United States Patent Application Publication US 2003/0194704 A1 - sequence listing, part 4

SEQ ID NO: 9327 - DNA, 505 bp, Homo sapiens
  MAP TO AC007498.2; EXPRESSED IN BONE MARROW, SIGNAL = 0.79; NT HIT: X98833.1, EVALUE 0.00e+00; EST_HUMAN HIT: BF923314.1, EVALUE 0.00e+00; SWISSPROT HIT: Q04635, EVALUE 1.80e-01
gagcaccaaggtggcggtggcccagttctcccaggaagcgaggtgcggcggggcctctgggggcaagctggccgtcccagccctcatggaacaactcctagctctgcagcagcagcagatccaccagctgcaattgatcgaacagattcgtcaccaaatattgctgttggcttctcagaatgcagacttgccaacatcttctagtccttctcaaggtactttacgaacatctgccaaccccttgtccacgctaagttcccatttatctcagcagctggcagcagcagctggattggcacagagcctcgccagccaatctgccagcattagtggtgtgaaacagctacccccaatccagctacctcagagcagttctggcaacaccatcattccatccaacagcggctcttctcccaatatgaacatattggcagcggcagttaccaccccgtcctctgaaaaagtggcttcaagtgctggggcctcccatgtcagcaacccagcg

SEQ ID NO: 9328 - DNA, 528 bp, Homo sapiens
  MAP TO AC004590.1; EXPRESSED IN BONE MARROW, SIGNAL = 0.85; EST_HUMAN HIT: BE734993.1, EVALUE 0.00e+00; SWISSPROT HIT: P47160, EVALUE 6.00e-19; NT HIT: gi14773266, EVALUE 0.00e+00
ccgctgaaggctgtccctggaggcagggacactctggccaggcctcatttagttggtcagtggctgagtgacccatgaggtaggcctctgcccctgagttcctggccctctcttcctcagccccatgtggaacccaaggatgcagctgctctgctaacacggcagcccatccttcaagactgtgacctcgccacagtggccctcagccctccacctccggcgggggcgagggccacccacctccaagtctccagccatgacgacctccgcactccggcgccaggtgaagaacatcgtgcacaactactccgaggcagaaatcaaggtgcgcgaggccaccagcaatgacccctggggcccccctagttcgctcatgtccgagatcgctgacctgaccttcaacacagtggccttcaccgaagtcatgggcatgctgtggcggcggctcaatgacagcggcaagaactggcggcacgtgtacaaggctctaacattgctggactacctgctcaagacgggctccgagcg

SEQ ID NO: 9329 - DNA, 508 bp, Homo sapiens
  MAP TO AC006486.1; EXPRESSED IN BONE MARROW, SIGNAL = 0.95; SWISSPROT HIT: P50901, EVALUE 5.40e-01; NT HIT: X56682.1, EVALUE 4.80e-01
ggtaccccagccctgctcccactgcccccaccccagctcctgtcaccaccacccaagtctccagcctttgtgggccccggccgccctggcgagcagccctcgccctgccaggaggggagccagggcggcagccgcagcagcagcgtggcctccctggaaaaggggacagcaccggcagcccgggcccgcacgccactgacagccgcccagcagaagtacaagaagggcgatgtggtctgcacacccagcggaatacgaaagaagttcaacggcaagcagtggcgccggctgtgctcacgagatggctgcatgaaggagtcacagcggcgaggctactgctcacgccacctgtccatgcgaaccaaagagatggaaggcctggcagacagtgggcctggcggggcgggccggcccgcggccgtggcagcccgtgagggcagcacggagtttgactggggtgatgagacgtcgagggacagtgaggccagcagtgtggcggctcgtggag

SEQ ID NO: 9330 - DNA, 503 bp, Homo sapiens
  MAP TO AC012313.5; EXPRESSED IN BONE MARROW, SIGNAL = 0.84; NT HIT: gi13899248, EVALUE 1.90e+00; SWISSPROT HIT: P26661, EVALUE 2.70e+00; EST_HUMAN HIT: BG032481.1, EVALUE 1.10e-02
ccaactgcacccccacggagtaggggttgcggagcaggagcaagccccagcaggacccttatagaggtcacggtcagggcaccctccgctggacagccacaagaatgggggtcaggggtgttcccagaggatccttgtgggacgactgcggtgcctgctccttgagagggtccagccccatggtgacaatgccaaggatgcttgccctaagccccaatctggagaaacaggtaagtgctgcgcgccctactaagggccccagataacacggaggtgccaggcctggaggcaggactgcagtactggcgcacttattgtgagccccacagcctcctcgcgccccgtggccacggggcccagccggggccagcctctgtgccccacgtgccatccgatcgcctgtccagcgtcctctcggcctccgccgggtcctcggggcccgcctcgggctccagcgcatcttctgcagttcctggcagggccgtgtccaggtcagggcccgt

SEQ ID NO: 9331 - DNA, 526 bp, Homo sapiens
  MAP TO AP001748.1; EXPRESSED IN BONE MARROW, SIGNAL = 1.4; NT HIT: AB038163.1, EVALUE 0.00e+00; EST_HUMAN HIT: BI834261.1, EVALUE 0.00e+00; SWISSPROT HIT: P16884, EVALUE 7.00e-03
ggtgagcaaaggcagaggggggcttcgaaaaccagaggcctctcattcctttgaaaacagagccccccgagttacagtatcagcaaaagagaaaaccttgctgcagaagccgcatgtggacattactgatccagagaagccccaccagccaaagaagaaagggtcccctgctaagccatcagaaggcagggaaaatgcgagaccaaaaaccacaatgcccagatctcaagtagatgaagagtttttgaagcaaagtttaaaggaaaaacaattgcagaaaacatttagattaaatgaaatagataaagaaagccaaaagccatttgaagttaaaggacccttacctgtccacacaaaatcagggttgtctgcgccaccgaagggcagcccagcgcctgctgtgttggcagaagaggccagagcagaggggcagctgcaagccagtcctcctggggcggcagaggggcatctggaaaaacccgtgccagagccccagcgcaaggcggcccctcccctgcccagaaag

SEQ ID NO: 9332 - DNA, 521 bp, Homo sapiens
  MAP TO AC018432.4; EXPRESSED IN BONE MARROW, SIGNAL = 0.86; NT HIT: AF000140.1, EVALUE 1.30e-01; SWISSPROT HIT: Q04839, EVALUE 1.30e+00; EST_HUMAN HIT: BE565296.1, EVALUE 7.30e-01
ttgggctcgcaaggatggagaaatcagataattgtgcagaactgagtgaggcaacagatgatgccatatcaaacaaatatgataaacagaacattggccattctgttttaaaagaaaatgctttctgtaatttggcagcaattgtcccagattctgttggcaggcattcacctgcttcagaagaaatgaaaagacagaatggcagacttaaaatggctgacaggtcaagtccccaaggtagacctttgcaggcaaagcaatcagcagtttcacaatcacctgatactgcaggttatgctgttgtaagcaataataaggagcagaaacagaactttaaagcccagaagacagaagcagaagttgatttaatagatcaagaagcaaagataaatgttgcagaagagtttaatccagaatctgtttttttctctaagatacatccacttcaaattgaaaacaagaaagaatttaaaactgcagactggaaaacaagggcagatcccaagacatttgccctgcca

SEQ ID NO: 9333 - DNA, 500 bp, Homo sapiens
  MAP TO CHR10.3; EXPRESSED IN LUNG, SIGNAL = 6.8; EXPRESSED IN BONE MARROW, SIGNAL =   4; EXPRESSED IN FETAL LIVER, SIGNAL = 4.2; EXPRESSED IN ADULT LIVER, SIGNAL = 4.4; EXPRESSED IN BRAIN, SIGNAL = 7.9; EXPRESSED IN PLACENTA, SIGNAL = 4.3; SWISSPROT HIT: Q01813, EVALUE 5.00e-19; EST_HUMAN HIT: BF529170.1, EVALUE 2.00e-63; NT HIT: gi15297728, EVALUE 2.00e-62
gactgtcagcggaggttctcaaatcattggtgacataagtgagacaacattaactacacaacagactatgtcaaacaaacaagcttgtgtttcacacatgagactagaaggtgtcctcaaccaggcacacccaccgtcacctgacacgcagtaggggcacctgggcgatgcgaagtgtatcaagcgtggcatgttctgtagcatctccatctccatgccccttggaaagcaaaccaccctagacacgatgattcactccgcagcacccagtggatcccaaggggacgggccctgaggccagcccccgtcacatacctgcagatccctgatgtcgaagggctcttcgaaaatgtatgcggcatcagctccggccgcgagcccccccatgttggccaggtagccacagtagccgcccatgggctcgatgatgaaaacacgcgccgcttggttccgctggcggactggcttgatgcggtcgcagggtctggtcacagagaagc

SEQ ID NO: 9334 - DNA, 543 bp, Homo sapiens
  MAP TO CHRX.3; EXPRESSED IN LUNG, SIGNAL = 2.2; EXPRESSED IN PLACENTA, SIGNAL = 1.5; EXPRESSED IN HEART, SIGNAL = 1.6; EXPRESSED IN HELA, SIGNAL = 2.9; EXPRESSED IN BONE MARROW, SIGNAL = 1.8; EXPRESSED IN FETAL LIVER, SIGNAL = 1.8; EXPRESSED IN BRAIN, SIGNAL = 1.3; EXPRESSED IN ADULT LIVER, SIGNAL = 1.2; EST_HUMAN HIT: BI822807.1, EVALUE 3.00e-03; SWISSPROT HIT: Q61603, EVALUE 3.00e-36; NT HIT: X75852.1, EVALUE 2.00e-90
ccctcctgctccttatcctcttgctgtgcagtcacgtgaaaggccttccgctggaaatgaaagtgctgggagccaaaggccaagtctttgatggtcgctctgagagcttccttagtacgtacatctggcattacctggggccattatgaaaggctcattcatgggcccagctgaggtgcccagaggctggtcagtagagggctgccctaatcctgtcctaatcccctcaggctcagctacaggctgggtacctggggcctgacacctcacctctctccttgcagggaaattcacctgcatcgaggtaaagtttcacctggaacggcagatgggctactatctgattcagatgtacatccccagcctactcatcgtcatcctgtcctgggtctccttctggatcaacatggatgctgcccctgcccgtgtgggcctgggcatcaccaccgtgctcaccatgaccacccagagctctggctcccgggcctctttgcctaaggtgaagagacatgcaagggaacttgcttgccatagagtacccca

SEQ ID NO: 9335 - DNA, 584 bp, Homo sapiens
  MAP TO CHR3.3; EXPRESSED IN LUNG, SIGNAL = 0.79; EXPRESSED IN HEART, SIGNAL = 0.67; EXPRESSED IN BRAIN, SIGNAL = 0.81; EXPRESSED IN BONE MARROW, SIGNAL = 0.86; EST_HUMAN HIT: W04836.1, EVALUE 8.20e-01; SWISSPROT HIT: P51685, EVALUE 1.00e-101; NT HIT: gi13929430, EVALUE 0.00e+00
gtgaatgggatcaacaagcctaaaatgttcattttgaagttggtgaagatcttccacttcaaagtctgttgattgtaaaatgaataacactgtagaacaccatcttcagaggccacttggtaaaacactagcaatgggatggtagccataatggcggttagccatactgccaggcacagcgttgtgcccatcctgatcgtcctcacctttagggcatacacggcatggacaacagccaggtacctgtccacactcatgagggtgatgaaaaacatgctgctgtagaagccaatgtaataaaagccagacaccactttgcacattacagtcccaaacacccactggtccagcagatagtaggtctgaaaggggaaggagaagacaaaaagcaggtcagacagggccaggttcaagaggtatacatctgtgatgctcctcagcttcttgcagaccacaaggaccaggatgaccaggctgtttcccagaagactgaatacaaacaggaggcaataaaagacagcaaggagcaacttgccatttgtctgaataagttccgcatcacaggggcttgagaagatatcagg

SEQ ID NO: 9336 - DNA, 542 bp, Homo sapiens
  MAP TO CHR19.3; EXPRESSED IN ADULT LIVER, SIGNAL = 1.8; EXPRESSED IN LUNG, SIGNAL =   2; EXPRESSED IN PLACENTA, SIGNAL = 1.2; EXPRESSED IN BONE MARROW, SIGNAL = 1.6; EXPRESSED IN FETAL LIVER, SIGNAL = 1.8; EST_HUMAN HIT: AU122285.1, EVALUE 0.00e+00; SWISSPROT HIT: P49366, EVALUE 1.00e-33; NT HIT: AJ001701.1, EVALUE 0.00e+00
gaacacacgcacaaaaatggcggcgacctggtttacaggggctaaaaatggtcacgtgataaaccaacttccggtctttcgcccaaagcacgttccctacttcctgtgctcttgcggagacgcgcgcgtcggggtttaacgcgtttctgggccgccgtaagcccggcctaggggcagctttgactcgagagccggctataggcgcatggaaggttccctggaacgggaggcgccagcgggggcgctggccgccgtgctaaagcacagctcgacgttgccgcccgaaagcacccaggtccggggctacgacttcaaccgcggtgtgaattaccgcgcactgctggaggccttcggcaccaccggcttccaagcaaccaacttcgggcgcgctgtacagcaagtcaatgccatggtgaggaccgggcggaatttctagggacgcggaggggcgtggcttgtagaaccaacgcggtactagacgggggcagcgtttccagtggaggggatatgtcttttatttgagttgcccaatagttggagga

SEQ ID NO: 9337 - DNA, 503 bp, Homo sapiens
  MAP TO CHR3.3; EXPRESSED IN BONE MARROW, SIGNAL = 0.69; EXPRESSED IN HEART, SIGNAL = 0.73; EXPRESSED IN HELA, SIGNAL =   2; EXPRESSED IN BRAIN, SIGNAL = 0.58; EST_HUMAN HIT: AW381182.1, EVALUE 3.00e-52; SWISSPROT HIT: Q13275, EVALUE 3.00e-29; NT HIT: gi14737482, EVALUE 3.00e-61
ccccctctctgcagatacactgggcagcctccccacagcgcatcgaggaatgcgtgctctcaggcaaggatgtcaacgtgagtttggtgggatccacaggtgggaagggggaatccacaggtgggaaggtactgcccccagtgagggggcaggcctggccagggcacctatgcagccttccctgtggccccagggcgagtgtgggaacttcgtcaggctcatccagccctggaaccgaacacacctgtatgtgtgcgggacaggtgcctacaaccccatgtgcacctatgtgaaccgcggacgccgcgcccaggtaagccccagccaccctggccctgtgctgcccccgctggtggctgcatcccagggtcctgatgggaggaggggcttcagccccagccctgccacttccgagccttttgaccttgggtgagtgacttctttcacctcgctgagcctcagtttcttcacttgaaaatggggctaaccgctgcctttctcac

SEQ ID NO: 9338 - DNA, 539 bp, Homo sapiens
  MAP TO CHR17.3; EXPRESSED IN BONE MARROW, SIGNAL = 6.8; EXPRESSED IN LUNG, SIGNAL = 9.9; EXPRESSED IN HEART, SIGNAL = 5.5; EXPRESSED IN FETAL LIVER, SIGNAL = 5.5; EXPRESSED IN ADULT LIVER, SIGNAL = 4.6; EXPRESSED IN BRAIN, SIGNAL = 4.2; NT HIT: L01117.1, EVALUE 0.00e+00; SWISSPROT HIT: P28799, EVALUE 8.00e-47; EST_HUMAN HIT: AW630248.1, EVALUE 2.00e-78
acagagaaacctgcattggcagggcccttttatctgcaggtggtagagtgcaggaaaagcataaatgcagacctaagcccctccactgggctgatggcacgctcacctctgggaaggggcagcaactggaagtccctgagacggtaaagatgcaggagtggccggcagagcagtgggcatcaacctggcaggggccacccagatgcctgctcagtgttgtgggccatttgtcctagaaagacagggaaaatgataaaccacagacttgtgcctggcgtcctcctctggccaatccaagatgaccctttgggaaaacccaggctgccagctcttgcctaggctgaggggcactcaccagaaggggacggcagcagctgtagctggctcctccggggtccaggcagcaggccacagggcagaactgaccatctgggcaccgcgttccagccaccagccctgctgttaaggccacccagctcaccagggtccacatggtctgcctgcaaagtaccaaggaacgtctggcaactgcttaagcc

SEQ ID NO: 9339 - DNA, 515 bp, Homo sapiens
  MAP TO CHR2.3; EXPRESSED IN BONE MARROW, SIGNAL = 1.2; EXPRESSED IN LUNG, SIGNAL = 1.1; EXPRESSED IN PLACENTA, SIGNAL = 1.7; EXPRESSED IN BRAIN, SIGNAL = 1.2; NT HIT: gi4507310, EVALUE 1.00e-122; SWISSPROT HIT: Q16550, EVALUE 3.00e-43; EST_HUMAN HIT: BG329966.1, EVALUE 1.00e-122
gaaaatggttcagggacacgatgtgctgcagctgtgtctctggatttgtaggtctctcctcgacttttcagctcctacacgattccttggggcaggtgaccagtgaatgacaccgcatatgtacctggcttaaagttactgactcgctgccacttggagacctagctgtcctctggactcatcattgcaatgattccatcaaaggaagagctagtgcagtcatataccatctcagttactcttcgtctgtagataggtgttacagttgtcagaaccttcatattcaaactggtctatagtcttgaccagcaaacacagccaacaagcctgcagatgccccaggtccttcagcaccatctccagggccatcttctctgatcaggaagatcattttaaaagtcaatttataattagtgatttatatgttgatgtcttttctgacataatttattatagcatgtatagctcagtgtgaggcctgtagtaatggttataggctttggagactgaccaac

SEQ ID NO: 9340 - DNA, 523 bp, Homo sapiens
  MAP TO CHR11.3; EXPRESSED IN BRAIN, SIGNAL =   1; EXPRESSED IN BONE MARROW, SIGNAL =   1; NT HIT: AJ005205.2, EVALUE 0.00e+00; SWISSPROT HIT: P46098, EVALUE 6.00e-49; EST_HUMAN HIT: AL525251.1, EVALUE 0.00e+00
tttggtggaagggttcagaccttggcttgtgattgctgagatgaattggcattggaacagggcacgggactttgtctgtgtcttgaaaatgtccctggcattccctgggtcctgaggggcctaagcagaaatcctctgtccccacctaaccaggactgtaccccctcctccactgggctgtacccactcaagcgtactgccagatggaccagagcataaccagggtgatgctgtaggccagcaccgctagcaggtaaatgtggaatagcagcttgtccagcacggagcccacgcgcagccagtctcgggccacctctcggatctcatcccgcttttccaggaattgccggatggaggacagctcctgcagcagcccacacaccgccagcgaggcctcccgaggtggtgggggagggctacatctgtccctcgggctcttctcgaagtcctggggtcctcccatgtggctgcagtggtttcccatggctggaagaagggcagggcattggcaagagagggagac

SEQ ID NO: 9341 - DNA, 564 bp, Homo sapiens
  MAP TO CHR17.3; EXPRESSED IN LUNG, SIGNAL = 2.5; EXPRESSED IN PLACENTA, SIGNAL = 2.6; EXPRESSED IN HEART, SIGNAL = 2.9; EXPRESSED IN BONE MARROW, SIGNAL = 1.8; EXPRESSED IN FETAL LIVER, SIGNAL = 2.9; EXPRESSED IN BRAIN, SIGNAL =   2; EXPRESSED IN ADULT LIVER, SIGNAL = 2.1; EST_HUMAN HIT: AW953484.1, EVALUE 2.00e-90; SWISSPROT HIT: Q61576, EVALUE 9.00e-28; NT HIT: gi14774929, EVALUE 2.00e-90
tattgtaggtgtggttgcgggagtagctgcaatacaaggcgggagggccaggaagggagtcaaaggggccctccccttccaggcagctcagagtgacccccagcttcgtccacgtttcacccagcccccgccctcccacctcaagaccctcctgacctggaatcgaagagggtgccgtccatcaaggagccattgtagtggtagcgcatgaagtccccggccccggctctgcggacacagccgggggggagctccagcgtctctagctggacagcgtccttcgggttgtgcacgtcaatcaggaggacgtgaaagaccagcgaggcctgtggggggatcactgtccctggggaagggatagggcttgaaccataaaattggggagcaagccgaggctccttcttgactcaggaaggcccagtgggcaccatgcaagacactagccccactctccagagccctttcccgcccatcagcagccctgcttcttgctcctccagtaagacctgagctgggttttccccagggccaccaccggctcatactgagccttcgtgtgaatca

SEQ ID NO: 9342 - DNA, 508 bp, Homo sapiens
  MAP TO CHR6.3; EXPRESSED IN ADULT LIVER, SIGNAL = 2.3; EXPRESSED IN BRAIN, SIGNAL = 2.9; EXPRESSED IN BONE MARROW, SIGNAL = 2.3; EXPRESSED IN LUNG, SIGNAL = 2.1; EXPRESSED IN PLACENTA, SIGNAL = 2.5; SWISSPROT HIT: P17221, EVALUE 6.00e-04; EST_HUMAN HIT: T28430.1, EVALUE 1.00e-100; NT HIT: gi5729833, EVALUE 7.00e-65
gaggacagacacgagcagtgtgaggtcagatgtaggaaaggcggcccaaagcctgaggccaagccaaggaacccaggcaccagggacccagaggggctgggctgggtgggccgctgacctgggcgttgacgtccacctgtcctgtgctcagcagcaggctgaccatctccaagttcccgattttggctgcgtggtggaggcaggtggaaccgtcctcctcctgagggagacacgggcaaatgagcctttgggctggcaccccaaacctggttcctgactccgggggccacgccctgctgcctgcgcgcacaccttgctatagacacagccaccacgctgcaccatgtaacgggctacctccaggtggttgttcaccacggcctccatcagtggcgtccgctgctgtttgtccactgcatttatgttggctccagcctgtgagggggcaggagggctggcaccagggaggcatggggcaggggaggggcctaagggcctggtgaatgag

SEQ ID NO: 9343 - DNA, 585 bp, Homo sapiens
  MAP TO CHR5.3; EXPRESSED IN ADULT LIVER, SIGNAL = 2.9; EXPRESSED IN HEART, SIGNAL = 3.8; EXPRESSED IN BONE MARROW, SIGNAL =   3; EXPRESSED IN LUNG, SIGNAL = 1.6; EXPRESSED IN PLACENTA, SIGNAL =   3; NT HIT: gi14726676, EVALUE 1.00e-78; SWISSPROT HIT: P47902, EVALUE 4.00e-23; EST_HUMAN HIT: BF063789.1, EVALUE 6.00e-17
tgctgtgtaaccctgagctggttgttttgcctacctcactgcctccctgatgggcatgggaggagtacttgcctcccagactgtgagtctgtgggtctgagtctgggaaatgactgtttcccttgaacctggagtgtatgtctctccccacctcagggtcctacttcagggagcctggattgtcttcctcctgggggtcctgcctgggccttttttgtagcctcctcctctcaactcaccttccttcccggctccttctgcttctcaggtaagactcggaccaaggacaagtaccgcgtggtctacaccgaccaccaacgcctggagctggagaaggagtttcattacagccgttacatcacaatccggcggaaatcagagctggctgccaatctggggctcactgaacggcaggtgtgtctgtcttcctatctcagccataggagcagtgcgaggactctggtctccaggctgccaggcagagtacagagctcagtagaaggaaaacagagaggttgagtctccaggccattgtcacacagcacagcagaaactgaggtgctaccagcaccctcccttaacaaa

SEQ ID NO: 9344 - DNA, 501 bp, Homo sapiens
  MAP TO CHR4.3; EXPRESSED IN LUNG, SIGNAL = 1.2; EXPRESSED IN BONE MARROW, SIGNAL = 1.1; EXPRESSED IN PLACENTA, SIGNAL = 0.72; EXPRESSED IN FETAL LIVER, SIGNAL = 0.71; EXPRESSED IN ADULT LIVER, SIGNAL = 1.1; EXPRESSED IN BRAIN, SIGNAL = 1.8; NT HIT: AB042201.1, EVALUE 0.00e+00; SWISSPROT HIT: Q9UPY5, EVALUE 2.00e-39; EST_HUMAN HIT: BG284503.1, EVALUE 0.00e+00
gcaatttgagggtgttccagatcacaccaacagcggatgctgcatctgggtagttcacgtacccgaacaaaaattttaaaaatttggtgtggcctttgccatccattcactcctcaaaaactaccatttgctttcccagaaagcaagctttccagccccacagccacgcccccacgagagaaaaagtcgcactcaccaaatagtgacaggaccccacacaccgtccagatggtcagagacatgcccacgctgcccgtgttctggagcacgcccttaggagagatgaagattcctgctccaatgatggtgccaatgataatggagactcccctcagtaaagtgactttcctcttcagctgcactttctcctgcccaggtggctccttgttgcccagggaaggcagcctcccgttaacatttccctgcaggtaacctcctttggagatggtggacacaacaggctttctgaccatagtagggacacacgggggaaaaataaaa

SEQ ID NO: 9345 - DNA, 566 bp, Homo sapiens
  MAP TO CHR12.3; EXPRESSED IN BRAIN, SIGNAL = 1.4; EXPRESSED IN LUNG, SIGNAL = 1.8; EXPRESSED IN HEART, SIGNAL = 2.1; EXPRESSED IN PLACENTA, SIGNAL = 1.6; EXPRESSED IN BONE MARROW, SIGNAL = 2.3; EST_HUMAN HIT: AL560589.1, EVALUE 1.00e-122; SWISSPROT HIT: P26010, EVALUE 1.00e-46; NT HIT: gi14757641, EVALUE 1.00e-122
cacattggtatgggcacaagctgtactgcagttggtggccagtgggccagtcctgaaggccccacactctgcacagtccctgtgtagtagatgccaataggttaccagctgggcagttgtcacccaatgccccttgcccaactacaagcaggacggagagtaggcagatgggagtagctcaacaagccccactgtgcccctgctcccaagatgcaagacctgaggcctcaccggtgtctctcgcatggtgtcttgcagcctgggcattggtcgcatagagcaccatagtagccgtccaagcactggcagcggttgcatttgcagcgtccatgcccactgcagagccctccctcgggactgatgcaactgtccatgtccccactgcattcgcatgctctgcccgtgcggttggcatgacagtgacatactccacattggcagcgaccaaagcctggggtagagccatgcagagggtgacaaccatactccacacacacagttggccatcatgtggcacgacaagcccacgcatccaatctttttgaagtatgccaaccacaccctct

SEQ ID NO: 9346 - DNA, 585 bp, Homo sapiens
  MAP TO CHR17.3; EXPRESSED IN LUNG, SIGNAL = 0.4; EXPRESSED IN FETAL LIVER, SIGNAL = 0.76; EXPRESSED IN BRAIN, SIGNAL = 0.51; EXPRESSED IN PLACENTA, SIGNAL = 0.55; EXPRESSED IN BONE MARROW, SIGNAL = 0.83; SWISSPROT HIT: Q14532, EVALUE 7.00e-26; NT HIT: X90761.1, EVALUE 0.00e+00; EST_HUMAN HIT: BG953695.1, EVALUE 0.00e+00
ccctaactcgggcctttaactagtcaagccaggctcctgctaccctcctcccaggatgaacacaggtggggagggagactgggaatactaggggtaccggtttcccattttagcccaaatgcatcaaacaaaccagggtgctgctcttggcttctgccaaagtgataggaagtgttgtgttgcagtgaggttcccatcgcaggggtattcagctggagtttgaagagcactgggatgctgctgagtggactgcagtccttaggggccatctaatgtttcaatctttagcaacttttgttgcatcttttcatgtctccctggggaggtgagccaggatcctatcattgtcacatttttctggaggtcttgtgccttttcaggaagtcggttcccttcgatgccagcttggggaccgccttaacatcgaggtggacgctgcacccccggtggacctgaccagggtgctggaggagatgcggtgtcagtacgaggccatggtggaggccaaccgcagggacgtggaggaatggttcaatatgcaggtgggcctctcacggtggggatggcctcctccatatccctagg

SEQ ID NO: 9347 - DNA, 526 bp, Homo sapiens
  MAP TO CHR11.3; EXPRESSED IN BONE MARROW, SIGNAL = 1.1; EXPRESSED IN FETAL LIVER, SIGNAL = 1.1; SWISSPROT HIT: P15328, EVALUE 7.00e-37; NT HIT: U20391.1, EVALUE 0.00e+00; EST_HUMAN HIT: AA436422.1, EVALUE 0.00e+00
attgtcgcacctcctacacctgcaagagcaactggcacaagggctggaactggacttcaggtgagggctggggtgggcaggaatggagggatttggaagtggaggtgtgtgggtgtggaacaggtatgtgacaatttggagttgtagggctggcagacctcaagatagttccgggcccagtggctaaaggtcttccctcctctctacagggtttaacaagtgcgcagtgggagctgcctgccaacctttccatttctacttccccacacccactgttctgtgcaatgaaatctggactcactcctacaaggtcagcaactacagccgagggagtggccgctgcatccagatgtggttcgacccagcccagggcaaccccaatgaggaggtggcgaggttctatgctgcagccatgagtggggctgggccctgggcagcctggcctttcctgcttagcctggccctaatgctgctgtggctgctcagctgacctccttttaccttctgatacctggaaatccctgcc

SEQ ID NO: 9348 - DNA, 534 bp, Homo sapiens
  MAP TO CHR1.3; EXPRESSED IN BONE MARROW, SIGNAL = 0.71; EXPRESSED IN LUNG, SIGNAL = 1.3; EXPRESSED IN PLACENTA, SIGNAL = 0.81; EXPRESSED IN HEART, SIGNAL = 0.51; EXPRESSED IN BRAIN, SIGNAL = 1.2; EST_HUMAN HIT: AV650615.1, EVALUE 1.00e-119; SWISSPROT HIT: P04746, EVALUE 1.00e-29; NT HIT: X07057.1, EVALUE 0.00e+00
gtgagaacattaggccccagcaatatatcattgtgtatggaaaaataaaagtgctgccagaaccaaaaaaacattaatttctaaaaggtcatttagatgatttccatgagagactttttaatgttcttctcctgttaggattattattgataatccttttcagattatgagtaaacagtttgccctcaagtatttattcatgctaatatttactttgtaaaatgtgcttcttacaggaatataaatagtttctggaaaggacactgacaacttcaaagcaaaatgaagttctttctgttgcttttcaccattgggttctgctgggctcagtattccccaaatacacaacaaggacggacatctattgttcatctgtttgaatggcgatgggttgatattgctcttgaatgtgagcgatatttagctcccaagggatttggaggggttcaggtgggtatgattcatagtatcaattgcagaattcactatgcttgtagtaaatagtattctgatcttatccgtgaagcttaggca

SEQ ID NO: 9349 - DNA, 539 bp, Homo sapiens
  MAP TO CHR2.3; EXPRESSED IN HEART, SIGNAL = 1.2; EXPRESSED IN ADULT LIVER, SIGNAL = 0.89; EXPRESSED IN BONE MARROW, SIGNAL = 1.3; EXPRESSED IN LUNG, SIGNAL = 2.1; EXPRESSED IN HELA, SIGNAL = 2.1; EST_HUMAN HIT: BF819196.1, EVALUE 2.00e-57; SWISSPROT HIT: Q62871, EVALUE 5.00e-17; NT HIT: U39575.1, EVALUE 6.00e-56
tgctttgggataaccgtagcaataaaagaactccagtgcaaagaactccactgtcagcagctgcacacacagtaagtaaataaggttatttccattaggcttctgtgctccttcatccttagctataatacttagtagtggccatcagagtcatctcagaatgtgcttcctttggtgtatgaattcctcaccatttagcaaccaagaatgaaggctatttttttttttggagatttattagaaactcatctctcttctgcgacaacattttgttaatagcaaacttcacattaagaatacccacaagttatgagactcgataataaacagaatgcttataattagactaaaaattttgttttgctttttggtacaataatccctgaaaactttttttaatatctctagcaccctgtatattgtgtaaatgttgttggaacacaaaatgctcacaatctgattagcatctctactgatggaaaaatttgttcatggagtctggacatgctttcccatccacaggtgggttaaacttggga

SEQ ID NO: 9350 - DNA, 518 bp, Homo sapiens
  MAP TO CHR19.3; EXPRESSED IN PLACENTA, SIGNAL = 0.83; EXPRESSED IN BONE MARROW, SIGNAL = 1.1; EXPRESSED IN LUNG, SIGNAL = 1.1; EXPRESSED IN HEART, SIGNAL = 0.87; EXPRESSED IN ADULT LIVER, SIGNAL = 0.81; EST_HUMAN HIT: AU130692.1, EVALUE 1.00e-61; SWISSPROT HIT: Q9UJU3, EVALUE 2.00e-16; NT HIT: gi15301667, EVALUE 7.00e-65
tgatggcaaatcaatgaagcaggaccatatttactattccaaggatagactggacaaaaccatcagaaacatcttgtctgtgttgcacggggattattaggactctcgggcacctaatctcagagaataatttcaggggcttcagagtttctaacaattgagcacacaaagacaccccaggaggctgccattgagtaactaagggcacctatcctcacctactaagagcaggttcctgaagttctccagcatcacatctcggtacagcttcctctggacagagtccagcagccccagctcctcctcagtgaagaccacagcaacatccttgaatgtcaccatctcctacaatgccaaacacatgcacactaagtttacagaagaagggcagtgctgagaaggtgtaaaggactggaagctgttctggagtctgggcaacttgagtcacatttacatagttctcttctgtttaccttctgtaatgctaataccattcaccaaaagggctgcaagaaaag

SEQ ID NO: 9351 - DNA, 511 bp, Homo sapiens
  MAP TO CHR14.3; EXPRESSED IN HEART, SIGNAL = 3.8; EXPRESSED IN PLACENTA, SIGNAL = 2.4; EXPRESSED IN ADULT LIVER, SIGNAL = 5.8; EXPRESSED IN BRAIN, SIGNAL = 2.2; EXPRESSED IN LUNG, SIGNAL = 3.4; EXPRESSED IN BONE MARROW, SIGNAL = 9.6; SWISSPROT HIT: O70435, EVALUE 2.00e-17; NT HIT: gi14753139, EVALUE 7.00e-65; EST_HUMAN HIT: AW129499.1, EVALUE 1.00e-121
gattctggagggagggtcacatgatatttatatggatttaatgtatttattacactttagtgtgttttctcttcctggttttcaaatgttttaaggtatttggcatgccttaaatgttacttattttgtttttttgttaaacttaagtttatgaagtttcttttattttcagttaaaaaactgattttcttctccttgtttcagtacagctattggaatcagatgcaaagatggtgttgtctttggggtagaaaaattagtcctttctaaactttatgaagaaggttccaacaaaagactttttaatgttgatcggcatgttggaatggtaaggtcatgtttaaaatgttcctttttgtcttgtccaatttcttttgaagtaactgattggaatagatcactgtgcagtcacaaaagtaatcagagcaagttactgcatttgtccagttcactgtccagtagaaaggcagcattctcataaccttattagtgatgggggaaaaaccaagtt

SEQ ID NO: 9352 - DNA, 550 bp, Homo sapiens
  MAP TO CHR10.3; EXPRESSED IN BRAIN, SIGNAL = 1.6; EXPRESSED IN LUNG, SIGNAL = 2.2; EXPRESSED IN PLACENTA, SIGNAL = 1.5; EXPRESSED IN BONE MARROW, SIGNAL = 1.4; EST_HUMAN HIT: BG566700.1, EVALUE 1.00e-129; SWISSPROT HIT: P11712, EVALUE 4.00e-29; NT HIT: L16883.1, EVALUE 0.00e+00
aagtgcttggcatgtagctggtactcaacaaatatttgttgaatacagggtgcctgttaagatctgatattaggtgaagagtaagtatgtccattcatttttcagttgcctatacatccatccattcatccatttatccatccactcatccatccattcattcatgcatgcacccatccacccatctatctcttcatctcttctacgatacactgaacagttattgcatattctgtttgtgccagttacagagacagtgtttgtcactgtcacagttacgcatgaggagtaactgctctctgtgtttgctattttcaggaaaacggatttgtgtgggagaagccctggccggcatggagctgtttttattcctgacctccattttacagaactttaacctgaaatctctggttgacccaaagaaccttgacaccactccagttgtcaatggatttgcctctgtgccgcccttctaccagctgtgcttcattcctgtctgaagaagagcagatggcctggctgctgctgtgcagtccctgcagctctcttt

SEQ ID NO: 9353 - DNA, 533 bp, Homo sapiens
  MAP TO CHR19.3; EXPRESSED IN BRAIN, SIGNAL =   2; EXPRESSED IN BONE MARROW, SIGNAL =   2; EXPRESSED IN LUNG, SIGNAL = 2.4; EXPRESSED IN HEART, SIGNAL =   2; EXPRESSED IN ADULT LIVER, SIGNAL = 1.8; NT HIT: gi16177382, EVALUE 0.00e+00; EST_HUMAN HIT: AL552030.1, EVALUE 0.00e+00; SWISSPROT HIT: Q9Y2A9, EVALUE 2.00e-69
gaaaccaaggcacagagagggtttcccaagtaaccccacagggcagggccttaacccaggctggattgtggacacttcctttcctgggcttagtgggctggagtggctaatagagacccaaggccaatttctccagccctcaagcaagcatgccctgtccaccctgcctgcaggtcctgttcttacagtggcaggagacaaggtgcgccaacgccagcttcgtgctcaacggggatgatgacgtctttgcacacacagacaacatggtcttctacctgcaggaccatgaccctggccgccacctcttcgtggggcaactgatccaaaacgtgggccccatccgggctttttggagcaagtactatgtgccagaggtggtgactcagaatgagcggtacccaccctattgtgggggtggtggcttcttgctgtcccgcttcacggccgctgccctgcgccgtgctgcccatgtcttggacatcttccccattgatgatgtcttcctgggtatgtgtctggagcttgagggactg

SEQ ID NO: 9354 - DNA, 570 bp, Homo sapiens
  MAP TO CHR6.3; EXPRESSED IN BONE MARROW, SIGNAL = 1.7; EXPRESSED IN LUNG, SIGNAL = 5.4; EXPRESSED IN HEART, SIGNAL = 1.7; EXPRESSED IN ADULT LIVER, SIGNAL = 1.5; EXPRESSED IN BRAIN, SIGNAL = 1.7; EST_HUMAN HIT: AL548191.1, EVALUE 0.00e+00; SWISSPROT HIT: O42490, EVALUE 1.40e+00; NT HIT: J05008.1, EVALUE 0.00e+00
gttcctgactggcaaaggaccagcgtcctcgttcaaaacattccaagaaaggttaaggagttcccccaaccatcttcactggcttccatcagtggtaactgctttggtctcttctttcatctggggatgacaatggacctctcagcagaaacacacagtcacattcgaattcgggtggcatcctccggagagagagagaggaaggagattccacacaggggtggagtttctgacgaaggtcctaagggagtgtttgtgtctgactcaggcgcctggcacatttcagggagaaactccaaagtccacacaaagattttctaaggaatgcacaaattgaaaacacactcaaaagacaaacatgcaagtaaagaaaaaaaaaagaaagacttttgtttaaatttgtaaaatgcaaaactgaatgaaactgttactaccataaatcaggatatgtttcatgaatatgagtctacctcacctatattgcactctggcagaagtatttcccacatttaattattgcctccccaaactcttcccacccctgctgccccttcctccatcccccatact

SEQ ID NO: 9355 - DNA, 597 bp, Homo sapiens
  MAP TO CHR1.3; EXPRESSED IN FETAL LIVER, SIGNAL = 1.6; EXPRESSED IN ADULT LIVER, SIGNAL = 1.8; EXPRESSED IN BRAIN, SIGNAL = 2.4; EXPRESSED IN BONE MARROW, SIGNAL = 2.1; EXPRESSED IN HEART, SIGNAL = 2.2; EST_HUMAN HIT: AL541019.1, EVALUE 0.00e+00; SWISSPROT HIT: Q9TSZ2, EVALUE 5.00e-16; NT HIT: gi14745045, EVALUE 0.00e+00
gtaagcagccgaccctgtaggaccagggggtgttggggaggaagactgcaggaggggagcgatgtggctgctcctggcagccctgctgctgggggcgacaggcacaggggtcgctggcctctctagggggcgggccctccgggtggaagatgcccctcgactgggcagcacattcctccgggctggcaggatgatgcctgtggctctgcgaaggggagcggttcggagggctgggatggggtaagcaggagaggagacaccggggaggacagggctgggcactcttcccaggatggcgagctggttgctcagggctggcagccctggacagctatggaagaaagaccagggccaggcagggaaggccaaagggccagtgggcgtgggcgaaggctccatctcggctgcgtagctgttgaggtgggagagaaggcgaatccggacggggtctgcacggctgctgggcccttcaaggacccccaggtacctgatgacctcagtgaggcactcccgaaaaccaatgctccggaagtcaactgccagggctcgggcatcaaagaatcctgcaaagggaggcgtgatgaaggtcatgccagg

SEQ ID NO: 9356 - DNA, 576 bp, Homo sapiens
  MAP TO CHR15.3; EXPRESSED IN PLACENTA, SIGNAL = 0.69; EXPRESSED IN LUNG, SIGNAL = 0.65; EXPRESSED IN BONE MARROW, SIGNAL = 0.97; EST_HUMAN HIT: AW075983.1, EVALUE 3.00e-99; SWISSPROT HIT: P08910, EVALUE 7.00e-32; NT HIT: gi5901977, EVALUE 1.00e-100
gctaactgaaggccctgatggaaggcggagatgactcacctcagtgcactgtacccctggcacacgctgacgcagcacaggaccttctcttggtttgcctgagtctcccccaagtatttgcacacaatgttaccacccaggctgaagcccacgacgaccagctgggtcaggggatatgtcttcttgatgtagttcaccatggctccaaattcccacgtgcagcctgtgggcaaaagggtgagattgctcaatcatttcaggtgcatcctatctggagaaaatgcaagctggaacgttactaaatgggtgccagtatactaaaagagagagaaatatatatgtgtatatatacgtgtgtgtgtcgggggatgtgtgtggagagagagacagacactgctctttggctatccagacagaagttcccagatgccccttgggataagaggaaacagggcctcagcagtgccaaagcgtggaggtaccatgtatcaaatgtacaatgcttcttaaaaggtaggtcacaagaaccgtgtctagataatcatggatatcaaagcagatttcagggtgtgcatg

SEQ ID NO: 9357 - DNA, 533 bp, Homo sapiens
  MAP TO CHR2.3; EXPRESSED IN PLACENTA, SIGNAL = 4.3; EXPRESSED IN BRAIN, SIGNAL = 1.3; EXPRESSED IN FETAL LIVER, SIGNAL = 1.3; EXPRESSED IN BONE MARROW, SIGNAL = 1.3; EXPRESSED IN HEART, SIGNAL = 1.1; EXPRESSED IN HELA, SIGNAL = 2.4; EST_HUMAN HIT: AW392518.1, EVALUE 0.00e+00; SWISSPROT HIT: Q16633, EVALUE 1.30e+00; NT HIT: AF227166.1, EVALUE 0.00e+00
tcttcaatctccccttcgtgggctttgaactccagaaccttctccaggctgggcacctgtagccaaacaaccaccatggttaactcaggtgtccagcaagtacactgtgactgatgcccacgccaccccttctaatggcccctcaatgcaagcttcattcacaagtttcccagatgccacgttcaacttctcacaattttgatcctgttgctactgacattcaccctccctaaccctgcaaacccacaccttccagacacggacgtagccatctgttcctccagtggcaagcagggtattatcgtggttgaagcacacaactttctgcagtggatcggagctaaagtctgtctgcaccgcctgcaaattctctaccctgagttctagcccctcgtgctgggtttccgctccacatttcttctctgctggggctgctcccttcctttgtcgaggcccctgctccttggaacctgtaacacaaacacttggccaggttccaggcttctacagtaaggagtactggcccctctctc

SEQ ID NO: 9358 - DNA, 535 bp, Homo sapiens
  MAP TO CHR6.3; EXPRESSED IN HELA, SIGNAL = 6.9; EXPRESSED IN BONE MARROW, SIGNAL = 3.8; EXPRESSED IN ADULT LIVER, SIGNAL = 3.9; EST_HUMAN HIT: BE313558.1, EVALUE 0.00e+00; SWISSPROT HIT: P02262, EVALUE 2.00e-55; NT HIT: Z83742.1, EVALUE 0.00e+00
aatcgcacagcttccttttcgcgcccagtagaggctataaaatgtacgtttttctagtttcacttcagtctttcttgaccgtatagataataggccttttgccatgtctgggcgtggcaagcagggaggcaaagctcgcgccaaggccaagacccgctcttctcgggccgggcttcagtttcccgtaggccgagtgcatcgcctgctccgcaaaggcaactatgcggagcgggtcggtgctggagcgccggtgtacctggcggcggtgctggagtacctgaccgccgagatcctggagctggctggcaacgcggcccgcgacaacaagaagactcgcatcatcccgcgtcacctccagctggccatccgcaacgatgaggagctcaacaagcttctgggcaaagtcaccatcgcacagggtggcgtcctgcccaacatccaggccgtgctactgcccaagaagaccgagagccaccacaaggcgaagggcaagtagaagcctggattagtttgcagcaactcaatcccaaaggaa

SEQ ID NO: 9359 - DNA, 588 bp, Homo sapiens
  MAP TO CHR8.3; EXPRESSED IN PLACENTA, SIGNAL = 0.57; EXPRESSED IN LUNG, SIGNAL = 0.82; EXPRESSED IN HEART, SIGNAL = 0.58; EXPRESSED IN BONE MARROW, SIGNAL = 0.85; EXPRESSED IN FETAL LIVER, SIGNAL = 0.62; EXPRESSED IN ADULT LIVER, SIGNAL = 0.67; EXPRESSED IN BRAIN, SIGNAL = 0.63; SWISSPROT HIT: P22680, EVALUE 6.00e-46; NT HIT: L13460.1, EVALUE 0.00e+00; EST_HUMAN HIT: AV682932.1, EVALUE 0.00e+00
ttccgtcacttgcattcttgcatagacattgctgatgtgatgaatttttatctatcttattcgtacagtgccacctgtctcagtagagcatttaatctgtatttcaccctcattagctcgtcaacaaatgacaaatctatacctattttgactttctaaatgattattactaagaagctacgtataatttatttatgtttctaagaatctccacataaggataactctcttcaacacctttatcataaaatctaagtacatcaaaatttctaaatagacaagcacataaaaaggtagaagacaaacagaatggtatataaatgtaaaactgcttaccttcgcagaagtagcaaagtgaaattttttccaatcaaaatattttccgtggcacaacaccttatggtatgacaagggatttgtgatgaaatggacatattttcccattagtttgcaggtaaaaacatgaccatgtttcctttgatttgctctgaggaactcaagaggattggcaccaaattgcagagcacagcccaggtatggaattaatccattctctagaggtggttcacccgtttgcctgtcagacac

SEQ ID NO: 9360 - DNA, 545 bp, Homo sapiens
  MAP TO CHRX.3; EXPRESSED IN LUNG, SIGNAL = 0.87; EXPRESSED IN HEART, SIGNAL =   1; EXPRESSED IN BONE MARROW, SIGNAL = 0.95; EXPRESSED IN ADULT LIVER, SIGNAL = 1.1; EST_HUMAN HIT: AW063546.1, EVALUE 6.00e-51; SWISSPROT HIT: Q92796, EVALUE 1.00e-25; NT HIT: gi16163367, EVALUE 1.00e-84
agattgaatgggatgttgggggcggggtcttacctggtgaagtcctcctcagccagcatgtgcctgggaataggagagtagcgggtggggggaacctgaggaggagcagggtagctgaccttgctctccacagccccgagataacccaggctggaattatggcttatgtggttgtcagccaaggcagtaaaagctggaatcaagaaagggagagaaaagttcagagactggtccagggaggtaccccaaactcctcaaggactttcccccacaccccacttcagatgcaaaagagaccaagggatgctgattcctcaggccgcacctccccactccatccacccgccacccagggttcctcctccgcagtccctttctaaatccttggctcactcctgtgagtcttagaaagagctgaagtcaaggcagtctacaaagaaaggcatgactagaggtgtgactaataataatccctcacatctctatagcctaatacagttttccaagggttttctcatccatgatctcatttgatccttgcagca

SEQ ID NO: 9361 - DNA, 596 bp, Homo sapiens
  MAP TO CHR12.3; EXPRESSED IN BONE MARROW, SIGNAL = 2.6; EXPRESSED IN LUNG, SIGNAL = 1.4; EXPRESSED IN ADULT LIVER, SIGNAL = 1.7; EXPRESSED IN BRAIN, SIGNAL = 2.5; EST_HUMAN HIT: AI339458.1, EVALUE 1.00e-103; SWISSPROT HIT: Q00872, EVALUE 2.00e-32; NT HIT: gi4505294, EVALUE 1.00e-102
tccatttgagaagattgccctagagttacctctgaacacatctggctttctttgttagaactgttagtttgcttatttgccaagcactaagtagagtttaatgtgagaaatagtgtcaagtaaaagtctatccttctcagatgcactttctttttaagccatgctttaaaattctgtcactggctttgatggtctattaatatgccaattacagatatgttttgacctaagtttcttcaatttgaacttcagcctaaaataacctggatgaaaaacaaagttgctattgtggatgatccaagatacaggatgttcagcaaccagggagtctgtaccctggaaattcgcaagcccagcccctatgatggaggcacttactgctgcaaagcagtcaatgaccttgggacagtggagattgaatgcaaactggaggtgaaaggtatgacatccaatatctcacgtatagactaaagttaaagaaaatcattgaattattgttcttaatgcttattgttcttaatccaaattgcttgccaaaatgctgcagcgagggtgggagagggtggtgagggcaagggaagcagggagggaattaa

SEQ ID NO: 9362 - DNA, 525 bp, Homo sapiens
  MAP TO CHR14.3; EXPRESSED IN BRAIN, SIGNAL = 0.56; EXPRESSED IN BONE MARROW, SIGNAL = 0.7; EXPRESSED IN LUNG, SIGNAL = 0.51; EXPRESSED IN HEART, SIGNAL = 0.68; EST_HUMAN HIT: AW869533.1, EVALUE 8.00e-44; NT HIT: gi6005893, EVALUE 4.00e-97
cccaccaaaaaccacttgactcatcccctcaccccgagaggccctggaaaggccattcaccgggggaagagggctgggtgacatgatcaggaatcacaattttcttattaacaacttcccatggacagaatttctgagaaaacaaaggagcaggtctgtgcaaggcagctagcggcctcggcaccccaggtcctcatagctcccagattcaccccacacacccaccggccccggcctagaacccaacctggttgttaaatggtgactcctccagccgcttcccgtacagggccagctcctctctcaccagccgggcccgagcagaggcctccagaggccccaaggccagcacgtgggcaccctggctctgctcaagggtctcccctaggcctgcatcactagacacactcagcaccaggtgtacacactgtgatatttgggcaaaggggcaggaaggtagaaagaaaaggagaaccacattggagaggcctctctcctccgtgccgtatccctccttctccccag

SEQ ID NO: 9363 - DNA, 573 bp, Homo sapiens
  MAP TO CHR1.3; EXPRESSED IN ADULT LIVER, SIGNAL =   4; EXPRESSED IN BONE MARROW, SIGNAL = 8.1; EXPRESSED IN HELA, SIGNAL = 3.1; EXPRESSED IN LUNG, SIGNAL = 5.8; EXPRESSED IN PLACENTA, SIGNAL = 2.7; EST_HUMAN HIT: BI757055.1, EVALUE 6.00e-51; SWISSPROT HIT: P05413, EVALUE 1.00e-12; NT HIT: U57623.1, EVALUE 0.00e+00
gattgcctgagctcttgtcctcacaccatcactagtttgggtcaaaggctgtgtgctctgtggcccagtgtccagaccccaccctgcccctcaattcctgactaagatcacagctcaggcctctaccctctttccacagtccattgtgacactggatggagggaaacttgttcacctgcagaaatgggacgggcaagagaccacacttgtgcgggagctaattgatggaaaactcatcctggtaagatgggcaactttggagctatatctgattggttattactactgctctttcagccaagcctgttctaaaaagccaagtcctcccctgagagctgtagaagctgggacaagagagtggttgtgggtcagggtggtatcaggtgggaattttctgtgtagtggctttggactcacacaggccggaactcaaatcttaccttataggctacatgactgtgggcaaatcaccttttccaagtgcaactgtaaaacgggtattaataataccaaccttgtagggctgctgggaagcctgtaagagacagtgtatgcacagcacaaagcatcact

SEQ ID NO: 9364 - DNA, 568 bp, Homo sapiens
  MAP TO CHR8.3; EXPRESSED IN ADULT LIVER, SIGNAL = 1.4; EXPRESSED IN BRAIN, SIGNAL = 1.5; EXPRESSED IN BONE MARROW, SIGNAL = 1.8; EXPRESSED IN LUNG, SIGNAL =   1; EXPRESSED IN HEART, SIGNAL = 2.1; EST_HUMAN HIT: BF918988.1, EVALUE 5.10e-02; SWISSPROT HIT: P00540, EVALUE 1.00e-108; NT HIT: gi4885488, EVALUE 0.00e+00
ctgtggccataaagcaagtgaacaagtgcaccaagaaccgactagcatctcggcggagtttctgggctgagctcaacgtagcaaggctgcgccacgataacatcgtgcgcgtggtggctgccagcacgcgcacgcccgcagggtccaatagcctagggaccatcatcatggagttcggtggcaacgtcactttacaccaagtcatctatggcgccgccggccaccctgagggggacgcaggggagcctcactgccgcactggaggacagttaagtttgggaaagtgtctcaagtactcactagatgttgtgaacggcctgctcttcctccactcgcaaagcattgtgcacttggacctgaagcccgcgaacatcttgatcagtgagcaggatgtctgtaaaattagtgacttcggttgctctgagaagttggaagatctgctgtgcttccagacaccctcttaccctctaggaggcacatacacccaccgcgccccggagctcctgaaaggagagggcgtgacgcctaaagccgacatttattcctttgccatcactctctggcaaat

SEQ ID NO: 9365 - DNA, 575 bp, Homo sapiens
  MAP TO CHR11.3; EXPRESSED IN BRAIN, SIGNAL = 1.2; EXPRESSED IN HEART, SIGNAL = 0.96; EXPRESSED IN FETAL LIVER, SIGNAL = 0.82; EXPRESSED IN ADULT LIVER, SIGNAL = 0.96; EXPRESSED IN BONE MARROW, SIGNAL = 0.92; EXPRESSED IN HELA, SIGNAL = 2.3; EXPRESSED IN LUNG, SIGNAL = 0.94; NT HIT: AJ295844.1, EVALUE 0.00e+00; EST_HUMAN HIT: BG770058.1, EVALUE 2.00e-66; SWISSPROT HIT: P41470, EVALUE 4.20e+00
ttgtttttctgggaaccaccatatttctggatctgagaaaacataacgaggagccaaaatcctgagccctaagatggtaaaacaaatacctgcttcctattccttctactaatactttagaacttaaaatataatgtaccaatcttatctttataaaagggaaaatggcaaaaacatggtacatgagatgccagagagatattagagccctctaaaaagcataaaatggcttgaaaaactgcaacactagatcatcttcttacctctttatgatcttcaactacactaagaagtgtatcaattgtattcagaattcccatagcagtaactgctttgtcatcactaccttcttcatctggccccgtctggattacttggttaaatgtcattgcctagattcaagagaatataactcaagtttgtcactgaagcattataaatatgttttggtctaagacttttaattcttagaacgttctcattgggataccacaacaaatcaatgtctccaaattgattaatgataataaagagcttaagctctataatcaaatagtctgctcattgggtgacct

SEQ ID NO: 9366 - DNA, 526 bp, Homo sapiens
  MAP TO CHR14.3; EXPRESSED IN BONE MARROW, SIGNAL = 0.88; EXPRESSED IN LUNG, SIGNAL =   1; EXPRESSED IN BRAIN, SIGNAL = 0.79; SWISSPROT HIT: P45164, EVALUE 9.60e-01; NT HIT: gi14751626, EVALUE 0.00e+00; EST_HUMAN HIT: BI825694.1, EVALUE 0.00e+00
ttcttcctgatccagttgggatagctgttctctagatcatagctcttcctcaccacagatcctaggcttcacctacaacagtctcaagctgcccttttcctcaatccatgaccaacatctttccagttcagatcggagtcttgggaacctcagaacgagctgtggattgaaatcaccaagtgctgtggcctccggagtcgatggctgggaactcaacccagtccatatgctgtgtaccgcttcttcaccttttctgaccatgacactgccatcattccagccagtaacaacccctactttagagaccaggctcgattcccagtgcttgtgacctctgacctggaccattatctgagacgggaggccttgtctatacatgtttttgatgatgaagacttagagcctggctcgtatcttggccgagcccgagtgcctttactgcctcttgcaaaaaatgaatctatcaaaggtgggagttcgaggttattacatcttcacgccctcttcccagtgttgtctccctgtc

SEQ ID NO: 9367 - DNA, 597 bp, Homo sapiens
  MAP TO CHR11.3; EXPRESSED IN FETAL LIVER, SIGNAL = 3.6; EXPRESSED IN ADULT LIVER, SIGNAL = 6.3; EXPRESSED IN BRAIN, SIGNAL =  11; EXPRESSED IN BONE MARROW, SIGNAL = 6.6; EXPRESSED IN HEART, SIGNAL = 7.1; EXPRESSED IN HELA, SIGNAL = 6.4; EXPRESSED IN PLACENTA, SIGNAL =   6; SWISSPROT HIT: Q13114, EVALUE 2.00e-05; EST_HUMAN HIT: AL544165.1, EVALUE 0.00e+00; NT HIT: gi4759253, EVALUE 0.00e+00
tccaagggtcaagagaggaggagattcaagtcacttttcacacaacagtggaaactgggataagaatctaactttctcaattttctgtccattgttcttttttcctaagtagctttttatgtgtaagactacttttgggatgttccatgttctatgtaacaatgttctctgcatctggttctgttataggacaccattttttcttatgctcacgtaccttattgattttatgatgcaggctttgcagaacctatggccgcatggcgtttgcactgcttctcgtaatgccatcaagcagatggggcattcatacttgctttccaggggtgggtcaaactctacatcatatccctggatctcctccataaatgagctggagaggttccccgtgctggcagttccacccacactatcatcttttgttacagcgctacaggagctggccatggccacacagcagtcactttcagactggctggatccacagctgttttcacagtttagcagactcatagtaacttgattatcacttgctctgtagaaatagcaagaaaaaaatgcctttataagtaacacacacactcacaccccacacat

SEQ ID NO: 9368 - DNA, 589 bp, Homo sapiens
  MAP TO CHR18.3; EXPRESSED IN ADULT LIVER, SIGNAL = 0.62; EXPRESSED IN BRAIN, SIGNAL = 0.61; EXPRESSED IN LUNG, SIGNAL = 0.31; EXPRESSED IN BONE MARROW, SIGNAL = 0.74; SWISSPROT HIT: Q01718, EVALUE 2.00e-96; EST_HUMAN HIT: BI830442.1, EVALUE 0.00e+00; NT HIT: X65633.1, EVALUE 0.00e+00
cacttggcaacgttattcccatggattctaaaaccagggatcagccattctaccagtacctgctgcagaagatcatctttttgaatgcgtccctgagctctgggctccggaaggcatatatgaaggggtcaatgacggcattgcacatgatcaacatgccgttcacctggaagagagacatgtagcaggcgcagtaggggttacttgggcagaatgtcatcaagaggacatgaagcacaaagggggcccagcagaagatgaagaccccgagcaggatggtcagtgtgatggcccctttcatgttggctctggggagggtggagatcttcctggtgtgggatcgagccagcaggaacatgtgcacatagaggcacaggatgaagaccagcatcagcgggaacagcgacgtgaaggtgatcactgtgggcacatgatgggagaagatcaccatggtgatgccagtccccgtgcagaacgtccagatgaccgtaagcaccaccacagtgcggcgcatggtcacgatgctgtggtaccgcagtgcgtggaagatggtgatgtagcggtccgcagcaatcacagacaggctgaa

SEQ ID NO: 9369 - DNA, 575 bp, Homo sapiens
  MAP TO CHR11.3; EXPRESSED IN HEART, SIGNAL = 1.2; EXPRESSED IN BONE MARROW, SIGNAL = 1.8; EXPRESSED IN BRAIN, SIGNAL = 1.9; EXPRESSED IN LUNG, SIGNAL = 2.8; SWISSPROT HIT: P35790, EVALUE 5.00e-20; EST_HUMAN HIT: BG958744.1, EVALUE 0.00e+00; NT HIT: gi4557454, EVALUE 2.00e-71
tctgactgccatgactgaggggaagaggagtggccttgggggttcgtggcattctaggaaggtgactttcttctgtcccttcacccgttcaatagcatttttgcataagccttctttcctggtttaggaattgacttttacacacaagaaagacttacttatgagacaagtatcaccagctgacaccctgcacttcagtgaactaggaagacctctgactactgtggcaaacaaatgctcacttatggtacttctgggagccaccactgtaaaactatgttaggaccaagtgatttgaccacttacttttccattgtgccaaaaagccattttggttccttattgaatggcattttcataccatgaaatgtagccattttctcggcgatttctgcagaaatatctggcaaacttaattcttcagtatctaatcgccggctctgaaaaagaaaagggagttaaaaactgacatttaccaagtaaactaaaaagagtgagatcacacagtcttaggaacgagaagtgtttttgtagtgcatttaagtctcacccaatgccccaaattcccttaagaa

SEQ ID NO: 9370 - DNA, 555 bp, Homo sapiens
  MAP TO CHR11.3; EXPRESSED IN HEART, SIGNAL =   1; EXPRESSED IN BONE MARROW, SIGNAL = 1.4; EXPRESSED IN ADULT LIVER, SIGNAL = 1.6; EXPRESSED IN BRAIN, SIGNAL = 1.9; NT HIT: gi12736598, EVALUE 0.00e+00; SWISSPROT HIT: P32583, EVALUE 2.00e-03; EST_HUMAN HIT: BF081516.1, EVALUE 0.00e+00
acgaggacgaacaacgaaagaaatgtgcctcatcagagagtgattccgatgagaaccagaacaagtctggcagcgaggccggcagtccccggaggccacgaagacagcggtcagatcaggactcagacagtgaccagccatccagaaagagaaggccctccggttctgagcagtctgacaatgaatctgtgcagtcagggagaagccactcaggagtttctgagaacgactctcgcccagcttctccaagtgccgaatcagatcacgaatcggagagaggatctgataatgagggttctggccaaggctctggaaatgaatcggaaccagagggatccaacaatgaggcctcagatagaggctcagaacatgggtcagatgatagtgactaggttttatttcatcaataagcttcatctctggaggaaacttttttaatatatgaaagctgtgataaaaatgtttcagatgtttagtcaattgtgaaatttttcttaaggcaattttcttttctatcagtttgtatattactaagccccaagagacatttcctgt

SEQ ID NO: 9371 - DNA, 538 bp, Homo sapiens
  MAP TO CHR19.3; EXPRESSED IN HELA, SIGNAL = 3.3; EXPRESSED IN PLACENTA, SIGNAL = 6.9; EXPRESSED IN BONE MARROW, SIGNAL =  13; EXPRESSED IN FETAL LIVER, SIGNAL = 6.9; EXPRESSED IN ADULT LIVER, SIGNAL = 9.5; EXPRESSED IN BRAIN, SIGNAL =  14; NT HIT: M67508.1, EVALUE 8.00e-77; SWISSPROT HIT: Q9UIE0, EVALUE 4.00e-17; EST_HUMAN HIT: BG704961.1, EVALUE 2.00e-66
catgattgcacttctggtggagctcaggaaaatcactgtcaggatacagacagaatgagtgggaaatctataagttgacctccacttctcctctccgcctgctcaatgctgctcctcccccagtagtccatggtcataggattgaggttatgtatccttgatgttataggaggcagtgaccttcaaggatgtggctgtgttcttcactgaggaggaactggggctactggaccctgcccagaggaagctgtaccaagacgtgatgcttgagaacttcacgaacctgctgtcagtgggtgagcacaggcaccctctgtaatggtacatcaggcctcaggagtggctttgtatcctagagtattcaagtttgtgtatgcagtgggaacttaaatttccagtaaattttaccttgatattacctagaatgaattggtattaagcacatgactttgcatgttcacagggcatcaaccattccaccctttccacttcctaagggaagaaaagttttggatgatggagacagcaacccaaagag

SEQ ID NO: 9372 - DNA, 599 bp, Homo sapiens
  MAP TO CHR2.3; EXPRESSED IN BRAIN, SIGNAL = 0.77; EXPRESSED IN BONE MARROW, SIGNAL = 0.8; EXPRESSED IN LUNG, SIGNAL = 0.33; EXPRESSED IN HEART, SIGNAL = 0.88; SWISSPROT HIT: P32418, EVALUE 3.00e-19; EST_HUMAN HIT: T19754.1, EVALUE 6.00e-05; NT HIT: X91216.1, EVALUE 0.00e+00
tgtgaatgccttgctctgacagatttattagcattttcaaatagaacttggtttcttccacacataacaatctcttaggattcacctttgcatgttccttgctgcccctcagattaaaccttccctttggggcacctctgaccttgtgcagtcatagatgtctcctgctgggccctggttcggatgctgtttggtttacaggactccttggttcctgattaactctataattccaatttggccccaaaggctctcaattcacaagccagttcctgaaattacatctactactctttccaggtggatcttaagctttggccaaccctatgaacagtttctgtcccaaggtgagactggctcctggtgggcagtgttggtgagcataccttgaattcataggattcttcaatgatcacttccaacttggtgtgctctcccaggatggggcgccccatttctgcaatgcgcctctcctcttcctctttgctggtcagtggctgcttgtcatcatattcgtctgtgaaacggaagtatcagagagtgagcactgtgttctgtttaatttggaaatccctggatcctgccataagaaagccaag

SEQ ID NO: 9373 - DNA, 520 bp, Homo sapiens
  MAP TO CHR20.3; EXPRESSED IN BRAIN, SIGNAL = 1.4; EXPRESSED IN HEART, SIGNAL = 0.84; EXPRESSED IN BONE MARROW, SIGNAL = 1.4; EXPRESSED IN LUNG, SIGNAL = 1.3; SWISSPROT HIT: P00529, EVALUE 6.30e+00; EST_HUMAN HIT: BE778907.1, EVALUE 0.00e+00; NT HIT: gi14772516, EVALUE 0.00e+00
catggtgaacacccttttccctcgccatagaccctactctccagaggtgaaggtcatggccaattccttccacagcaggttcagagttccaggagaggccagggtgggatcccagaggaatctggacttttctggccaacacctgcctaaggcaaagtttcttattacataaatatccttgttaaaaagcaaaatattgatcctgtacaatataacctgttaaaaaaatcgtgcttacaaacagctcctagataagagggcaggtggagagaggacggagaaaacagctaccaaaaagggaggggggagtttaaaggactactagggaaagttttagggcagtgggagaattccaacttaggacaatatctacgagcaaaaaagtaatcacacctgcttcccggattttcaattaagaaaatgccatttgtaaaaggttgggcggtgggctggagggcgggggttgcagggaacctcattggcgctcctttccctgcctcccacctcaagatgatgcaga

SEQ ID NO: 9374 - DNA, 556 bp, Homo sapiens
  MAP TO CHR3.3; EXPRESSED IN ADULT LIVER, SIGNAL = 1.2; EXPRESSED IN BRAIN, SIGNAL = 1.2; EXPRESSED IN BONE MARROW, SIGNAL =   1; EXPRESSED IN HEART, SIGNAL = 0.88; SWISSPROT HIT: Q9Y215, EVALUE 5.00e-05; EST_HUMAN HIT: AA807535.1, EVALUE 7.80e-01; NT HIT: AF229118.1, EVALUE 0.00e+00
tctgtgttagacacgggctgcagaagggaatttcataaacacttggggagaagaaaaacagaaggggaaattccatgtttgagcagctgatgggaacccaggaagttatattataaattcacctcatggtttttgagaagatgagaaactttgccaaatccaattcctgctaagaagaatctccctccatcatttatttaagatatttggagaatggacacaccccaggaactgcaaaatgtccattccggggctcaacttctgggtgacagtggagggttgaggctctcagaaaagattccggaggcagctcaggtggagtggggcaggcaggtggggctgcgtggtgtgcactgagtagcctgcactttttttcctctcataaatcccaaagtactcaccggacttcggccacctctgaagaatggtggtgggaacagtggtggtggaggaggcgtcagcaggcagcatgctttgtggccaccacgcttcttctgatccaggctgggaagggctgttcagagaaaactgccgctcgttagcatgtggtcagtgc

SEQ ID NO: 9375 - DNA, 504 bp, Homo sapiens
  MAP TO CHR17.3; EXPRESSED IN BRAIN, SIGNAL = 1.4; EXPRESSED IN BONE MARROW, SIGNAL = 1.9; EXPRESSED IN HEART, SIGNAL = 1.3; EXPRESSED IN PLACENTA, SIGNAL = 1.5; EXPRESSED IN ADULT LIVER, SIGNAL = 1.5; NT HIT: gi14774885, EVALUE 0.00e+00; SWISSPROT HIT: P15860, EVALUE 7.00e-20; EST_HUMAN HIT: BI764435.1, EVALUE 0.00e+00
cttcccgggtctctctgacgcccgtggctccccacaggcctttcccctcgcgtcctccctccctttccagcaccttcactcggcctgtttttcttcctcctcctcggcactgagctgagacgcgctgagcagtttgctctcctttttccacttcatgcgtcggttctggaaccatatcttgatctgcctctccgtcaggcacagggcgtgcgcgatctcgatgcgccgccgccgcgtcaggtagcgattgtagtgaaactccttctccagctccagcgtctggtaacgtgtgtatgtctggcggcctcgccggccgctgggcccaaaggaggaacctgttacgcagagtggagatgctgaggcctgcggtcaccgggcccaggaccccctcccctagtcgaccctcgaacacagactccagccagtaccgggatgccctctattctgccggctcccttcccccgtttcgcactcctccagcgccccctccagattccctcctag

SEQ ID NO: 9376 - DNA, 533 bp, Homo sapiens
  MAP TO CHR11.3; EXPRESSED IN FETAL LIVER, SIGNAL = 1.7; EXPRESSED IN BRAIN, SIGNAL = 2.6; EXPRESSED IN BONE MARROW, SIGNAL = 2.4; EXPRESSED IN PLACENTA, SIGNAL = 2.2; EXPRESSED IN HEART, SIGNAL = 1.6; SWISSPROT HIT: P40362, EVALUE 3.40e-01; EST_HUMAN HIT: AW117178.1, EVALUE 0.00e+00; NT HIT: gi16184325, EVALUE 1.00e-78
acagaaacatgaacggagggcacaggaggcggggcctccacaagaccatgagttggaggtgggagagacaacttaccttatgctccagaccccgtggattctggatcctgtgtatcctcaagactctgtccaagccacaggaggctagtagaggctttgaagggtggcactgcaacccacgcacactgcctgccagccccttcagacagcccagtagacgccctagagaaggggggaagcatccgtgataactggctggccaataaccaaccattcattgtttcctgttccaatcactttccatttcaacatttaatctgcaacaaaaccctgagactggagcttctactaatatttccatttcgcaggtgaggaaactaaggcacagggagttgaaataattagtttaaggtcatacagcttttagggaaaccaggatttaaacccaggcaatctggcacctgaatgaggcctcactggccccactgcaccaccttagagggaatcctgacccttctccctgctccttcctt

SEQ ID NO: 9377 - DNA, 575 bp, Homo sapiens
  MAP TO CHR22.3; EXPRESSED IN ADULT LIVER, SIGNAL = 1.6; EXPRESSED IN FETAL LIVER, SIGNAL = 1.3; EXPRESSED IN BONE MARROW, SIGNAL = 1.6; EXPRESSED IN HELA, SIGNAL = 2.2; SWISSPROT HIT: P32154, EVALUE 2.50e+00; EST_HUMAN HIT: AL046886.1, EVALUE 1.00e-116; NT HIT: AF328769.1, EVALUE 1.00e-117
ggtaggcgagatctgtgctctgtgagccttacgccctttgagccatggtcagtctggtaggccctttcctgagaagctctgcccttgtgttcccacagatcctatgaatgcactccagagcctgactggcggacctgctgcgggagccgctggaattggcatgcctcctcggggcccgggacagtctctgggcgggatgggtagccttggtgccatgggacagccaatgtctctctcagggcagccgcctcctgggacctcggggatggcccctcacagcatggctgtcgtgtctacggcaactccacagagtgagtaccacacttcttggaggatttgccgctttccttgcaaacgacaacacattttattcctgtgcttatgatggtatcaagaaaagcatggagaagctccaaatcgctctggtttttttgttttttaaatctttgttgtatgtggagagaaaaggcttccaattttcgttgagctcccagaagggttaagtgatgctgggccctcctcctcctcctagccctgggcaggagggtgcggatggcctgagactccatccaaag

SEQ ID NO: 9378 - DNA, 527 bp, Homo sapiens
  MAP TO CHR9.3; EXPRESSED IN BONE MARROW, SIGNAL = 1.6; EXPRESSED IN FETAL LIVER, SIGNAL = 2.1; EXPRESSED IN BRAIN, SIGNAL = 2.4; EXPRESSED IN LUNG, SIGNAL = 2.1; EXPRESSED IN HEART, SIGNAL = 0.87; SWISSPROT HIT: O95477, EVALUE 6.00e-33; EST_HUMAN HIT: BG164931.1, EVALUE 4.70e-02; NT HIT: AF275948.1, EVALUE 0.00e+00
  unsure 191
ggaatccacaccctgagaagtaaatctgttttgacactcaaagcttacttggtcaagtgttgtctgagaaacagagtagtcttctatgtggagtcgctttttgctctgggagaggatgctgaatatcctggccagagaagataatgaagatggaagctggtattgtagcatgttccggtgtttctcttttngaacacttccaggaaatgcaagtccaaagaaatcctggacaggcttcaggtccgggttggaccctgctattcgtacaactattgtataaccatctccaaacctgaaagcaggaaaaaatacccaaatggaggatctccagaaaactatttaaaagaatactgaaccctgggaacccaacttgtgccatgaaaaagggcggcccctggcaggcccagaaataagtttctgagagaaggaaccagttatcatttactaaatacttattttatgtgaagcaccatgccatgtgctgtaaatacatgatctcctttaatcctcacctggacccatgaagt

SEQ ID NO: 9379 - DNA, 573 bp, Homo sapiens
  MAP TO CHR6.3; EXPRESSED IN ADULT LIVER, SIGNAL = 0.87; EXPRESSED IN BRAIN, SIGNAL = 1.6; EXPRESSED IN BONE MARROW, SIGNAL = 1.4; EXPRESSED IN LUNG, SIGNAL = 4.3; SWISSPROT HIT: O35984, EVALUE 5.00e-42; EST_HUMAN HIT: BF991359.1, EVALUE 0.00e+00; NT HIT: D28769.1, EVALUE 0.00e+00
gttacggcgctttcgtctacagaggagggagaagagcggtgaggaggatgttgatgtcctggcagggctgtcacatggcatgaccccagagtcaccattgtcatggagtaccatgttgtgcagcatggcagctcagggtcttggagaggaatgggaaggagcccagtgctgggggccagcctggggtccctgggcccacctggcatccaggaaacgggagcgcaggatcatcacagcctcgcaggtgctctgcttcagctgcatctggatggcgctgaactttcgatggatgatgctcaccatgcgttccatctctttgggggccacgggcctggtgcggctctgctccctcagcaggttcatgacatgggtcgtgaactcattacatgcctgtagtgggggccagtgggctggtgaggaggagccctttgaccatgggattcccctgcaagagcccttccctccacccacccaagcctcctctccttacctgctcatacttctccagctccgagtggtatatgtgacggatctgggcaagtttgctgcgatagtccgagtgttcgatggagt

SEQ ID NO: 9380 - DNA, 547 bp, Homo sapiens
  MAP TO CHR4.3; EXPRESSED IN BONE MARROW, SIGNAL = 0.78; EXPRESSED IN LUNG, SIGNAL = 0.5; EXPRESSED IN BRAIN, SIGNAL = 0.55; SWISSPROT HIT: P50571, EVALUE 4.00e-24; EST_HUMAN HIT: AL539373.1, EVALUE 1.00e-82; NT HIT: M59215.1, EVALUE 0.00e+00
actaggggtgctgtgaaaggaagaagatggttccaaccaaataatggtctgattacttgtcttttgtttctcaactcaggagcgtatccacgactgtcactaagttttcgtctaaagagaaacattggttacttcattttgcaaacctacatgccttctacactgattacaattctgtcctgggtgtctttttggatcaactatgatgcatctgcagccagagtcgcactaggtaatacattctcagcactgcagagagctaacagattttactttcaaacaaataaccaatatcaggaattataggcaagggctctcttatagcaagccaaagaattagatcatcttacaagtccctgaatataaaacatctaaatgtaagaatgtccacaacgaatattctacaatgtactgtctttttagcattttaccaaaacaaacaaacaaaaatcttggaatatatctagcactacttaagtgtctcatggaatatatttttaaattctcattacactagtttttactaactttgggatgacttcccctt

SEQ ID NO: 9381 - DNA, 510 bp, Homo sapiens
  MAP TO CHR9.3; EXPRESSED IN ADULT LIVER, SIGNAL = 1.4; EXPRESSED IN BONE MARROW, SIGNAL = 0.85; NT HIT: gi16161478, EVALUE 0.00e+00; SWISSPROT HIT: Q60793, EVALUE 7.00e-31; EST_HUMAN HIT: AA913566.1, EVALUE 0.00e+00
ggaattctggtcttccctcccccaactcacggatataatttataccctgatatccacaacttccagtcacccccttggcattttgtaagtccaggaatattcaagtcggatttagaattggaatgatagaagatccagtcacagaccccatctgttctttgatttttgtcttttggattcctcatttttcctgattatccactcacaagatgactcagttgggaacttgaccatgattgtagtgctttctggctgggctccttccctcatcgggaagacagtgtgaaaagtaaaaaatactgaattctcttctggcagtgtgggtcatatccactgtctgggatttaaaaatgcctcttcatgtgtaaggcgaggtggtccgacctggaaaatgctcggtcgcatttttggcactggaacgggcggtgccccgtgtgtttacggtagtgcctggtcagttcatctgagcgggcgaatttccatccacagccgtcccagtcacagtggtaa

SEQ ID NO: 9382 - DNA, 507 bp, Homo sapiens
  MAP TO CHR14.3; EXPRESSED IN LUNG, SIGNAL = 0.88; EXPRESSED IN BONE MARROW, SIGNAL = 1.1; EXPRESSED IN FETAL LIVER, SIGNAL = 0.94; EXPRESSED IN BRAIN, SIGNAL = 0.61; EXPRESSED IN ADULT LIVER, SIGNAL = 0.62; NT HIT: AJ238393.1, EVALUE 0.00e+00; SWISSPROT HIT: P12883, EVALUE 3.00e-32; EST_HUMAN HIT: BF834726.1, EVALUE 1.00e-116
tcacagggaagacagaagggatattgggaaggagagggctctttggagggtctggattcttccccaaagggaaggagaatgggaccatcctcaggtctgcatgggcatggggcatgggtgtacccctctctgtccacccaggtgtacaggtggccagggtggactctcacatcagcctgacacccaccttgccatactcggtctcggcagtgactttgccaccctctcgagacacgatcttggccttgacaaactcctgtttgtcatcaggcacgaagacatccttcttgaggtcaaaaggcctggtctgcgcttctagccgctccttctctgacttgcgcaggtagggggcggcagccccaaagactgccatctccgaatctcccatggctgtgcctggagtgagcagaagctggctgccctcccatctgcccattcttcccttccctccctgggctctccccttcagtgggagccccaaaacctagcaccatgctcaagagtcaa

SEQ ID NO: 9383 - DNA, 592 bp, Homo sapiens
  MAP TO CHR6.3; EXPRESSED IN ADULT LIVER, SIGNAL = 1.9; EXPRESSED IN BRAIN, SIGNAL = 2.1; EXPRESSED IN BONE MARROW, SIGNAL = 1.9; EXPRESSED IN HELA, SIGNAL = 3.5; EXPRESSED IN HEART, SIGNAL = 1.9; EXPRESSED IN FETAL LIVER, SIGNAL = 1.8; SWISSPROT HIT: P40055, EVALUE 1.00e-12; EST_HUMAN HIT: BE388763.1, EVALUE 1.00e-79; NT HIT: gi14782802, EVALUE 1.00e-79
tgactcataacatcgagccgcccagctcgagcattcagagctgccacaatcttccccactgacacatccaggtaggttagaaaccctgtttctgactgagagagaaagacagagagaatgacccagtcctgattgccctctgtattccctctgctggggtcctaaaggagaggtggtcatcccaagggcttccaaccagttcctgagctccatggccactcacagctgtagccaggaggaagtggaagggcaggaactcaagccgtgttactcggtcacagcggcggatacagtggagctcaatgccctgattgtcatagatgtggagccagcggttctgagcaacagcaagcagtgcctcagaatggagaaacctgggggagaggaagagtggttcaattgggaaatgaggtcacaggctatcattcaatcaggaatggactatctcaccccaactgaccgctgacagtgaggccactgaccggatgtcccgcaccgcctccatgacgttgatctcgcacataagcttctttgttacccaatcaagggcagccacatgacctcggcgccctccaaaagccaggtgtctgtt

SEQ ID NO: 9384 - DNA, 515 bp, Homo sapiens
  MAP TO CHR12.3; EXPRESSED IN PLACENTA, SIGNAL = 2.3; EXPRESSED IN HELA, SIGNAL =   2; EXPRESSED IN BONE MARROW, SIGNAL = 2.8; EXPRESSED IN ADULT LIVER, SIGNAL = 2.6; SWISSPROT HIT: P34535, EVALUE 7.00e-06; EST_HUMAN HIT: AI940682.1, EVALUE 0.00e+00; NT HIT: AF351620.1, EVALUE 0.00e+00
cttggggtagggatagggagcagagagcagatagagttgggtggactcaggcagccgtgcgccaagcagtcatatgtcgcaccttcccactctgcttctcctgcaaatggtcagtctcctgtgggttgcccctccccttactgaccacttctgctcttccttttttgctctaggcctctggaaccttgtttttctcttctccaacctgtccctcatcttcctcatgccctttgcatatttcttcactgagtctgagggctttgctggctccagaaaggtaagtaggggatatgtatccaggcaggaaacggaattccacacacatggttcagctgaagagattttaataaagaggctatttgcagaggtttagttaacggaagtttgaggctctagtgacagtaggaagtcattaccacccttaggcctgtagggacaaagggaggaaatggtttctagaacccactaatagctgaagccagggatgtgaagctgcccagagaggagctgttgtc

SEQ ID NO: 9385 - DNA, 600 bp, Homo sapiens
  MAP TO CHR4.3; EXPRESSED IN BONE MARROW, SIGNAL = 4.2; EXPRESSED IN LUNG, SIGNAL = 1.8; EXPRESSED IN PLACENTA, SIGNAL = 2.6; EXPRESSED IN FETAL LIVER, SIGNAL = 2.4; EXPRESSED IN ADULT LIVER, SIGNAL = 2.8; EXPRESSED IN BRAIN, SIGNAL = 3.8; SWISSPROT HIT: P27707, EVALUE 9.00e-18; EST_HUMAN HIT: AU132553.1, EVALUE 3.00e-59; NT HIT: gi4503268, EVALUE 2.00e-59
aagctcagaggctatccaaggtcacacaccagtaagactggacttgagccaagatctgactaataacaaagtctatcctctcaacaaccacgctatacaatctcccaagtcaaaattctttctgaaagagtacctaaataatgttcagatatattcctactttatcacttaaagtgaaatttcacatattacgctatcaataccaccaagggatactagttataaaaactttaagtaaataggatctcattgcaatcaagagaatgaaaatctatacctagttctggaagataccaataagcaaaacgactggaaattttacatattgctagtcatatcttccaaattttagattaaaatttaacaaaggtaacaaaggtatttaaaatgaatagtaaataaaaataagtcttacttcagtgtcctatgcaggagccagctttcatgtttataatgaagcttctctaaatattcaagaggaatgccttgctcttcatttcttccccgtaaatatattctatgtaagcatgtctaaaagcaagtaataagagatggaagaaaaaggcagggaacaattattcttgtctgctgccatcaaaa

SEQ ID NO: 9386 - DNA, 563 bp, Homo sapiens
  MAP TO CHR19.3; EXPRESSED IN LUNG, SIGNAL = 1.1; EXPRESSED IN PLACENTA, SIGNAL = 0.82; EXPRESSED IN BONE MARROW, SIGNAL = 0.93; EXPRESSED IN FETAL LIVER, SIGNAL = 0.54; EXPRESSED IN BRAIN, SIGNAL =   1; SWISSPROT HIT: O95473, EVALUE 6.00e-23; EST_HUMAN HIT: AI081072.1, EVALUE 5.00e-73; NT HIT: gi11425252, EVALUE 3.00e-73
gaagcgcttgtaagggactggagcatcatttcggaggtcctggaatgccaggtaggcctggaatatctgtgggcagaaaagcgcgtgctgaaggctgacttgggctgggcaggtcaggagagggactgggctggggactggcctgggaaggagacaaaagataccggtgtttggactgctcactgcccaggagccctaggccaaagcacaggccctgatgctgggctgtggctgctcagaggaagcggcacctggaagggaccagtggagtcctgggggaacccccgacccctgacccccaggggagctaagtgagagcaggaatgttctagccctttcaaccccaccctgcagagggtgccctcctagggaggggtggtggaggggcttgtcctcacccagacaaggatggagaagaaggtgaaggcgatggctgcctgggcactgctgctccccaggaggaactctttgggcggcgaatgctgccattggttggccaggaagcagaaacccatgaaccagacaactgcccagagaactgtggcgtcacagggagagaaaag

SEQ ID NO: 9387 - DNA, 556 bp, Homo sapiens
  MAP TO CHR11.3; EXPRESSED IN HELA, SIGNAL =  13; EXPRESSED IN BONE MARROW, SIGNAL = 2.3; EXPRESSED IN HEART, SIGNAL =   2; EXPRESSED IN FETAL LIVER, SIGNAL = 2.9; EXPRESSED IN ADULT LIVER, SIGNAL =   3; SWISSPROT HIT: P38138, EVALUE 1.00e-05; EST_HUMAN HIT: AU141643.1, EVALUE 1.00e-82; NT HIT: gi14773515, EVALUE 9.00e-83
tcaaagccctgatccacttccagcacatcagcctcgtcccggtagttccaacggctctggtggtagccgagggagaagagtgggggcaacgcctgggttcctgcaggttcatgagggatgggggtcacaacgaggatcaggcccaacacccagaaactgagggaggcttgtgaactagaggcaggctgaggggtataaacctagaaaacaagctggggcacaggatctctgaaaacacatagaatcacccgacaagaaaagagcagaagaatgaggcagggaaaaccatgtacctgtgagactagcatattgccggaaaacatcagagatggagggccccagcagcaggaagacgtcaatgatgccagtctctgacatccagcgaacatctgtctgtggggtctccccagagccctgcaggtagtccatcatcttcccaaacagggtctgtataggtgaccacaaaggggtcagacacctcctgccctcccattttccaaccccaagacaaaaagtagcaattttctcccagagtccacacagagctggctcatgt

SEQ ID NO: 9388 - DNA, 505 bp, Homo sapiens
  MAP TO CHR19.3; EXPRESSED IN BONE MARROW, SIGNAL =   1; EXPRESSED IN HEART, SIGNAL = 0.67; EXPRESSED IN PLACENTA, SIGNAL = 0.78; SWISSPROT HIT: Q9NQT4, EVALUE 1.00e-23; EST_HUMAN HIT: BG283853.1, EVALUE 2.00e-96; NT HIT: L08634.1, EVALUE 0.00e+00
tcgtgagggagagatgtgtgtatccctgcgtatttagtagtattcaatcggacaagaaatcatgcatcaacgcaggagtgacatttaccagctggtatcgtgaggaggtgggcactcggttgcacagtacacggtagtccctctccaaaagaaagacctgggtgaagttcttaccttgcaggaaggaagcagagccatctggccgcgacagcaggttctgttcgcaggcaaagtgccggaggctgcagccaggaccccgagggctggaccctgttccattttcagcacggattttggcgtcagtatgcgtctcctcctccatcgcgccgagcccacgtgcggctgcagttgtcacttccgcctggcagcgcgcgccgcaaacaggctgcgtaaccagtgcgcacgcgccgggctgggccatcctcctgggcgtccgcacgtggcttagcgtttaccaacaatctggctccgcccagtcccacctcctaactctggcaacgccatt

SEQ ID NO: 9389 - DNA, 571 bp, Homo sapiens
  MAP TO CHR9.3; EXPRESSED IN BONE MARROW, SIGNAL = 2.7; EXPRESSED IN HEART, SIGNAL = 1.3; EXPRESSED IN HELA, SIGNAL = 5.5; EXPRESSED IN ADULT LIVER, SIGNAL = 1.5; EXPRESSED IN BRAIN, SIGNAL = 1.8; EXPRESSED IN FETAL LIVER, SIGNAL = 0.76; SWISSPROT HIT: P04083, EVALUE 7.00e-21; EST_HUMAN HIT: BI037971.1, EVALUE 0.00e+00; NT HIT: gi14745912, EVALUE 3.00e-55
tcagaattcctcaagcaggcctggtttattgaaaatgaagagcaggaatatgttgtaagtagagtgataataaaattatgattacaatattgaaataaaaacgaatataagtaaatggccattaatttatttctctctcattcttagcaaactgtgaagtcatccaaaggtggtcccggatcagcggtgagcccctatcctaccttcaatccatcctcggatgtcgctgccttgcataaggccataatggttaaaggtaacgtgtttcctcaaaacagttccctcctggacatttcagaatggctatttgaatgactgtcaaaaaacagacatgtgcaatggaaagaatctgtttcattttgaagataaaaacatttctttgccaaacgaagatgtaattatttacttaacactgaggaaattgtgttcacatcagtggaatctctattgttacagcagatattactggctcatttctagcagaaattccatgctgaaattaaaagctctgttcacatatagagttgcaactagtatcaaacactgcaacactgagggccaggaaaagtta

SEQ ID NO: 9390 - DNA, 589 bp, Homo sapiens
  MAP TO CHR5.3; EXPRESSED IN HEART, SIGNAL = 3.6; EXPRESSED IN BONE MARROW, SIGNAL =   3; EXPRESSED IN FETAL LIVER, SIGNAL = 3.1; EXPRESSED IN ADULT LIVER, SIGNAL = 3.6; EXPRESSED IN BRAIN, SIGNAL = 4.3; EXPRESSED IN LUNG, SIGNAL =   3; EXPRESSED IN HELA, SIGNAL = 3.4; EST_HUMAN HIT: BI261813.1, EVALUE 2.00e-04; SWISSPROT HIT: O00254, EVALUE 1.00e-115; NT HIT: AF374726.2, EVALUE 0.00e+00
agaaaactgttgcccacaccagtccacatgttaccaaggcataggtgtgcttgggcaggccccggtaggtgaaaggatggacgatggccaggtagcggttgatgctgatgcaggcaaggagcagaatggagcagtacatgttgccatagaagatgactgtggtggcccggcacaggacctctccaaatacccagttgttcccattgagatgataagctatcttaaagggcaatgtaacacaaaaaagaaaatctgcaatggccaggttggtgtagaatacagtggtacagatggatctggtcctgaagaaaagcatccacagggtcacagcattggccgggacaccaactacaaacaccaggaggtagatggcaggtatcagtttagtacttaaggagctggtcaggtaccccatggtagcatttttcacatggagatgtgaagcactttcttcagggcacttaatttttacagtaatcgtggctcctgtccagccttccaaggcagaaaaggggaactcttcaaaagaatttgggggagctccacgaaaggtcttaatgggtaaggttggctttgccaagttgtttgt

SEQ ID NO: 9391 - DNA, 551 bp, Homo sapiens
  MAP TO CHR3.3; EXPRESSED IN BRAIN, SIGNAL = 0.96; EXPRESSED IN BONE MARROW, SIGNAL = 0.87; EXPRESSED IN HEART, SIGNAL = 0.62; EXPRESSED IN ADULT LIVER, SIGNAL = 0.55; EST_HUMAN HIT: AA703266.1, EVALUE 0.00e+00; SWISSPROT HIT: P11182, EVALUE 2.00e-34; NT HIT: X15069.1, EVALUE 0.00e+00
gacccaatgacaaaaggtggacaataatcaatttggtaaaacaaattaacagtaccctttaaagcttctgtttctatgtttactaatggcttccccacataggcaatatcatctagactatgctagagttttcaatgactccatcataaggactagcgatggtaacagaagctttatcactttgaactttaccgatgttatcaaactgagacactgtatctccttcttttacataacattaacagttacttttctaatcccttcttcagtgtctgagaatctgaactgaacaagctgtccacatacagcattaattgttttcagaaagttatgtggatgactatacttgaatgaaggataatcaaagaaacacacataatttggcttcaaaacatgaacattactacatgttggaaaacagtgaaacaaatcagctgcccagcattcctgctccaggtcctcagtacacagactgcagacatcttacccgggaaatggcaactgtgccacagaccacaaggtacatttcaactgctcaatcgccaactgta

SEQ ID NO: 9392 - DNA, 551 bp, Homo sapiens
  MAP TO CHR11.3; EXPRESSED IN PLACENTA, SIGNAL = 0.64; EXPRESSED IN BONE MARROW, SIGNAL = 0.72; EXPRESSED IN ADULT LIVER, SIGNAL = 0.69; EXPRESSED IN BRAIN, SIGNAL = 0.59; EST_HUMAN HIT: BF958361.1, EVALUE 6.00e-88; SWISSPROT HIT: P46098, EVALUE 8.00e-18; NT HIT: gi14770564, EVALUE 4.00e-88
ttcacctatgtgcaccaacctagcattaatgggtatctctcatggtttacctgtatgcagaatgctcttgaaggtcaggctgcaattctggacatcaaatggaaaagcatatgtctctaaactgcacgcagagaccacctggatgggcttatagttctcaatggtcccagatgagttcacataaacatagggaaggtcaggggatctttcaatgtccacactatatgaaacacaagagaacttggttgtcacagagaggatgttggtcatttcaaaacataggctgaatagggagagggtagtgactatgaggtccaggaccagcctagccctgcaaaacagaatcgcattttccatgagatgattcaccctggcaaagatgagcttttcagtgacagcctcgtaagttaactcatttgctgctataacaacacagacataatgagtaacctcaacattagtaaccagatctgtctcttaaataatgtcaacacatggcacttctaacctgaatactcccaacaatatgctccccttcaacttgagaagca

SEQ ID NO: 9393 - DNA, 590 bp, Homo sapiens
  MAP TO CHR11.3; EXPRESSED IN BONE MARROW, SIGNAL = 1.7; EXPRESSED IN LUNG, SIGNAL = 1.1; EXPRESSED IN HEART, SIGNAL = 1.9; EXPRESSED IN FETAL LIVER, SIGNAL = 0.54; EXPRESSED IN ADULT LIVER, SIGNAL = 1.6; SWISSPROT HIT: P15918, EVALUE 4.00e-39; NT HIT: gi14763520, EVALUE 0.00e+00
caaactgtttaggcgcttccggaaaatgaatgccaggcagtccaaatgctatgagatggaagatgtcctgaaacaccactggttgtacacctccaaatacctccagaagtttatgaatgctcataatgcattaaaaacctctgggtttaccatgaaccctcaggcaagcttaggggacccattaggcatagaggactctctggaaagccaagattcaatggaattttaagtagggcaaccacttatgagttggtttttgcaattgagtttccctctgggttgcattgagggcttctcctagcaccctttactgctgtgtatggggcttcaccatccaagaggtggtaggttggagtaagatgctacagatgctctcaagtcaggaatagaaactgatgagctgattgcttgaggcttttagtgagttccgaaaagcaacaggaaaaatcagttatctgaaagctcagtaactcagaacaggagtaactgcaggggaccagagatgagcaaagatctgtgtgtgttggggagctgtcatgtaaatcaaagccaaggttgtcaaagaacagccagtgaggccaggaaagaaa

SEQ ID NO: 9394 - DNA, 583 bp, Homo sapiens
  MAP TO CHR19.3; EXPRESSED IN FETAL LIVER, SIGNAL = 2.9; EXPRESSED IN ADULT LIVER, SIGNAL =   4; EXPRESSED IN BRAIN, SIGNAL = 2.4; EXPRESSED IN HELA, SIGNAL = 3.2; EXPRESSED IN PLACENTA, SIGNAL = 2.3; EXPRESSED IN BONE MARROW, SIGNAL = 2.4; NT HIT: AF012341.1, EVALUE 0.00e+00; EST_HUMAN HIT: AL543612.1, EVALUE 1.00e-119; SWISSPROT HIT: Q92947, EVALUE 2.00e-58
ccggctgagtaagaatcaccactgtgtgggctccacaggcacagggagccgcgtccccagcacggagcctgcctgacaaagccgcatccgcaggtgacccaacacccattcccaaagtggctgccacttacccccaggctggatgcaccagggagcacattctcctctggcacctccacaccgtccatgatgatcatgcctgtggctgaggcccgcagcgagaacttgccctggatcctgggggccgagagaccccgcatccccttctccagcaggaagccccgaatgcagccatcttcacaccgagcccacactacaaacagatcggccataggcgagttcgtgatcctggggatggaacagtcggtgaggggtctgaccagtgcccctttgcccctgttcaccacctgcccaccacccagaacccttaccaggtcttggtcccattgagggtgtagctcttgttggatgagttgtagtgggctctggtctccatgctgctggggtcacttccgctgttgggctctgtgagcccgaagcagcccaggagctcccccttggctgcaggcacaagacaaagtca

SEQ ID NO: 9395 - DNA, 501 bp, Homo sapiens
  MAP TO CHR5.3; EXPRESSED IN LUNG, SIGNAL = 4.1; EXPRESSED IN PLACENTA, SIGNAL = 1.8; EXPRESSED IN BONE MARROW, SIGNAL = 1.6; EXPRESSED IN FETAL LIVER, SIGNAL = 1.1; EXPRESSED IN ADULT LIVER, SIGNAL = 1.1; EXPRESSED IN BRAIN, SIGNAL = 1.5; NT HIT: gi14726895, EVALUE 0.00e+00; EST_HUMAN HIT: AA402380.1, EVALUE 0.00e+00; SWISSPROT HIT: Q92628, EVALUE 6.00e+00
cagactgtcctctgctgcactgacccctgcatggagtagcaccagaagaatggcaggagttagagaaatgtcttgacacaagggaaagtgagttcccacgctgtgggcctggggccatgggggtgagggaccaggaaagctacaggcatggaagcccaacctcttctgagacttggcagggagaggacacggggagacactgatatctgttacactttgacatcagcaccttgggctttcaaaacacaaatggtagacaaaatcgcctaggcaagactgaagtccaactcatagagtggctctgaccaagttaacccctacatcctgaccatacagagctcccgcagtggcactctgaccacggaagatctgcagaaatgtagacagacaataaattactacagatgggtcacagaaccatcctagctttgtggcaaaggtgggtggcactaagccagattgtggggatgaggagtggagggccaggaaattgccaaagta

SEQ ID NO: 9396 - DNA, 592 bp, Homo sapiens
  MAP TO CHR5.3; EXPRESSED IN BONE MARROW, SIGNAL = 1.3; EXPRESSED IN FETAL LIVER, SIGNAL = 1.6; EXPRESSED IN ADULT LIVER, SIGNAL = 1.5; EXPRESSED IN LUNG, SIGNAL = 1.7; EXPRESSED IN HEART, SIGNAL = 1.7; EXPRESSED IN PLACENTA, SIGNAL = 1.8; EST_HUMAN HIT: BE262635.1, EVALUE 0.00e+00; SWISSPROT HIT: Q9Y5H9, EVALUE 4.00e-79; NT HIT: gi14861872, EVALUE 0.00e+00
aaatacccagagcccctttgttacttcagagaagcggaggaataagagaagcagcaggactttaacagagactagaatatttaaatttttgcaaaacatgctcttctaatttgatcaaaacattgaggattggtaatggcgtcttctatcagaaggggccgaggggcctggacacggctgctctcgcttctgctcctcgcagcctgggaggtggggagcggccagctccgctactccgtccccgaggaggccaaacacggcaccttcgtgggccgcatcgcgcaggacctggggctggagctggaggagctggtgccgcgcctgttccgggtggcgtccaaaagacacggggaccttctggaggtaaatctgcagaatggcattttgtttgtgaattctcggatcgaccgggaggagctgtgcgggcggagcgcggaatgtagcatccacgtggaggtgatcgtggacaggccgctgcaggttttccatgtggaagtggaggtgaaggacattaacgacaacccgccaatatttccaatgacagtaaagactatccggtttcccgaatcaaggctgcttgattctcggtttc

SEQ ID NO: 9397 - DNA, 514 bp, Homo sapiens
  MAP TO CHR12.3; EXPRESSED IN FETAL LIVER, SIGNAL = 1.4; EXPRESSED IN BRAIN, SIGNAL = 0.77; EXPRESSED IN ADULT LIVER, SIGNAL = 1.5; EXPRESSED IN PLACENTA, SIGNAL = 0.83; EXPRESSED IN BONE MARROW, SIGNAL = 0.74; EST_HUMAN HIT: BI768698.1, EVALUE 1.00e-100; SWISSPROT HIT: P00973, EVALUE 3.00e-31; NT HIT: M11807.1, EVALUE 1.00e-112
cctgtaaagaggttgctgccatagttccggcgagtgacggtggtggcttggatggggtgatggcagtggagagggcaggagggaggatcaggaatggacctcaagacttcccagccctgggtctgctgcacttttcaatcaaaccccatggccagggagattgtcccctcagagtgactgaaggaaattcagagaagagctgacacctaagttgtagattttgcccgaacaggtcagttgactggcggctataaacctaacccccaaatctatgtcaagctcatcgaggagtgcaccgacctgcagaaagagggcgagttctccacctgcttcacagaactacagagagacttcctgaagcagcgccccaccaagctcaagagcctcatccgcctagtcaagcactggtaccaaaatgtatggccctcccaccaggcctggtgggtcctgtctcgactgggagcagaggaggggtggggggaggagagaaagaagggagtgaagggaagaggag

SEQ ID NO: 9398 - DNA, 513 bp, Homo sapiens
  MAP TO CHR11.3; EXPRESSED IN FETAL LIVER, SIGNAL = 1.9; EXPRESSED IN ADULT LIVER, SIGNAL = 1.4; EXPRESSED IN BONE MARROW, SIGNAL = 1.3; EXPRESSED IN PLACENTA, SIGNAL =   1; EXPRESSED IN LUNG, SIGNAL = 1.3; EXPRESSED IN HEART, SIGNAL = 1.7; EXPRESSED IN BRAIN, SIGNAL = 1.3; EST_HUMAN HIT: AV707065.1, EVALUE 0.00e+00; SWISSPROT HIT: O94966, EVALUE 7.20e-01; NT HIT: gi15308366, EVALUE 0.00e+00
atgggctactttccagcctcttcaagtataggacacaactatggttcctaccagtagggagaaatgaataatcaatcttacataacacaaaagaaagatgagaggcacaaaaagacaaactgactttggcttttaagaacctaatgttaaccctgaaatgccacattcagtaacacaacaacaaaacaaaagattacagcagcaagccaccacttcacacagtattaaaaattcggaaataatgtaatagccttccttccatctcccactcaatctgttgtggcatctttttgtttttcctgctttttagctgcaggcagttcaaggcttgcccactgcatcggttcagcttttctcatagtgatttcaatctttgttgcagtcatagttacataacttcgctttacatcaatcacctgtaacatatcaaagagaattacaggaaacctcagtagttttattagtctcagaggaaaacatcagacttgcttatgccaataatcccaaatccaa

SEQ ID NO: 9399 - DNA, 504 bp, Homo sapiens
  MAP TO CHR5.3; EXPRESSED IN ADULT LIVER, SIGNAL = 0.48; EXPRESSED IN BONE MARROW, SIGNAL = 0.72; EXPRESSED IN LUNG, SIGNAL = 0.9; EXPRESSED IN PLACENTA, SIGNAL = 0.96; EST_HUMAN HIT: R70093.1, EVALUE 9.00e-56; SWISSPROT HIT: P07686, EVALUE 2.00e-14; NT HIT: M23286.1, EVALUE 1.00e-130
tcctgaagatttcatttccccagatatttgtcttagccggtaaatgtaaatttcatacatttttgttgttctaaattaatattttatgaaatgcttgtataaatagatttagtcttcattgagttcaagacaacagaaaattctaaaactaaatcaaaattttattttgtcatagttcaccatcaatgaatccaccattattgattctccaaggttttctcacagaggaattttgattgatacatccagacattatctgccagttaagattattcttaaaactctggtaagtaattacttcattctaatctgttgtctattctgaagatgtctcctttatgttgtaactttatgttggttactattgtgtagtttggaacaggggaatttgtataagcactgggcattctttcctcagttcctagggaagtgtatttcctcagctgtgacgtggaggtccccttgagaatcaccctcctgttttcagtgcgagagccacgtata

SEQ ID NO: 9400 - DNA, 539 bp, Homo sapiens
  MAP TO CHR2.3; EXPRESSED IN LUNG, SIGNAL = 1.4; EXPRESSED IN HEART, SIGNAL = 1.2; EXPRESSED IN BRAIN, SIGNAL = 1.6; EXPRESSED IN FETAL LIVER, SIGNAL = 0.54; EXPRESSED IN ADULT LIVER, SIGNAL = 1.1; EXPRESSED IN BONE MARROW, SIGNAL = 1.2; NT HIT: gi10048403, EVALUE 0.00e+00; EST_HUMAN HIT: AW991247.1, EVALUE 2.00e-87
tgaatgaacaggcattcagccacttcagcacactttgcacattttagttaataagcaaaacaaaatgaatatactccacatcaaacactttgcagaactatatataagccacaggtaagaaaagaaaatacaaacctgcggcaaatccatcaaatattctgtttttccttaagattggatgactattagtgctgatgagaacacctgcttgagcattcctgaaaatatcattttcttcaaggagacctataataaaatatttccttagattaaggctaatgcatataacagactactaacctttttggtggtatttaggtttgcttttagtttcttatttaactgcatggtaaaattcacaggactattttttcagccaaaacaagtttattagcaattcagaggtattaaggatctaacaaaattgctacaatgacaggtaagagcattctgaccaataatctgccatctccatgatagcagggtccatgtctaagtttactcagcacttcatcttcagagccaggtgcataggtgat

SEQ ID NO: 9401 - DNA, 512 bp, Homo sapiens
  MAP TO CHR1.3; EXPRESSED IN LUNG, SIGNAL = 2.3; EXPRESSED IN HEART, SIGNAL = 3.4; EXPRESSED IN BONE MARROW, SIGNAL = 3.3; EXPRESSED IN PLACENTA, SIGNAL = 3.5; EXPRESSED IN FETAL LIVER, SIGNAL = 2.3; EXPRESSED IN ADULT LIVER, SIGNAL = 3.2; EXPRESSED IN BRAIN, SIGNAL = 2.3; NT HIT: AF217621.1, EVALUE 0.00e+00; SWISSPROT HIT: Q14774, EVALUE 1.00e-38; EST_HUMAN HIT: BI909283.1, EVALUE 0.00e+00
ctggtccttggtagagtcgccaagtaagcgttgctttttcactcagggaggtggcttgagggtgcacgcgagtcggataggagcaaacctgggtctcatctcggtgtctcttcttgtctcccggtgtggcgcggcgcaggtgaaggtgtggttccagaaccggcggatgaagtggcggcactccaaggaggcccaggcccaaaaggacaaggacaaggaggctggcgagaagccatcaggtggagccctggctgcggatggcgagcaggacgagaggagccccagccgttctgaaggcgaggctgagagcgagagcagcgactccgagtccctggacatggcccccagcgacacggagcggactgaggggagtgagcgttctctgcaccaaacaacagttattaaggccccggtcactggcgccctcattaccgccagcagtgctgggagtggtgggagcagcggcggcggcggcaatagtttcagcttcagcagcgccagcagtcttagta

SEQ ID NO: 9402 - DNA, 573 bp, Homo sapiens
  MAP TO CHR19.3; EXPRESSED IN HEART, SIGNAL = 1.4; EXPRESSED IN HELA, SIGNAL = 2.1; EXPRESSED IN PLACENTA, SIGNAL = 4.1; EXPRESSED IN BONE MARROW, SIGNAL = 1.4; EXPRESSED IN ADULT LIVER, SIGNAL = 1.5; SWISSPROT HIT: P55055, EVALUE 3.00e-29; NT HIT: gi14786960, EVALUE 5.00e-97; EST_HUMAN HIT: BG122383.1, EVALUE 7.00e-97
cttttctctgcaatagcgcctctagcctgatcctcaattttctcagcctcagaccctttttcctttctctccttggctcatagaagactctattcgccgtggaatgtcatcctacaacggcaagcactggtcttccttaactctgctcccagcatctgtcctggagctatctctggggttccttgtgggcagatggaccattacctcgatagtggatgccttcaggagggcgatctggtcctcccggcccagctgcaggaaaccaggcacttgcttagcgaagtccacgatctcctggactgagatgatggccagctccgtgaagtgggcaaagcgttgctggcgggcatctcgggactgggggtctgcgcccaggggccagggctgggacacaggagaccagggtcactcccaggtctttgtgagcctaagtctgggtggccaccttgaggccaagcctgcaccctgggggatcctcttcccaaagcccctgccctctggagcctcattctcccacaccctgggtgatggcccagctggctctaccccattgggaccgtcacactcaaggtt

SEQ ID NO: 9403 - DNA, 588 bp, Homo sapiens
  MAP TO CHR3.3; EXPRESSED IN BONE MARROW, SIGNAL = 1.1; EXPRESSED IN LUNG, SIGNAL = 0.89; EXPRESSED IN HEART, SIGNAL = 1.4; EXPRESSED IN FETAL LIVER, SIGNAL =   1; EXPRESSED IN ADULT LIVER, SIGNAL = 1.2; EST_HUMAN HIT: BG621468.1, EVALUE 1.00e-125; SWISSPROT HIT: P52742, EVALUE 2.00e-54; NT HIT: gi16159167, EVALUE 0.00e+00
ttacacccactgagcagcagataaggcatcaaactccagactaggacacattaggacacaacatttcttgttcaaaatacaaaatattcatactagctacagattgagtcttacattcctaggaatttaggagaaaaaaaaggtgcttccatacaaatcttcccatactcattatattccaaattttactctccagcatgaagcctctgatgtcgaagaagtgctgaactgtgcctaaaggatttcccacatccaacacactcataaggtttttctccagtatgaattctgtaatgctcactaaggtgtgcttgtttgcggaaagttttttcacactcactacacttataaagtttctctccagtgtgagtcctttcatgttcaacaagggaagagttctgagtgaaggctttaccacattcagtgcatgtgtagggcttctctcctgaatgaattctctgatgctgcatgagacatgcactctgattaaaggctttcccacattcattacacttaaaaggtttatctccagaatgacttctctgatgacgagtaaggcatatgctctgactgaaggctttgccacat

SEQ ID NO: 9404 - DNA, 529 bp, Homo sapiens
  MAP TO CHR2.3; EXPRESSED IN ADULT LIVER, SIGNAL = 0.83; EXPRESSED IN BRAIN, SIGNAL =   1; EXPRESSED IN BONE MARROW, SIGNAL = 0.77; EXPRESSED IN HEART, SIGNAL = 1.1; EXPRESSED IN PLACENTA, SIGNAL = 0.68; NT HIT: gi14729317, EVALUE 2.00e-99; EST_HUMAN HIT: AL046404.1, EVALUE 0.00e+00; SWISSPROT HIT: Q99726, EVALUE 2.00e-24
ttgttgctgtcccttatccctcctacttcctgagtcctgggcacccagctcccctatcccagccatccccatctctgcatctgcacccaggaacattcctgggactctgggtggagagtggcttgggcaggtatttggagaatggggtttaagggctgctccccaacttaccgaccacctccccagccatgaagacaaagcaaacggcacaggcagcatatagctgcctccgtgcatgcagcctctcaggggtaaggcccggcggcggaagggggtccctgtggcagtggtggaagggcatctccacaggtttggactcctcagggaggggctctgagggctctgtgaagagactgaggcaagcaacatggttcaacctgggcctggcccacaggctggcctgctcactccacgtccttagtccccagtgctggcctcatcagaccatctccttccccaggcctggtcgtatctgggagctgcatcggcagagggccacatgagagaccggggctaaatgaacaggtca

SEQ ID NO: 9405 - DNA, 590 bp, Homo sapiens
  MAP TO CHR2.3; EXPRESSED IN LUNG, SIGNAL = 1.1; EXPRESSED IN BONE MARROW, SIGNAL = 0.89; EXPRESSED IN FETAL LIVER, SIGNAL = 0.98; EXPRESSED IN BRAIN, SIGNAL = 1.2; EST_HUMAN HIT: AU138230.1, EVALUE 0.00e+00; SWISSPROT HIT: Q9JLV5, EVALUE 2.00e-26; NT HIT: gi4503164, EVALUE 4.00e-79
tccagcaaactctgaatgtccctgaacttgaacaaatgttagtgtagtctgtgttcttctccaaaacaatctacctttatttctagaaataaacacttaataatctaccaaattaatttccaatcacgttgtcagtacacaatcataataaacctcagttaggtgcactctatttcatctaaaacacaccttacctttaacttagatatcatgtttttttcagagtcatcagaaacacttttatttgtgagaagtctccttgccaagtgttgtttataataacgttcaaatacatctttttcttgcataaacctaaaaaggaccattgctttatccaatattgtttctacttcttgttctgttagctgcaaaattaagatgatgtaacaattatacaattttagttctacaaaagcagtactacggttcatttacagcttaaaaacactattgtttgaaaacatagatatctggttgacatacatcaaaaaaagggatacggtttgagaaagtgtctcctacttcacacagtagcatcattcttacattctcatttagtgcatcatgaatgaggggttggagtggaattc

SEQ ID NO: 9406 - DNA, 560 bp, Homo sapiens
  MAP TO CHR20.3; EXPRESSED IN HEART, SIGNAL = 0.88; EXPRESSED IN BONE MARROW, SIGNAL = 0.87; EXPRESSED IN FETAL LIVER, SIGNAL = 0.77; EXPRESSED IN LUNG, SIGNAL = 0.84; EXPRESSED IN PLACENTA, SIGNAL = 1.1; NT HIT: gi7657553, EVALUE 0.00e+00; EST_HUMAN HIT: BG771600.1, EVALUE 0.00e+00; SWISSPROT HIT: Q9UK85, EVALUE 1.00e-72
tctatccacgatgctcatgcccaagagagctccttgggtcttacaggcctccagagcctactccaaggcttcagccgacttttcctgaaagatgacctgcttcggggcatagacagcttcttctctgcccccatggacttccggggcctccctaggaactaccaacaagaggagaacgaggagcaccagctgaggaacaacaccctctccagccacctccatattgacaaggtgaccgacaataagacaggagaggtgctgatctccgagaaggtggtggcatccatccagccggcggaggggagcttcgagggtaactggaaggtacccaggatggagtaggcggcggccctggtgtccatccggaaggctatggacaacttccatgcagagctccatccccgggtggccttctggatcatgaagctgccacggtggaggtcccaccacaatgtcctggagggcggccgctggctcagtgagaagcgacaccgcctgcaggccatccaggatgggctccacgaggggacccgcgaggacgtcctaaaagaggggaccca

SEQ ID NO: 9407 - DNA, 539 bp, Homo sapiens
  MAP TO CHR1.3; EXPRESSED IN BONE MARROW, SIGNAL = 0.94; EXPRESSED IN FETAL LIVER, SIGNAL = 0.64; EXPRESSED IN BRAIN, SIGNAL = 0.67; EXPRESSED IN ADULT LIVER, SIGNAL = 0.67; EXPRESSED IN LUNG, SIGNAL = 0.76; EXPRESSED IN HEART, SIGNAL = 0.85; EXPRESSED IN PLACENTA, SIGNAL = 0.7; NT HIT: M37922.1, EVALUE 0.00e+00; SWISSPROT HIT: P23109, EVALUE 3.00e-29; EST_HUMAN HIT: BF575179.1, EVALUE 6.00e-97
gctagtcctacaacagcccggtctcatctttaggaccatctttaggactgttctgaaatgtgctatgagaatctgacccatgtttctgagagcatattttcaaggtacccacacagaaacccactaaaaggagagcaggcactgagctctgtgttggaccctggttggaaagcaggagagccatgcacgcagcacagtccttgtcccatgccttacacatagcagaaactctcagctgacttttgaaaaggggcttgaacactaatatgtgaaaacctcttttagaaattgatgatgcaatgcgcaactttgctgaaaaagtgtttgcctctgaagtcaaagatgaaggaggtcgtcaggagatttccccctttgatgtggatgagatctgtccgatttctcatcatgagatgcaagcacacatattccatctggagactctgtccacctccacagaagccaggaggtaagtggtgtaaggggagtgcttagtatattggcacctaaggaggggtatctgccagggaagatatggttca

SEQ ID NO: 9408 - DNA, 544 bp, Homo sapiens
  MAP TO CHR21.3; EXPRESSED IN BONE MARROW, SIGNAL = 0.87; EXPRESSED IN ADULT LIVER, SIGNAL = 0.9; EXPRESSED IN BRAIN, SIGNAL = 1.1; SWISSPROT HIT: P56182, EVALUE 2.00e-12; EST_HUMAN HIT: BI223794.1, EVALUE 9.00e-50; NT HIT: U79775.1, EVALUE 6.00e-50
gctgaccttgcctctgtgacgtctctcttttgaaacagtttgactacgaggcagttgctaacagactgtttgaaatggccagccgccagagcaccccttctcagaacagaaagcgtctctacaaagtgatccggaagtgagtgtgtgagggcgctgcgtcctccctgctccccttggagttgccctttcttgctcagatctgggtgcctttgccttgtcctgggcccttccgcagcccccggggtgatccccgctaggaccctgagaccgtccccagcccctggggttcccctggctaggaacctgcagccgctctagctggagcttcctcctcctgcggaagccgcagctgtggtaagtgggtatctgtcttactctttcaggctgcaggacctggcaggaggtgaggatcggccgggcactgacaatggcaccaccttggaggtggagctccatcctcgtgggagtggtttggttctaggggtctcatagcacgtggagtctctttgcagagaggcctggtggtgtttctgagggacaggga

SEQ ID NO: 9409 - DNA, 540 bp, Homo sapiens
  MAP TO CHR9.3; EXPRESSED IN BONE MARROW, SIGNAL = 0.68; EXPRESSED IN LUNG, SIGNAL = 0.56; EXPRESSED IN BRAIN, SIGNAL = 0.74; EXPRESSED IN ADULT LIVER, SIGNAL = 1.1; EST_HUMAN HIT: W44326.1, EVALUE 7.60e-01; SWISSPROT HIT: P01562, EVALUE 4.00e-82; NT HIT: gi13128949, EVALUE 0.00e+00
gcaagcccagaagtatctgcaatatctacgatggcctcgccctttgctttactgatggtcctggtggtgctcagctgcaagtcaagctgctctctgggctgtgatctccctgagacccacagcctggataacaggaggaccttgatgctcctggcacaaatgagcagaatctctccttcctcctgtctgatggacagacatgactttggatttccccaggaggagtttgatggcaaccagttccagaaggctccagccatctctgtcctccatgagctgatccagcagatcttcaacctctttaccacaaaagattcatctgctgcttgggatgaggacctcctagacaaattctgcaccgaactctaccagcagctgaatgacttggaagcctgtgtgatgcaggaggagagggtgggagaaactcccctgatgaatgcggactccatcttggctgtgaagaaatacttccgaagaatcactctctatctgacagagaagaaatacagcccttgtgcctgggaggttgtcagagcagaa

SEQ ID NO: 9410 - DNA, 507 bp, Homo sapiens
  MAP TO CHR12.3; EXPRESSED IN BONE MARROW, SIGNAL =   1; EXPRESSED IN PLACENTA, SIGNAL = 0.81; EST_HUMAN HIT: BI042645.1, EVALUE 0.00e+00; SWISSPROT HIT: P08392, EVALUE 1.10e-01; NT HIT: gi6754411, EVALUE 1.00e-69
tagccctagcaaacgtccagtgctttctcaagctagaggtctgtgttcttcggtgtctgtaggtccgtcccatctgaatgcttctgattttctacccccgtatcactttctatttctctgcagcgtgcatcgatcgccctggtgggagcttagaaggcggcaggcgaagaggggtaggaggggggagagccgaggagaagcagagagggtggcaggcgtggggatctgccgagccggcactgcaccgggtcctaggaaggctctcggaggggaggggaggccagggcgacccccgaagcaatggcccagtccgctagaacggcactgcgttaaggcacctgggatcaggaagaaatatctaaacaacaacaacagaaaaccaacaaacccccaaacccaaacccaaccctctgcaaaaagctgcacccggcccgcaggcgagggggattccaaactgagtgaaaggcagggtggaggggaaggcagcgagaggcaaagtcgcagatc

SEQ ID NO: 9411 - DNA, 536 bp, Homo sapiens
  MAP TO CHR22.3; EXPRESSED IN BONE MARROW, SIGNAL = 0.94; EXPRESSED IN HEART, SIGNAL = 0.94; EXPRESSED IN HELA, SIGNAL =   5; EXPRESSED IN ADULT LIVER, SIGNAL = 0.69; EXPRESSED IN BRAIN, SIGNAL = 0.63; EST_HUMAN HIT: BI086963.1, EVALUE 2.00e-93; SWISSPROT HIT: P33992, EVALUE 1.00e-27; NT HIT: gi11418030, EVALUE 2.00e-93
cttaaccaacaagcttcccgatggctctattacagtcggacatgatgtcacacctggtgaagatccctggcatcatcatcgcggcctctgcggtccgtgccaaggccacccgcatctctatccagtgccgcagctgccgcaacaccctcaccaacattgccatgcgccctggcctcgagggctatgccctgcccaggaagtgcaacacgtgagtctgtggcccagagggactgtgggaggtgacctgagtgaagatcagaaaggatgagaacaagtagcaagcactgcctgcagctgcttctagagatccactgggatgggctgggcaggggtgtgcccttaggattggcacagatctgatgccctgtggctctgagacaccatgaacagggtccctctacattggtgacttctgtctcaccaggatacccagacagcgttgtagggaacccagggttgggagggaaaagcagtccagggtaatgagtctacttggaatcttctgaagcaaactatggtttgctcactaggccaga

SEQ ID NO: 9412 - DNA, 502 bp, Homo sapiens
  MAP TO CHR18.3; EXPRESSED IN LUNG, SIGNAL = 0.94; EXPRESSED IN ADULT LIVER, SIGNAL = 0.94; EXPRESSED IN BONE MARROW, SIGNAL = 0.98; EXPRESSED IN HEART, SIGNAL = 0.99; EXPRESSED IN PLACENTA, SIGNAL = 1.1; EST_HUMAN HIT: AU119647.1, EVALUE 0.00e+00; SWISSPROT HIT: P16241, EVALUE 7.00e-01; NT HIT: gi16178137, EVALUE 0.00e+00
ggtccagaaaaggtgacgagtgttgtgccttttaaaagacaaaggaatgaaagcagaacagagggacctattgtcaaggacgaggctcttcagattttagcattagatcctaaaaaatatgaaggccgttcttatgaagaaaagaagcaatttcttaaagattatttccataagaaaccatatcctagtaaaaaggaaatagaactgttgtcctcactcttttgggtgtggaaaattgatgtggcttcattttttggaaaaagaaggtatatttgcatgaaagcaataaaaaatcacaagccttctgtacttttaggctttgatatgtctgaacttaaaaatgtgaaacatagattgaactttgaatatgaaccataaaacttgcaaaaaaaaaaaaaagtaactctaaagtagtaggtagatttttttcagttgaaatttcacagtgttgtcctcactgtgttggtgaatcaacctcagtggtcactgtgctgctctgcag

SEQ ID NO: 9413 - DNA, 584 bp, Homo sapiens
  MAP TO CHR19.3; EXPRESSED IN LUNG, SIGNAL = 1.1; EXPRESSED IN ADULT LIVER, SIGNAL = 3.8; EXPRESSED IN BRAIN, SIGNAL = 3.2; EXPRESSED IN FETAL LIVER, SIGNAL = 2.3; EXPRESSED IN BONE MARROW, SIGNAL = 3.6; EXPRESSED IN HEART, SIGNAL =   4; EXPRESSED IN PLACENTA, SIGNAL = 2.5; SWISSPROT HIT: Q9UPV9, EVALUE 5.70e+00; EST_HUMAN HIT: AU160174.1, EVALUE 0.00e+00; NT HIT: gi7657477, EVALUE 0.00e+00
agaccaacatccgctactcgccgctgaccacgctcaaaaccgtggattcctctggcagcctgtatgtgcgaacgacccaccgcctcctcttccgctgtccacgcctcctcaaccttggccttcaatgtctgtcctgcggctgcctcccaacgcgggtgcggccaagatgagcagaacagagcttcacgatccccatccctgaacaaccagacctcttcattccacatctaattcaaaggatgaacagactcttcatttattcattctgcaaactccccctcccctcctctgtgcctagacatggctagaatcccagaagggcctttattttcaggcatagactcctctgtggtcacagctggagcacagagagggaccctgggaacttggcctgggaagcccagagcaggaagccacagctgtctctgggaaagcaagggaggcttcctggaggaagcggcattgttatgagccttgaaggaagagacagactctgctacattcaacctcgtgacttcatgatcctgggcctgagaacacaggaatgattcatagcccaccccccacctccatgcatacaccag

SEQ ID NO: 9414 - DNA, 567 bp, Homo sapiens
  MAP TO CHR6.3; EXPRESSED IN LUNG, SIGNAL = 0.88; EXPRESSED IN HEART, SIGNAL = 1.8; EXPRESSED IN ADULT LIVER, SIGNAL = 1.4; EXPRESSED IN BONE MARROW, SIGNAL = 1.5; SWISSPROT HIT: O15540, EVALUE 2.00e-27; EST_HUMAN HIT: BG706848.1, EVALUE 6.00e-94; NT HIT: U81235.1, EVALUE 4.00e-94
tttattcccctctccccatccccactctgaagaagaagcagtttctcaccttacagtttctatcatctgcagtggtttcatcaaactcttctcccagctggaaactaatctccgtgttcttgaatgtgctgagagtcctgatgaccactttgtctccttcttgactgataattaccgttggtttggtcacatttcccacctgcctagtggcaaagcccacgcctaaaatagcaaagggaacagtacagtctgcagcgacttccaaaataactcacaaagcaagaatctgctttctgattctggaatccacgttctaaagtgtaagtttcattagaacatgattagcccattaatcatgtaaaacactactgtgataataagtggatgcagaagaaaaccaaaaaagtcagagaagcttcatattctccacggaatagcaaatgttctgtttttattggccctgggtaagaaggcaagcaagtgccacattaaaaatccattcagtggaaaatgcatagcctagcatctgatcagggcaatgtgatctgtctttgcctcttgctgacc

SEQ ID NO: 9415 - DNA, 548 bp, Homo sapiens
  MAP TO CHR22.3; EXPRESSED IN LUNG, SIGNAL = 3.8; EXPRESSED IN HEART, SIGNAL = 6.8; EXPRESSED IN PLACENTA, SIGNAL = 4.8; EXPRESSED IN BONE MARROW, SIGNAL = 6.1; EXPRESSED IN BRAIN, SIGNAL = 6.6; NT HIT: X58467.1, EVALUE 0.00e+00; SWISSPROT HIT: P10635, EVALUE 4.00e-23; EST_HUMAN HIT: AV657559.1, EVALUE 0.00e+00
tgatacccctgcaagactccacggaaggggacagggagccgggctccccacaggcacctgctgagaaaggcaggaaggcctccggcttcacaaagtggccctgggcatccaggaagtgttcggggtggaagcggaagggcttcttccagacggcctcatccttcagcaccgatgacaggttggtgatgagtgtcgttccctgggcaggagatgcagggtgagagtggggactggactctaggatgctgggacccctgccaccaaacacacgggggacacacactgcctggcacacagctggactctgtcaactagtcctgcgcccgagaagctccacagtaccctctccgaccccacagcagggcgcagtcacacctctcagaggcacccacactgccccctctccctgcaggcgctgggtcctccaacattctggcaggtcctgatttgtcttccccactagactggggctctggatggacaggccagccctgcctatactctggaccccccatccaagcggggacagtcagtgtggtggcattgag

SEQ ID NO: 9416 - DNA, 550 bp, Homo sapiens
  MAP TO CHR2.3; EXPRESSED IN LUNG, SIGNAL = 3.5; EXPRESSED IN HELA, SIGNAL = 4.2; EXPRESSED IN BONE MARROW, SIGNAL = 3.4; EXPRESSED IN HEART, SIGNAL = 2.5; EXPRESSED IN PLACENTA, SIGNAL = 3.3; EXPRESSED IN ADULT LIVER, SIGNAL = 2.4; EXPRESSED IN BRAIN, SIGNAL = 3.2; NT HIT: D82356.1, EVALUE 0.00e+00; SWISSPROT HIT: P29558, EVALUE 2.00e-18; EST_HUMAN HIT: AW809992.1, EVALUE 3.00e-59
ttcagaagtgtgcagccaagtcaagatgcctttttgtgttacttttcatgtgggcattcaagatcacaccccctcccccaccccgcaaagtttcaagaaaggacttacaagtctcacctctccttctctatgccatggtcttccattagggatgtatttgtttgggttctgtctctttttctgtcctccatcagcaaacttacacaataaaggttctgtgggggctaagtaaacagagaaaaataaaatgaaaccacaatgatacgtgtatgtggatgacaaaatgtattacaaaaataggaatagtgttcacgctattagaaaattcatacaacactttaaggcaaaagcagtttactcagacctttgtaaaactgtccacgatgaaaaacatagtgcagaaaaacatactagttattatttctgaacatttaaataactattctgaggaagcaaaggaatctttcgattcactttcacacttaagagtagacacatttcttttggttttgggccctctccaattccacctctggaccgtcaccaaaat

SEQ ID NO: 9417 - DNA, 585 bp, Homo sapiens
  MAP TO CHR16.3; EXPRESSED IN BONE MARROW, SIGNAL = 1.8; EXPRESSED IN FETAL LIVER, SIGNAL = 2.7; EXPRESSED IN BRAIN, SIGNAL = 2.3; EXPRESSED IN ADULT LIVER, SIGNAL = 2.5; EXPRESSED IN PLACENTA, SIGNAL = 2.2; NT HIT: gi16166386, EVALUE 0.00e+00; SWISSPROT HIT: O60437, EVALUE 6.00e-87; EST_HUMAN HIT: BG679708.1, EVALUE 0.00e+00
atcggaaatcaacatggcagcgacggaaacacgagacctgcggaacatgaccgtggcggactctgggaccaaccatgactccagactgtggtccctggagagggaactggatgacctcaagaggctctccaaggacaaagacctcgagatcgacgagctgcagaagcgcctgggctccgtggccgtcaagcgggagcagcgggagaaccacctgcggcgctccatcgtagtcatccaccctgacacaggccgcgagctgtccccggaggaagcccaccgtgccgggctcattgactggaacatgttcgtgaaactcagaagccaggagtgcgactgggaggagatctcagtgaagggtcccaatggggagtcctcagtgatacacgacaggaagtctggcaagaagttctccatcgaagaggccctgcagagtggcaggctgacccctgctcagtatgaccgctatgtcaacaaggatatgtccatccaggagctggcggtcttggtatctgggcagaagtaggcacagctcttgcaactcttcgtaacggcagacgctggccctctcctacgacgcagtgacct

SEQ ID NO: 9418 - DNA, 549 bp, Homo sapiens
  MAP TO CHR19.3; EXPRESSED IN BRAIN, SIGNAL = 4.5; EXPRESSED IN PLACENTA, SIGNAL = 3.7; EXPRESSED IN HEART, SIGNAL = 4.4; EXPRESSED IN BONE MARROW, SIGNAL = 4.1; SWISSPROT HIT: Q07886, EVALUE 1.00e-05; EST_HUMAN HIT: AW250528.1, EVALUE 1.00e-73; NT HIT: gi14766934, EVALUE 3.00e-73
cttcttctgggaagcacaggccccgtgagtccacagcccagacagcgtggggagggcagccccatcctacagacagggacactgaggcgtggcggtctatctgtccatccccagggtgagcaccgtggagcagctggaccagcgctacctgctggtgcctgagaaggtcaaggacgcctacctggtccacctgatccagcgcttccaggatgagcacgaggactggtccattatcatcttcaccaacacgtgcaagtgagcggggcccgcctctcccctcccaccgcccttcaaaggaggaggtggcccgacgtctttggtctgggacacacagccagtctcagcactccccagcctctgctcagcctggaggtcatgggggcttccctcaaggagccaaggtccctcaatctgaaggtgcagccggcctttggggttcctcagcccagccgttgatggaagggccaggaaacccctgcaagcagctgtttgagcagcccatttgctgtgttctgggggtgtcactgagctttcctgggcctttagtcc

SEQ ID NO: 9419 - DNA, 597 bp, Homo sapiens
  MAP TO CHR14.3; EXPRESSED IN BONE MARROW, SIGNAL = 1.4; EXPRESSED IN HEART, SIGNAL = 1.5; EXPRESSED IN PLACENTA, SIGNAL = 1.4; EXPRESSED IN BRAIN, SIGNAL = 1.1; EXPRESSED IN ADULT LIVER, SIGNAL = 1.8; SWISSPROT HIT: P10144, EVALUE 8.00e-23; EST_HUMAN HIT: AI569402.1, EVALUE 0.00e+00; NT HIT: M38193.1, EVALUE 0.00e+00
tgtctcctgatggtgctcagcttcagccttggcagaagggcaggccctggagaaactggtgtggataggaaggagctgagtatcagcttcatgtgggggtttggggaggtggcaaggggtgaggggagaggagaaagcagaaaacagcaaaattgtgtcattggcctgcatagcgcagatgtggtgcctgagaatgagggtcaatgaataaacaagaaaccagcttttccactcagctaagaggtatttattcagttgctggcacctctcccagtgtaaatctggacttggctccagagaaggtgtttcattacagcgggggcttagtttgcttcctgtagttagtagcgtttcatggttttctttatccagtgtacaaagcttgagactttggtgcaggctcgtggaggcatgccattgtttcgtccataggagacaatgccctgggccaccttgttacacacaagagggcctccagagtccccctgtgaatagagagtggaaggactgagctgatgctcctccgggtcctgccctctcttccatctcaagcccccttttagaaaaggccaacttgcacagcctacatgtgggaga

SEQ ID NO: 9420 - DNA, 514 bp, Homo sapiens
  MAP TO CHR19.3; EXPRESSED IN BONE MARROW, SIGNAL = 2.6; EXPRESSED IN HEART, SIGNAL = 1.7; EXPRESSED IN PLACENTA, SIGNAL = 1.9; EXPRESSED IN ADULT LIVER, SIGNAL = 1.8; EXPRESSED IN BRAIN, SIGNAL = 4.6; SWISSPROT HIT: Q08493, EVALUE 6.00e-32; EST_HUMAN HIT: AW878487.1, EVALUE 9.00e-96; NT HIT: AF157816.1, EVALUE 0.00e+00
agggctgaatgtacgtgtcccccagactggaagcccctccagggtcccgcatgtcacctagaacagatgtttccaaaccccagaagtgcatgtccctctccctgaagcccagagagaatggatcccaggtctaactcggcccagacagcacccttcaggcacactccctggctagccagccagggccaaaccagggctcgtggggttggctcagcccctccttttacttcctcccagtgtctaccggttcagcccagtcccctgccaacctgggacttctccactgaggccgtatgcttgtcacacatgggactgatgtccaggcccgactcacgctcgcggtctccctgctggaagaactcggccatgatgcggtccgtccactggcggtacaggggcagcggcttggtggggttgctcagatcagcacagtgcaccaggttctgcaagacctacagagatcgaggcttgggagggcactggcggggcccagccacacctagacctggcacct

SEQ ID NO: 9421 - DNA, 518 bp, Homo sapiens
  MAP TO CHR21.3; EXPRESSED IN ADULT LIVER, SIGNAL = 2.1; EXPRESSED IN FETAL LIVER, SIGNAL = 2.6; EXPRESSED IN BONE MARROW, SIGNAL =   2; EXPRESSED IN LUNG, SIGNAL = 4.7; SWISSPROT HIT: P20591, EVALUE 4.00e-21; EST_HUMAN HIT: AL576770.1, EVALUE 0.00e+00; NT HIT: AF135187.1, EVALUE 0.00e+00
tcccgtgaactgttctttccttccaggaggccagcaagcgcatctccagccacatccctttgatcatccagttcttcatgctccagacgtacggccagcagcttcagaaggccatgctgcagctcctgcaggacaaggacacctacagctggctcctgaaggagcggagcgacaccagcgacaagcggaagttcctgaaggagcggcttgcacggctgacgcaggctcggcgccggcttgcccagttccccggttaaccacactctgtccagccccgtagacgtgcacgcacactgtctgcccccgttcccgggtagccactggactgacgacttgagtgctcagtagtcagactggatagtccgtctctgcttatccgttagccgtggtgatttagcaggaagctgtgagagcagtttggtttctagcatgaagacagagccccaccctcagatgcacatgagctggcgggattgaaggatgctgtcttcgtactgggaaagggattttcagccctc

SEQ ID NO: 9422 - DNA, 582 bp, Homo sapiens
  MAP TO CHR9.3; EXPRESSED IN ADULT LIVER, SIGNAL =   2; EXPRESSED IN PLACENTA, SIGNAL = 1.9; EXPRESSED IN LUNG, SIGNAL = 1.9; EXPRESSED IN HEART, SIGNAL = 2.6; EXPRESSED IN BONE MARROW, SIGNAL = 2.1; EXPRESSED IN BRAIN, SIGNAL = 1.6; SWISSPROT HIT: O15287, EVALUE 4.00e-15; EST_HUMAN HIT: BE257635.1, EVALUE 2.00e-81; NT HIT: U70310.1, EVALUE 2.00e-81
cagaatggactggggaagagacttcagagtgtcaaagatagagaaggttaatgtcttagagaagagtcctcagttcaggtctagaagcaaggtaagaggctgaggagtggcgacctatgtcctgccactgcctcattcatcccccaagtcacaagaacaaaagcagagtcacaccccaggggaggcatcagaagtgggaagagaagctcaggtgagcaaggggaacctcacctccccgtctgtaggcacctgcttgctagtatgtgcttggtctggctctgagtgccacaatgaaggggtgaggctaggtcaggtggtggcagtagtaattctacctcaatgagaaactgcggggctttggaactgcatgggacattcaaggcctaaaagagaaagaaaaaaattgtatctataatctttgggagccatacttccttatacttggatcttgactagtcaagtcaccccatcacaagcacctcaggaatcctccaccccacatcttcacctggcagttccctacctcaactagcagctccagactctccagctctgctgttgtgtcccccagttgctgataga

SEQ ID NO: 9423 - DNA, 598 bp, Homo sapiens
  MAP TO CHR6.3; EXPRESSED IN BONE MARROW, SIGNAL = 1.9; EXPRESSED IN HELA, SIGNAL = 2.9; EXPRESSED IN FETAL LIVER, SIGNAL =  17; SWISSPROT HIT: P04179, EVALUE 1.00e-24; EST_HUMAN HIT: BG567022.1, EVALUE 0.00e+00; NT HIT: S77127.1, EVALUE 0.00e+00
tagaaagccgagtgtttcccttgggaaagtgttaatattttatttttaagtaactggggcaaaagactagattttctataactgcaatagaataggactagaaaggcatccctacaagtccccaaagtatatggatggaatatttttgatggttttataaatgacaattgtaatttagctctctgaagaaaatgtccaatcagattcaatcacacaaagcatttactattttcaatcacttgcccaataacaaaatgtttagtaagaaattattcagaacattaagttgtttatgaaataagtgactaagcaacatcaagaaatgctacaatagagcagcttactgtattctgcagtactctataccactacaaaaacagtcataaagagcttaacatactcagcataacgatcgtggtttactttttgcaagccatgtatctttcagttacattctcccagttgattacattccaaatagcttttagataatcaggcctgacatttttatactgaaggtagtaagcgtgctcccacacatcaatccccagcagtggaataaggcctgttagaaagaaggggaaaacaaaccaaccat

SEQ ID NO: 9424 - DNA, 555 bp, Homo sapiens
  MAP TO CHR17.3; EXPRESSED IN BONE MARROW, SIGNAL = 1.8; EXPRESSED IN HEART, SIGNAL =   2; EXPRESSED IN ADULT LIVER, SIGNAL = 4.5; SWISSPROT HIT: P02533, EVALUE 1.00e-36; EST_HUMAN HIT: AL570908.1, EVALUE 0.00e+00; NT HIT: J00124.1, EVALUE 0.00e+00
gacctgcttggggtacagagggtggcctggagcccaggcctgcagaggaggagggtcttaccatctctggatgactgcgatccagaggagaactgggaggaggagaggctgtgaaaatagaaaaggacaggatcattagatacatggtggggccgtgagagtgccatggggggggcggactaaggggagggccaagactcactgggcgtcctcgccctccagcaggcggcggtaggtggcgatctcctgctccagccgcgtcttcacgtccagcaggatcttgtactcctggttctgctgctccatctcgcagcggagctgggccagctgctcctccacgctgccaatcatctcctggatctgggccagctgcatgcagtagcgacctttggtctcctccaggctgttctccagggatgctttctgtgagggagggaaagggaatcaacgattagtgagtgtggccgttctctccctgccagtcctgggtgcaccacccttcctggcactattcctaccatgctgagctgggactgcagctcaatctccaggttc

SEQ ID NO: 9425 - DNA, 507 bp, Homo sapiens
  MAP TO CHR1.3; EXPRESSED IN LUNG, SIGNAL = 2.3; EXPRESSED IN HEART, SIGNAL = 3.7; EXPRESSED IN BONE MARROW, SIGNAL = 2.3; EXPRESSED IN ADULT LIVER, SIGNAL = 2.8; NT HIT: gi11427606, EVALUE 1.00e-108; SWISSPROT HIT: Q9WTL2, EVALUE 2.00e-30; EST_HUMAN HIT: BE745389.1, EVALUE 1.00e-107
ctcacaggagactccgttccctaatcttttttctgagctcagttccctttttctgctgggcagaccctccaagctcaggtggggttggagctgctctaccccatgctcagcccttatctctccactccttcagtggtgctgatcggcgaatcaggtgtggggaagaccaatctactctcccgattcacgcgcaatgagttcagccacgacagccgcaccaccatcggggttgagttctccacccgcactgtgatgttgggcaccgctgctgtcaaggctcagatctgggacacagctggcctggagcggtaccgagccatcacctcggcgtgagcccgggcctggggggctgctgggtggtgggagttctggggaagtcgaggaacacttctggaggagaagtgggggaggaggaggcaagggggctcagcagtgggctctggggggtggggatggagatcacagaagataaaaggtactgtaaacagaaacagcacaagccaggat

SEQ ID NO: 9426 - DNA, 594 bp, Homo sapiens
  MAP TO CHR20.3; EXPRESSED IN LUNG, SIGNAL = 3.3; EXPRESSED IN PLACENTA, SIGNAL = 3.7; EXPRESSED IN HEART, SIGNAL = 4.3; EXPRESSED IN BONE MARROW, SIGNAL = 4.4; EXPRESSED IN FETAL LIVER, SIGNAL = 3.4; EXPRESSED IN BRAIN, SIGNAL =   5; EXPRESSED IN ADULT LIVER, SIGNAL = 3.9; SWISSPROT HIT: O88943, EVALUE 1.00e-11; EST_HUMAN HIT: BE703020.1, EVALUE 1.00e-123; NT HIT: gi14769905, EVALUE 3.00e-46
cttcacatcctcgctccttccacagattcctgcagagggtgagcgctgtggcccatccacagacagggcaatgccaaagccccagcggcctccactcctcaacaaggtgggaccaggacaagggctgtgctggtccccgggggacacctggactcacctggatcaggcctgctgccgggttccgcctcttctcaaagtgcttctgcctgtgctgctcctgaaccttcagggcaaacccagaccccaagatgccctgcaattcatcagggtcaggtcacaccccagggaccccccacaccccaattcatcagggtcagaccatgctctggggccccacaccccccccaattcatcagggtcagaccacactccagagactcacacaccccccaattcatcagggtcagaccacgccccagggactcacacaccccccagttcatcagggtcagacccgtctccaccgatccatgcctcccccaccttcatcaaggtcagactaatccaggaacccatatccccacaatttgtcagcatcaagaggaaggaaccctctggcttgcaggagacatggcaggacccacactgaactca

SEQ ID NO: 9427 - DNA, 511 bp, Homo sapiens
  MAP TO CHR17.3; EXPRESSED IN FETAL LIVER, SIGNAL = 2.4; EXPRESSED IN HEART, SIGNAL = 3.7; EXPRESSED IN PLACENTA, SIGNAL = 1.9; EXPRESSED IN LUNG, SIGNAL = 1.9; EXPRESSED IN BONE MARROW, SIGNAL = 1.5; SWISSPROT HIT: Q9JK42, EVALUE 5.00e-30; EST_HUMAN HIT: AI870615.1, EVALUE 0.00e+00; NT HIT: gi14773211, EVALUE 2.00e-99
tggggaggatgagaactctgggctttcgagtgggaagcctgccggcaggcagctaaaagatcagagtgggctttgggaggagcagggagggcactgggagtccatcggattgggaagggtagagcgggtgaagacaccgtggagaggggagtcagaagcggagaagagtctgggggtgtcccatgtgaacatctgccctgccccacaggttcactgacgccctggtcaccatccggaaccggcacaacgacgtggtgcccaccatggcacaaggcgtgcttgagtacaaggacacctacggcgatgaccccgtctccaaccagaacatccagtacttcctggaccgcttctacctcagccgcatctccatccgcatgctcatcaaccagcacagtgggtgccggccacagcggcggggagcgggcggtggggggggcggtgctggggcccagggccgggctgctgaggggacctagaccactcttcagaaccccacaaagggagtctttga

SEQ ID NO: 9428 - DNA, 591 bp, Homo sapiens
  MAP TO CHR12.3; EXPRESSED IN FETAL LIVER, SIGNAL = 0.92; EXPRESSED IN BRAIN, SIGNAL = 1.4; EXPRESSED IN ADULT LIVER, SIGNAL = 1.2; EXPRESSED IN BONE MARROW, SIGNAL = 1.2; EXPRESSED IN HEART, SIGNAL = 1.3; EXPRESSED IN PLACENTA, SIGNAL = 2.1; SWISSPROT HIT: P46942, EVALUE 1.00e-11; EST_HUMAN HIT: BG677099.1, EVALUE 7.00e-94; NT HIT: gi15304108, EVALUE 5.00e-94
tcctgtcactggtgcttgaggggaggggtgtgtccctgtcactcagctctccaacttccttaaacttcttgatccctgctttctaccctgatctcgcccctaattctctttgaggacttttcatctgtctggctccaccgctctcccagctgttttgcctttgaccttactctgtgtgtccctgccacaccacacctttttctctcatccctctcttcagctcacttgttctctccttctttcactgcaatcattctcttgtttcctttcctttctcgtactctgctgctctctccaaccctcccttcatctgtgtcccattcctctgaactcctgtgtctctccttgattgcattgctcactcttcacttcaccattcttccaacagtacaatgcttgcacactgcacggtggaaaaggccaggagcagcgagagtttgcgttgtccaacctcaaggctggggccaaggatattttggtggctacagatgtggctggtcgtggtattgacatccaagatgtgtctatggttgtcaactatgatatggccaaaaatattgaaggtaagttccagggaaagcagcttcaatc

SEQ ID NO: 9429 - DNA, 554 bp, Homo sapiens
  MAP TO CHR1.3; EXPRESSED IN FETAL LIVER, SIGNAL = 3.7; EXPRESSED IN ADULT LIVER, SIGNAL =   3; EXPRESSED IN BRAIN, SIGNAL = 3.4; EXPRESSED IN LUNG, SIGNAL = 3.6; EXPRESSED IN HEART, SIGNAL = 3.2; EXPRESSED IN HELA, SIGNAL = 8.2; EXPRESSED IN BONE MARROW, SIGNAL =   3; NT HIT: gi14724833, EVALUE 0.00e+00; SWISSPROT HIT: Q15357, EVALUE 1.00e-35; EST_HUMAN HIT: BE380015.1, EVALUE 0.00e+00
gcaggcctagaggtagagggcctgctagaaacagaaggctaaacaaaaggctggcctgctcaccctcaccggagtccctcttcctaggaaaactgccttatttggaagacaaaagctcatttgttgtctcatccccacccaggagagaagggtccactccccgaagattcctcttgtttccacatagagattcctcacctggtacatagcatatattgggcttttatttgatcatcactgctcactttaagagcaggctttcgatctgtgagcccgcggagtatacaccatgagcaaagctcaccctcccgagctgaaaaaatttatggacaagaagttatcattgaaattaaatggtggcagacatgtccaaggaatattgcggggatttgatccctttatgaaccttgtgatagatgaatgtgtggaaatggcgactagtggacaacagaacaatattggaatggtggtaatatgaggaaatagtatcatcatgttagaagccttggaatgagtataaataatggctggtcagcagagaaacccatgctctc

SEQ ID NO: 9430 - DNA, 577 bp, Homo sapiens
  MAP TO CHR16.3; EXPRESSED IN HEART, SIGNAL = 2.5; EXPRESSED IN FETAL LIVER, SIGNAL = 3.8; EXPRESSED IN BRAIN, SIGNAL =   2; EXPRESSED IN BONE MARROW, SIGNAL = 2.7; EXPRESSED IN LUNG, SIGNAL = 1.2; EXPRESSED IN PLACENTA, SIGNAL = 2.1; NT HIT: gi14774719, EVALUE 0.00e+00; SWISSPROT HIT: P35858, EVALUE 4.00e-95; EST_HUMAN HIT: AW152410.1, EVALUE 1.00e-129
ctcttcctcaaggacaacggcctcgtgggcattgaggagcagagcctgtgggggctggcggagctgctggagctcgacctgacctccaaccagctcacgcacctgccccaccgcctcttccagggcctgggcaagctggagtacctgctgctctcccgcaaccgcctggcagagctgccggcggacgccctgggccccctgcagcgggccttctggctggacgtctcgcacaaccgcctggaggcattgcccaacagcctcttggcaccactggggcggctgcgctacctcagcctcaggaacaactcactgcggaccttcacgccgcagcccccgggcctggagcgcctgtggctggagggtaacccctgggactgtggctgccctctcaaggcgctgcgggacttcgccctgcagaaccccagtgctgtgccccgcttcgtccaggccatctgtgagggggacgattgccagccgcccgcgtacacctacaacaacatcacctgtgccagcccgcccgaggtcgtggggctcgacctgcgggacctcagcgaggcccactttgctccctgctgac

SEQ ID NO: 9431 - DNA, 574 bp, Homo sapiens
  MAP TO CHR6.3; EXPRESSED IN LUNG, SIGNAL = 2.8; EXPRESSED IN HELA, SIGNAL = 2.7; EXPRESSED IN PLACENTA, SIGNAL = 2.4; EXPRESSED IN HEART, SIGNAL = 3.6; EXPRESSED IN BONE MARROW, SIGNAL = 2.5; EXPRESSED IN BRAIN, SIGNAL = 2.2; NT HIT: X87344.1, EVALUE 0.00e+00; SWISSPROT HIT: P28062, EVALUE 4.00e-22; EST_HUMAN HIT: BI918327.1, EVALUE 0.00e+00
gtgagttgctgagaggaggccagcaggcaaatttcataggtttcccaagacaccacacacctcctatatcatgtgataaccccatgaaaaaggctccaccatttgtgtgtggacaagggcaggaaagttctcttgtcttcctttgggagcccccacctcacctgtaactctttgtcctaacttgcacttcctcctctcaggccccatccccatgtggcctcttctttgggtctggcgctctccgggactgaaggctacccccgaccctgtaccccgcgctcccgctctcgcctcctcctctcaggcgaccctccactcctcagcgcccgcctccctgcatccctaggggcttccctactgccccgacctgcattccccggggtaaagcgagctctggagatcgcatagagaaactgtagtgtcctgggtccgagcgacgcccgcttcccgcaaccgggagagccgattccggccgctgccctcggggggctccgcatacatctagtagcgccatgaccgcccagcacccagagatctgtccgctctcggaggaggaagtgaaagcgaaagccac

SEQ ID NO: 9432 - DNA, 535 bp, Homo sapiens
  MAP TO CHR9.3; EXPRESSED IN BRAIN, SIGNAL = 0.56; EXPRESSED IN LUNG, SIGNAL = 1.4; EXPRESSED IN BONE MARROW, SIGNAL =   1; SWISSPROT HIT: P35408, EVALUE 6.00e-24; EST_HUMAN HIT: BI600443.1, EVALUE 0.00e+00; NT HIT: X97875.1, EVALUE 0.00e+00
tgctgaaattcaatcatggcatgatttcctttgtatgcatttgaggactctgtttataacccagataaaaacataaaacttttgaaactcttctaagaatgtctaacacaaattacctgtatagatatcatggcacagacgatgctgaggccggactgactgaagaagaacaggctgaagatgctgtactcacacagcagctggcccccaggttacccgcccttcatgtacatggcgatggtcacctggctcaccagcaaagtgaacaacaggtcggtggcagccagccgcataactgtatagaaggtggtctccttctgctccttgcgcgacttgcacagcaccacgatggccaccaggttgcccaccaccccgaaaatggacggtcccaggctgtccagcagattgggctccaggccaaggacacattggcctgggaaggggttaacatgacagtggctggtggtacgcagccctggagtgcaaagctgagtctggagatggcagaagagagacaaagccaccatgagtgaaa

SEQ ID NO: 9433 - DNA, 562 bp, Homo sapiens
  MAP TO CHR22.3; EXPRESSED IN HEART, SIGNAL =   1; EXPRESSED IN BONE MARROW, SIGNAL = 0.95; EXPRESSED IN ADULT LIVER, SIGNAL = 0.63; SWISSPROT HIT: P03010, EVALUE 2.40e-02; EST_HUMAN HIT: BE250745.1, EVALUE 0.00e+00; NT HIT: gi7662217, EVALUE 0.00e+00
ctatttgctccgcagactccacaaaagtcgtgtgcttgcactgtggccggaccatcagccgggggaagaagccgactaacttgggtaccagctgtcttctgagacatttacagcggttccatagcaacgtgctgaaaactgaggtctcggagacggctcggccctcctctccggacacccgggtgccgcggggcacagaattatcaggcgcttcctcttttgatgacaccaatgagaagttttacgattctcacccagttgccaaaaaaatcacaagtctcatagctgaaatgattgcacttgacctccagccatattcttttgtagacaacgttggctttaacaggctgcttgaatacttgaaacctcagtactccctccccgccccttcctacttctccaggacagctatcccaggtatgtatgataatgtgaagcagataattatgtcccaccttaaggaagctgagagtggtgtgatccacttcacgtctggaatatggatgagtaaccagacccgtgagtacctgaccctcacggcccactgggtttccttcgagtc

SEQ ID NO: 9434 - DNA, 584 bp, Homo sapiens
  MAP TO CHR12.3; EXPRESSED IN BONE MARROW, SIGNAL = 1.2; EXPRESSED IN LUNG, SIGNAL = 4.7; EXPRESSED IN HEART, SIGNAL = 0.71; EXPRESSED IN ADULT LIVER, SIGNAL = 0.79; SWISSPROT HIT: Q9ULV4, EVALUE 3.00e-48; EST_HUMAN HIT: BG743743.1, EVALUE 0.00e+00; NT HIT: gi15305413, EVALUE 0.00e+00
taaagcctgaaccagccaagcacccctgcactccactggtcctcaccacactggccgtgtctgtggttttcttggggatgctgatcaggtcgcacttcttgtttgcagtgggcttgctatccagaatgttcttcttgaccaccttgagatccctgtttttgcctggaatgtacccgtgcttcaaggagatgaggattgggtctgcattcttgccttcgaaccactcttctgcctccagcgcggcctctggccccgctgtgtcaggatacaggtcatcttggaaaaggtcagactacaagagacatttggcacccgtgggtaaggaagaagaaaggcctgggatttttgaattttatttttacatttgtttaaaatatggattgtctagaaaactcagcactcaccttcctgggaacagtcataataataggttcacactttctctcatgaagtttgaagaatcttcagaggggaaataaaggcaaagttgcattaagtgaaatatgaggctgactaacaggatgaataattagttttctacaatgctgtctgaaatgtcaagtgcttctttacccatccccaca

SEQ ID NO: 9435 - DNA, 586 bp, Homo sapiens
  MAP TO CHR3.3; EXPRESSED IN PLACENTA, SIGNAL = 0.52; EXPRESSED IN LUNG, SIGNAL = 0.68; EXPRESSED IN BONE MARROW, SIGNAL = 0.79; NT HIT: gi14738199, EVALUE 9.00e-80; SWISSPROT HIT: Q10337, EVALUE 9.90e-02; EST_HUMAN HIT: BE163727.1, EVALUE 8.00e-32
aacttgtcccaggcaaaaagcaaaataagacaaaatttggccattatattggccccaaattctataggctccatctgaatattttggttggttttctcactataaaatatggtaaatatgggtacataaaggtccgtgtatgctggtaggagcggtagaaaaaatttgggcatgtttagtatataatattctgtgccttttttttatgcttgaaagatttccccaaaagaatctgttttaagtggtataaatgcctaccagtgtctgcatgtaagatccttatccagctgcttgtttggagcctgctgcagggggtacaaggctgtccagctgttggcgatgtcctgtattaatcaaccattcataaaacttgttctctaccagtacctggaactgcttcctttgatccctaaaattgcgattatgagtaaaaagaatataagaacatgaattcatataaattgtactctaagcaattatacaatattttaataggataatgttaaatgattaattatttcttgttatccttttgttctcactgttcagagtacactggacacccccaccccacaaaggattgatc

SEQ ID NO: 9436 - DNA, 562 bp, Homo sapiens
  MAP TO CHR17.3; EXPRESSED IN BRAIN, SIGNAL = 0.92; EXPRESSED IN BONE MARROW, SIGNAL = 0.86; EXPRESSED IN PLACENTA, SIGNAL = 6.4e+02; NT HIT: J03071.1, EVALUE 0.00e+00; EST_HUMAN HIT: AV752999.1, EVALUE 0.00e+00; SWISSPROT HIT: P01241, EVALUE 1.00e-25
actacaggtctcccccatccccgcctggggagaaggcatccactcacggatttctgttgtgtttcctccctgttggagggtgtcggaatagactctgagaaacagagggaggtctgggggttctgcaggaatgaatacttctgttcctttgggatataggcttcttcctaggagaaggaccgcccaccaaggtctacgctggagaccagctcccattgttacttttctgggaacctcactcagcgtgtgctcatctgcctgcattttcgcttcgggaaaaaccctgagctccttagtctcctcctcttatttcccagcgggggaaagtcaccccttcctgccacccctgatgcgcacccattccccaagagcttacaaactcctggtaggtgtcaaaggccagctggtgcagacgatgggcgcggagcatagcgttgtcaaaaagcctggataagggaatggttgggaaggcactgccctcttgaagccagggcaggcagagcaggccaaaagccaggagcagggacgtccgggagcctggggagaaaccagagggcaacag

SEQ ID NO: 9437 - DNA, 529 bp, Homo sapiens
  MAP TO CHR17.3; EXPRESSED IN HEART, SIGNAL = 1.3; EXPRESSED IN BRAIN, SIGNAL = 2.2; EXPRESSED IN ADULT LIVER, SIGNAL = 1.4; EXPRESSED IN BONE MARROW, SIGNAL = 1.5; SWISSPROT HIT: Q13164, EVALUE 1.00e-20; NT HIT: gi14775573, EVALUE 0.00e+00; EST_HUMAN HIT: BF525755.1, EVALUE 0.00e+00
ctcaagtctttgaggagccggctcagaggtgccttgtgggcaggtcgggtgggcagaggggagacttggacttggacaaggcttcaggcttttaccttctcccctgcccaacttccccgcagatggccccagcgcacccctggaggctcctgagcctcggaagccggtgacagcccaggagcgccagcgggagcgggaggagaagcggcggaggcggcaagaacgagccaaggagcgggagaaacggcggcaggagcgggagcgaaaggaacggggggctggggcctctgggggcccctccactgaccccttggctggactagtgctcagtgacaatgacagaagcctgttggaacgctggactcgaatggcccggcccgcagccccagccctcacctctgtgccggcccctgccccagcgccaacgccaaccccaaccccagtccaacctaccagtcctcctcctggccctgtagcccagcccactggcccgcaaccacaatctgcgggctctacctctggccctgta

SEQ ID NO: 9438 - DNA, 577 bp, Homo sapiens
  MAP TO CHR5.3; EXPRESSED IN FETAL LIVER, SIGNAL = 0.82; EXPRESSED IN ADULT LIVER, SIGNAL = 1.4; EXPRESSED IN BRAIN, SIGNAL = 1.8; EXPRESSED IN HELA, SIGNAL = 2.8; EXPRESSED IN LUNG, SIGNAL = 2.2; EXPRESSED IN BONE MARROW, SIGNAL = 1.5; EXPRESSED IN HEART, SIGNAL = 1.4; EXPRESSED IN PLACENTA, SIGNAL = 1.4; EST_HUMAN HIT: BG108112.1, EVALUE 1.00e-114; SWISSPROT HIT: P15362, EVALUE 7.30e+00; NT HIT: U81504.1, EVALUE 1.00e-113
gctgaccaggaggagagatggggaaaggtgacacaggtaagtaaaacatgatggcaatcttgactctgcagacctagccttccatcactactggtattactattactgggacctgattcactaagagcaaagaaatgtatttatcttatatgataaattcagtttaacaagaaaaagcaaatataaactgaatatgctaattgtcaatacaatcatattctactttactattttactaaaaagtattctactttacttttaaaatgaacatatttagtgatcaaatatagttaaggttttaaatgagaattaatatttacctattggattaaaaacatgcattttcatgcctataggaagttttttttcccctatgtggatattttctatctttcgatcagtagtgttattcagtgttatttgtatagagaccatcttatcaccaaaaatgcaaggctgtcttggaaagaaataatgggcagctagtccttttccactcattcgatgaagcagcacgtgagttttcgttggtacaaatgcaggagtactgacctattacacacggcaaaaagaaaaa

SEQ ID NO: 9439 - DNA, 508 bp, Homo sapiens
  MAP TO CHR1.3; EXPRESSED IN FETAL LIVER, SIGNAL = 1.4; EXPRESSED IN ADULT LIVER, SIGNAL = 1.8; EXPRESSED IN BRAIN, SIGNAL = 1.8; EXPRESSED IN LUNG, SIGNAL = 1.3; EXPRESSED IN PLACENTA, SIGNAL = 1.5; EXPRESSED IN BONE MARROW, SIGNAL = 2.2; EXPRESSED IN HEART, SIGNAL = 1.5; EST_HUMAN HIT: BF350767.1, EVALUE 0.00e+00; SWISSPROT HIT: Q01965, EVALUE 2.00e-28; NT HIT: gi14728292, EVALUE 0.00e+00
actttgccggcagtatcaacactcagcttcatgaatatattttcaatgaatgaagacaggtgactgctcagggggcaggcctgattccacatggagtctgcctctctcctcacaggcaggctgaggaagcccaaaatcacgtggagcctcaggcacagtgaggatggcatctgcaggatcagcctgacctgctccgtggaggacgggggaaacactgtcatgtacacatggaccccgctgcagaaggaagctgttgtgtcccaaggggaatcacacctcaatgtctcatggagaagcagtgaaaatcaccccaacctcacatgcacagccagcaaccctgtcagcaggagttcccaccagtttctttctgagaacatctgttcaggtttctctccatctctgtttactcaggtcacaggaccttggggcctccaagagtttgcatcctgactgattctttatgaagtgcagtaagaggctgtgggtgagagccctttagagtggcatg

SEQ ID NO: 9440 - DNA, 551 bp, Homo sapiens
  MAP TO CHR2.3; EXPRESSED IN LUNG, SIGNAL = 0.95; EXPRESSED IN BONE MARROW, SIGNAL = 0.67; NT HIT: gi14735269, EVALUE 0.00e+00; SWISSPROT HIT: P55876, EVALUE 2.00e-01; EST_HUMAN HIT: AV648820.1, EVALUE 0.00e+00
ttggctctgcaaatctaggcagtaaaaccagtgttagtaacccaaatcagactagtgcatcaaaagtaggttctttctttgatgattggaatgatccctcatttgccaatgaaattattaaagcatgtcatcaattagataatacctgggaagcagatgatgtagatgatgatttgttgtaccaagcatgtgatgatattgaaagactaactcagcaacaagacattagaaaggacagtaagacatcagaaagtatatgtgagatcaataataattccgaacatggagccaaactaactcagcaacaagacattagaaaggacagtaagacatcagaaagtatatgtgagatcaataataattccgaacatggagccaaaaacatgtttgctatatctaaacaaggaagtaatttggtacaatcaaagcatttgaatccaggcagcatttcagtgcagacatctttgacaaatagctcacaaatagataagccaatgaagatggagaaaggggaaatgtatggaaattctccaagatttttaggtgccaca

SEQ ID NO: 9441 - DNA, 593 bp, Homo sapiens
  MAP TO CHR1.3; EXPRESSED IN HEART, SIGNAL =  10; EXPRESSED IN BONE MARROW, SIGNAL = 7.5; EXPRESSED IN FETAL LIVER, SIGNAL = 7.5; EXPRESSED IN BRAIN, SIGNAL = 7.8; EXPRESSED IN LUNG, SIGNAL =  23; NT HIT: AF307860.1, EVALUE 0.00e+00; EST_HUMAN HIT: AW580813.1, EVALUE 0.00e+00; SWISSPROT HIT: O00622, EVALUE 3.00e-71
tgtatgagtttcaggcggtggtttggaatcttaactttatccccttctacctttctcttttggtgatctttgcagctcagtcagagggcagaccctgtgaatataactccagaatctaccaaaacggggaaagtttccagcccaactgtaaacatcagtgcacatgtattgatggcgccgtgggctgcattcctctgtgtccccaagaactatctctccccaacttgggctgtcccaaccctcggctggtcaaagttaccgggcagtgctgcgaggagtgggtctgtgacgaggatagtatcaaggaccccatggaggaccaggacggcctccttggcaaggagctgggattcgatgcctccgaggtggagttgacgagaaacaatgaattgattgcagttggaaaaggcagctcactgaagcggctccctggtaagtggagactgagcacttcagacactgtactgagatgcatttctggtctaaatctttgtagaaatgagtgcttgagcctgtttgtgtcggtatgcctctgagaagtcttccctcttatatgtctctagtttttggaatggagcctcgcatcctataca

SEQ ID NO: 9442 - DNA, 527 bp, Homo sapiens
  MAP TO CHR16.3; EXPRESSED IN ADULT LIVER, SIGNAL = 0.85; EXPRESSED IN BRAIN, SIGNAL =   1; EXPRESSED IN LUNG, SIGNAL = 2.2; EXPRESSED IN PLACENTA, SIGNAL =   1; EXPRESSED IN FETAL LIVER, SIGNAL = 0.62; EXPRESSED IN BONE MARROW, SIGNAL = 0.87; EXPRESSED IN HELA, SIGNAL =  12; EXPRESSED IN HEART, SIGNAL = 1.6; SWISSPROT HIT: P15559, EVALUE 4.00e-38; NT HIT: M81597.1, EVALUE 0.00e+00; EST_HUMAN HIT: BI014709.1, EVALUE 2.00e-97
aataagcacgcaaatgtccctgacaccccttccgatgtccccccatacctggaatatcacaaggtctgcggcttccagcttcttttgttcagccacaatatctgggctcagatggccttctttataagccagaacagactcggcaggatactgaaagttcgcagggtccttcagtttacctgcagagaagaaaaagagaggctggggccagaggggccaaagctgggccagaggacccacaggcaaggagatccgcaaagaactaattaaagaggggaggaggaactcctcctacctgtgatgtcctttctggaaatgatgggattgaagttcatggcatagaggtccgactccaccacctcccatcctttcttcttcaaagccgctgcagcagcctccttcatggcatagttgaaggacgtcctctctgagtgagccagtacgatcagtgctcttctgcctacagagacacacacaaagcacacagggaaaacccattaccaaccagcaaaccttcagctacaggg

SEQ ID NO: 9443 - DNA, 553 bp, Homo sapiens
  MAP TO CHR11.3; EXPRESSED IN ADULT LIVER, SIGNAL = 3.4; EXPRESSED IN BRAIN, SIGNAL = 7.4; EXPRESSED IN PLACENTA, SIGNAL = 1.7; EXPRESSED IN BONE MARROW, SIGNAL =   2; EXPRESSED IN LUNG, SIGNAL = 1.4; EXPRESSED IN HEART, SIGNAL = 3.7; EST_HUMAN HIT: BI021749.1, EVALUE 0.00e+00; SWISSPROT HIT: P29798, EVALUE 3.00e-15; NT HIT: AF188177.1, EVALUE 0.00e+00
aggatgaaaggtgagaccccggtgaacagcactatgagtattgggcaagcacgcaagatggtggaacagcttaagattgaagccagcttgtgtcggataaaggtaggtgggaccctggctggctcccattagttggccaggctgtgctgtgctgcaggttcccaaagctcaagataagagatgcgttctttccttcactccctgaggtcaggggaggagtctggggctctgtagagagagctgtccccaggcctctgggggggatgagggagaagacaagtcgtaaggagccctggagatggcaaaagagaacccatttggggagggaggctgcagtccccttcagaggtcctggctaacaatacccttcctggctgtgtcccaggtgtccaaggcagcagcagacctgatgacttactgtgatgcccacgcctgtgaggatcccctcatcacccctgtgcccacttcggagaaccccttccgggagaagaagttcttctgtgctctcctctgagctcccctgtcccttctcacaactcctcccttttccctc

SEQ ID NO: 9444 - DNA, 515 bp, Homo sapiens
  MAP TO CHR14.3; EXPRESSED IN HELA, SIGNAL =  10; EXPRESSED IN PLACENTA, SIGNAL = 7.5; EXPRESSED IN HEART, SIGNAL =  12; EXPRESSED IN BONE MARROW, SIGNAL = 9.8; EXPRESSED IN FETAL LIVER, SIGNAL =  11; EXPRESSED IN BRAIN, SIGNAL =  12; EST_HUMAN HIT: BE740078.1, EVALUE 1.00e-124; SWISSPROT HIT: Q10510, EVALUE 4.80e+00; NT HIT: U43842.1, EVALUE 0.00e+00
ggactgctggacagagaaggcctgggcaggggcagtagccgatatttaaaggtctttcagcgccagcatccccacctccagcaccactattggaaaataattaggccaccttttgcctcggtcacagcctgtgaccagcttcttccccccaaggaggctcctagaccccctctgcctgtctcccctcaccaggtagccttgctcaccataggtccctgcagtagcgggctcgccagcagcagctcctggggacctctgaacggttgcagtgaacctgggcgagggccggggactgtggcgctgcaggctcgagatagcttggacgggaatcccatcggggagacaagctagatactcagccggagcagcagcggcgtctcaggctcgcgtccctcagctcggatgccacactcacctagcttccgggccgggctccgcgctccttccctccctccctcctcctctgccttctcgcatcttccttcctcctctttccctccctcgctttctttctt

SEQ ID NO: 9445 - DNA, 525 bp, Homo sapiens
  MAP TO CHR2.3; EXPRESSED IN BRAIN, SIGNAL = 5.6; EXPRESSED IN HELA, SIGNAL = 3.9; EXPRESSED IN BONE MARROW, SIGNAL = 3.7; EXPRESSED IN LUNG, SIGNAL = 4.2; EXPRESSED IN PLACENTA, SIGNAL = 3.7; EXPRESSED IN HEART, SIGNAL = 4.8; EXPRESSED IN FETAL LIVER, SIGNAL = 2.4; EXPRESSED IN ADULT LIVER, SIGNAL = 3.9; EST_HUMAN HIT: AA456888.1, EVALUE 0.00e+00; SWISSPROT HIT: Q00288, EVALUE 8.00e-34; NT HIT: X69699.1, EVALUE 1.00e-108
atagcacactatggctgggggccagggggagggtgccccatagcatgggcgaagggaggaggcagggaggtatgatatctgcctggagccaggtgtgctccctgcctgattgttcagcatcaggccccttcccggcctctgctccacccaagccaggcctttcttgtctctttcctgatttccccaaagcccaggggcgcccagcctgacaccagaggctgctttctctcttacctattaatggagctgacactgggcacagtgtcattgtcacagacgccctcagccaggagccggtctcggatctcccaggcaaacatggtagggttctggcgtttgtagtccccaatcttctccaccaccttgggggtggccaccttgggcttggagccccctatcactccaggccggatgctgccagtctcgtagtacctactccaatagagaatcccaaagaattacccaataagcaggtggggtctttagacagggatttagccagagcctccctcctctctgaggctt

SEQ ID NO: 9446 - DNA, 542 bp, Homo sapiens
  MAP TO CHRX.3; EXPRESSED IN PLACENTA, SIGNAL =   1; EXPRESSED IN BRAIN, SIGNAL = 1.4; EXPRESSED IN BONE MARROW, SIGNAL = 1.3; EST_HUMAN HIT: AV706099.1, EVALUE 7.60e-01; SWISSPROT HIT: O15537, EVALUE 4.00e-36; NT HIT: AF018962.1, EVALUE 0.00e+00
gcagatgatccactgtgctgtggagtcggtgctctgacagagggcagtgacaggagctcggggacaggaggggaagtcccagagggtgcgagctgaagttggtttgggataagcccaacttacccggttgtttccagtctggtccttgtagtaaatccagttcaggcgctcatcggtcctgtactgcacgctgtacttggtcatccactcatcgatgtcacagcgcccctgggtgaggatccctgaaatcactttgatctccttcagatctatctgtaaccactggctactgtcctggaacttggagagccaggcacacctgccgagaacataccgagtcaccgagagactccccctgtgcatgtctgcaaaaagcccgcaggtgctggctctcgaggggatgccagcatccaaagagccccctgccaagctcgggcagtctgggctgcagtctgagccttgtctcctaggaatggccagcttccgttatacttaacttgcatctcattctccctctccctgcatctccacctcccaagaaa

SEQ ID NO: 9447 - DNA, 545 bp, Homo sapiens
  MAP TO CHR2.3; EXPRESSED IN HEART, SIGNAL = 3.5; EXPRESSED IN PLACENTA, SIGNAL = 2.5; EXPRESSED IN FETAL LIVER, SIGNAL = 2.8; EXPRESSED IN ADULT LIVER, SIGNAL = 3.8; EXPRESSED IN BRAIN, SIGNAL = 4.7; EXPRESSED IN HELA, SIGNAL = 2.3; EXPRESSED IN BONE MARROW, SIGNAL = 4.2; NT HIT: gi14733147, EVALUE 2.00e-68; EST_HUMAN HIT: AI421872.1, EVALUE 2.00e-78; SWISSPROT HIT: P13612, EVALUE 6.00e-20
tatctggaggaggtttggggtggtgagattaaagtttaaataataatagttttttttttcttacaggatttaattgtgatgggggccccaggatcatcttactggactggctctctttttgtctacaatataactacaaataaatacaaggcttttttagacaaacaaaatcaagtaaaatttggaagttatttaggtactataaaaattgacaaacttaaatgatctgtgccttacaaatactagtactgtaattataaataaggaaaatgtattttccaaagatctaaatggccagtataattacagtaataattaggcagttcagaaactgtctcttaaggataggatttatgaaacttcagtgaactcagtattttacatttacacatgtgactaaaatcatcaatatataattcttaatagaactcctagtttagtttactctttgtagttcactttaggaaacactagtaagtttctatctctatgtagtcaactgattatacaggttgtttctgttgagtgcctcccatatctcagga

SEQ ID NO: 9448 - DNA, 534 bp, Homo sapiens
  MAP TO CHR1.3; EXPRESSED IN FETAL LIVER, SIGNAL = 1.5; EXPRESSED IN BRAIN, SIGNAL = 1.8; EXPRESSED IN ADULT LIVER, SIGNAL = 1.7; EXPRESSED IN HELA, SIGNAL = 5.3; EXPRESSED IN PLACENTA, SIGNAL =   1; EXPRESSED IN BONE MARROW, SIGNAL = 1.2; NT HIT: gi15294625, EVALUE 0.00e+00; EST_HUMAN HIT: BG574203.1, EVALUE 0.00e+00; SWISSPROT HIT: P48382, EVALUE 4.00e-53
tggtaaccttgaggactgggcagattccatggcagctgctgacttgagaggggtagaattcctttccccacttccacctgacttttttcgagggcgcccccgtttccttttggcatcacttgctgtatcctctatatcctgctttgctgctttagctggtggagcctgcccactggcctcactcacaggtacttcagctgtcctcttgacacccttgtcatgtggtccttggtcaccacctatgcctacctctctgttctctgtgccccggggctgagtgagtcccccaggtggagctcgcccaggcccaggtccaggtccaggcaaagcaggaacagttggtaagatcatgttaatgatgggcacagctgctgggggtgccccggccctactagacagaggcagtgtagccactttcagggcacctgaagaaagcctgggggccagaataggtggagagactgggattggcggaattagtgagcgaggggcccggggaaggagcagaggcagccgagccactagggcattaac

SEQ ID NO: 9449 - DNA, 549 bp, Homo sapiens
  MAP TO CHR17.3; EXPRESSED IN BONE MARROW, SIGNAL =  18; EXPRESSED IN LUNG, SIGNAL =  17; EXPRESSED IN HEART, SIGNAL =  17; EXPRESSED IN PLACENTA, SIGNAL =  14; EXPRESSED IN ADULT LIVER, SIGNAL =  15; EXPRESSED IN FETAL LIVER, SIGNAL = 9.6; EXPRESSED IN BRAIN, SIGNAL =  20; EST_HUMAN HIT: AW410297.1, EVALUE 4.00e-95; SWISSPROT HIT: P50221, EVALUE 4.00e-28; NT HIT: gi13654180, EVALUE 3.00e-95
aaaagaaagtttggggtggggggagggtgggaggcaggtacctgagattggaaaccaaaaataaaaaatcttcccaattctaatatgggtaagacaccagaaggaataaaaaggacagtgtagcttttttctcagcatcctgtaaaaataagggagactggtaaagactgcctagttgctcaagggcaaaagaaagggaatggagtctccctcagcccatgtcttcctgtttggggtcctctctccccagacaaccaggagaacagagggaagccggagggcagcagcaaagcccgcaaggagaggacggccttcaccaaggagcagctgcgagagctggaggcagagtttgcccatcataactacctgactcggctccgcagatatgagattgcggtaaacctggacctctctgagcgccaggtgcgcccccggtgggcccctcctcttctttgctctctcatctccctcccttccctcctttcccaccacccctccctggaccttctcctttttcttcctccagccagtccagcggttttcaactgt

SEQ ID NO: 9450 - DNA, 591 bp, Homo sapiens
  MAP TO CHR1.3; EXPRESSED IN LUNG, SIGNAL = 4.2; EXPRESSED IN PLACENTA, SIGNAL = 1.7; EXPRESSED IN HELA, SIGNAL =   3; EXPRESSED IN BONE MARROW, SIGNAL = 1.1; EXPRESSED IN ADULT LIVER, SIGNAL = 4.9; EST_HUMAN HIT: AL528799.1, EVALUE 0.00e+00; NT HIT: gi14728204, EVALUE 0.00e+00
tcaatgaagccatctttggagttagtcattactctctccttatcagttatcttgacttcaacccgatattcctcttcttttggtccagaccctcaaatttaagagtagcttgaagttaaggaaaggtcatttttccacagtttcagttctctgaaacacttccatctcccactgaaagtcacagtccaggagtgaagtaatcacatgctagaacatcagggccaattcgcaagttattatgaacgcttgcattggtcaatcttatttatcaccacaagcctgaaaatgcaatgtcctgaaaaaggtgggctctctgtgcacacgtaatttttaaaaaggagagggtaatatgaaggggactgaggcttgatcaccaaaaatcagcacaatgaaaataaacaataatgaataatgagcactagaattcagattaccagatgtttcaaagagatggggtgccagttttcaattccgtttttaacaccacattacaaaagaactatttttaaaaatgagaaaggattgagggaaaagaaaaaaaataaaaagaatatctaaactgttgaatgaccccccatttgttcctgataa

SEQ ID NO: 9451 - DNA, 567 bp, Homo sapiens
  MAP TO CHR2.3; EXPRESSED IN HEART, SIGNAL =   4; EXPRESSED IN PLACENTA, SIGNAL = 3.8; EXPRESSED IN BONE MARROW, SIGNAL = 2.5; EXPRESSED IN FETAL LIVER, SIGNAL = 3.2; EXPRESSED IN BRAIN, SIGNAL = 3.9; EXPRESSED IN LUNG, SIGNAL = 3.3; EXPRESSED IN HELA, SIGNAL = 2.8; NT HIT: gi14785833, EVALUE 1.00e-109; SWISSPROT HIT: P24738, EVALUE 1.40e+00; EST_HUMAN HIT: AA181709.1, EVALUE 0.00e+00
atgcactgtctgtctgtggctcttcagggacctccaaaaaccctcccatctcattggccagcctgaaaggcactgctagatgggggcaggggacagacggaagacagacaaggtgggcgggggtctttatttgagtttaggcatgattcgaatgaagaggatcatgctaatgaagatgaagcagacgataatgagcatggcccagagcagccagttgactgacttctgcgtgtgctgctccagacgctctgactccgtcttcagtttctccaggttctggtccgccattttcagtgagtgtgacagggtctgtgggggaggtggaaaaggtgtcaacaggactggggccaagaatggcctctctctacttccctgggactggcctgcacctcttgtcgcttgctggtgctgtgccctctgctgggaatgccatttttgccttctacgaaactcctattcatcccgcaaagccccagccacaatgctcctgtgctgggaagccttctctgatgccccaggggcagaggctggagagctcccccagtccccacacctggttgtccttct

SEQ ID NO: 9452 - DNA, 531 bp, Homo sapiens
  MAP TO CHRX.3; EXPRESSED IN BONE MARROW, SIGNAL =   4; EXPRESSED IN PLACENTA, SIGNAL =   3; EXPRESSED IN HEART, SIGNAL = 3.6; EST_HUMAN HIT: BF347458.1, EVALUE 1.00e-79; NT HIT: U52111.2, EVALUE 0.00e+00; SWISSPROT HIT: P50745, EVALUE 9.80e-01
agctcactccacctgtggtcggccctgaatgccccacagtgctccaccgtctgctccgtcaactcgtccagcctcctcctgtgccggagccctgctgtaccagacagagcccacccgcagcgggtcttcttcaccctagacaacgtgcaagtggacttcgccagtgccagtgggggccagggcttcctgtaccagcccaacccccgcctggcacccctcagccgcgaggggcctgcccgcccctaccgcctcaagccaggccatgtcctggatgtggaggtgagggccaccttcaaccctgccccgccacggtgctcaggccgcctctgtgggggccagcagcttaggctcccatgtgtgtcccagggcgagggcctcaacctgggcatcagcaaggaggaggtgcgcgtgcacatcggccgcggcgagtgcctggtgaagacgctcacgcgcacccacctgtactgcgagccgcctgcgcacgccccgcagcctgccaatggctccggcctgccacagttcgtggtgagt

SEQ ID NO: 9453 - DNA, 529 bp, Homo sapiens
  MAP TO CHR22.3; EXPRESSED IN BRAIN, SIGNAL = 6.4; EXPRESSED IN HELA, SIGNAL = 5.3; EXPRESSED IN PLACENTA, SIGNAL = 5.7; EXPRESSED IN BONE MARROW, SIGNAL = 4.5; EXPRESSED IN HEART, SIGNAL = 4.5; EXPRESSED IN ADULT LIVER, SIGNAL = 4.1; SWISSPROT HIT: P17050, EVALUE 2.00e-30; EST_HUMAN HIT: BE386881.1, EVALUE 2.00e-96; NT HIT: M59199.1, EVALUE 0.00e+00
gtcctgaggaagtgcaggaggcagtctggggccttagcccagaccttttcccaacagatgtgaagaaacaagctccaaacagtaggtgcctccccacatacccagagcctcaaatgcttccagggtgggctatgctgccactcatatttagggagcctgggagccacaatccccctaacccctgggtagggggaattgggaagctcagccaggtgggcgctgggtgggtctccatggccaccctccccgtttgcctacgtgccccagccagctgcgtaactcaccctgggcccgctcctcgggggtggagaagcagccatccagcttgagcatgtctaccttccactcggcgaaggtctgagcatcctggaccaccttgtccagtgtggtgcctgggtaacccatgcaggtgaagttgcccatgtccgcgtagatacccaacttcaggcccagggagtgaacctgtgggggtttgaggacacagtgggctcaagcaggaccctcaaggagcctcctcaaggcatatctg

SEQ ID NO: 9454 - DNA, 591 bp, Homo sapiens
  MAP TO CHR14.3; EXPRESSED IN BONE MARROW, SIGNAL = 1.1; EXPRESSED IN LUNG, SIGNAL = 2.2; EXPRESSED IN FETAL LIVER, SIGNAL = 0.73; EXPRESSED IN ADULT LIVER, SIGNAL = 0.78; EXPRESSED IN BRAIN, SIGNAL = 1.1; NT HIT: gi13631481, EVALUE 2.00e-59; SWISSPROT HIT: Q00978, EVALUE 1.00e-17; EST_HUMAN HIT: BF360435.1, EVALUE 1.00e-110
tctctcccatccaattccagctcctactcaattctaaacctgaccttaagagtgggaccaggtgtacagggggtgcagagtgtgggtgttcccagggccatgggtgccctagcactgggaggatgtgagcaagtagcaaaggtctgggcacatctgagttagcagccagggctgctacctgggaggactctaaactctcccagcagagagcttgtcgggctgtgctgtgatctgctacttctaagcacttatatgaggcaggggcaccctttcctatttgcacatgggtgagtagcacttagttccaagtacttctgaccttgcagctcctgctctggcaagaccccctcctacctctctccatcatgggttcctcactattgcctccctgcctgtggccctctctcttctttttgttcttcgaacccttgaccctttctctttcagacttggtcaggtactttcagggcctgggccccccaccgaagttccaggtaacactgaatttctgggaagagagccatggctccagccatactccacagaatcttatcacagtgaaggtgagctcggagcaggggtagagtaccc

SEQ ID NO: 9455 - DNA, 570 bp, Homo sapiens
  MAP TO CHR15.3; EXPRESSED IN ADULT LIVER, SIGNAL = 1.1; EXPRESSED IN BRAIN, SIGNAL = 1.1; EXPRESSED IN BONE MARROW, SIGNAL = 0.71; EXPRESSED IN LUNG, SIGNAL = 0.65; EXPRESSED IN HEART, SIGNAL = 1.1; EXPRESSED IN PLACENTA, SIGNAL = 0.74; NT HIT: AL163203.2, EVALUE 0.00e+00; SWISSPROT HIT: P21781, EVALUE 1.00e-11; EST_HUMAN HIT: AL525382.1, EVALUE 6.00e-51
tatctgttgtgggtcaggggtcttgggctgagtaaataatcacattaaaaattttaaaaacttccgattaaaacagaaataagaacaaatggccattcgtggatcatttgcaaaactgaacgaatatttgacatgtctttctgtgattccttgcagatatcatggaaatcaggacagtggcagttggaattgtggcaatcaaaggggtggaaagtgaattctatcttgcaatgaacaaggaaggaaaactctatgcaaaggtattgataattgatagcttaggcttaatttttaaaactcatttttgtcaaaatatctcacctttctgaaaagtaaaaatggaattaatttatctccaactgtataatttaatgattttattaaaacactttatactcaaacgttaagaaaaaatgttttctgtgtgactttggacaaatggcttgttctttggattttggtttcttcatctgtaaaatgagttgaattaactgacctctaaggatccttccagctctaaaattccatgtgcattttagatatttaaaatccaaaatttccatttgccag

SEQ ID NO: 9456 - DNA, 558 bp, Homo sapiens
  MAP TO CHR22.3; EXPRESSED IN FETAL LIVER, SIGNAL = 0.94; EXPRESSED IN BRAIN, SIGNAL = 0.95; EXPRESSED IN BONE MARROW, SIGNAL = 1.8; EXPRESSED IN HEART, SIGNAL = 1.1; NT HIT: U50726.1, EVALUE 2.00e-83; SWISSPROT HIT: Q15080, EVALUE 2.00e-12; EST_HUMAN HIT: BG675250.1, EVALUE 3.00e-43
gtgctcagcccagagagttcgaacccttccctgtgtgctcacccccaccaggtttggaaggagcacccatcctggagtcagggagacctgggttcaattcccagctcctccactaaaaaatggggtggcctcagagaagtcgcttattctccccaagcctcagtttctacatctgtaaaatgggagactaaagtatgtaaggcacttctataggaactcagtgagtgttctctccttccctccttactgcacgcttctcctcaggctctatttgacttcactggaaacagcaaactggagctgaatttcaaagctggagatgtgatcttcctcctcagtcggatcaacaaagactggctggaggtgagttcagaagtgaggatggaggtgagattgaaggtgaggttggagggaaattaaaagtgaagatagaggtgagggtggaagtgcaattggaggtgaggatgaaggtgagggtggaggtgagattggaggtgaggatggaggtaagagtggaggtgaggatggaggtgagattggaggtgaggatgaaggtga

SEQ ID NO: 9457 - DNA, 518 bp, Homo sapiens
  MAP TO CHR2.3; EXPRESSED IN BONE MARROW, SIGNAL = 1.9; EXPRESSED IN BRAIN, SIGNAL = 1.2; EXPRESSED IN HEART, SIGNAL = 1.5; EXPRESSED IN PLACENTA, SIGNAL = 1.4; NT HIT: AB038983.1, EVALUE 0.00e+00; SWISSPROT HIT: Q14790, EVALUE 2.00e-14; EST_HUMAN HIT: BI910060.1, EVALUE 1.00e-54
atcaagcccactgtgactccatatatcaaatgggaaattatttgggaaaagatttctaaagtgtctccatttcccaccacagggtcatgctctatcagatttcagaagaagtgagcagatcagaattgaggtcttttaagtttcttttgcaagaggaaatctccaaatgcaaactggatgatgacatggtaagacctggtatcttactgagatttagtcctgagacttggttagccagggggcatttctgagaccaaagagaggggtattttggtaaaagcaacctggattctcactttttaactagaagaagaaagttgtcagcacgagtgttacagatgtgattcctttagaccgaagtgctgctcatgttaattattgggagcaaggcagagtcagaggccgggagaaggaggctgtgcagatgcagcccagacccggcagagctgggaaagactgcggtgggtctgagatatttcctccacttctgcagtccccgaaacaacctgggacctgaa

SEQ ID NO: 9458 - DNA, 586 bp, Homo sapiens
  MAP TO CHR1.3; EXPRESSED IN LUNG, SIGNAL = 0.36; EXPRESSED IN BONE MARROW, SIGNAL = 0.78; EXPRESSED IN HEART, SIGNAL = 0.54; EXPRESSED IN ADULT LIVER, SIGNAL = 2.8; EXPRESSED IN BRAIN, SIGNAL = 0.53; SWISSPROT HIT: P45481, EVALUE 6.50e-01; EST_HUMAN HIT: AI185648.1, EVALUE 0.00e+00; NT HIT: gi14720223, EVALUE 0.00e+00
agcatttgttgttgtttgcgtcagcagcttgggcactttttctgggcaaccgtggcggcgtgtgcactccagtgttgccaagggctggggatacggggggccagggtgggggtcagggagggtttccagcgcaggaggggagggctgtgcggctcccagcctttccaccagggcctggctggctggggctggggcggagggccccacggagctgcgaggctgcggacaggagtctgcggcctctagtacttagcgatgtcccccttcttcaggatgacctgtcgctgccagggcgccagcttgctctcatcgtagcccagcgtccgcagcttctctgactgttccttctcccgccgcagctcctcctgcttctgtcgctcctcctctttcctgaggcagtggggaggggggcagacccggtgaagtctggggccagatacccaggctggcagaaagggtggggccaggcaccaggcagaggccaggtcacccatgcaaggggtgggttactgagggctggggctcggttgctgaagacagaggggctagattgggggcagaatggggttactggagcacaggggag

SEQ ID NO: 9459 - DNA, 526 bp, Homo sapiens
  MAP TO CHR2.3; EXPRESSED IN LUNG, SIGNAL = 3.5; EXPRESSED IN BRAIN, SIGNAL = 3.9; EXPRESSED IN BONE MARROW, SIGNAL = 2.2; SWISSPROT HIT: P10069, EVALUE 8.50e-02; EST_HUMAN HIT: AU123962.1, EVALUE 1.00e-129; NT HIT: gi14721257, EVALUE 1.00e-129
tacaacagtggcaacaaggggacccagctatgacgctcggggtgtgggcctgcctcccacaacactgggtccatatgtgtggggcctgggactggtaggtggctgaccacaggctgggtggagtggatccttcagggaaggggaccctgatggcggtggggcaggccccatagctcgtacccggaatatctggcgcaggtactccagggccttctccaggtattcatctgtcttccggacactgtcttgccccatctcgtccaggtcgttggctgtgtaggagccattggtgtccatggagctaaagcccagccatgagaggaaggagtggccagccgggctctccgcacactggtcggagatggacttggctgtgtgtttggcctgtgtgatgagctgagcgaggcgcaggacctgcaagggaggcgcgggcaggtcaccagcaggacaggcctgtgctgccacccaggcagccccaagagcaatgcacagccagactgctgagcgtcaggaggagtggcttctg

SEQ ID NO: 9460 - DNA, 553 bp, Homo sapiens
  MAP TO CHR16.3; EXPRESSED IN LUNG, SIGNAL = 2.7; EXPRESSED IN HEART, SIGNAL = 4.5; EXPRESSED IN HELA, SIGNAL = 3.3; EXPRESSED IN FETAL LIVER, SIGNAL = 5.5; EXPRESSED IN ADULT LIVER, SIGNAL = 3.9; EXPRESSED IN BRAIN, SIGNAL = 3.9; EXPRESSED IN BONE MARROW, SIGNAL = 2.8; EST_HUMAN HIT: BF841523.1, EVALUE 7.80e-01; NT HIT: X98833.1, EVALUE 1.00e-129
tgattacggagaagttgcccagtgttgtcaggtccccgagttgaggtagagaggttgtgatcgctgaggtacctgtggaggagctgccgccgccgccgctgctgctgctgctgctgctgctgctgcttggggcggtactgctgtggctgccgctggaagtgccgctgccgcttttgttagcaaccggggcctccacctccatggactcttccctgtcaagtccgttgtgttctgaaaggtcgctgcagtccacttgatctgttttgttaactgtgtcattcatttgttcatcaggattatcaggaggggggctgggggagaaggtttcgggtggggaggctggattttcatttacgattaaaactaattgatttttagtacagttcttcttgtggagcagaagatctgataattcaaagaactcggcacagcaccggccacagacgtgggcatccttgctcttagtagggcgactcggttgacccttttctgtgtctcctacaaatgtcaaaaaggtgcaggattagaaaaggggccaggacacacagtcacc

SEQ ID NO: 9461 - DNA, 563 bp, Homo sapiens
  MAP TO CHR1.3; EXPRESSED IN BRAIN, SIGNAL = 2.6; EXPRESSED IN HELA, SIGNAL = 2.7; EXPRESSED IN BONE MARROW, SIGNAL = 2.7; EXPRESSED IN PLACENTA, SIGNAL = 2.6; EXPRESSED IN LUNG, SIGNAL = 3.6; EXPRESSED IN HEART, SIGNAL = 3.4; EXPRESSED IN ADULT LIVER, SIGNAL = 3.1; NT HIT: gi16157341, EVALUE 5.00e-72; SWISSPROT HIT: P32018, EVALUE 5.50e-02; EST_HUMAN HIT: BG984808.1, EVALUE 4.00e-58
ttaatttctctgggtgggggaacgggaggcgtgtgatggatggctcttaccttattcataagcgaggataaaagagatgaatttgccgggactgcgtggccatttgattcgttgctagaacacacaaaccaagggacttgagctcagacggccggggcctgggccctggggctcaccttccctgcccgaccctggggctccagccgagcccgctgcaactgcctgggcgggaccaccccggggctccagctcgaaggtgtggttcccggggctggctcccatagggggcctcgcctcacctgggctccttcacagtcaggtctagactgcggtcctgggaggcttcgtgggggcctggggcgccggtgctctcaccgggttccggcttcacttgggccggggggaacctggctggggtgacctgctgcccgcttcctgcaggggaggggtgggaagatgcgtcagaggggctgaaggcctggcccgggcacagacagccgccgtgccccctggagggagggcagtgggctgggtgggccccggctactggtcagcgcttctcc

SEQ ID NO: 9462 - DNA, 579 bp, Homo sapiens
  MAP TO CHR1.3; EXPRESSED IN BONE MARROW, SIGNAL = 0.93; EXPRESSED IN LUNG, SIGNAL = 0.65; EXPRESSED IN HEART, SIGNAL = 1.1; EXPRESSED IN FETAL LIVER, SIGNAL = 0.5; EXPRESSED IN BRAIN, SIGNAL = 1.2; NT HIT: gi15296916, EVALUE 1.00e-111; SWISSPROT HIT: O96000, EVALUE 4.90e-01; EST_HUMAN HIT: AW131520.1, EVALUE 1.00e-110
ccacttatcccgttctttcctttgagtacttgttaaatgcttgcctcttttctagacagtgaaaatacatttttcctatcctcagagtttgtattctagggtaattatttaatacatcattctggtcattttatattctacaggggtgtggtgcaattatttaatgctgttcagaaacatcaaaagaatgttgatgaaaaggttaaggaagctggaagttctatgagaaagcgtgctaagttgatatcaactgtttccaagaaagatttcatcagtgttttgagagggatggatggaagtacaaatgagactgcttcaagcaggaagaaaccaaaagccaaacaggtaaaaacttttctataggattcagtgtatcagactttcagctctaaaactagtcttgagatggaaaaccagactatagaattacagagttttgtgtttttttcctaaattttattaaaattcctccatgcccgcaacctttagagatagggcttgcctctctcctatctgaaatcctgccattttgcacattttggagaatagaagcctgtgtgggccacagctttaatttca

SEQ ID NO: 9463 - DNA, 559 bp, Homo sapiens
  MAP TO CHR3.3; EXPRESSED IN BONE MARROW, SIGNAL = 0.72; EXPRESSED IN HEART, SIGNAL = 0.53; EXPRESSED IN ADULT LIVER, SIGNAL = 0.61; EXPRESSED IN BRAIN, SIGNAL = 0.66; NT HIT: AB026898.1, EVALUE 0.00e+00; SWISSPROT HIT: P36400, EVALUE 1.40e+00; EST_HUMAN HIT: BE170556.1, EVALUE 7.80e-01
ggcatcctaggaatcgtgacaagatgcccctggccgcccctccctctcttcctccctccctccttccttccctcttttcctccttccctccctccttttctcccttcttctctcccttcctcattaattgagtgtctgctatatgctaggttctcaaaatcacctccttttggtcttcaaagatgtgagaacattaacctgtgggcggatatcccccttttccctccagtgtgagcttgcaggaatcatggtcaaggccagctgcatgtggatggcggcatgggtcctgcagcagccttggcctgatttcagccctagtgagccttcactgacttcacttactctactttggcaggaattgggcagctgattgctttggatctgatctatatttctggtgaaaaaagccagccagaccctggagagctcacagacttaacagcccagcacttcatacgatttgagcctgaaaaccttcggtccacggctaggaagcagctgattattagaaatgctacgtgggtaacccctgtgtgtgccccaatacccaacccttctt

SEQ ID NO: 9464 - DNA, 570 bp, Homo sapiens
  MAP TO CHR2.3; EXPRESSED IN PLACENTA, SIGNAL = 0.46; EXPRESSED IN ADULT LIVER, SIGNAL = 0.72; EXPRESSED IN BRAIN, SIGNAL = 0.67; EXPRESSED IN LUNG, SIGNAL =   1; EXPRESSED IN BONE MARROW, SIGNAL =   1; SWISSPROT HIT: P01275, EVALUE 2.00e-26; EST_HUMAN HIT: BI467044.1, EVALUE 6.00e-88; NT HIT: X03991.1, EVALUE 0.00e+00
taagcaagttttgagccaggcttagactcttacctgttcctcttggtattcatcaaccactgcacaaaatcttgggcacgcctggagtccagatacttgctgtagtcactggtgaatgtgccctgtgaatggcgcttgtcctcgttcatctgatcaggatcactgagtgggtctgcctgggaagctgagaatgatctgtgaagaacagtgattggtacaacataaatctctcctcaagagtagactcacttgagaagcatcttcactacaaaatacaagaccatataaaacagtaaggcaggcatctagagtatttcaataggtagtttagaaagatcttccttagcttgtcatgagaatcccttcgttttagtatagttgcatacgctattattctgaattctagaaacatgtttctcaactgacttctttttttctgaaataggattaaacaaatctttttctactaattaatctactcatgattatgctaatagtgacagaagagagtagtgacttgaatattttaaaagagtgaagaatcccaaatcatttctttgggcagcagat

SEQ ID NO: 9465 - DNA, 561 bp, Homo sapiens
  MAP TO CHR11.3; EXPRESSED IN BONE MARROW, SIGNAL = 1.4; SWISSPROT HIT: P53619, EVALUE 2.00e-09; EST_HUMAN HIT: AU128180.1, EVALUE 0.00e+00; NT HIT: gi16183728, EVALUE 0.00e+00
cattttggtggggaagagtgatgctgtgactttcagttgtgaattgaacatttttctagtattttacagttacttttaataccgcttttagggaaattgatatgttctgtaatgagaatgtagtcaacatgatggagactcaaacctcctgctttaccttactctttgtttattttcctaggttaccaaagtgacccaggtagatggaaacagccccgtcaggttttccacagagaccactttcctagtggataagtatgaaattctgtaataccaagaagagggagctgaaaaggaaaattttcagattaataaagaagacgccaatgatggctgaagagtttttcccagatttacaagccactggagaccccttttttctgatacaatgcacgattctctgcgcgcaaggaccctcgactcacccccatgtttcagtgtcacagagacattctttgataaggaaatggcacaaacataaagggaaaggctgctaattttctttggcagattgtattggccagcaggaaagcaagctctccagagaatgcccccagttaa

SEQ ID NO: 9466 - DNA, 512 bp, Homo sapiens
  MAP TO CHR11.3; EXPRESSED IN BONE MARROW, SIGNAL = 8.2; EXPRESSED IN HELA, SIGNAL = 3.8; EXPRESSED IN PLACENTA, SIGNAL = 5.4; EXPRESSED IN HEART, SIGNAL =   7; EXPRESSED IN FETAL LIVER, SIGNAL = 3.2; EXPRESSED IN ADULT LIVER, SIGNAL = 7.2; EXPRESSED IN BRAIN, SIGNAL = 9.1; NT HIT: U43920.1, EVALUE 0.00e+00; SWISSPROT HIT: Q92785, EVALUE 1.00e-25; EST_HUMAN HIT: AU130112.1, EVALUE 1.00e-85
ttaactagcacaggggtgggcttgtgagacacgtggagtgaacattctttcacctctttgggggttaaacttaagtctgattagacatatgatgaaatcatgtgttcctgatggtaatttatttgtaaagtaattcctcatgatggcctagaaaaggggcttcgtgtcccatgaggcagaagtggaggcaaatagaacggaagagacagccacccagtcccttgagccttctagagaagcagatggcaggggagaggaatagctcagcaccctatgccccccgctccaacatacacgcctgatttctatcttccctgcagccttggggagcagtactacaaagatgccatggagcagtgccacaattacaatgctcgcctctgtgctgagcgcagcgtgcgcctgcctttcttggactcacagaccggagtagcccagagcaattgttacatctggatggaaaagcgacaccggggtccaggtgagggtccagacttgggagaaggggactc

SEQ ID NO: 9467 - DNA, 568 bp, Homo sapiens
  MAP TO CHR2.3; EXPRESSED IN BONE MARROW, SIGNAL = 1.7; EXPRESSED IN FETAL LIVER, SIGNAL = 1.5; EXPRESSED IN ADULT LIVER, SIGNAL = 1.2; EXPRESSED IN HELA, SIGNAL = 3.1; EXPRESSED IN PLACENTA, SIGNAL = 1.4; EXPRESSED IN HEART, SIGNAL = 1.6; SWISSPROT HIT: P35365, EVALUE 6.00e-58; EST_HUMAN HIT: BI489745.1, EVALUE 5.00e-36; NT HIT: AJ308680.1, EVALUE 0.00e+00
tcttaccccagcactgcttcctgcagaagtttctggttgtgggtttttgctctagtaagctgtgatgctctatattcacctgaccatttttggagcagcatttagccctgtgagctcacttctctgacaaatctaagaggagttgttgtctttctggtttgttcagcttcttccttgtttttctgttttattttttaattccattattttctttgttccaaggtaaaggaagcacctgatgaggctgaagtggtgttcacggcacattgcaaagcaacggtgtccttccaggtgagcggggactcctggcgggagcagaaggagaggcgagcagccatgatggtgggaattctgattggcgtgtttgtgctgtgctggatccccttcttcctgacggaactcatcagcccactctgtgcctgcagcctgccccccatctggaaaagcatatttctgtggcttggctactccaattctttcttcaaccccctgatttacacagcttttaacaagaactacaacaatgccttcaagagcctctttactaagcagagatgaacacaggggt

SEQ ID NO: 9468 - DNA, 591 bp, Homo sapiens
  MAP TO CHR2.3; EXPRESSED IN PLACENTA, SIGNAL = 0.82; EXPRESSED IN BONE MARROW, SIGNAL = 1.3; EXPRESSED IN BRAIN, SIGNAL = 0.86; SWISSPROT HIT: O95342, EVALUE 8.00e-42; EST_HUMAN HIT: BI013907.1, EVALUE 2.10e-01; NT HIT: gi4502456, EVALUE 0.00e+00
gagtcagcccaggtcagaagaaccgccctgatgacccacagaatcttgagaaataattaatcccagctattgtaagacaccaagcttgggatggtttgctaagcagcaaaaagctaactgacagaaccaggctattccttccttgtgtgttgatcttttctcaccttggctagatattcctcacctgaacacatagctgaaatggagcccctcattggagattaagtaacctccatatctgtaggaagcagaattcgcaataaacatgatgcactgggcaaaggcaaagcagaatccgtaaatattggctttctgaatggctgtcttgaagggcttctccagctcagtctcaagtgcttcaatgaaccgcctctcctttccaattccagcaacagtgcggatgttactgagggcttcatttgtaatctgaagattgaaaaagagtcttaggaatacaagggcagaaataactcctttcgtgacatttcagtggctgcctggattagatggtgcaaatggcagaatgtggtacaaatcagagaatgcatcatctgggaatacaaagacgtggctggagatcaacccaactgg

SEQ ID NO: 9469 - DNA, 547 bp, Homo sapiens
  MAP TO CHR19.3; EXPRESSED IN BRAIN, SIGNAL = 2.9; EXPRESSED IN HELA, SIGNAL = 3.7; EXPRESSED IN BONE MARROW, SIGNAL =   3; EXPRESSED IN LUNG, SIGNAL = 2.1; EXPRESSED IN HEART, SIGNAL = 2.5; SWISSPROT HIT: P55269, EVALUE 5.00e-20; EST_HUMAN HIT: BE712122.1, EVALUE 7.00e-72; NT HIT: AF008195.1, EVALUE 0.00e+00
tgtctgtcttgtccccttcccttgtcccccgttggcctgttgcttttcatttcagcctggcttggggctcagtctccttatctttagtgtgcggtggatgcgggaattttccaccatcagcctgatgcctgctccccggcactggttctcctctctcctgcaggatgattgccgccgtggacacagactccccccgagaggtctttttccgagtggcagctgacatgttttctgacggcaacttcaactggggccgggttgtcgcccttttctactttgccagcaaactggtgctcaaggtgggcagctgcagggcagtgagcccagggatgctccccctcagatctgtgaggacctggggatcgtggtatcaaccccctgcagtggcccagtgaccacagagggcatggagagagatggctgtgcactgggtgtctgctccttcttttattcattcaacaagcatttactggacctgctatgtgccaggcctatacctggcacctgggacacagcactgtacaaagcaggctacatccctgctctc

SEQ ID NO: 9470 - DNA, 590 bp, Homo sapiens
  MAP TO CHRX.3; EXPRESSED IN PLACENTA, SIGNAL = 2.8; EXPRESSED IN BONE MARROW, SIGNAL = 2.6; EXPRESSED IN BRAIN, SIGNAL = 1.9; EXPRESSED IN FETAL LIVER, SIGNAL = 2.2; SWISSPROT HIT: P41208, EVALUE 2.00e-23; EST_HUMAN HIT: AV733516.1, EVALUE 6.00e-85; NT HIT: U82671.3, EVALUE 0.00e+00
agaggcagaggaaaggaagggcagtacggcaggaatgcacagagcttgccttcagttctttaacatctatggtgccagttccatccgcatcgaaaagatcaaaagcttcccggatctcctgcttttgctcttcagtaagctcaggcttagggctcattctttttcgctgagaacttgatgccatgtttgccttcttaaagttggaggcctttatatgttatgcaatacacaagcacaataatatatcatacagtccatatttacataacatagttacagacacccatatgtatttttaaagtcatttatataaccaattccaaagctttgcttaaaaagaaagataacagggtttactggcaagaacaatgaatctttccatgaacttctacccctcccttttctttactgttgtttctagaagcagggagatcacttgttcagtaaggacacctcttactgaaaatcatcccaaaagagagccagtcaagaagatgactgtgaataactagagataatcagctcttcccgaacgtggggatcctggttctgaaaacagtcttacgatgcccactcccagtactcccctt

SEQ ID NO: 9471 - DNA, 537 bp, Homo sapiens
  MAP TO CHR14.3; EXPRESSED IN BRAIN, SIGNAL = 2.1; EXPRESSED IN BONE MARROW, SIGNAL = 1.1; EXPRESSED IN HELA, SIGNAL = 3.3; SWISSPROT HIT: Q29036, EVALUE 9.00e-19; EST_HUMAN HIT: AA215648.1, EVALUE 0.00e+00; NT HIT: U84213.1, EVALUE 0.00e+00
acaaggcaatgaccaagagcagtagcactgatgaattatgatgatattaatgcatactttgcagaccaatggaaaattctgcaaatgtcaatagcagtatgggagcctggccaaccatgatcaaaaccagtcccatccaatttctcttcctaaaatcaacattataggacaaggactatgatcatcacttacattcttttagtctcctactcctcaattaagtaaatgagaatgagtcagccaacaaagttcatgacaacaaggtgcaggatggtgctggcaaagagaaaatcagcaaaggctcgctctggggagatgccttggaaatccgctttgttctgtgggttgatctgtattctcaggcaaactgcacaagaagcaaaacacaaaaaaatgattatatagaagtataaaataaatatgctaatgaacacagacatacccgaggacccaacaattctactctaacagaaatgaatgcatatatacatcaaagggcatacacagaaatgatacccagatagccccaaactggaa

SEQ ID NO: 9472 - DNA, 523 bp, Homo sapiens
  MAP TO CHR1.3; EXPRESSED IN HEART, SIGNAL = 1.8; EXPRESSED IN ADULT LIVER, SIGNAL = 1.5; EXPRESSED IN BRAIN, SIGNAL = 0.93; EXPRESSED IN BONE MARROW, SIGNAL = 1.3; EXPRESSED IN LUNG, SIGNAL =   1; EXPRESSED IN PLACENTA, SIGNAL = 1.3; NT HIT: gi14742785, EVALUE 9.00e-86; SWISSPROT HIT: P20800, EVALUE 5.00e-27; EST_HUMAN HIT: BI760483.1, EVALUE 1.00e-85
ccagtagcttccaccctgacaccctgccccagagctccccctgcccccaatccccatggatgctcactcaggagtgttcacccagatgatgtccaagtggcagaagtagacgcactccttgtcgagccaggagctgcaggagcaacggcgaagccgaaggtgggtgccttgggcatgagatgaggacgctggctgctccagggtggcagcagcctggcccttccctgcatgcacaggagggagagagaggtggagaggtgggttggggtgcctggcacatcccagagtgggggacccaccatgcccctcctcttgcataatcgagggagttggcactcttgctgctcaagagctccaggccagcccagggaagtcccagcagcccgtggggagcctgggcacctctgtatttgcagaacctttcccctgccaccactgccgccaggctcccgcccctgtctgcccccagctggcttgggaggcactgcagccctagagggagacagagataggcagacccagg

SEQ ID NO: 9473 - DNA, 545 bp, Homo sapiens
  MAP TO CHR3.3; EXPRESSED IN BONE MARROW, SIGNAL = 2.5; EXPRESSED IN FETAL LIVER, SIGNAL =   3; EXPRESSED IN ADULT LIVER, SIGNAL = 2.2; EXPRESSED IN PLACENTA, SIGNAL = 2.8; EXPRESSED IN LUNG, SIGNAL = 2.9; EXPRESSED IN HELA, SIGNAL = 2.3; NT HIT: L36149.1, EVALUE 0.00e+00; SWISSPROT HIT: P46094, EVALUE 4.00e-87; EST_HUMAN HIT: BE252309.1, EVALUE 3.00e+00
aagcaccttgtggaagatggtgtcgaggatggaggacaggatgctggctacccacacagccatggtcaccagcacccggcagcggagggtggggacgcgcagggtggagagggggctcactaccgacaggtagcggtggatggtcatgatggtcaggaagaagatgctgctgtagaggctgatggagaagatcatattgaggagtttgcagaggaagtctcccagcacccagccccagtggtatggggagatccacacaggcaacaagcaggcgaacaccaggtctgagaggcacaggttgaggatgaagatgttggtgagggactccaggctctcatacttcaccaggacccacaggaccaggctgttgcccactaggctgaggagaaacaccaggcagtataggacagtggtggcgagggtagcaaagacccaggcctggttctcacacggctggctctgaaggtcatagtaaaaaaaggtggtgctctctgggttgcctgaggactccatctggaccagatggcagggacgtttagagcatc

SEQ ID NO: 9474 - DNA, 572 bp, Homo sapiens
  MAP TO CHR22.3; EXPRESSED IN PLACENTA, SIGNAL = 1.4; EXPRESSED IN BONE MARROW, SIGNAL =   2; EXPRESSED IN LUNG, SIGNAL = 0.99; EXPRESSED IN HEART, SIGNAL = 1.4; EXPRESSED IN BRAIN, SIGNAL = 1.3; NT HIT: X54018.1, EVALUE 0.00e+00; SWISSPROT HIT: P10323, EVALUE 1.00e-36; EST_HUMAN HIT: BG724168.1, EVALUE 1.00e-110
aagctcttccccacttttcccaaccccatgtccctgcctcccctcagttgtggagttacaaggacaggctgtgctcatgccaggtttgaactgtgctctggtctctccccagtggcccctgtgggttacggttcaggcaaaacccacagggtggtgtccgcatcgtcggcgggaaggctgcacagcatggggcctggccctggatggtcagcctccagatcttcacgtacaacagccacaggtaccacacatgtggaggcagcttgctgaattcacgatgggtgctcactgctgctcactgcttcgtcggcaaaaagtacgtgtagggatgcactgagggaggtcttcagaacggctcttctcagagaggggcgttccccggggatgctgtgcagcgtctccctggggctctgggccaagtggctgcaagactccgggggctggtccagacctttgctaggggaaggccctgagggtcgctgtcaccaggcttttgtccagccggttgtgacctggcttacctttgtgcccacagtaatgtgcatgactggagactggttttcggagcaaag

SEQ ID NO: 9475 - DNA, 564 bp, Homo sapiens
  MAP TO CHR1.3; EXPRESSED IN BRAIN, SIGNAL =   2; EXPRESSED IN FETAL LIVER, SIGNAL = 1.2; EXPRESSED IN BONE MARROW, SIGNAL = 1.4; EXPRESSED IN HEART, SIGNAL = 1.6; SWISSPROT HIT: Q05526, EVALUE 3.10e+00; EST_HUMAN HIT: BE298275.1, EVALUE 1.00e-126; NT HIT: AJ011123.1, EVALUE 1.00e-126
cagcattacctccctgaagccctctcacctccacttgcagctcgcctatgtcatccaccgaccaggcctcatcatcgttgtcatagttgggcacagtgctgaagctgccagctcgctgctcatgggtaataccacattcgggcaagttttctacggacctcgtactccgaattcggttctcggggatccgggcagggacactggtggtgtcaaagttttcacattcaaggacttccacataaatcaggtagggagcctgggggaagagtgagacagtatttgcaacttacttccaccactaacccccaaatctcaactctgttagcaaggttcttcctgctgtcctttctcctagctccagccttcatccaatagtcctctgaaactatgaacactatatttagggcagatacttgtcctatgatcacctatgtaaagaatttgtgtgacagaatccttaagtcttcaaaatatttcaactgagctccaaaatgtacagatgatgtgcttgggccaaaccactctagactatcaattacaggctgtaagggaggcctagatgcc

SEQ ID NO: 9476 - DNA, 508 bp, Homo sapiens
  MAP TO CHR10.3; EXPRESSED IN LUNG, SIGNAL = 2.2; EXPRESSED IN HEART, SIGNAL = 1.6; EXPRESSED IN BONE MARROW, SIGNAL = 1.4; EXPRESSED IN PLACENTA, SIGNAL = 1.6; EXPRESSED IN FETAL LIVER, SIGNAL = 1.5; EXPRESSED IN ADULT LIVER, SIGNAL = 1.3; EXPRESSED IN BRAIN, SIGNAL = 0.99; SWISSPROT HIT: P14222, EVALUE 1.00e-58; EST_HUMAN HIT: BI838706.1, EVALUE 0.00e+00; NT HIT: M31951.1, EVALUE 0.00e+00
gataatctgtggctgtggggaaagggagcagtcatcctccatccctccacccatggcttcccagagcccaagtgccccctgtctctgcagctccatggcagcccgtctgctcctcctgggcatccttctcctgctgctgcccctgcccgtccctgccccgtgccacacagccgcacgctcagagtgcaagcgcagccacaagttcgtgcctggtgcatgctggccggggagggtgtggacgtgaccagcctccgccgctcgggctccttcccagtggacacacaaaggttcctgcggcccgacggcacctgcaccctctgtgaaaatgccctacaggagggcaccctccagcgcctgcctctggcgctcaccaactggcgggcccagggctctggctgccagcgccatgtaaccagggccaaagtcagctccactgaagctgtggcccgggatgcggctcgtagcatccgcaacgactggaaggtcgggctggacgtgactcctaagc

SEQ ID NO: 9477 - DNA, 559 bp, Homo sapiens
  MAP TO CHR5.3; EXPRESSED IN LUNG, SIGNAL = 1.2; EXPRESSED IN HEART, SIGNAL = 0.86; EXPRESSED IN BONE MARROW, SIGNAL = 0.86; NT HIT: D61416.1, EVALUE 0.00e+00; SWISSPROT HIT: P20585, EVALUE 4.00e-29; EST_HUMAN HIT: BE514324.1, EVALUE 1.00e-100
agcaggatcaaacgtttccctactttttaggagttctgtgcaatacctcaaattctatccagaatgttcctacaaagtacagtatgatgttagacactctttacatccaacatgttttcttttgtttaatttaatttgagctattattggctcaaaatatatagattcttagtgatcttttatatttattgttcataaaataatgttcggcttcctaataagaaagtgaagaggaaaatcaaggtgttttcatcttgcttgtaggatgggtgctgcagacaatatatataaaggacagagtacatttatggaagaactgactgacacagcagaaataatcagaaaagcaacatcacagtccttggttatcttggatgaactaggaagagggacgagcactcatgatggaattgccattgcctatgctacacttgagtatttcatcagagatgtaagtatccggtaaactgtatttaaaaagaaattaatttgtaaattattatttttaaatgacagtcataattgtgccatatttatggggtacaatgtgatgttttga

SEQ ID NO: 9478 - DNA, 527 bp, Homo sapiens
  MAP TO CHR21.3; EXPRESSED IN LUNG, SIGNAL = 1.1; EXPRESSED IN BONE MARROW, SIGNAL = 1.3; EXPRESSED IN HEART, SIGNAL =   1; EXPRESSED IN ADULT LIVER, SIGNAL = 0.98; EXPRESSED IN BRAIN, SIGNAL = 1.9; NT HIT: gi14780854, EVALUE 0.00e+00; SWISSPROT HIT: O95613, EVALUE 3.00e-41; EST_HUMAN HIT: AA306406.1, EVALUE 1.00e-17
caggtacacacagtgccgtcatacagcgagggaattcggggtgctggtgctcagggcagtgatgcgctgtggggtcactggcagaggagctgggtggcatctcagtggcatccgggcctctgtgtcctgcccctgcttccacgggatgtctgctgtttcattttctgtgtcttccttactcattctcattcatgcttctgtgtctccctgatgcgccctggttctgaccatgggcccttatcagaggccttttctccgccgcaggccgtgcatggccttgagctggaggcgctgcgcctgagtctgagcaacatgcacacggcgcagctggagctgacacaggccaacctccagaaggagaaggagacggcattgacggagctgcgggagatgctcaacagccggcgtgcccaggagctggccctgctacagagcaggcagcagcacgagctggagctcctcagggagcagcacgcacgggagaaggaggaggtggtgctcaggtgtggacaggaagcaggtactgc

SEQ ID NO: 9479 - DNA, 570 bp, Homo sapiens
  MAP TO CHR17.3; EXPRESSED IN FETAL LIVER, SIGNAL = 0.91; EXPRESSED IN BRAIN, SIGNAL = 1.9; EXPRESSED IN BONE MARROW, SIGNAL = 2.2; EXPRESSED IN PLACENTA, SIGNAL = 1.7; EST_HUMAN HIT: AW631291.1, EVALUE 8.00e-72; NT HIT: gi16164374, EVALUE 5.00e-72; SWISSPROT HIT: O75771, EVALUE 5.00e-20
atggggttttcctgtgtcagaatctcaatggaacccagcatcctgcccttacctgttcctcctcatcctgggttttagcctgaagcagctggaggaggcgggaagctgtcagccctccattggaatctacatataggacgttttgctgcaggccatgggccacatttgctgccatacagagacatacctgggggtgggggcattggatgaacttgacacttcagagagggtccagatgggagctccccaccaaaccttgcccagattccagcaacacaaatgggctgagtcccgaccccattccttattacccatcttctctctgttgggctctgaacccattagtacgctgaagctcccccagggaccctgggctatgcatctaccaccctcacccctaaatcctcctgactgctggcctcacatgtacctgagttttgccgctacctgggcctcctacaatttcagtcacttctccagtatagagaccagcatcaagcagtttatcaagactgatggcagaagagaagaaaatcaacacaagaggttaggaggaagacaggggaaaag

SEQ ID NO: 9480 - DNA, 550 bp, Homo sapiens
  MAP TO CHR21.3; EXPRESSED IN LUNG, SIGNAL = 1.5; EXPRESSED IN PLACENTA, SIGNAL = 1.5; EXPRESSED IN ADULT LIVER, SIGNAL = 2.4; EXPRESSED IN BRAIN, SIGNAL = 1.6; EXPRESSED IN BONE MARROW, SIGNAL = 2.1; EST_HUMAN HIT: AU143357.1, EVALUE 6.00e-91; NT HIT: gi14780601, EVALUE 4.00e-91; SWISSPROT HIT: O70477, EVALUE 1.00e-26
tgagtcacttgtcctgcctgccacagagcgaatcagtggaagggctaggctttggctcacagcccacacacctagcactgggatgcaccgaggtcaccaccacgcgcctttgtcttccctgcacaccagatgcagccaaacaccaaagcccaggtcagtggcaccggaacaacacatcagtttagaggatttctgatgttattccactttggttattggcagtagagatggttctatctaatgactaagaactggtatgtaggatcatgataacttacaataatgccacctttttctctgaaagtcttcattttctctgctctagatggtaaaagcaatccaggttttgcgcattcatcttcttgagctggaaaaggttaacgaactctgcaaagatttctgcagtcgatacattgcttgtctgaaaacaaaaatgaacagtgaaactctgttgagtggagagcctggaagcccgtactcaccagtgcagtcccaggtacttacatttgggggtctcgctttccctctctgccactgtgaacatctgcat

SEQ ID NO: 9481 - DNA, 500 bp, Homo sapiens
  MAP TO CHR13.3; EXPRESSED IN BRAIN, SIGNAL = 1.2; EXPRESSED IN FETAL LIVER, SIGNAL = 1.2; EXPRESSED IN BONE MARROW, SIGNAL = 1.1; EXPRESSED IN PLACENTA, SIGNAL = 1.1; SWISSPROT HIT: P24545, EVALUE 4.60e+00; EST_HUMAN HIT: BE504550.1, EVALUE 3.00e-68; NT HIT: gi15301776, EVALUE 2.00e-68
tctttttccctgctggtttgtaactgtttcttttttttttttcttcctggagttatattatctaggtttgttatatttatatttagaattattgtatctatatttaacaaaggatgattttcttctatatttcttttttccttttttttttttttagatgtctttggtttgttctggaaatattaatggctaaaaatgaaaataacagtcacgcttttatcagaaagatggtagaaaatattaaacaaacaaaagatgcccaaggaccagatgatgcaaaaatgaatgaagtatgtaattctttgtaaataattatggttccatattgatttaaaaatttaggtgtaaagtatgaaacttctgtagtatttatagatagcatcaaataattttttctattagtaattagaattacgtagaattagcagtaattttattacaagtaaatgagcaaaaccagtagtgtaagctaagatgcttacacagactgttgctttcat

SEQ ID NO: 9482 - DNA, 549 bp, Homo sapiens
  MAP TO CHR2.3; EXPRESSED IN PLACENTA, SIGNAL = 1.8; EXPRESSED IN BONE MARROW, SIGNAL = 2.2; EXPRESSED IN LUNG, SIGNAL = 3.1; SWISSPROT HIT: P80313, EVALUE 4.00e-24; EST_HUMAN HIT: BG257448.1, EVALUE 9.00e-84; NT HIT: gi14723764, EVALUE 4.00e-82
ctggaggtagaggctggttggggaatggatgtggtagacagttgggggaatgtggtttaagaagacctctagataattctgttaagggagagatgggagcattttcccctttcccctgccagtctcattataatagatgattattaaaagcagttaatttctttcttttctagcccacaccagttatcctattgaaagaggggactgatagctcccaaggcatcccccagcttgtgagtaacatcagtgcctgccaggtgattgctgaggctgtaagaactaccctgggtccccgtggcatggacaagcttattgtagatggcagaggtaagtctacagagttcctcaggcctgtgtgcaggaaaggaggctcctgagggggtgtttgggactagcataggttggtatcagaaatcccactgcttttaagatcgttgaaagatgactcactctgaagcagttccaattcttatattgtcctgactgctgagcccgtgtgggactatatgagagaacctaggctcaggagcctgttgcctcatagggaga

SEQ ID NO: 9483 - DNA, 572 bp, Homo sapiens
  MAP TO CHR4.3; EXPRESSED IN BONE MARROW, SIGNAL = 0.8; EXPRESSED IN FETAL LIVER, SIGNAL =   1; EXPRESSED IN BRAIN, SIGNAL = 0.78; EXPRESSED IN ADULT LIVER, SIGNAL = 0.84; NT HIT: gi14725014, EVALUE 0.00e+00; SWISSPROT HIT: Q13316, EVALUE 6.00e-73; EST_HUMAN HIT: AW188973.1, EVALUE 5.10e-02
ctccaggagcacaggaaaaggaggagatgataaagatgacgatgaagatgacagtggagatgacacctttggtgacgatgacagtggcccagggcccaaagacagacaagaaggaggaaactccagactgggaagtgatgaggactctgatgacaccatacaagccagtgaagagagtgccccacaagggcaagacagtgcccaagataccaccagtgagagcagggaacttgacaatgaggaccgggtggacagcaagcctgagggaggtgactccactcaagagagtgagagtgaagagcactgggtgggaggtggcagtgatggggagagcagccatggagacggctccgagttggacgatgagggaatgcagagtgatgacccagagagcatcaggagtgaaaggggaaactccagaatgaacagtgcaggcatgaaatcaaaagaatctggagaaaacagtgagcaagcaaacactcaagattcaggtggcagccaattgctggagcatcccagtaggaaaatttttaggaagtctcgcatctcagaggaagatgacagaagcgagc

SEQ ID NO: 9484 - DNA, 592 bp, Homo sapiens
  MAP TO CHR5.3; EXPRESSED IN ADULT LIVER, SIGNAL = 6.3; EXPRESSED IN FETAL LIVER, SIGNAL = 4.3; EXPRESSED IN BRAIN, SIGNAL = 4.3; EXPRESSED IN BONE MARROW, SIGNAL =   4; EXPRESSED IN HELA, SIGNAL = 6.4; EXPRESSED IN PLACENTA, SIGNAL = 5.8; EXPRESSED IN LUNG, SIGNAL = 3.2; EXPRESSED IN HEART, SIGNAL = 4.9; NT HIT: gi14735831, EVALUE 1.00e-110; SWISSPROT HIT: P49419, EVALUE 6.00e-16; EST_HUMAN HIT: AA633629.1, EVALUE 0.00e+00
atgctactaccgcatccagcgccagcggggagtcggtaggtcagtgcccgcccggcctcctcgagcgagccccggcggctgcagagatttcttgagcgcccgcgtacctctccccggcctccccagcttccattatacacgccctcgttttcctcgcggagccccagctctttcagccacgcatactggggctgattgatgaggagagtggacatgaaggcggcaggcctgctccaaggtccagagagcttgctggtctttgcagcgtgcacacacagcgcgcgaggaaggcgccacatactgagcccgggactcgggatgagcccaaggccctgagagctgctgaaatagagccccgccccccgcccgggagaacccattgggcagacccgacccctcccactgggcacgaccccgccaccgccccgtctgcccctggtcttccggaggagcctgcggctgaatcctgcctggaacaatgggagtgctacagggaggagtgggctgctgccatctggtgaaagactccgggagccacagttccagctgggaattcttttcagcaaaatattggcgctgaagtacagtaggc

SEQ ID NO: 9485 - DNA, 513 bp, Homo sapiens
  MAP TO CHR19.3; EXPRESSED IN LUNG, SIGNAL = 1.2; EXPRESSED IN PLACENTA, SIGNAL = 1.9; EXPRESSED IN ADULT LIVER, SIGNAL = 1.5; EXPRESSED IN BONE MARROW, SIGNAL = 1.3; NT HIT: gi16177788, EVALUE 1.00e-53; SWISSPROT HIT: O43765, EVALUE 5.00e-15; EST_HUMAN HIT: BF204010.1, EVALUE 2.00e-53
ctctcagctttccccatcagccccattttacagatggggaaaactgaggccgttcctccaggaagttggagaggaacgcagctctcaggctcccctcaagggctgcccgctgggctcagagccgccagtgagggacctgccctgccttttcttccccagagccgcagcctacagcaaactcggcaactacgcaggcgcggtgcaggactgtgagcgggccatctgcattgacccggcctacagcaaggcctacggcaggatggggtgagtgcctgtccacggccgcgcctttccagtctctcgggacccctcctctcctgctcctgcttcctctcttgtgtggcttttttcccacccacaacgaattctcccaccccggttcagttcaactctgacactagctgttcggagccaacgtagtccctacaggtcacaggctcagccccacagacgccccgcatcaggtgccacccggagatccctgggccccttgcttctccctgactggctgtc

SEQ ID NO: 9486 - DNA, 513 bp, Homo sapiens
  MAP TO CHR2.3; EXPRESSED IN ADULT LIVER, SIGNAL = 0.77; EXPRESSED IN BRAIN, SIGNAL = 1.3; EXPRESSED IN PLACENTA, SIGNAL = 0.64; EXPRESSED IN BONE MARROW, SIGNAL = 0.83; NT HIT: AF041056.1, EVALUE 2.00e-86; SWISSPROT HIT: O42184, EVALUE 1.00e-04; EST_HUMAN HIT: AA077633.1, EVALUE 2.00e-50
tttctgcaggtgttgaccagcaatttcctgcggcatttacttcttgataacaagagtgagaagatagagacagggtagatagacacttaagagtaaaatgtattaacacaaaggctctggccgcccccctacaaaggaggccatggaaccgatggaactgatggaggaaatgctgggactgtgggtcagtgctgacacacccatggccatacgtttggtcttcttggccttggctgggctggtggatgggaagccagtatggatcaccttgtggatggatgcaaagagaccaaacttggcgggcactggaagtacctggggaagcaggagagactcacactgctgtcatggccccacagcctggagcctcccctgcctcctctgcctcttcagagcccagcagaaagacagagaaagaagcctccttggggttccattacccacactccaaggtggaaatctttcagatggttagatgatgaaggtagtagaaggcaaggatgattgggagta

SEQ ID NO: 9487 - DNA, 560 bp, Homo sapiens
  MAP TO CHR8.3; EXPRESSED IN BONE MARROW, SIGNAL = 1.4; EXPRESSED IN LUNG, SIGNAL = 1.2; EXPRESSED IN HEART, SIGNAL = 1.8; EXPRESSED IN PLACENTA, SIGNAL =   1; EXPRESSED IN FETAL LIVER, SIGNAL =   1; EXPRESSED IN ADULT LIVER, SIGNAL = 1.2; EXPRESSED IN BRAIN, SIGNAL = 1.1; EST_HUMAN HIT: AW965863.1, EVALUE 1.00e-117; NT HIT: AF098463.1, EVALUE 0.00e+00; SWISSPROT HIT: P52823, EVALUE 2.00e-36
catgatacgttgcccagatgagcccccttaaattcctccatgtatatgcccatcctctttgtcaggtcaagctaaagacctccctcttgtccttcctccatggcagggaaaagcattcgtcaaagagagcttaaaatgcatcgccaacggggtcacctccaaggtcttcctcgccattcggaggtgctccactttccaaaggatgattgctgaggtgcaggaagagtgctacagcaagctgaatgtgtgcagcatcgccaagcggaaccctgaagccatcactgaggtcgtccagctgcccaatcacttctccaacaggtacaaactgagtctactttttcacaatcaggggactgggagcaggtggctggctggcagagccagactgggagggagggttaaattgccacagtcatgctcttattttagcttgcagtcttcccagcttttgcaggaaaaaaatatgtttgtgattggttgtgacagtttaagcagcttgggcttttttttccctactgttataggaaaagtcttttcatgcagctcatagaaagccagcc

SEQ ID NO: 9488 - DNA, 550 bp, Homo sapiens
  MAP TO CHR9.3; EXPRESSED IN FETAL LIVER, SIGNAL = 1.4; EXPRESSED IN BRAIN, SIGNAL = 3.3; EXPRESSED IN HELA, SIGNAL = 3.3; EXPRESSED IN PLACENTA, SIGNAL = 1.6; EXPRESSED IN BONE MARROW, SIGNAL = 1.3; EXPRESSED IN LUNG, SIGNAL = 1.9; EXPRESSED IN HEART, SIGNAL = 2.3; EXPRESSED IN ADULT LIVER, SIGNAL = 2.3; EST_HUMAN HIT: BI758449.1, EVALUE 6.00e-88; NT HIT: gi14736054, EVALUE 2.00e-50; SWISSPROT HIT: P28702, EVALUE 4.00e-02
aatgccaggaaacatggaaggctctgccctgtctgtccacgtcgggggtttccagaggtctggggtggggcttgggggtcactgtaccttctctccattggggttccccagaatgtagcagcccatgatgtggatgacgttcggctctgggttcactttgctcatcaggcggctcagccgcttccagaagctggtggagaggggtgggtcacccagtggcaggggacaggcaccccactccacagagcggaccgtggaggaggggctgtgggggagggacatgccagggcctggactctgcctccagccctccccgcgcccagggcacccggcttctcactgaatcatgtcctcttccttctccactttggcaaaggtggccaccttgttcttgaggagatagaggtgtccaggacctccctgtaagaagctgtggtcaggcatctgctcctccttcctgcccctctccgacacacatgcacccacgcacatgcgtgggaggtagttttggtcttcatcccccggccacgcttcttccccttgatctccc

SEQ ID NO: 9489 - DNA, 506 bp, Homo sapiens
  MAP TO CHRX.3; EXPRESSED IN BONE MARROW, SIGNAL = 0.83; EXPRESSED IN PLACENTA, SIGNAL = 0.46; EXPRESSED IN LUNG, SIGNAL = 0.79; EXPRESSED IN HEART, SIGNAL = 0.93; EXPRESSED IN BRAIN, SIGNAL = 1.1; SWISSPROT HIT: P56377, EVALUE 3.00e-19; EST_HUMAN HIT: BF171925.1, EVALUE 1.00e-106; NT HIT: gi14763381, EVALUE 3.00e-73
tgtcttggggattctaaccgcgggagagggtgggaatgactatttattagtagaaattattaagttgtccatattgggaacatgcagagcccagtcttatttagcttgtaggaatatgttttcaagtacttgagatttggaaattaagcttacttaaaccagtgatacttagtcatttttagaaagagttaagattgattcactctagttcgattttattcactacctgatagtgaataagcatcttctgcttctgcaagttttaacaattttttcttttcttttttcttttttttttccttttcaggtctgtgaactagatatcatctttaattttgagaaggcttattttattttggatgagtttcttttgggaggggaagttcaggaaacatccaagaaaaatgtccttaaagcaattgagcaggctgatctactgcaggaggtaagctacttattctcttcactaggcactagcatgttttgctcttgctggggaagtctca

SEQ ID NO: 9490 - DNA, 573 bp, Homo sapiens
  MAP TO CHR22.3; EXPRESSED IN HELA, SIGNAL = 3.6; EXPRESSED IN BONE MARROW, SIGNAL = 4.5; EXPRESSED IN PLACENTA, SIGNAL = 5.6; EXPRESSED IN FETAL LIVER, SIGNAL = 4.2; EXPRESSED IN ADULT LIVER, SIGNAL =   4; EXPRESSED IN BRAIN, SIGNAL =   5; NT HIT: gi14778605, EVALUE 6.00e-75; SWISSPROT HIT: O15371, EVALUE 3.00e-23; EST_HUMAN HIT: AI347993.1, EVALUE 5.00e-76
tgctgtttggcatttgtctcctaactgacccctccatctctaccccacccctggatttatctctgccagtcaattgtccagtacacggggaggggagggtcaacctccctacccagacccttcctttcacaagatcagctgccagctcctgcacaggaatctcacccaagcttgaggtactcagatccagccagcaaagcacagcaggtccaccgggccaacttgtagctgttgttcttcagctccgtggcaatgacagcccctcgctgagagtccagcttctgacgccagtcaacgccattacagtgctgcaggagagccccgttagagaaacagaagcaagctccaaatgcccaaggtgctgggacctcctctggcagagaaggaactccctagtctgcttgcttagaaagtgggtaggtacgcactaaatcttaccatttaagagacaaagacatagtcccttcccttgcacagcctgccgcacagcagtcactcaacgacttacaattcctctcttctaaaagctcgcctagacagggaatgatggatggacacacacggacacacaca

SEQ ID NO: 9491 - DNA, 544 bp, Homo sapiens
  MAP TO CHR14.3; EXPRESSED IN LUNG, SIGNAL = 2.3; EXPRESSED IN BONE MARROW, SIGNAL = 2.3; EXPRESSED IN BRAIN, SIGNAL = 1.6; NT HIT: gi14751476, EVALUE 1.00e-120; SWISSPROT HIT: Q15070, EVALUE 2.00e-24; EST_HUMAN HIT: BI912843.1, EVALUE 1.00e-120
agcatgaagggaagtcatggattcttactcaaagtaacttctcttcctaactattgataaaaatgagatgtcctttttaagcttgaaatctgcagacactaggctaacctggaagaacaagaagtagagagaacagaacccagtactggttattataaaaagatctcacttgctttgtgttcgctactgaataaatataatacaaggctttctttcacacaggttcaggcccctcctgttgttgctgcaactccctcacccacagcagtacctgaggtggcttctggagagactgcagatgtagtccaaactgctgcagagcagagcttcgctgaactggggctggggtcatacaccccagtgggactgatccagaatttactggaatttatgcatgttgatctgggcctaccttggtggggggccattgctgcatgtaaggggaatataccctggacatgggttagggatttaacctcatagatggcaattctttgaatggattcaggaagtagttgcagaagctctggggtcagaagagcag

SEQ ID NO: 9492 - DNA, 600 bp, Homo sapiens
  MAP TO CHR11.3; EXPRESSED IN BONE MARROW, SIGNAL = 1.4; EXPRESSED IN LUNG, SIGNAL = 0.83; EXPRESSED IN PLACENTA, SIGNAL = 0.82; EXPRESSED IN HEART, SIGNAL = 1.5; EXPRESSED IN BRAIN, SIGNAL = 1.5; EST_HUMAN HIT: AI651030.1, EVALUE 1.00e-61; NT HIT: AJ249369.1, EVALUE 0.00e+00; SWISSPROT HIT: P76473, EVALUE 1.50e+00
gagctctgggagatgtcctgtcccttgcagcctctgggctcctgtggcaaccacctccaacctaggccccacgcaccaggagtagatgaagaaggccataataaggcgcagagtaccagtagcttcaggtggcgccagtggggcacagcgtaggccacatcatccaggaggaactggcccaggctgtagacatagcccattcaaggtgcccacgcaggcccgtgtgtgaatgggcatcactccacatctggaaagagggttaagacaggatgctgcaactacctgggctgctgggctagtaaaggcccctccctccatccaaaccttggcctgtcccaaggctcagtggaaaatgcatcgagtaagttgagtgccagggtgatgggagtgggggaatttcagtggaggtatggatgaggagctgggttcagaatatctgggaactgccccctccacactcttgattttttttttttttctgctcctcctcaacctattctcctggctagagttccttctccattgagagcacctctggccacttggtctgtcttcagcagcaaccattcctctggtcttcctcagctatgggctggattc

SEQ ID NO: 9493 - DNA, 552 bp, Homo sapiens
  MAP TO CHR14.3; EXPRESSED IN PLACENTA, SIGNAL = 0.56; EXPRESSED IN BONE MARROW, SIGNAL = 0.91; EXPRESSED IN ADULT LIVER, SIGNAL = 0.69; EXPRESSED IN BRAIN, SIGNAL = 0.91; EST_HUMAN HIT: BE293065.1, EVALUE 0.00e+00; NT HIT: M98447.1, EVALUE 0.00e+00; SWISSPROT HIT: P22735, EVALUE 1.00e-57
ttgcctgagacattgagcagcatggccccctggtccacaagatggggccggtattccttgtaggccactggcatggtcacacggtccgctgtggagaagaggcatggcgtcactgaggcctgcttccctacatgaggcttcccccagggactccccactgctcctggggtctccatgtccacagccctgaggtgcccagccatccagggggcagggctgggtaaggagcacttacaggcccctggtgccagctccacttccttcttggtctccttgaagatggtaccactgacaccagtatagaaagtgactgagaggtagaggtgcagtttcactgtgcggcggctgctgctgtgattgatcagcatcacagagaccatcagatcctgccccatcaccgcgtcctgtgcctccacctgcatggccacatcctccgctgagccccggttggcatacacattgggtttgctgccgtgggctgctgctgtctctactgccttccgctctgcgtctgagcctgggggttgagggtcaagggtgaggttccaattc

SEQ ID NO: 9494 - DNA, 504 bp, Homo sapiens
  MAP TO CHRX.3; EXPRESSED IN FETAL LIVER, SIGNAL = 2.8; EXPRESSED IN ADULT LIVER, SIGNAL = 2.5; EXPRESSED IN HELA, SIGNAL = 3.3; EXPRESSED IN BONE MARROW, SIGNAL = 1.3; NT HIT: gi14757937, EVALUE 0.00e+00; SWISSPROT HIT: P55795, EVALUE 7.00e-80; EST_HUMAN HIT: AU132183.1, EVALUE 0.00e+00
accaagagcccaacaatcaccatgatgctgagcacggaaggcagggaggggttcgtggtgaaggtcaggggcctaccctggtcctgctcagccgatgaagtgatgcgcttcttctctgattgcaagatccaaaatggcacatcaggtattcgtttcatctacaccagagaaggcagaccaagtggtgaagcatttgttgaacttgaatctgaagaggaagtgaaattggctttgaagaaggacagagaaaccatgggacacagatacgttgaagtattcaagtctaacagtgttgaaatggattgggtgttgaagcatacaggtccgaatagccctgatactgccaacgatggcttcgtccggcttagaggactcccatttggctgtagcaaggaagagattgttcagttcttttcagggttggaaattgtgccaaatgggatgacactgccagtggactttcaggggcgaagcacaggggaagcctttgtgcagtttgcttca

SEQ ID NO: 9495 - DNA, 580 bp, Homo sapiens
  MAP TO CHR12.3; EXPRESSED IN LUNG, SIGNAL = 4.9; EXPRESSED IN HEART, SIGNAL = 3.6; EXPRESSED IN HELA, SIGNAL = 3.6; EXPRESSED IN PLACENTA, SIGNAL = 3.2; EXPRESSED IN BONE MARROW, SIGNAL = 4.1; EXPRESSED IN BRAIN, SIGNAL = 4.7; NT HIT: gi16163898, EVALUE 9.00e-80; SWISSPROT HIT: O35594, EVALUE 2.00e-18; EST_HUMAN HIT: AU116935.1, EVALUE 1.00e-79
atgaagacaggaagatgggggttgggaagttttataataaaactaaattattaagttattatataatatataattattatataaagttttctaataaaacgaaattattatatacgtgtgacatgttgggaagtagagaagaaaaaatgtgaatatattgagtttatacagatgtatgatatttagctactacttttctactcattagattacatattgtgttttttttacagttcaaacgatatgtcaataaacttcgaagcaagagtacagttttcaaaaagaagcatcagataatagctgaacttaaagctgaattcggtcttttgcagaggactgaagaacttcttaagcaacgtcatgaaaatattcaacaacaactggtaatacagtattatcttgggctactataaatacaaatgccaggaggtttatgggttacagctttatactgaagtcattgtttttactggaaaaatgataaaagtattacttttctctgattaattacagacatgacatataagttgattcatttatttttaatgtagcagtaagcactggcttttgtgtgtgtgct

SEQ ID NO: 9496 - DNA, 569 bp, Homo sapiens
  MAP TO CHR4.3; EXPRESSED IN FETAL LIVER, SIGNAL = 1.3; EXPRESSED IN BONE MARROW, SIGNAL = 1.7; NT HIT: gi16158372, EVALUE 7.00e-99; SWISSPROT HIT: P52875, EVALUE 9.00e-26; EST_HUMAN HIT: AA256653.1, EVALUE 0.00e+00
gttcagctgaggagaaacggaagaattgagactatagcatttgttgctgtgtgagaccagtggttcagaggggaggtttgggggtcacataaatgtagtttttttggagcatatttcatagaatttaaacacttagaaaagtcaagtgatttgtgtgctattttgatttgcttcctgtgcttactttcatttgtttattatttattttagtttcaacgaaccaaacttttaaatggaccgggagatgttgaaacgggtacaagcataacagtacctcagaaaaagtggttgcattttatttcacccatttttgttcaagctcttacattaacattcttagcagaatggggtgatcgctctcaactaactacaattgtattggcagctagagaggtgagtgatatttgagaggagactgtttaaaatgaaacgtaattattattactttgttccagaaaacactggacacactgaagtgggccacagcattccttcatatgcaagactgttttacatctgataattcagctgctctctaaaattggccttctcccagttcctgctacctg

SEQ ID NO: 9497 - DNA, 565 bp, Homo sapiens
  MAP TO CHR16.3; EXPRESSED IN BONE MARROW, SIGNAL = 2.4; EXPRESSED IN HEART, SIGNAL = 2.6; EXPRESSED IN HELA, SIGNAL =   2; EXPRESSED IN PLACENTA, SIGNAL = 1.9; EXPRESSED IN FETAL LIVER, SIGNAL =   3; EXPRESSED IN ADULT LIVER, SIGNAL =   5; NT HIT: gi14774807, EVALUE 4.00e-91; SWISSPROT HIT: O95255, EVALUE 9.00e-53; EST_HUMAN HIT: BF815129.1, EVALUE 8.00e-35
gataatcctatcgggggaggcatttcctgaaggcccttggggagggcatggccatcccctcctctcccacctgcaggtcccagccatggtgggacgaccatacctcaggtcctcgcctcggtcagcacacttgtactgcagctggccgggcaggctggccaccaaggctttgagctgcaccgtctccagggctgcccagatagcctcgtccgagtgctcctgcagcaggtcgaggttcatccgcagagagccagggaacaggatggggtcctggcggggaggggcggtgggtcagagccgggtcccaccatgcctcccatctttgcccaccccctccaccagcctcacctgggggatgatgctgatcctggagcgcagtgtgtgcagccccacgtgggcaatggggaccccgtcgatccagatcccaccctcagctgcctcctggagccgcagcagcccactggccagggaggacttccctgccccggtcctgccaacgatgcccacctgcccggggttgggaggaaaggcctgctctgaccagagggtttgtgggcatttattg

SEQ ID NO: 9498 - DNA, 595 bp, Homo sapiens
  MAP TO CHR1.3; EXPRESSED IN LUNG, SIGNAL = 2.2; EXPRESSED IN ADULT LIVER, SIGNAL =   1; EXPRESSED IN FETAL LIVER, SIGNAL = 0.42; EXPRESSED IN BONE MARROW, SIGNAL =   1; NT HIT: gi4885630, EVALUE 1.00e-115; SWISSPROT HIT: P35590, EVALUE 3.00e-34; EST_HUMAN HIT: AU117449.1, EVALUE 0.00e+00
gacaaaggagagcatcagggctgggccaggggtcgccccagtggacctttcagcattttgatggctgcgttcatcttcagcccgtccttcttgatcatggcccggatgacctggccgaagttcccctccccgatgaggtcctcaaaggtgatgtcctcccactctagcactgggtagctcaggggctcgggctgcagttttggccgccgggtaagtgtcaaggtccctgagctgaactgcaggatggtctcctcgcccttcacaggatgagacaagagggcagacggtccacgcaagagtcaaagggggcggaaggaggcacagacaggcacacgaggaggtttcagtgtcagacaagtgggcagagacccagatggagggcaccctggtggtcagccagggacagacaggcagacagaggacataactgagacagaatcataggtaacagagccacaggtaggctgctgggtggacagatgtccaaggagagaaatgcagaggctgcagccaggggatctagtgtacgggactctggaaggcagaaccagggcttgtgggtaaagttgctagaagccacaatgtgagtcaatgg

SEQ ID NO: 9499 - DNA, 528 bp, Homo sapiens
  MAP TO CHR3.3; EXPRESSED IN HELA, SIGNAL = 5.5; EXPRESSED IN BONE MARROW, SIGNAL = 1.8; EXPRESSED IN LUNG, SIGNAL = 1.2; EXPRESSED IN HEART, SIGNAL = 1.9; EXPRESSED IN FETAL LIVER, SIGNAL = 1.4; NT HIT: gi14736240, EVALUE 3.00e-98; SWISSPROT HIT: Q02388, EVALUE 8.00e-26; EST_HUMAN HIT: BF870818.1, EVALUE 2.00e-66
aaatgcaaatagcgggtgagggccaagcccatggggggtcccacccctcccaacccctcttccctcactctcctggccagcccccagcctcaccctctctcctggccttcctgcctctcccacacccccagccctgcctgggagcccgggaataccaggctttccaggctccccggcaaggccggaaggcccgggggggcccctctccccaagggccagaccaggtggcccctgagggccagggtctccacggtcgcccttcagcccgcgttctccaggaaagccgatggggccctgcaggagtggaagagagaatgctggtggctgtacagctacaccccactccacggggcacaacccactgagccacttctgctcacctccttgcctggggggccctgttcgcctgagtcccccttggggcctcgacgccgttcgggcacaggcaggaagctaccagagctctcatcccaggtctccacgatctcccgcagggcagatgcctgagggacagcaagaggtcagagg

SEQ ID NO: 9500 - DNA, 593 bp, Homo sapiens
  MAP TO CHR3.3; EXPRESSED IN LUNG, SIGNAL = 1.2; EXPRESSED IN BONE MARROW, SIGNAL = 1.5; EXPRESSED IN HEART, SIGNAL = 1.2; EXPRESSED IN PLACENTA, SIGNAL =   1; EXPRESSED IN ADULT LIVER, SIGNAL = 1.6; EXPRESSED IN BRAIN, SIGNAL = 1.5; EST_HUMAN HIT: BG205056.1, EVALUE 0.00e+00; NT HIT: gi11449889, EVALUE 0.00e+00; SWISSPROT HIT: P51677, EVALUE 2.00e-89
gtgtcatcaccagcatcgtcacctggggcctggcagtgctagcagctcttcctgaatttatcttctatgagactgaagagttgtttgaagagactctttgcagtgctctttacccagaggatacagtatatagctggaggcatttccacactctgagaatgaccatcttctgtctcgttctccctctgctcgttatggccatctgctacacaggaatcatcaaaacgctgctgaggtgccccagtaaaaaaaagtacaaggccatccggctcatttttgtcatcatggcggtgtttttcattttctggacaccctacaatgtggctatccttctctcttcctatcaatccatcttatttggaaatgactgtgagcggagcaagcatctggacctggtcatgctggtgacagaggtgatcgcctactcccactgctgcatgaacccggtgatctacgcctttgttggagagaggttccggaagtacctgcgccacttcttccacaggcacttgctcatgcacctgggcagatacatcccattccttcctagtgagaagctggaaagaaccagctctgtctctccatccacagca

SEQ ID NO: 9501 - DNA, 521 bp, Homo sapiens
  MAP TO CHR6.3; EXPRESSED IN HELA, SIGNAL = 8.1; EXPRESSED IN BONE MARROW, SIGNAL =  36; EXPRESSED IN PLACENTA, SIGNAL =  24; EXPRESSED IN HEART, SIGNAL =  35; EXPRESSED IN FETAL LIVER, SIGNAL =  21; EXPRESSED IN ADULT LIVER, SIGNAL =  31; EXPRESSED IN BRAIN, SIGNAL =  28; SWISSPROT HIT: P17442, EVALUE 1.90e-01; EST_HUMAN HIT: BE260055.1, EVALUE 0.00e+00; NT HIT: gi14782398, EVALUE 3.00e-61
tatagacacagccaccacgctgcaccatgtaacgggctacctccaggtggttgttcaccacggcctccatcagtggcgtccgctgctgtttgtccactgcatttatgttggctccagcctgtgagggggcaggagggctggcaccagggaggcatggggcaggggaggggcctaagggcctggtgaatgaggcatggggccgggcccgtgctgacctgcagcagcacatggcagatctccacggagccttctgggcggctgcatgcaggggcgtgcgcttgctctgctggtcgctctggaagttggggtccaggttgtccactgcggggagagcccgccacaccgggagagggagggacaagtggtaagcaagctagggggcaggtggcacttctttcaggaaggcttctcagggccccaagctggatcagggcccctcctggcattctccgagcttgcctccaccacagcatttatcagaataaggagtcaaaggcatcagctctgcctgaattcaaacc

SEQ ID NO: 9502 - DNA, 598 bp, Homo sapiens
  MAP TO CHR19.3; EXPRESSED IN BONE MARROW, SIGNAL = 1.7; EXPRESSED IN HEART, SIGNAL = 2.7; EXPRESSED IN FETAL LIVER, SIGNAL = 2.6; EXPRESSED IN ADULT LIVER, SIGNAL = 3.6; NT HIT: gi14758744, EVALUE 0.00e+00; SWISSPROT HIT: P15882, EVALUE 5.00e-05; EST_HUMAN HIT: BG772249.1, EVALUE 0.00e+00
ccttttctgctccacctgagggaagaaaggtgggctcagcctgggtgctgaagaccatgagcgcccagggccaggtggggccctgcacagttctgaccattgagtttggtgtcgcccgcagggtcagccacaacaacaaggtgaatctcatgaccagcgagaacctctccatctgcttctggcccaccttgatgagacctgatttcagcactatggacgccctcacagccacgcgcacctaccagacaatcattgaactctttatccagcagtgccccttcttcttctacaatcggcccatcaccgagccccccggcgccaggcccagctccccctctgccgtggcttccaccgtccccttcctcacttccacgcctgtcacaagtcagccgtcgcccccacagtcgcctccacccaccccccagtccccaatgcagccactgcttccctcccagcttcaagccgaacacacgctgtgagccaccaagacctggggcgacaggagaaccggtcctctctctgacggggtggcatttggccttgaacaaaaccaagtccactggggacagaggcaggggcaagtggctctccccattac

SEQ ID NO: 9503 - DNA, 514 bp, Homo sapiens
  MAP TO CHR17.3; EXPRESSED IN ADULT LIVER, SIGNAL = 1.1; EXPRESSED IN LUNG, SIGNAL = 0.86; EXPRESSED IN BONE MARROW, SIGNAL = 0.87; SWISSPROT HIT: Q10085, EVALUE 2.00e-06; EST_HUMAN HIT: BG105222.1, EVALUE 2.00e-69; NT HIT: gi16164321, EVALUE 1.00e-69
cctgctgttgcctcctttagagaagtgagggctggatgactcaggataggaggttggtagaaagggcatctgtgctcaagtgtgtcagcgtggaagatcgcccgcaggggtgtgaggggcaggaccacatagccttggggccctggctagagctggaggtcacctcctgaacgccccctacactctctgacaagacacagaatggacgtgggcgagctcccgagtttcagaggtgagcctcagtcaaagacccgtgtgctccgacggtcatttcctgggctggtgagcagctaagccctgcctgcagaggttagagcttacccatcactccaagtgtggttgcaaacatcagcgcgatcccgatggggaggccaaccacatagtacccaatggtattcacaatggctccaaccttctgatttccactccccctcagaacaccaccactcgtgcactgcaggcagagagcattccatcactgtgaacacatccggcgctcttgaaacactcccat

SEQ ID NO: 9504 - DNA, 581 bp, Homo sapiens
  MAP TO CHR2.3; EXPRESSED IN HELA, SIGNAL =   3; EXPRESSED IN PLACENTA, SIGNAL = 4.7; EXPRESSED IN FETAL LIVER, SIGNAL = 3.1; EXPRESSED IN ADULT LIVER, SIGNAL = 4.4; EXPRESSED IN HEART, SIGNAL = 5.2; EXPRESSED IN BONE MARROW, SIGNAL = 4.8; NT HIT: gi4827015, EVALUE 1.00e-121; SWISSPROT HIT: P48751, EVALUE 6.00e-34; EST_HUMAN HIT: BF093595.1, EVALUE 1.00e-113
caatacacactcccccatcccagggccctaaggctgtgaccccagccccgtcctgactcctggagtcctttgcatccctgatcccaacagcccggggcctccgagccagagggagtggtctgtgccccagcagccccttgttcccccagaactgtctttggagttggggggctctgaggcgacccctgaagatgaccccttgctgcggacgggctcggtatttggggggcttgtgcgggatgtgaggcgccggtacccgcactaccccagtgacctgcgagatgcgctgcactcccagtgtgtggccgctgtgctcttcatctacttcgcagccctcagccctgccatcaccttcggggggctgctgggtaagggactggggcttggggagttgaggggctcctctagtcacttctggtcccagtgtcacttgcaggattctgggtctgggtgtgatcacattagggggccaatggttagatgtgctagcaaaggtgtaagcaccttacagagatgctggatcagggaatcccagcgatcacctttggggagctataaagtgagggtgtgggagaggtgta

SEQ ID NO: 9505 - DNA, 553 bp, Homo sapiens
  MAP TO CHR20.3; EXPRESSED IN FETAL LIVER, SIGNAL = 2.2; EXPRESSED IN ADULT LIVER, SIGNAL = 2.5; EXPRESSED IN BRAIN, SIGNAL = 2.7; EXPRESSED IN LUNG, SIGNAL = 2.6; EXPRESSED IN HEART, SIGNAL = 2.4; EXPRESSED IN BONE MARROW, SIGNAL =   3; EXPRESSED IN PLACENTA, SIGNAL = 2.1; SWISSPROT HIT: O43451, EVALUE 2.70e-01; NT HIT: gi14772516, EVALUE 0.00e+00; EST_HUMAN HIT: AL526827.1, EVALUE 0.00e+00
ctaacagcttggcaagggaggtgaaatggtgtgtctgaggtgactgtgtaaacggtaccgttgctggacaacactgactgaaaacggaggtgctggtacaggaggaatgggtgggcgagaaataaaggccttctctcctgcccattggttggaagcaggcaatggagccaagtgaccttctacagcagggcctgaccaactgactgctgtggggtctgcaggttgggaccagaaggtgggcttcttgggcaatttctctagaggtcatccaaggtgaaaccctctgtgtctccaagaggcctccccattctccaaagagaaggaggttctggcgctttggagaggaagagggccaagtgtggctcccgattcaggtcaaaaaaataaaagtaaataatacctgaagtcctacggtatgagatcttttcacggggttggggctcaaggctccttctggaatcgatcctagagcctgaacccccaaaccaagtgctcctgtatacagacactggaatttttttttttgaacccagctctgaaagctcagctgcct

SEQ ID NO: 9506 - DNA, 508 bp, Homo sapiens
  MAP TO CHR22.3; EXPRESSED IN HELA, SIGNAL = 2.3; EXPRESSED IN PLACENTA, SIGNAL = 5.3; EXPRESSED IN BONE MARROW, SIGNAL =   5; EXPRESSED IN LUNG, SIGNAL =   4; EXPRESSED IN HEART, SIGNAL = 6.3; EXPRESSED IN FETAL LIVER, SIGNAL = 3.2; EXPRESSED IN BRAIN, SIGNAL = 5.5; EXPRESSED IN ADULT LIVER, SIGNAL = 6.2; SWISSPROT HIT: Q9UJY5, EVALUE 1.00e-09; NT HIT: AF218584.1, EVALUE 1.00e-94; EST_HUMAN HIT: BG956127.1, EVALUE 0.00e+00
tcaggtgatgctgacacctctctagacagccccaccccacctgcatccttttccccacagtcgtcggatgccactgagcccccagcccctgctctggcccaggcccccagtatggaaagccgacccccagcgcagacatccctgccagcaagcagcggtctggacgacctagacctcctggggaagaccctcctgcagcagtcgctgcccccggaatcccagcaagtgcggtggtgagggcccaccatggctggcatggggtggggagcactccctgttcccacaaaccagcaacttctcctgggcttgtccaggcccagcagggagaggctcgttgctgtcttgttttgtaagcagcagatgccaagcagtgcacctgcctctggaaacacaacagtgcccaaggcagacctgggcccactggcctggcctccccccaggtgttcccagctcccttgagaaaggtccagagggccggcagaggggaggacactgggctggagtgaat

SEQ ID NO: 9507 - DNA, 591 bp, Homo sapiens
  MAP TO CHR12.3; EXPRESSED IN LUNG, SIGNAL = 1.1; EXPRESSED IN HEART, SIGNAL = 0.76; EXPRESSED IN BONE MARROW, SIGNAL =   1; EXPRESSED IN FETAL LIVER, SIGNAL = 0.69; EXPRESSED IN BRAIN, SIGNAL = 1.1; SWISSPROT HIT: P50542, EVALUE 5.00e-28; NT HIT: Z48054.1, EVALUE 1.00e-117; EST_HUMAN HIT: BG390548.1, EVALUE 1.00e-117
gctgaaactctgagggttggagtgaattccattccttcatcggcttttgattttatttgcggctttggttggctccttgcctgctaaaaccttccccttagatctgtaactttattattaactcatgtcagaggagtcacaggtgaggccattgtgactctgcatttcaaagcttggcttggatcccagggtgctcacatgtgccagtgtcagtcattgcagatatcaagtctgcccatccctgatcaaacaggtgtctggagctaaagccagataaccagacagcactgatggcgctggctgtgagcttcaccaacgagtccctgcagcgacaggcctgtgaaaccctacgagactggctgcggtacacaccagcctatgcccatctggtgacacctgctgaagaaggggctggtggggcaggactgggccccagcaagcgtatcctgggatctctcttgtctgagtgagtatgaggggttcctaggatgaggaattacagtaacctaagtcccagtaggagggtgaccttggttttggaagtttggatggattgagactgaagggtcctgagaatgggatgggaaacct

SEQ ID NO: 9508 - DNA, 598 bp, Homo sapiens
  MAP TO CHR17.3; EXPRESSED IN BONE MARROW, SIGNAL = 2.6; EXPRESSED IN PLACENTA, SIGNAL = 3.2; EXPRESSED IN HEART, SIGNAL =   4; EXPRESSED IN FETAL LIVER, SIGNAL = 1.8; EST_HUMAN HIT: BI553806.1, EVALUE 0.00e+00; SWISSPROT HIT: P14136, EVALUE 7.00e-64; NT HIT: gi14772709, EVALUE 0.00e+00
cccatcaagaggtagggaggcccagggagcagggaggttcggcccctccctgagacttctcgggcactccttcttggggattcagccccttctgctcacaaggccccccttccccatcccctcctcacttctgcctcacagtggccaggtcctgtgccagattgtccctctcaacctccagccgggcgctgttggcggtgagttgatcgagccgcagccgcagctctcgcagctcagcctggtagacgtctgccagcttggtgggctccttggcccgcagctggttcagctcagcagccagcgccttgttttgctgttccaggaagcgaaccttctcgatgtagctggcaaagcggtcattgagctccatcatctctgcccgctcactggcccgggtctccttgaagccagcattgagtgccccagccagggagaaatccacccgggtcgggagtggagggggcattcgagccagggagaggcgggtgccaggacccagacggcggccaggagccaggccccccaccatcatctcccctgaggagacgtaggagcggcgagcagcggaggtgatgcgtctcctctccatcctgctctg

SEQ ID NO: 9509 - DNA, 519 bp, Homo sapiens
  MAP TO CHR22.3; EXPRESSED IN HEART, SIGNAL = 1.1; EXPRESSED IN ADULT LIVER, SIGNAL = 0.94; EXPRESSED IN BRAIN, SIGNAL = 0.89; EXPRESSED IN BONE MARROW, SIGNAL = 1.3; NT HIT: U50722.1, EVALUE 0.00e+00; EST_HUMAN HIT: BI834138.1, EVALUE 8.00e-81; SWISSPROT HIT: Q15080, EVALUE 2.00e-19
ttgacttgacaggggtctccttctccagagacccttctgcatccttatcctcatcatcttcctcctcctcctcctccccttttcccttccacctctttttggcttgtgctcctggcccctgagccctccccacaacctctgtcctccttaggttttcgtcatcgaggtgaagacaaaaggaggatccaagtacctcatctaccgccgctaccgccagttccatgctttgcagagcaagctggaggagcgcttcgggccagacagcaagagcagtgccctggcctgtaccctgcccacactcccaggtaggcggccactcccgtcctgctgctgcagagctgctgactctccttccttccagggcccctgacactgttctgtgatttgatctcaaccccagtgaaaactgttcatgtagtttatagcccccactcccggcagttacaggctgccaagccctccctgcatggctccccctgcctcacgccatggcttccaccccaagcactctagcctcac

SEQ ID NO: 9510 - DNA, 572 bp, Homo sapiens
  MAP TO CHR12.3; EXPRESSED IN HEART, SIGNAL = 1.8; EXPRESSED IN PLACENTA, SIGNAL = 1.5; EXPRESSED IN ADULT LIVER, SIGNAL = 1.3; EXPRESSED IN FETAL LIVER, SIGNAL = 1.7; EXPRESSED IN LUNG, SIGNAL =   1; EXPRESSED IN BONE MARROW, SIGNAL = 1.4; SWISSPROT HIT: O43822, EVALUE 6.00e-04; NT HIT: AB038993.1, EVALUE 5.00e-32; EST_HUMAN HIT: AL580561.1, EVALUE 0.00e+00
gaaaatttgccctctcctccccagctacaagacagggttgtggcctagctttgctgcaccaaaagaacacatgaatgtattacagagtagaatatggcacttagggattccttgaagggcagaagcaggaccagagcggggtcacacagcacctctgcagtaaatctggcaaggcttggcaggccagtcctcacagtgtttctagggacactggaaccccgagagtcccccagaggccccattcctagcaactggcaaccaaagcccattattcctgcatgaacccctcctgaccacactggcaggggcaacatggtggccaacctgggggagctggccaagcttcgagacctgcccaagctgcgagcgttggtgctgcttgataacccatgcacggacgaaaccagctaccgccaggaggccctggtgcagatgccataccttgaacgcctggacaaggaattctatgaggaggaggaacgggctgaggctgatgtgattcgacagaggctgaaggaagaaaaggagcaggagcctgagccccagcgtgacctggaacccgaacagtcatt

SEQ ID NO: 9511 - DNA, 548 bp, Homo sapiens
  MAP TO CHR1.3; EXPRESSED IN HEART, SIGNAL = 1.2; EXPRESSED IN FETAL LIVER, SIGNAL =   1; EXPRESSED IN ADULT LIVER, SIGNAL = 1.6; EXPRESSED IN BONE MARROW, SIGNAL = 1.3; SWISSPROT HIT: P35317, EVALUE 1.00e-14; NT HIT: L76938.1, EVALUE 1.00e-125; EST_HUMAN HIT: BE005103.1, EVALUE 2.00e-57
tccatttctgacccttcctgtgtggtctttagaaggataaataagaaaacatgagttctatatttctgaaatcttggtttctctattaaaaatctgttttttattcagtcaaaaaattaattgaatgtccctaattattgtgtagagccacgggccctaacttgtcttttcccttccagctgtacctgggtgtggtgctatcagccgttgtaatcataactggttgcttctcctactatcaagaagctaaaagttcaaagatcatggaatccttcaaaaacatggtccctcaggtaccagacgctttgtccttccccagtggatgacttgacagccccaagcatgtcagcctgtgaattagtgtgaagttaaggttttccaagtattacatgactcatcagagagatggatgtcttctaccccacccaaaaccaacctattttccttctatccaaaaagtggtagcctttcttttgaatgtaaactctgaatacaggcacaccatgtaacagcaatatctcttaaactggcgagcaagcttttgtaac

SEQ ID NO: 9512 - DNA, 587 bp, Homo sapiens
  MAP TO CHR2.3; EXPRESSED IN LUNG, SIGNAL = 0.78; EXPRESSED IN HEART, SIGNAL = 0.53; EXPRESSED IN ADULT LIVER, SIGNAL = 0.52; EXPRESSED IN BRAIN, SIGNAL = 0.4; EXPRESSED IN BONE MARROW, SIGNAL = 0.81; SWISSPROT HIT: P41595, EVALUE 3.00e-34; NT HIT: AF156159.1, EVALUE 0.00e+00; EST_HUMAN HIT: AW934890.1, EVALUE 1.30e-02
tcgacaaaagagcaaaggtcataataatgctaaaaagttaaactgctgctgacttagaaaaaaggcacaattattatgcaaaatagaaaatgtatttaaaagttaccatccacagaaatattgaatttaatgttgtctccattatctgaagttaaacattatgttgttaaagttataaaatttcagatgagtaacaaaaaagacaaaagatgtatcacctgaaaaactgtagactgaaagttgccattttatagaataaaatgtttgtcttgtttttgtttctttcagaggctatgtggcccctcccacttgttctatgtcctgcctggttatttcttgacgttctcttttcaaccgcatccatcatgcatctctgtgccatttcagtggatcgttacatagccatcaaaaagccaatccaggccaatcaatataactcacgggctacagcattcatcaagattacagtggtgtggttaatttcaataggtatgtagagaatgccagagtgtgggtggtatacaaaatctttggttccacttggctaggagaataccaggtctggtaggcaatgaaactcagcatga

SEQ ID NO: 9513 - DNA, 549 bp, Homo sapiens
  MAP TO CHR6.3; EXPRESSED IN HEART, SIGNAL = 0.69; EXPRESSED IN BONE MARROW, SIGNAL = 0.84; EXPRESSED IN LUNG, SIGNAL = 1.8; EXPRESSED IN ADULT LIVER, SIGNAL =   1; SWISSPROT HIT: P15577, EVALUE 3.00e+00; NT HIT: gi15301192, EVALUE 0.00e+00; EST_HUMAN HIT: AL581273.1, EVALUE 0.00e+00
tccaccttaagcattggtcctcaaaacagagctcctcaaaatattaggtgctgtgctcattacagaatcaaactgatcacactgattgaaaacttcctcaatgaaattttcaatcaacaacatgcttcaaataaaagtcaaacagtgttccaaccacttgatttcaaaccaagtagattttaggtttagaaacactaaaaaaaggtgtttcatttataaatacggaaggaacaaaaacatcactgcatcaatccagaaattatcaaaatatttagaggacaagaaatataaaatttagtcaactttgctgttttctcagttccttaaaatcccagagaatctgcaaatatagctaaaaggtaccaactcttgaaagcctatataactagtcatttcccattgagtattttggaattttattattctatttattcatattctacttatttataatgtattctgctttatgatgtttatctgaataatctggacaaattctcattctgggcagtcattcatttcatcctatgaatgccatggtaagggaaa

SEQ ID NO: 9514 - DNA, 526 bp, Homo sapiens
  MAP TO CHR19.3; EXPRESSED IN BRAIN, SIGNAL = 0.92; EXPRESSED IN FETAL LIVER, SIGNAL = 0.5; EXPRESSED IN BONE MARROW, SIGNAL = 0.92; EST_HUMAN HIT: BG398256.1, EVALUE 0.00e+00; SWISSPROT HIT: O09043, EVALUE 1.00e-14; NT HIT: gi14786947, EVALUE 4.00e-60
ggtcagaaggttaaaggggcagaaggcattcggaaagctcccctcccacagtgacacctctctgacttctgacctagggttccaccaccgcttcaatcccaatgcctccagctccttcaagcccagtgggaccaagtttgccattcagtatggaactgggcgggtagatggaatcctgagtgaggacaagctgactgtgagtggcctttgactccaggaagcctcgagcctgggagaaccctgttgtctaagatcatctggcttagggaggggcttgaggtgcaggggcttcctgagccgatggatggggcttctcaaggagggggaggggttcctgggtgaagggataggaattctctcaagtccagaggcaaagtttgctaagcagttgggggcttgggtccagatgtccccagacctgggattaatgctttggtttgggagacctcaggacatgtggttattgtcctcccaaaagtaactggtcacatctcaatctacccctagattggtggaatcaagggtg

SEQ ID NO: 9515 - DNA, 539 bp, Homo sapiens
  MAP TO CHR12.3; EXPRESSED IN BONE MARROW, SIGNAL = 0.89; EXPRESSED IN BRAIN, SIGNAL = 1.4; EST_HUMAN HIT: AW160781.1, EVALUE 1.00e-101; SWISSPROT HIT: Q13610, EVALUE 4.00e-04; NT HIT: gi14766316, EVALUE 1.00e-101
tcttgatgacattgcttggcgttacattttacatttgtttgcaaactactttttaattcaaataatttgatgatttccttacacatattgtaatgaaatctttgctctcttacaggtagagctgagtaaagaagaagtaaaacgcctcattgctgaggcaaaggagaaattgcagtaagtttaggaccagatgaaatctatatcttaaatgatgatgaccatgtggtcttgttattagaaggtagcatttgggtgattctctttttctttctgtgctcatagagaagaaggtggtggcagtgatgaagaggagacaggcagtccttcagaagatggcatgcagagtgcacgcacccaggcacgcccaagagagcccctggaggatggtgacccagaggatgacaggacgcttgatgatgatgagctggctgagtacgacttagataaatatgatgaggaaggtgacccaggttagtttatccacttctgatggtttgtaattacaagctcaatatgttggatcatgtttgtggtgttcc

SEQ ID NO: 9516 - DNA, 525 bp, Homo sapiens
  MAP TO CHR17.3; EXPRESSED IN FETAL LIVER, SIGNAL = 4.9; EXPRESSED IN LUNG, SIGNAL = 1.8; EXPRESSED IN BONE MARROW, SIGNAL = 1.7; EXPRESSED IN ADULT LIVER, SIGNAL = 3.7; SWISSPROT HIT: P34022, EVALUE 5.00e-54; NT HIT: D38076.1, EVALUE 0.00e+00; EST_HUMAN HIT: BE792026.1, EVALUE 0.00e+00
tcagcatcctccttggtttcctcctccaccaaaagagcttctagcttttccgccactttttttggcatgatcgtttttgcccgatcctttcttttctctccgatctctttcttgcattcttcaaactttgttttgaatttctgtgcattctcaatattcaggaagtggatggccagcagctctggcttggggcactcgttggcgaagtcggcgtgggtgttccagacccaggcatggtcactacccatgttgggcttcagctccattatcagcgtgaagagtggttagcacagatcttcagggtcttgtccctccgcatgaggaggcagatggtccctttctccttgtgtttcaggagcttgacgttgccggtgcctcactccttccattctgggagatccttctctgaggcaaatcagaacagtttcgtctgcatttttaaaagttcttcatcttcctccagtgttttaatttcttgctcaggaagagaaactattggctcaaactgagggtcatggttggact

SEQ ID NO: 9517 - DNA, 534 bp, Homo sapiens
  MAP TO CHR22.3; EXPRESSED IN BONE MARROW, SIGNAL = 6.8; EXPRESSED IN HELA, SIGNAL = 2.8; EXPRESSED IN PLACENTA, SIGNAL =   6; EXPRESSED IN ADULT LIVER, SIGNAL =   7; EXPRESSED IN FETAL LIVER, SIGNAL = 4.6; EXPRESSED IN BRAIN, SIGNAL = 5.2; SWISSPROT HIT: P70362, EVALUE 1.00e-18; NT HIT: gi16166906, EVALUE 5.00e-69; EST_HUMAN HIT: BI459906.1, EVALUE 7.00e-69
tcagggataaatcccagcaccattttcacagtaacactagcttctgactcccacatgcaaagtaagtactgttgaaggctacagcattgcagacttagggcaggaaaagttactattcaaataaaaacaagcacatactcttccctcctttctccacatctgacctgtcattaggccctgctagcatggacacagagaagcagcggtactgtgtggagaagcggttttggaagaccctgggaatagggtggtcgaacatgttgaaagagaactagaaggaggaaagagaaacaagtattaaaacaaaggtacatttcttcatgtcaaaagccaaaacatgtcagagtaattaatgctactaaacattgtcagagaacacaatgtactgaaatcttcaatgtaatcttactaaatacaaaacaggccatgccaagcctgtcctgaacctttttcagggctatgctcccatcttcatcctcaggatcaaggcccaacctcttgcatacctcagagacttgtactgacagccccaca

SEQ ID NO: 9518 - DNA, 589 bp, Homo sapiens
  MAP TO CHR1.3; EXPRESSED IN LUNG, SIGNAL = 3.5; EXPRESSED IN HEART, SIGNAL = 6.2; EXPRESSED IN BONE MARROW, SIGNAL = 6.6; EXPRESSED IN HELA, SIGNAL = 2.7; EXPRESSED IN PLACENTA, SIGNAL = 4.5; EXPRESSED IN ADULT LIVER, SIGNAL = 5.5; EXPRESSED IN BRAIN, SIGNAL = 5.1; SWISSPROT HIT: Q03173, EVALUE 4.00e-08; NT HIT: U72521.1, EVALUE 5.00e-97; EST_HUMAN HIT: BG168503.1, EVALUE 8.00e-75
caaaaccatcctacccatccattcaggcaattaaagtcactgctatataacattttcaagtgattagctgttagtagcaataatgaaagccttaccctgttgggatggagtctcggccggctgagaggctgcctgcaagcctggctcagaagcagaagagtctcccagcacagagtttagaggagtctcaacagaggcaggggcagctgcagagggagaagggagaacactaggcttggatgagggagttgaggcaataggggtgcttggaggaggagaagcttgagatccacagtgtgagagtgatgcgagggaaggcagtggaggcggcggcggaggagctgctggccctgaggtaggcggtggagacactggatatgttacagagtcaaccagcccattgggtgctgtcggtgatggaggcatttggggcacaggagaagaaacacaaacagggaggacaggccttggaccagtagctttgcctggggggctgctaatcattattggaggagatggagggaggggcgaaaaattggaagtagaccaggcacagggcttcgtagctggaggctgagaagagggtgtg

SEQ ID NO: 9519 - DNA, 519 bp, Homo sapiens
  MAP TO CHR9.3; EXPRESSED IN BONE MARROW, SIGNAL = 4.2; EXPRESSED IN FETAL LIVER, SIGNAL = 2.8; EXPRESSED IN PLACENTA, SIGNAL = 3.1; EXPRESSED IN HELA, SIGNAL = 2.8; EXPRESSED IN HEART, SIGNAL = 4.7; EXPRESSED IN LUNG, SIGNAL = 3.9; EXPRESSED IN BRAIN, SIGNAL = 8.3; EXPRESSED IN ADULT LIVER, SIGNAL = 5.1; SWISSPROT HIT: Q99731, EVALUE 1.00e-18; NT HIT: AJ223410.1, EVALUE 0.00e+00; EST_HUMAN HIT: AI660682.1, EVALUE 2.00e-72
ggggaataagaaggtgggagtctcaacaggggctaaaacgggagatgaggctagacaccctccccacaactcacactacagcaggcaccctgcagccatccttgatgagaaggtagtggaagttcctcacgatgtacccagggatgggtttctgggtcacagacaggcagcagtcttcagcatcattggtgccactcagagttggggctgggatggggaaagaaggtgacaggacacagggacccttgagggtggcatggccatggccctagctcggattgaggacacctgtgtgtgtgtgtgtgtgtgtgtgtgtgtgtgtgtgtgtgtgtgtctggtggggtcggggaggagttagacctggtattcagccattatgcaccaatatggctctggctctactggttgctaaatatattgtcatacttctaaactgttttgtaaataaccactgccctgagccccacaaatgacttcctgctgccctgatcaccccaacctctctcccaggacaatcca

SEQ ID NO: 9520 - DNA, 549 bp, Homo sapiens
  MAP TO CHR3.3; EXPRESSED IN ADULT LIVER, SIGNAL =   1; EXPRESSED IN BONE MARROW, SIGNAL = 0.86; EXPRESSED IN PLACENTA, SIGNAL = 0.82; EXPRESSED IN HEART, SIGNAL = 0.9; EXPRESSED IN BRAIN, SIGNAL = 1.6; EST_HUMAN HIT: BF849619.1, EVALUE 2.00e-19; NT HIT: AB026898.1, EVALUE 0.00e+00; SWISSPROT HIT: P15800, EVALUE 2.70e-01
  unsure 119
gctcaggagctgtgggttaggcagtgttttttttttcacaaggccaaacgtgggacagaggcagggacactctaggatgtgcttccaggtgtgccggctcctagctaacggtgggtttngtgtttagttcagaagcggagagcctggggcactcctcctactctgtggatgatgtgattgtcctggaaatcgaggtgaaaggctcagtagaacctttccaggttctcttagagccatatgccctcatcatcccaggggagaactacattgggataaatgtgaagaaggcttttaaggtaggtcattgtctctcccctgcctaggctggccgaggcagtgttgacatgagtgcaagtgtagggaggatatagcaggaggggcagatggtagcagccactgcatggaggctgaggccattcccagggctttgaacccaacttgacttgcacagatgcataggccaggcatggctgtcttcttttatcagcctcccagaatcctctgaaagttagggctatggaacctattcccgtccttggcagagtatgt

SEQ ID NO: 9521 - DNA, 577 bp, Homo sapiens
  MAP TO CHR16.3; EXPRESSED IN LUNG, SIGNAL = 0.65; EXPRESSED IN BRAIN, SIGNAL = 0.73; EXPRESSED IN BONE MARROW, SIGNAL = 0.74; EST_HUMAN HIT: AI124720.1, EVALUE 5.20e-02; NT HIT: gi14779893, EVALUE 8.00e-71; SWISSPROT HIT: Q92901, EVALUE 7.00e-13
gagaagtgggaccagcagtctgagccatgtggcaggtggggtggtctctaggtgcctggactgcagggctggccagccgccttctctgagcttctgcacctctgccactcactctcaggccccgggaaacagggagggtacctactttacagaggaggaaaccggggcctagagggggagagacagtctatgttcaaagatggtggctggaaccagctcagaggcctccgggtggggggcggtcccagaggtaggacccctgcttggtgggctgggggtgaggtgggggcaggataggcctggggagctgccccggttgggggcttctgagcaccctcctgtgcatggctcaggcacaagagcaagaagaaagccttcaccaaggcctgcaagaggtggcgggacacagacgggaaaaagcagctacagaaggacttcgccgccatgaagaagtactgcaaggtcattcgggtcattgtccacactcaggtcagcccccggccctccgctgtcggtcagtccctaggaccacgctccctcaccccagcttccaggagctgtggcaaatgtcagccta

SEQ ID NO: 9522 - DNA, 517 bp, Homo sapiens
  MAP TO CHR2.3; EXPRESSED IN HELA, SIGNAL = 2.1; EXPRESSED IN BONE MARROW, SIGNAL = 1.5; EXPRESSED IN LUNG, SIGNAL = 1.7; EXPRESSED IN ADULT LIVER, SIGNAL = 1.1; NT HIT: gi4507702, EVALUE 2.00e-90; SWISSPROT HIT: P21139, EVALUE 2.10e+00; EST_HUMAN HIT: BI252984.1, EVALUE 2.00e-90
gctgcagtgggtaaggagagtgtcccccaaatgcactcctggaaactttctacatacacagcctggctcgggagatggctgtgcagacaggaggctctggtacagcgtgagccactctgcagtgcgtgcccttacttctcttcagaacggtggtcctcctggtcactgatgtcatcgtcgtctaccaagtggccgaagggctccgacgagatggacaccatgttggaaaggatgactctgctgtcactgctgcccgtgaggaccagctggtcatgagagtggttgtagcggacgttccacaccctgcaaagggcaaggcagctgctgaaatgaactgtcacccgcaggcaacaccaacaatggatcacaccggctctgagggccccactaggctggggctcacgttaggcactgccaggcaatcggcccccagtcacagggcctgacataaggcagttttccgctgaggttgggtttactgcaggtttctcttaagtcccaagagacagacagggaa

SEQ ID NO: 9523 - DNA, 535 bp, Homo sapiens
  MAP TO CHR2.3; EXPRESSED IN BONE MARROW, SIGNAL = 1.7; EXPRESSED IN HEART, SIGNAL = 1.6; EXPRESSED IN FETAL LIVER, SIGNAL = 1.1; EXPRESSED IN ADULT LIVER, SIGNAL = 1.5; EXPRESSED IN BRAIN, SIGNAL = 1.6; NT HIT: gi7657298, EVALUE 4.00e-82; SWISSPROT HIT: P13002, EVALUE 8.00e-05; EST_HUMAN HIT: BG013572.1, EVALUE 7.00e-69
agccatgtgctaaagggatgctgcgttcctcgctgggcctgtaagaggaaactccagggtctctgtgggcgaatgtgaccacaggccaggccagcagcagggcacggcagagcctgcgaagccatcctaccttgaacaccttgatctggcagctggctgagtgcaggtgctccgtgtactccccattctcgttctgcttaaacgtgtcaatctggactcgaaagggcactcccttctcgcccccgtgcttcctgggggtgaattctgtgctgatgcagtgtacctgggaggagaaacgttgggcaggtggcaaggaggcaccaagcagggtgcccctggatcccccaagcgccccctctattggaggtgtccttccctgcttggtcagtgcaggcctgcctcgacctccctgctttccctgacactctgtccactccatcaggccggtggcctccctgttcccctgcctgcaaaagacatacacacccccacctttgtctctttactgtggaggccctgcctgaccagctaagtc

SEQ ID NO: 9524 - DNA, 564 bp, Homo sapiens
  MAP TO CHR4.3; EXPRESSED IN HELA, SIGNAL =  11; EXPRESSED IN BONE MARROW, SIGNAL =  13; EXPRESSED IN BRAIN, SIGNAL =  19; EXPRESSED IN ADULT LIVER, SIGNAL =  19; EXPRESSED IN PLACENTA, SIGNAL =  11; NT HIT: gi14722877, EVALUE 0.00e+00; SWISSPROT HIT: P25763, EVALUE 8.00e-67; EST_HUMAN HIT: AW027601.1, EVALUE 0.00e+00
acgaccgctgagttatccacaaacagatgtatttctagtctgtttttcagtggtctctccatcttcatttgaaaatgtgaaagaaaagtgggtgcctgagataactcaccactgtccaaagactccttttttgcttgttgggactcaaattgatctcagagatgacccctctactattgagaaacctgccaagaacaaacagaagcctatcactccagagactgctgaaaagctggcccgtgacctgaaggctgtcaagtatgtggagtgttctgcacttacaaagaaaggcctaaagaatgtatttgacgaagcaatattggctgccctggagcctccagaaccgaaaaagagccgcaggtgtgtgctgctatgaacatctctccagagccctttctgcacagctggtgtcggcatcatactaaaagcaatgtttaaatcaaactaaagattaaaaattaaaattcgtttttccaataatgacaaatgccctgcacctacccacatgcactcgtgtgagacaaggcccataggtatggcccccccttccccctcccagtacta

SEQ ID NO: 9525 - DNA, 566 bp, Homo sapiens
  MAP TO CHR2.3; EXPRESSED IN BONE MARROW, SIGNAL = 0.92; EXPRESSED IN PLACENTA, SIGNAL = 1.1; EXPRESSED IN LUNG, SIGNAL =   1; EXPRESSED IN HEART, SIGNAL = 0.66; NT HIT: gi14781421, EVALUE 2.00e-93; SWISSPROT HIT: Q15633, EVALUE 2.00e-14; EST_HUMAN HIT: BI562574.1, EVALUE 0.00e+00
tgaaaagccctaacgacctgagatgagaggtctcagtttcagagcctgttcctcacagctgtctggcaaaaagagaacttttccgaactgaaaagcaacaccaagtattgactgccaacccactcggtcatccaggttaactgtgtatacagacctgtgcaggttatgtcaccaacggttactctgaaggtgaaagtgggcacgtgtatttgcacatcagatctttcacattcataaactgggatgttcttggtcttcatgccgtattcgtgtaatacctgaatcggtgttttccctggcttagctgttatcatcttccccaaactgcaaaaaccacaaaaaggtgtgctttgcatgccaaattggagattgaagcagaagcgtagaggccagttttaaccgccaccgacggtgacgagggaggcgccgagttccccggaggccagggccagagctggcgaggctggggcgcacctgtcttccggccccgctgcggcagtcactccgcaggagcaggcggggtgagcgaggtctttagagagagcacttgaatgcgggtaggagag

SEQ ID NO: 9526 - DNA, 582 bp, Homo sapiens
  MAP TO CHR6.3; EXPRESSED IN FETAL LIVER, SIGNAL = 0.92; EXPRESSED IN ADULT LIVER, SIGNAL = 1.2; EXPRESSED IN BRAIN, SIGNAL = 0.89; EXPRESSED IN BONE MARROW, SIGNAL = 0.77; EXPRESSED IN PLACENTA, SIGNAL = 1.1; EST_HUMAN HIT: AI904271.1, EVALUE 1.00e-45; NT HIT: D28769.1, EVALUE 0.00e+00; SWISSPROT HIT: Q15109, EVALUE 4.00e-13
gctctcttggcagaatttgggtggggtaggggaggcttgggtgtgggtgcatggagggagaggtggggtggctgttagggataaggccagaatggggcaggaaattagagcctgtgctgtcctgcaccctagtcccagggtctgtagggcttggggagaggtctcaccgatgatgctgatgctgacagcacggctttcctggggcccgtggctggaatgggtggccacacagctgtaggttccctggtcctgaggccctatctcagggaggatcagcacagggctggggggaaggggcaagggcacaccctggtgggggaaggggagaggagactatttcaaaacccttgtctttttgtctccatatcttcagataccctctcttcctcctcagctcctagcctgcctttccctcgttagccctctgccctccctgttgctagttatggttcaccctacctcccagcccctctctccaggtcactcacatccttcatccagtggatttgaggagagggctgggcagggacttcacaggtcagggttacggttccaccaggagctactgctccaccttctggc

SEQ ID NO: 9527 - DNA, 572 bp, Homo sapiens
  MAP TO CHR5.3; EXPRESSED IN BONE MARROW, SIGNAL = 0.98; EXPRESSED IN LUNG, SIGNAL = 0.78; EXPRESSED IN HEART, SIGNAL = 0.7; NT HIT: D61398.1, EVALUE 0.00e+00; SWISSPROT HIT: P20585, EVALUE 8.00e-37; EST_HUMAN HIT: H99382.1, EVALUE 1.00e-122
tgccatctttaccctgaacccagtgtttctttctttttttaaaaaaatcacattatagttaggttcattgctttattgggaatctacctctttaaaaaattctatgctggttatgaattgacataatgagaccaaaattactattgttctgttttcttcttatttgctacctaagagccaaagaaatgtctgaggaccaggaatgtttcaaagtctctggaaaaattgaaagaattctgctgcgattctgcccttcctcaaagtagagtccagacagaatctctgcaggagagatttgcagttctgccaaaatgtactgattttgatgatatcagtcttctacacgcaaagaatgcagtttcttctgaagattcgaaacgtcaaattaatcaaaaggtatgtaactgctatagatgagtatccagttacctagaatagtgggttctgaagtactatcaggttctctgaggtcattcatggcaatggttcctaaacttggatcatcttctgaatcatctgagggagattttgtgttttagtttagtttttttacatccctggagattcgattt

SEQ ID NO: 9528 - DNA, 529 bp, Homo sapiens
  MAP TO CHR16.3; EXPRESSED IN BONE MARROW, SIGNAL =   2; EXPRESSED IN ADULT LIVER, SIGNAL = 5.1; NT HIT: L48546.1, EVALUE 0.00e+00; SWISSPROT HIT: P49815, EVALUE 8.00e-31; EST_HUMAN HIT: BI060178.1, EVALUE 5.00e-48
ttgggcagtaagtctgggaggcgtggcaaccgctctgcccacacacccgccccacagcttgggcagccagcacaccccgctgagggagccccatattccctacccgctggcggagccgcttgatgtggcggagccgggcaatccacttggaggggtagatatcggtggggttggagcggctatgatgcacctgtgaggccatctggggacgtaggcagggggtgagctcactatcaggtggcacctgggcctgtcccaccagctcacgcctggacccacccccactcacatttgcgtgcagggccatctggcgggccacgaagggcaggttgcggtcagacacgatcttggccacgctggtgtccacaaggccctccatgtctggggagacttggtggtcacgccaggcccagggctcttggcgccacactgcagggccccacccggccctacctttcctgcactgcagggccccacccggccctacctttcctgcactgcagggacaccaggttgcactcgtagtcca

SEQ ID NO: 9529 - DNA, 572 bp, Homo sapiens
  MAP TO CHR19.3; EXPRESSED IN BRAIN, SIGNAL = 1.3; EXPRESSED IN FETAL LIVER, SIGNAL = 1.8; EXPRESSED IN ADULT LIVER, SIGNAL = 2.5; EXPRESSED IN BONE MARROW, SIGNAL = 1.1; EXPRESSED IN HEART, SIGNAL = 1.2; EXPRESSED IN LUNG, SIGNAL = 1.6; EST_HUMAN HIT: BG775238.1, EVALUE 0.00e+00; NT HIT: AF044968.1, EVALUE 0.00e+00; SWISSPROT HIT: Q92692, EVALUE 9.00e-26
acaaggagtgaggtggcatcttgttggcatggggagagagcggtcaggattttggggtcaagagcagattggtaatctgtgtcgtgcgtaggaagtgatcttgagttcctgtcctctctctacctccaggaaatgcctcgataccatgagctgcccaccttggaagaacggtcaggacccttgcaccctggagccacaagcctggggtcccccatcccggtgcctccagggccacctgctgtggaagacgtttccctggatctagaggatgaggagggggaggaggaggaagagtatctggacaagatcaaccccatctatgatgctctgtcctatagcagcccctctgattcctaccagggcaaaggctttgtcatgtcccgggccatgtatgtgtgagctgccatgcgcctggcgtctcacatctcacctgttgatcccttagctttcttgccaaggatctagtgccccctgacctctggccaggccactgtcagttaacacatatgcattccatttgtgatgtctaccttggtggctccactatgacccctaacccatgagcccagaga

SEQ ID NO: 9530 - DNA, 503 bp, Homo sapiens
  MAP TO CHR1.3; EXPRESSED IN HEART, SIGNAL = 3.2; EXPRESSED IN ADULT LIVER, SIGNAL = 3.5; EXPRESSED IN BRAIN, SIGNAL = 2.4; EXPRESSED IN HELA, SIGNAL = 2.2; EXPRESSED IN BONE MARROW, SIGNAL = 2.4; EST_HUMAN HIT: BE893863.1, EVALUE 4.00e-67; NT HIT: M57430.1, EVALUE 0.00e+00; SWISSPROT HIT: Q91806, EVALUE 2.00e-08
gaagggagaatgggaaggagttgcggcctggaggcttcctgctagagctgagaagccttcggggagtaataggaagggggatttccattgcttaggctgagggcggggcccaaggactgttgaaaaatagctaaggatgggggttgctagaaaactactccagaagtgtgaggccgatattaatccggtgtttttgcgttctctagtcactttaagaaccaaatggaaggtcacactagggttttcatttccattgattatagaaagctttaaagtactgtagatgtggctcgccaattaaccctgattactggtttccaacaggttcttgctggtgtgaaatgactgagtacaaactggtggtggttggagcaggtggtgttgggaaaagcgcactgacaatccagctaatccagaaccactttgtagatgaatatgatcccaccatagaggtgaggcccagtggtagcccgctgacctgatcctgtctctcacttgtcgga

SEQ ID NO: 9531 - DNA, 562 bp, Homo sapiens
  MAP TO CHR17.3; EXPRESSED IN BONE MARROW, SIGNAL = 2.9; EXPRESSED IN BRAIN, SIGNAL =   4; EXPRESSED IN FETAL LIVER, SIGNAL = 1.8; EXPRESSED IN PLACENTA, SIGNAL = 2.5; EXPRESSED IN LUNG, SIGNAL = 2.6; SWISSPROT HIT: O43497, EVALUE 1.00e-17; EST_HUMAN HIT: BI917129.1, EVALUE 1.00e-70; NT HIT: AF227745.1, EVALUE 8.00e-71
tcttctctgtgggatgggaggctggacccgctgatgtctgccctcctttcaagccctgtctttctgtgccacgactgccccctccttcaggaaccccctcccccaactcagggagctgtattctgggctttccaggtggaaccagctggacctggccattgtgctgctgtccatcatgggcatcacgctggaggaaatcgaggtcaacgcctcgctgcccatcaaccccaccatcatccgcatcatgagggtgctgcgcattgcccgaggttggtgcccagcccacgcacctgccctcctagggtgaccagcccagggagagagagcaagggtcggctttgtggctggtcaaggcctgggcggctgtgggttcccatgggtctttctcccagcttctgccaagggaggctggagacagggctgaggatggggatgcaacctggctggcccggagatggccatcccagcagccccagcccagccctggtcctgactctgccagctgtctggccggggacccaaagaggccagctcatgacgttgtcctgttctgcagtgctga

SEQ ID NO: 9532 - DNA, 566 bp, Homo sapiens
  MAP TO CHR19.3; EXPRESSED IN BONE MARROW, SIGNAL = 1.1; EXPRESSED IN PLACENTA, SIGNAL = 1.5; EXPRESSED IN FETAL LIVER, SIGNAL = 1.3; EXPRESSED IN BRAIN, SIGNAL = 1.4; SWISSPROT HIT: P15621, EVALUE 1.00e-109; EST_HUMAN HIT: AW795413.1, EVALUE 0.00e+00; NT HIT: gi16176192, EVALUE 0.00e+00
tggtgccatcatgtgtcttcgaaagcttgagcgatgagataacaatctcccacattgcttacattcatagggtttctctagagtgtgagttccttcatgaattcgtgctgaaccaggaaaatcaaagcctttcccacatatcttacatttatgaggtccatctccactgtgcattatcatgtgtctttgaaagcttccaagatgacaaaacgctttcccacactgtttacatgtatagggtttctctccagtgtgaattctttcatgtactcgaagggaaccggaaacactgaaggctttcccacattgtttacatttgtagggtttctctccagtgtgagttctttcatgtcttagatatgaactgtaatcagggaaggctttagaacactgcttacattcatacggtttctccccagtgtgtattttttcatgtcttagataggaactgtaaacagggaaggctttagaacactgcttacattcatatggtttctctccagtgtgagttctttcatgcatacgtaataaactgggccaaaaaaaggctttcccacacaattcac

SEQ ID NO: 9533 - DNA, 551 bp, Homo sapiens
  MAP TO CHR9.3; EXPRESSED IN LUNG, SIGNAL = 1.3; EXPRESSED IN BONE MARROW, SIGNAL = 1.4; EXPRESSED IN HEART, SIGNAL = 1.5; EXPRESSED IN PLACENTA, SIGNAL = 1.8; EXPRESSED IN ADULT LIVER, SIGNAL = 1.3; EXPRESSED IN BRAIN, SIGNAL = 1.1; NT HIT: M17310.1, EVALUE 0.00e+00; SWISSPROT HIT: O05974, EVALUE 3.00e+00; EST_HUMAN HIT: AI025543.1, EVALUE 0.00e+00
ttgctgacttgtggagatgcagcgaatgtgaaatcccacgtatatgccatttccctctacgctcgctgaccgttctggaagatcttgaaccctcttctggaaaggggtacctattattactttatggggcagcagcctggaaaagtacttggggaccaaagaaggccaagcttgcctgccctgcattttatcaaaggagcagggaagaaggaatcatcgaggcatgggggtccacactgcaatgtttttgtggaacatggtgagtgcttttcaaaatttctgctcatggttttcctcatgcattcatcttaggccttcaaggaactttgaacaacagtacttgcgacagttccttccaattccacttaataaatttgttactgtagttatctcttagtggaactttctttgtataagaaaaagttacttcgtgacttcggctttattcaaaatctatttgagttgcttatttcttgcctgattcctctgctaattcactgttgaccttggacaagccactttactgttccagggctttagtttcctgaggg

SEQ ID NO: 9534 - DNA, 525 bp, Homo sapiens
  MAP TO CHR12.3; EXPRESSED IN HEART, SIGNAL = 0.85; EXPRESSED IN ADULT LIVER, SIGNAL = 0.61; EXPRESSED IN BRAIN, SIGNAL = 0.8; EXPRESSED IN FETAL LIVER, SIGNAL = 0.81; EXPRESSED IN BONE MARROW, SIGNAL = 0.73; SWISSPROT HIT: P50542, EVALUE 4.00e-23; NT HIT: gi14757794, EVALUE 8.00e-77; EST_HUMAN HIT: AW504611.1, EVALUE 1.00e-76
ggttgtcatcctcacatccctgctgttctgacggtgccacctctcagtccatctctcacgtgcttttcttgtaggggtaccagtttgaggaggagaaccccttgcgtgatcaccctcagccttttgaagaagggctgcggcgccttcaggagggggacctgccaaatgctgtgctgctttttgaggcagctgtgcagcaggatcctaagcacatggaagtgagtgactccatagtctcatttctggctagagactgcttcctccatcttgagaaaggccccaaggagagtagtgcagatgggttagggcctgggtgatggcctaggataggggcttgagagcgagatggtgagtgggagaagccagggggaagggcgaatggagaggtgaatatggggtgatggaatctgtcaacttccctctaggcttggcagtatctgggtaccacccaggcagagaatgaacaagaactattagccatcagtgcattgcggaggtgagtacactgaaaggtgtgggtgaggt

SEQ ID NO: 9535 - DNA, 578 bp, Homo sapiens
  MAP TO CHR3.3; EXPRESSED IN BRAIN, SIGNAL = 2.3; EXPRESSED IN BONE MARROW, SIGNAL = 1.9; EXPRESSED IN PLACENTA, SIGNAL = 1.5; EXPRESSED IN HEART, SIGNAL = 2.5; EXPRESSED IN FETAL LIVER, SIGNAL = 1.4; EXPRESSED IN ADULT LIVER, SIGNAL = 2.2; SWISSPROT HIT: P22914, EVALUE 6.00e-50; NT HIT: AF242198.1, EVALUE 0.00e+00; EST_HUMAN HIT: BF727164.1, EVALUE 0.00e+00
aatatggccccattcatgtcattactccacaatgcggcggaaagactggacagctggggaggctgcaccccaatcgatgggcttccggtactccttcttgtccaggaggtactgcctgccacggtagttgggtagctcatagaaaatccagacaccctccagcaccttacaggagtggatctctcgcatgtgaaattgctccatgatggaagggcaatcttcggtggtttcatacatctgaccactaaaatcccctttctcaaagatctgaatcttatactggcctccactaggctgaaaagacacaggagaaaatgaacagaaaccattatggaaatcaccagcaggtcaagaacttagagaacagtattgctcagaacttatcaccttgaaagctagatgatctgaactcccatctcaccatgtactgactaaaacagctaactttcaataagaaaaaattaattcttcaaaacactcaagaggcagagacagcaccctggaaattagtgtagtcattctagtgatgagctgctctaagatgttactcaagcctcagcagccaacaagcagctact

SEQ ID NO: 9536 - DNA, 558 bp, Homo sapiens
  MAP TO CHR2.3; EXPRESSED IN LUNG, SIGNAL =   4; EXPRESSED IN HEART, SIGNAL = 1.4; EXPRESSED IN BONE MARROW, SIGNAL = 1.8; EXPRESSED IN BRAIN, SIGNAL =   1; SWISSPROT HIT: O70165, EVALUE 5.00e-03; NT HIT: AF128179.1, EVALUE 1.00e-121; EST_HUMAN HIT: BI518787.1, EVALUE 2.00e-54
gatcccattcccttctctcccaaatgcttcctgcccctttgcctctggtagcctgtccccaaaaggatagtgggagcccatctcaccagccattctctttgcaggcaccccaggaccccaaggagagaagggcagcaaaggcgatgggggtctcattggcccaaaaggggaaactggaactaagggagagaaaggagacctgggtctcccaggtgagggccgtattgggggtgtcggtgcttgccaggaggcctgagggaactagggcctgacctctgtgccattgggtctattcagtgcccactgagggcaaggcagtgctctgtctatgggaatctctggagcaccacacatagtctcttctttccgggtgagcaaagagatgcaatatgagagggagaacaatgtcattccaggcatgactatggcaagctggggcacaggcagtgctaggagctcagagaggaagccaaggggatgaggagagtgggcctgcactgggccttgggaagcagggcagactgactggtggcaagggcaaggggattgattcaagga

SEQ ID NO: 9537 - DNA, 583 bp, Homo sapiens
  MAP TO CHRX.3; EXPRESSED IN LUNG, SIGNAL = 2.4; EXPRESSED IN HEART, SIGNAL = 2.7; EXPRESSED IN HELA, SIGNAL =   2; EXPRESSED IN PLACENTA, SIGNAL = 2.3; EXPRESSED IN BONE MARROW, SIGNAL = 2.3; EST_HUMAN HIT: W21958.1, EVALUE 1.00e-92; SWISSPROT HIT: P04000, EVALUE 2.00e-54; NT HIT: AF158970.1, EVALUE 0.00e+00
gtctctggcttgagggacaggatggaggggagactgtctgaggatggacaaagctggagggaaacagccaattgcaaaggcaggagggcggaagggggaggggagaggtgggatcagcactggtatagacaggcggtgctgcagcccagctcctctctctcctctgcctcctgccctcaggccccttcgaaggcccgaattaccacatcgctcccagatgggtgtaccacctcaccagtgtctggatgatctttgtggtcactgcatccgtcttcacaaatgggcttgtgctggcggccaccatgaagttcaagaagctgcgccacccgctgaactggatcctggtgaacctggcggtcgctgacctagcagagaccgtcatcgccagcactatcagcattgtgaaccaggtctctggctacttcgtgctgggccaccctatgtgtgtcctggagggctacaccgtctccctgtgtggtaagccagtcggggcccaggctcggcggaaaccactcattcaccctgcaagctcctccagccacctcatgatgatcggggcccagctgctcctgtaggcctgtct

SEQ ID NO: 9538 - DNA, 545 bp, Homo sapiens
  MAP TO CHR16.3; EXPRESSED IN BONE MARROW, SIGNAL = 0.77; EXPRESSED IN PLACENTA, SIGNAL = 0.54; EXPRESSED IN LUNG, SIGNAL = 0.56; EXPRESSED IN HEART, SIGNAL = 0.8; EXPRESSED IN BRAIN, SIGNAL = 0.52; EST_HUMAN HIT: AW243584.1, EVALUE 0.00e+00; NT HIT: AF058301.1, EVALUE 1.00e-44; SWISSPROT HIT: Q9Y6M0, EVALUE 9.00e-21
aggtttgcattcagtctgcctagccccacagcccctcctgctctcatggcctctgctgccccacccactctgccccagcctgggctcacccatgctgctccccagggtgactcaggtggacccttggtctgtgacaaggatggactgtggtatcaggttggaatcgtgagctggggaatggactgcggtcaacccaatcggcctggtgtctacaccaacatcagtgtgtacttccactggatccggagggtgatgtcccacagtacacccaggccaaacccctcccagctgttgctgctccttgccctgctgtgggctccctgactcctgcagccattctgagtgcaccagaaactgtgaggctgcagtggggaccacagtattggctcacctcctctgggctgtgggcgcttcagggacagggttgggactgcctgctggatcagattccggccccttttgtctcgtttgctaataaatacgtgtgcatgttcaagctgatgccttacagagctttctgtggacctaaggggtttcgtggacaa

SEQ ID NO: 9539 - DNA, 560 bp, Homo sapiens
  MAP TO CHR19.3; EXPRESSED IN LUNG, SIGNAL = 1.2; EXPRESSED IN HEART, SIGNAL = 1.5; EXPRESSED IN BONE MARROW, SIGNAL = 1.3; EXPRESSED IN FETAL LIVER, SIGNAL = 1.5; EXPRESSED IN BRAIN, SIGNAL = 2.2; NT HIT: gi13652274, EVALUE 0.00e+00; SWISSPROT HIT: P17024, EVALUE 7.00e-76; EST_HUMAN HIT: AV726241.1, EVALUE 0.00e+00
tgagtcctttcatgcaatcgaatttgactggaacgaaggaaggccttaccacattgcttacactcaaaaggcttatttccagtgtgaattttttcatgttctcgaagggaacttgaaaaactgaaggttttaccgcatagtttacattcatagggtttctctccagtgtgtgttctttcatgcagtcgaaaggaactggaacgaatgaaaacttttccacactgtttacattcatagggtttctctccagtgtgtgacctttcatgaattcgaaaataacttgaacacctgaaggctttcccacactgtttacattcatagggtttctctgcattgtgagtcctttcatgtctttgaagggaacttgaaaaactgaaggttttaccacattgtttacattcatagggtttctctccagtgtgagttgtttcgtgttctcgaagggaacttgaaaaactgaaggttttatgacactgtttacactcataaggtttctctccagtatgagttctttcatgcaatcgaagagaaatggaccaactgaatgatttgccacatcg

SEQ ID NO: 9540 - DNA, 579 bp, Homo sapiens
  MAP TO CHR1.3; EXPRESSED IN ADULT LIVER, SIGNAL = 0.61; EXPRESSED IN PLACENTA, SIGNAL = 0.58; EXPRESSED IN LUNG, SIGNAL = 0.99; EXPRESSED IN BONE MARROW, SIGNAL = 1.1; EST_HUMAN HIT: AU131206.1, EVALUE 0.00e+00; SWISSPROT HIT: P49454, EVALUE 7.00e-83; NT HIT: gi16160663, EVALUE 0.00e+00
agctgagaagaggcatcgagaaactgagagttcgcattgaggccgatgaaaagaagcagctgcacatcgcagagaaactgaaagaacgcgagcgggagaatgattcacttaaggataaagttgagaaccttgaaagggaattgcagatgtcagaagaaaaccaggagctagtgattcttgatgccgagaattccaaagcagaagtagagactctaaaaacacaaatagaagagatggccagaagcctgaaagtttttgaattagaccttgtcacgttaaggtctgaaaaagaaaatctgacaaaacaaatacaagaaaaacaaggtcagttgtcagaactagacaagttactctcttcatttaaaagtctgttagaagaaaaggagcaagcagagatacagatcaaagaagaatctaaaactgcagtggagatgcttcagaatcagttaaaggagctaaatgaggcagtagcagccttgtgtggtgaccaagaaattatgaaggccacagaacagagtctagacccaccaatagaggaagagcatcagctgagaaatagcattgaaaagctgagagccc

SEQ ID NO: 9541 - DNA, 507 bp, Homo sapiens
  MAP TO CHR3.3; EXPRESSED IN ADULT LIVER, SIGNAL = 5.9; EXPRESSED IN LUNG, SIGNAL = 3.9; EXPRESSED IN HELA, SIGNAL = 2.1; EXPRESSED IN PLACENTA, SIGNAL = 4.6; EXPRESSED IN BONE MARROW, SIGNAL = 6.4; EXPRESSED IN BRAIN, SIGNAL = 5.2; EST_HUMAN HIT: BE252309.1, EVALUE 2.80e+00; SWISSPROT HIT: P46094, EVALUE 2.00e-86; NT HIT: gi11449895, EVALUE 0.00e+00
ggttaaagcagcagtgggagaaggcgaggttgcggcagatgagcagggcgtattctagctgctgtttggcctcgcagctccggatgatctgggtccgaaacagcgtctgcagaaacagggtgaagttgtagggaccccagctgaggaagtaggccaccacgatggcgaagatgagcttgaccgtgcggtggcgccgcttggagcgtgagcggaacagggtcctgaggatctccacgtagcagaacaggataatccccagggacagcaggaagaagaggttgtgctggtagacggaggtgaggtaccacgtgagttcggaataatcacagcccgaagaaagcaccttgtggaagatggtgtcgaggatggaggacaggatgctggctacccacacagccatggtcaccagcacccggcagcggagggtggggacgcgcagggtggagagggggctcactaccgacaggtagcggtggatggtcatgatggtcaggaagaagatgctgc

SEQ ID NO: 9542 - DNA, 577 bp, Homo sapiens
  MAP TO CHR12.3; EXPRESSED IN BONE MARROW, SIGNAL = 5.3; EXPRESSED IN HELA, SIGNAL = 4.2; EXPRESSED IN HEART, SIGNAL = 3.7; EXPRESSED IN FETAL LIVER, SIGNAL = 5.6; EXPRESSED IN ADULT LIVER, SIGNAL = 3.1; EST_HUMAN HIT: AU128626.1, EVALUE 0.00e+00; SWISSPROT HIT: Q14839, EVALUE 4.00e-40; NT HIT: gi14784284, EVALUE 0.00e+00
acctttagagaggccaagccccacaccaaaacgtaagttcctgactacctcacctccatcagtggcttcatccttgaatagttcctcagtgccaaatttgaggatatcatcaagctcctgtttggacatagatccagtcttggagcccagcccaggccgcaccactagatgcgtcagcatcattttcttctttgccacctgcgtgatgcgctcctccactgacgcacgggtcacaaaccggtagatcattacctttttattttgcccaatccggtgagctctgctaaaggcctggagttgaacaggaaataaagccagaaattgtattttcctggtgccactcttatcctgacttccacataatattctaaattcagtacaaggcaaggtccacagcctacattcataggaaacttccttttgcacccctgcctccagacaccaccctctattatcatgttacccaaaataggatcacagctaaccaaactctggcttacaataaggtaaacaacacaaaaagaatctgttgtttctcacttaaaaacctaattccagatggtggagccctcataga

SEQ ID NO: 9543 - DNA, 540 bp, Homo sapiens
  MAP TO CHR21.3; EXPRESSED IN BONE MARROW, SIGNAL = 0.81; EXPRESSED IN BRAIN, SIGNAL = 0.68; SWISSPROT HIT: Q07654, EVALUE 9.00e-27; EST_HUMAN HIT: AA633399.1, EVALUE 1.00e-103; NT HIT: AB038162.1, EVALUE 0.00e+00
ccttggaacaggtgtgtgtgtgtggcttcctggggtccttgtgcctccatctccagcccagaaaggacagggaggccctgagaccccctgccttatggggctgggcccagaccacgatgccactggggccttacctgcttcctgcaggggcttgaaacaccaaggcactccagggatcctggagtcaaagcagcagccccggttgttgcactccttgggggtgacatgggggtagccgcagtccaccctgtccttggctggcacggcacactggtttgcagctgtcccagacaaagccctgtcagctgccagagcccttgctgggctgcggtgagtgtgtttgcttcactttgcaagtttgcatcctcccgctccgccccaccccgccgagttcaaccactgctgaaaccctcgcccttaggaagatgcactttccctgtgaatatttaaagagaggcagtctgttaaatgctcagctcggggactctggccatttgcctaagtgtctttctccttggcacgctcttatcaccttctcgg

SEQ ID NO: 9544 - DNA, 589 bp, Homo sapiens
  MAP TO CHR19.3; EXPRESSED IN BONE MARROW, SIGNAL = 1.6; EXPRESSED IN ADULT LIVER, SIGNAL = 1.6; EXPRESSED IN BRAIN, SIGNAL = 1.4; EXPRESSED IN PLACENTA, SIGNAL =   1; NT HIT: gi14755564, EVALUE 0.00e+00; SWISSPROT HIT: P28698, EVALUE 5.00e-35; EST_HUMAN HIT: BE743568.1, EVALUE 0.00e+00
taggcccatcttgacgattccaagaccacccccttgagcaagaatgccatcccctctgggtcccccatgcctgcccgtcatggacccagagaccacccttgaggagcctgagactgcccgcctccgcttccgagggttctgctaccaggaggtggcaggtccccgagaagccctggcccggctgcgtgagctgtgttgccagtggctgcagcctgaggcacactccaaggagcagatgctggagatgctggtgctggagcagttcctgggcacactgcctcccgagatccaggcctgggtgcgcggtcagcggccaggcagtcctgaggaggccgctgccctagtcgaaggactgcagcatgaccctgggcaactgttgggctgggtgagtgtggctggcatcagcttcttggagggatagaccctggctagagccattgtgacctacctcttctcctcagatcacagcccatgtcctgaagcaggaggtgctccctgcagcccagaagacagaggaaccacttgggagcccccacccctcagggacagtggagtcccctggggaaggtccccaggacaccagaataga

SEQ ID NO: 9545 - DNA, 511 bp, Homo sapiens
  MAP TO CHR1.3; EXPRESSED IN BRAIN, SIGNAL = 4.8; EXPRESSED IN HELA, SIGNAL = 2.6; EXPRESSED IN BONE MARROW, SIGNAL = 3.2; EXPRESSED IN PLACENTA, SIGNAL = 2.5; EXPRESSED IN HEART, SIGNAL = 3.8; SWISSPROT HIT: Q01956, EVALUE 1.60e+00; NT HIT: gi6679159, EVALUE 9.00e-49; EST_HUMAN HIT: AW752727.1, EVALUE 4.00e-36
tatgggggttagtgagccagaacctatcactgaagtactgtttgaaggactctctgatctgtcttcactgactaagataatctcaaagttctggcctgcctccttgatcttctaataagattccaccaggacctgggtgaggctttggcaggatgaacacccatgtgcagagaaatagggtcctatgtaaggcctttctgggatgctgctctccaagaactgtgagtcatttcataaacctgaaaaggttaggtccccaagggaattccataccttctgggtcatctcagatcaccagcagcccattcttgcccacaacctttgcagtggtggcatctacgaatattagcaatggaatattggaaatttggtatttgttccaaagtttctgtgcttctccttgtagggcagcgccagccaagtcatgtcccacatgaagtcctaccactgccactggtcatccttgctgctgctcatcaccagcttctaaccaagctgctcctccaaaaag

SEQ ID NO: 9546 - DNA, 571 bp, Homo sapiens
  MAP TO CHR19.3; EXPRESSED IN FETAL LIVER, SIGNAL = 1.4; EXPRESSED IN ADULT LIVER, SIGNAL = 2.6; EXPRESSED IN HEART, SIGNAL = 2.6; EXPRESSED IN BONE MARROW, SIGNAL = 2.4; EXPRESSED IN HELA, SIGNAL = 3.3; EXPRESSED IN PLACENTA, SIGNAL = 2.3; EXPRESSED IN BRAIN, SIGNAL = 3.1; EST_HUMAN HIT: AL035901.3, EVALUE 0.00e+00; SWISSPROT HIT: P34580, EVALUE 4.00e-12; NT HIT: gi14766934, EVALUE 0.00e+00
aacaggactgggcaagtcaggagcctgggggctcagggaggaaccctggggatggagaggggaatggggggcaggtccagaaccactacctgacccagcctggccccttcacacccacagggagctggcctaccagatcgcagagcagttccgggtcctggggaagcctctagggctgaaagactgcatcatcgtcggtggcatgggtacgggagctgggaggcgggggaagccccagcatgggaccctagcagctttggaccacctgcccagccctgcctctcatgctctgtcccccagacatggtggcccaggcgctggagctctctcggaaaccacacgtggtcatcgccacgccggggcgcctggcagatcacctgcgcagctccaacacttttagtataaagaagatccgcttcctggtgagttcgccccgcccctgcagacctcaggagctgggctcggagcctccaggcccaatgtcagagcctggggcaccatctcatccatttaggaaacgtatgtccgttagactgtccagtaaaacgctaggaacagtgacaaggaccgt

SEQ ID NO: 9547 - DNA, 531 bp, Homo sapiens
  MAP TO CHR8.3; EXPRESSED IN BONE MARROW, SIGNAL = 2.2; EXPRESSED IN LUNG, SIGNAL = 6.6; EXPRESSED IN BRAIN, SIGNAL =  33; EST_HUMAN HIT: AI242045.1, EVALUE 0.00e+00; SWISSPROT HIT: P10909, EVALUE 1.00e-39; NT HIT: L00974.1, EVALUE 0.00e+00
acccgtccaagtcatctgtcagctatcacaccttggccaagctgtggaacctctcttactttgctcctttgtaaagcagggttatattttccctgagtgggtgatgaggcttcaaggcaacaggggcgcctaaagttttctattttctgccgtgtgataaatgctcagtcaaaagcacacatgcccctgctcccgatcacagctcgggctcccgagccacagcatgtggccgggacacagctcaccgtggtgacccgcagatagtactggtcttcgccttgcgtgaggtttgccagccgggacacccagttaaactgctcgttcagctgctccagcaaggaggaggtgttgagcatcttccactggtaggactttagcagctcgttgtatttcctggtcaacctctcagcgacctggagggattcgtcgagctcccgccgcagcttagcctgggaggggttgttggtggaacagtctgcccagagatggaagaaacgcaagtgagaagtgtgaagggaaggctacaaaggg

SEQ ID NO: 9548 - DNA, 591 bp, Homo sapiens
  MAP TO CHR3.3; EXPRESSED IN ADULT LIVER, SIGNAL = 2.5; EXPRESSED IN BONE MARROW, SIGNAL = 2.3; EXPRESSED IN PLACENTA, SIGNAL =   2; EXPRESSED IN LUNG, SIGNAL = 1.7; EXPRESSED IN FETAL LIVER, SIGNAL = 1.3; EXPRESSED IN BRAIN, SIGNAL = 2.8; SWISSPROT HIT: P51677, EVALUE 1.00e-102; NT HIT: gi11449889, EVALUE 0.00e+00; EST_HUMAN HIT: BG182330.1, EVALUE 0.00e+00
actatgatgacgtgggcctgctctgtgaaaaagctgataccagagcactgatggcccagtttgtgcccccgctgtactccctggtgttcactgtgggcctcttgggcaatgtggtggtggtgatgatcctcataaaatacaggaggctccgaattatgaccaacatctacctgctcaacctggccatttcggacctgctcttcctcgtcacccttccattctggatccactatgtcagggggcataactgggtttttggccatggcatgtgtaagctcctctcagggttttatcacacaggcttgtacagcgagatctttttcataatcctgctgacaatcgacaggtacctggccattgtccatgctgtgtttgcccttcgagcccggactgtcacttttggtgtcatcaccagcatcgtcacctggggcctggcagtgctagcagctcttcctgaatttatcttctatgagactgaagagttgtttgaagagactctttgcagtgctctttacccagaggatacagtatatagctggaggcatttccacactctgagaatgaccatcttctgtctcgttctccctctgc

SEQ ID NO: 9549 - DNA, 565 bp, Homo sapiens
  MAP TO CHR1.3; EXPRESSED IN ADULT LIVER, SIGNAL = 2.6; EXPRESSED IN BRAIN, SIGNAL = 0.85; EXPRESSED IN LUNG, SIGNAL = 0.84; EXPRESSED IN BONE MARROW, SIGNAL = 1.1; EXPRESSED IN PLACENTA, SIGNAL = 0.89; NT HIT: gi14720223, EVALUE 3.00e-76; SWISSPROT HIT: O00401, EVALUE 2.10e-01; EST_HUMAN HIT: BE791713.1, EVALUE 3.00e-77
ggaaccaagcttccattgagcagcggctgaaaccccgcagctggcggtgtggggctccggactggtgacagtgcaggtgacacagaaggcagcggcgaatcgggctgcagggagaagcggtggggctgagcgcccggtggcctagggccagggaagccgggtcgcaggctcctgctgggcccgcctacctggaaggccggctgcccgatgcctgagaacactgtggtcagccccttgctctggggcgtcggcttcaggctcttgcctgccttaatctcagccagtagctccgagttgtcgcccgtcggggacatcatgttgaaagacttggtgcctatgcggaggcaggagatgaggcactggccagggtggggctgcatccccgccacccctcacccgcccctctgcagcccctttcctaagccaagattggatgggtgcccatcctccgggccagcgggcagctctccagatcccaggtcctgcaggcaggtttcagggcccccagaggcgggcccttggttccctgactgtggcaaccccaccatcttccccaccctactca

SEQ ID NO: 9550 - DNA, 554 bp, Homo sapiens
  MAP TO CHR2.3; EXPRESSED IN BONE MARROW, SIGNAL = 1.1; EXPRESSED IN FETAL LIVER, SIGNAL =   1; EXPRESSED IN ADULT LIVER, SIGNAL = 1.4; EXPRESSED IN BRAIN, SIGNAL = 0.99; NT HIT: gi11430011, EVALUE 0.00e+00; SWISSPROT HIT: P24341, EVALUE 2.00e-46; EST_HUMAN HIT: AW243295.1, EVALUE 0.00e+00
cgaaaaccaaaaccaaaaccaaaacaaaaacaaaaacaaaaacaaacaaacaaaaaacctcttgatttttttcttcttctccctttaattttgttagaggaaatcaagtctgatacaccaaccagcaattggctcactgcaaagagtggcagaaagaagaggtgcccttacactaagcaccaaacgctggaattagaaaaagagttcttgttcaatatgtacctcacccgcgagcgccgcctagagatcagtaagagcgttaacctcaccgacaggcaggtcaagatttggtttcaaaaccgccgaatgaaactcaagaagatgagccgagagaaccggatccgagaactgaccgccaacctcacgttttcttaggtctgaggccggtctgaggccggtcagaggccaggattggagagggggcaccgcgttccagggcccagtgctggaggactgggaaagcggaaacaaaaccttcaccgctctttgtttgttgttttgttgtattttgttttcctgctagaatgtgactttggggtcattatgttcgtgct

SEQ ID NO: 9551 - DNA, 588 bp, Homo sapiens
  MAP TO CHR17.3; EXPRESSED IN BONE MARROW, SIGNAL = 1.1; EXPRESSED IN HEART, SIGNAL = 0.64; EXPRESSED IN ADULT LIVER, SIGNAL = 0.68; NT HIT: gi14775763, EVALUE 0.00e+00; SWISSPROT HIT: P08111, EVALUE 3.00e-07; EST_HUMAN HIT: BG032503.1, EVALUE 0.00e+00
ggaagggtttcttgagggtccaatggtgtccatgaggttggggcctggaggggagtcccccagagtcccccacagcccacagtggctcaccttgaactgctcctcagatgcgatgagcacagcgtgaccaccctgcatgtcaggtgcctgcgccaggtcccgtgaggcctcgtagggctcgggcagtgggcggccacgccgccaacacggcaatggcaccacaggcgcccggtgcatcagctgcacctccttgcccagcacggcctccaccgcttgctcaggccgcttctcaccacccactgctgctgccggcacctccagtgcataggcgaacacagagcctgagttggtgccagcccacatggtcgctcgtggtgggcccctgcagaaaacaagcgcgtaggagggtgctccctgtgggccaggcatctcccctggggtcttcccacagactgcaggtccctccctgcctctcttgtagccctgcttcctaactatgacaccctgggactcagggctgattccctcctgccccatgcctccctggtgacctccagcctcgaggcctgagaccccagctctatgctg

SEQ ID NO: 9552 - DNA, 598 bp, Homo sapiens
  MAP TO CHR3.3; EXPRESSED IN PLACENTA, SIGNAL = 5.3; EXPRESSED IN BONE MARROW, SIGNAL = 5.7; EXPRESSED IN LUNG, SIGNAL = 5.2; EXPRESSED IN HEART, SIGNAL = 6.4; EXPRESSED IN FETAL LIVER, SIGNAL = 2.7; EXPRESSED IN BRAIN, SIGNAL = 8.2; EXPRESSED IN HELA, SIGNAL =   9; EST_HUMAN HIT: BE874999.1, EVALUE 1.40e-02; SWISSPROT HIT: P23805, EVALUE 1.70e-01; NT HIT: AF009963.1, EVALUE 1.00e-119
gagaggaggaggaggaggtggtggtggaggaggaggcagggggtggagagagagaaagcgcacgccgagaggaggtgtgggtgttccgcttccatcctaacggaacgagctccctcttcgcggacatgggattacccagcggctgctaacccctctcctcgccctgctcccccaaaccggcgtggctccccgggcaccaaggtagcggctggggccgggcagagggcgcggggagttggcactggctccccgggcgcagaagtttttgccccgctctcggggagatcttgagggatgtgcatgcacttggcatgcatttgggggttcctttactgcgggcagttgttttggggggagctcatttgaagcttaaaaaacaaatatcctctactctagtgcgtggctttgggggctccccattctggtctgatgtggcattcccccaagttggaaactgttgctgcagctgcaggaaatagttctttttttttttttttttttgaagagaggttgtgggggtgtcatatgtgagtctgctcaaggaaataatctttctaaaaatgtatccctctcttgcgctccgtggttgggagaataa

SEQ ID NO: 9553 - DNA, 547 bp, Homo sapiens
  MAP TO CHR19.3; EXPRESSED IN HEART, SIGNAL = 2.1; EXPRESSED IN PLACENTA, SIGNAL = 1.7; EXPRESSED IN BRAIN, SIGNAL = 1.7; EXPRESSED IN BONE MARROW, SIGNAL = 1.8; EST_HUMAN HIT: AW629730.1, EVALUE 2.00e-53; SWISSPROT HIT: O00322, EVALUE 9.00e-17; NT HIT: gi14767272, EVALUE 2.00e-53
aggctaagagcagggaggtcaggagctaggctgccgggttccaatcccagctcccaccacttaccgactgtgtggcctcgggcaagggactttccctttctgggcctgtttactcatccgcagaacggtgatgaccgcagccctgctctcctagagatctcatgagcggatgtctttaaggcactcactcctctaaaagctggcacatcgggagctctatcggcctctgtggacggagcccagggccctcccagcacccggtccaccccgcccacctcaatcatgacgcggtcccagaggcgggtcagctcctggccctggtcggtgtccgcgctgtagaaggtcagcatctgcttggtgatcagggatgggttggacaccatctgaggagaacagggaagaacaagggccggcagggctgggtggggagagaggacgacctccgccccgccgcgccgggaccctcgcccctcccatgcaggtcaggcccctccccaggcctcgccgggctcacgtagtcacggtgggtgtaggacgtgatgcagga

SEQ ID NO: 9554 - DNA, 502 bp, Homo sapiens
  MAP TO CHR16.3; EXPRESSED IN BONE MARROW, SIGNAL = 1.6; EXPRESSED IN LUNG, SIGNAL = 0.96; EXPRESSED IN HEART, SIGNAL =   1; EXPRESSED IN ADULT LIVER, SIGNAL = 1.1; EXPRESSED IN BRAIN, SIGNAL = 1.6; SWISSPROT HIT: P26258, EVALUE 4.00e-53; NT HIT: AF077345.1, EVALUE 0.00e+00; EST_HUMAN HIT: AA399390.1, EVALUE 0.00e+00
cttgcttggaggacacattggagaaagacctattgagggatggtgaactcgcatatgtatctcttgctgctgcgacaggcctcatcactccacttgccctgagctgattgggagaacaggacacagttttctcgcttgccaccgttaggctgtgcacggtcccagttgaggaaggagatagcgattccgttgacgtcaacaaacttgccttccgtgaccatgtcattgatgcccagccaaaagtcattgacacctggcaggctccttttaccatagtcttggagggcgttgatttcgtcggagttcctggggataaccaggattcctcctttggaaatgcagtcttcattggcctcatggaaatgcttcaaaccttctgaagcaaggtagcatttcttgtgaactttagtgcctcggagacagactgtgaagatgtgaagtgtaacatattaagatgcattttgagtgtattatgactagggctggacctggcaaatagcaa

SEQ ID NO: 9555 - DNA, 503 bp, Homo sapiens
  MAP TO CHR13.3; EXPRESSED IN BONE MARROW, SIGNAL = 0.66; EXPRESSED IN HEART, SIGNAL = 0.75; NT HIT: gi5729878, EVALUE 1.00e-127; SWISSPROT HIT: Q92598, EVALUE 7.00e-37; EST_HUMAN HIT: BF881959.1, EVALUE 0.00e+00
accaggagaactgtcttccgcatcatctttctgcacctgtttggtgtatttatcaaaaacaaaagagctataaactacaatacagctaaacttggcccatgtgggatccaaggtgtctgagggggaaaataatgaaattcattgggttgtcaaaagtaggacaggatattggtcttaacttttctaaaaacaagtttttatttgctaaggtcacaatttgaagaactctgtgctgaacttctgcaaaagatagaagtacccctttattcactgttggaacaaactcatctcaaagtagaagatgtgagtgcagttgagattgttggaggcgctacacgaattccagctgtgaaggaaagaattgccaaattctttggaaaagatattagcacaacactcaatgcagatgaagcagtagccagaggatgtgcattacaggtactttctcaactctgcttttgcttggtgtacagtctttaaacagtttccactggatgtcgtca

SEQ ID NO: 9556 - DNA, 561 bp, Homo sapiens
  MAP TO CHR6.3; EXPRESSED IN PLACENTA, SIGNAL = 0.81; EXPRESSED IN HEART, SIGNAL = 0.82; EXPRESSED IN BRAIN, SIGNAL = 0.81; EXPRESSED IN ADULT LIVER, SIGNAL = 0.88; EXPRESSED IN BONE MARROW, SIGNAL = 1.1; NT HIT: X02882.1, EVALUE 0.00e+00; SWISSPROT HIT: P06340, EVALUE 3.00e-54; EST_HUMAN HIT: BE706347.1, EVALUE 0.00e+00
ggcatctggtggtggaataggcacctggagctctaggagagaaaggaaggagtcggtggtatatgaaaggattctagagtaaaggaaacctggggccaggagggtgcatggggagggggctccgtaccccaatgcctgaggagtggcgcatccaggccccagtgctccacctggcagtcatagacgtcctcggctgagggcacgaagggcaggtagtggaacttgcggaacaaatggtcaggctgggaatagaagctggtctgggccactccctcagtgacagtttggccgttgcgtagccaggtgatattgatcacaggggggaagatgttgtccacgatgcagatgaggatgttgggctggcccagctccacccgagacttggggagcacggtcacccgtggaggcactaggaggaacgggccctgagtccacaggctcatccctcaccccagggccttactaggactgggattaagggacgttccccctttgtagccatctgtgggcaggggatgctctggggtatccactggggcaggagaggagggaaacagaggg

SEQ ID NO: 9557 - DNA, 566 bp, Homo sapiens
  MAP TO CHR3.3; EXPRESSED IN BONE MARROW, SIGNAL = 0.92; EXPRESSED IN ADULT LIVER, SIGNAL = 3.7; NT HIT: gi16158830, EVALUE 1.00e-122; SWISSPROT HIT: P51150, EVALUE 1.00e-40; EST_HUMAN HIT: BF435115.1, EVALUE 1.00e-122
tgacaaaaccgaattccctccttcaaagtgcagaaagggaagtgaagctgagacagccaagacaatggcccaaagtcacagccagctgggggcaggatggggacttaacccaggtcacctgggtcccggtccttaaaggcagttggcctgaagggctggcatatggtaatgaagactcccaccagcacctcctagagccatgtgagcttagcagagaaccctccaaattcacaaggcccctggggagcaggtgtctgtgacaatatctatcatcgttggtacttacttgtctgttttcgaggtcaatcttgtttcccaacacaacaaatgggaagttttcaggatctcggggactggcctggatgagaaactcatctctccagctatctagggttttgaatgtgttgggggcagtcacatcaaataccagaacgcagcagtctgcacctctgtagaaggccacaccgagagactggaaccgttcctgtcctgctgtgtcccatatctgtgagagacaaaacattcattccttgggagaatgctaggcagagcaccaggagcatgta

SEQ ID NO: 9558 - DNA, 598 bp, Homo sapiens
  MAP TO CHR22.3; EXPRESSED IN LUNG, SIGNAL = 2.2; EXPRESSED IN PLACENTA, SIGNAL = 1.5; EXPRESSED IN HEART, SIGNAL = 1.8; EXPRESSED IN BONE MARROW, SIGNAL = 1.5; EXPRESSED IN FETAL LIVER, SIGNAL = 2.3; EST_HUMAN HIT: AA554596.1, EVALUE 1.00e-106; SWISSPROT HIT: P40333, EVALUE 2.00e+00; NT HIT: gi4885636, EVALUE 2.00e-71
aacctcatccaggtgagtgccaggacagggcagggcacggccaggaagagctgtcagtgcaggagcttcctgcccagtggagagtcgaggccatcgtgtttgtcccaggctccgcttctcatttcggggcgtctcggttgtcggctggtgggatgttctgtggggagggaggcttgccaactgcgtgctttgctgtggagtgggcagggcagatgtagttaaaaaaaaaaaaaaagcagggaaagaatgtctgttctctgtctgagtgccaggtgggcaggctcacaggtgagctgtggttaccggctgtgtccccttgtcccctctcagtcctgggctgacgcgttccgcagctcgcccgatctgacaggtgtggtcaccatctatgaggacctgcggaggaaaggcctggagttccccatgactgacctggacatgctgtcacccatccacacaccccagagggtgagagaactgccgtaccgggaaccaagggaagggaggcaggactcatccccagagacatcaccaggctggcccctgacttcctgggctcttgatgttcccaggagccctcactgatcctgttttcctccca

SEQ ID NO: 9559 - DNA, 524 bp, Homo sapiens
  MAP TO CHR5.3; EXPRESSED IN HEART, SIGNAL = 3.5; EXPRESSED IN BRAIN, SIGNAL =   3; EXPRESSED IN FETAL LIVER, SIGNAL = 1.8; EXPRESSED IN BONE MARROW, SIGNAL = 1.9; EXPRESSED IN HELA, SIGNAL =   5; EST_HUMAN HIT: BG623944.1, EVALUE 1.00e-118; SWISSPROT HIT: P34991, EVALUE 3.00e-21; NT HIT: gi16160551, EVALUE 1.00e-75
ttttgctggcatgttataggtgttactccctttttaagagcatgtgatcaaagacaaaactgtgtgctacctacctgggcttcctcctcttcagtaaagtcatttttgatattgaaggtcttgcgaatctcctcaggagttttccccttgatcatattggcaacagtcttgcatgtaacatcaagcaaacctttgatgtctaagtagtttgcagcctgtaaagagacagttgttttccttaaagtatacttgatgttttaaactaaatccaaagttaatgattgacactccgtatctaataaagcttaaaatgctaattttaagaaattaaagggagaagaataaatcactcctaagttcttctgtgaaagacttttatgtgaccttctttgttatacctctataatgttgaatccttctgcttccttaaccaaactatactagctcaaatgtgaaataacggccactactgttgtgtatgtgtgtacacatgcacacaaataccacatcaggtcttggcaaaa

SEQ ID NO: 9560 - DNA, 504 bp, Homo sapiens
  MAP TO CHR19.3; EXPRESSED IN LUNG, SIGNAL =   1; EXPRESSED IN HEART, SIGNAL = 0.94; EXPRESSED IN ADULT LIVER, SIGNAL = 0.8; EXPRESSED IN BRAIN, SIGNAL = 0.67; EXPRESSED IN BONE MARROW, SIGNAL = 1.1; SWISSPROT HIT: Q9Y6Q5, EVALUE 1.00e-25; NT HIT: AF020797.2, EVALUE 5.00e-84; EST_HUMAN HIT: AU099332.1, EVALUE 8.00e-84
ctcctcagcgtggtaggttcttggatgctggtggtgaccaggtcctttccttccaccctcagccattgatcagccgcaactacaagggcgatgtggccatgagcaagattgagcacttcatgcctttgctggtacagcgggaggaggaaggcgccctggccccgctgctgagccacggccaggtccacttcctatggatcaaacacagcaacctctactgtatccaccccacgtggtgtccctggaggtgggtgtgggggctgtcggcgatggtggcagctcaggccaagagagggtgggctgaggacaggagttgcaccgcacatctctgtggcttaggctggggggcaggggcaggtagagatgagggtggtggcaagggacagggtggaggttcggggtctgtattccatttacttctccataaatggcaccttttccttaaccttgctgccccagtggtggccaccacatcgaagaatgccaatgcctccctggtgtact

SEQ ID NO: 9561 - DNA, 569 bp, Homo sapiens
  MAP TO CHRX.3; EXPRESSED IN BONE MARROW, SIGNAL =   1; EXPRESSED IN FETAL LIVER, SIGNAL = 1.8; EXPRESSED IN LUNG, SIGNAL = 1.4; SWISSPROT HIT: P97355, EVALUE 1.00e-19; NT HIT: gi15307675, EVALUE 1.00e-94; EST_HUMAN HIT: AW013994.1, EVALUE 0.00e+00
cagtggccatcttctccttcagctttttgttagagaaaatctaaagcatgacaggattttttaaaaagtgaactgtgtacaatagttgtcaacatttggtggtggccgtgattatataaaactaaaagcccaagctttggattcgttttgtgcttgtcaaaagtcggcagtcatgtggctttcttttgcacactcttcatcctagctccacttgtaaggcagtgttctagtaaggtacatttctgtttttctctttttccagattaccacccatagtgcgaggaggagccatcgacagatactggcccaccgccgacgggcgcctggttgaatatgacatagatgaagtggtatatgacgaagattcaccttatcaaaatataaaaattctacactcgaagcagtttggaaatattctcatccttagtggggatgttagtaagtattccatccctgccccgatcacgtaacaaagtggtgatgtgttgaatgatggtgttttcctgacaattactactgtcgtggatttgtttgagtttgtttttgacactgctggtttttgagatgca

SEQ ID NO: 9562 - DNA, 515 bp, Homo sapiens
  MAP TO CHR19.3; EXPRESSED IN BONE MARROW, SIGNAL = 0.69; EXPRESSED IN ADULT LIVER, SIGNAL = 0.53; SWISSPROT HIT: P20151, EVALUE 5.00e-54; NT HIT: M18157.1, EVALUE 0.00e+00; EST_HUMAN HIT: BE770929.1, EVALUE 0.00e+00
tggaggctcacacactgaagactcctggggcgcaagactatgggtcagagaaaaactgggctgtggccggaccccacctggttctttggccccacttccctcagacccaggcatctgggctcccagctacaccatctggcccaggcgtacactcctctggttcgatgctgccccagcctgaggcgtagcaggtggtccccagtgctggctcctgggtgggcaggcccaggaccttcacaacatctgtgatcttggcaggctctgacaggcggagcagcatgaggtcatggctggagtcttcatctggtctaaggctttgatgcttcagaaggctcatattgtagagcgggtgtgggaagctgtggctgacagggaccctctggcctgtgtcttcaggctcaaacaggttgtgccgacccagccagacctggctattcctggggaggaagggggtggatgcatgaggagagagaaaatggggaaaggtagatggggcaggggaggataagggagac

SEQ ID NO: 9563 - DNA, 579 bp, Homo sapiens
  MAP TO CHR6.3; EXPRESSED IN HELA, SIGNAL = 2.5; EXPRESSED IN BRAIN, SIGNAL = 0.89; EXPRESSED IN BONE MARROW, SIGNAL = 1.4; NT HIT: gi15304975, EVALUE 0.00e+00; SWISSPROT HIT: P16106, EVALUE 4.00e-72; EST_HUMAN HIT: BG327264.1, EVALUE 0.00e+00
aattactgcccggaaacctctacgctctctccccacgaatgcggcgagcgagctgaatgtccttgggcatgatagtcactcgcttagcatggatggcacacaggttggtatcctcaaagagccccaccaagtaggcctcgcaggcctcctgcagggccatcaccgcggaactctgaaagcgcagatctgtcttgaagtcctgagcgatttctcgcaccaggcgttggaaaggcaacttgcggatcagcagctcagtcgacttctgatagcggcgaatctcgcgcagagccacggtgccgggacggtagcgatgaggtttcttcacgccgccggtggccggcgcgcttttccgagccgccttagtggccagctgcttgcgcggcgctttgccaccggtggacttgcgtgcagtctgcttggtgcgggccatctcagactacctgaaagaaaaactcagccacttggcagagtggaaactgcccttatatatactcagaaacattctaattggccttgttgattttcaaaagacccgcgcaacaaaaccattggctgaagagtccaacgatgtgattggtg

SEQ ID NO: 9564 - DNA, 501 bp, Homo sapiens
  MAP TO CHR10.3; EXPRESSED IN BONE MARROW, SIGNAL = 0.92; EXPRESSED IN LUNG, SIGNAL = 1.1; EXPRESSED IN HEART, SIGNAL = 0.82; EXPRESSED IN BRAIN, SIGNAL = 0.88; NT HIT: AF261914.1, EVALUE 1.00e-112; SWISSPROT HIT: Q9NR30, EVALUE 1.00e-19; EST_HUMAN HIT: BG113094.1, EVALUE 8.00e-87
ataagcagcccaaatgatgcacattttaaaattgtttgtactttttgtgtattataagtaacaccgtggtgaacttcttgttttattatttccttaggataaaatggtggggtaggtgataaattagaattacatacagtcaaaggaatggatttattactatagaaatatgattattatatactgcatcaaaaataaatatgttacacatgtgaaagatttggaaagttactcatttatcttgagatgtcttagaaatgaaatgtgtccacttctagtatcctttctcctaacacactctcaaacaacaggcttttggattccgtgcctcccactgccattagtcacttcaaacaatcagctgagaagctgatagaggagaagggagctgtggaagctctggcagcagcactggcccatatttcaggtgccacgtccgtagaccagcgctccttgatcaactcaaatgtggtaaggttctgcagcacattcctgacactt

SEQ ID NO: 9565 - DNA, 530 bp, Homo sapiens
  MAP TO CHR12.3; EXPRESSED IN LUNG, SIGNAL = 1.4; EXPRESSED IN BONE MARROW, SIGNAL = 2.4; EXPRESSED IN HEART, SIGNAL = 3.1; EXPRESSED IN FETAL LIVER, SIGNAL = 1.7; EXPRESSED IN ADULT LIVER, SIGNAL = 2.3; EXPRESSED IN BRAIN, SIGNAL = 2.2; NT HIT: gi14768075, EVALUE 0.00e+00; SWISSPROT HIT: P11161, EVALUE 1.30e+00
acactgggtttttggagtgggcaggtccaaccaaggccttgaccctgagggcctgagagagcgggcctgccgtggccacagctgaggcctgcaagcttacagtaacggtgtctgaggggacagaaacaggggaggggggagcccctcacccccgaggggtcttagagaggggtgggcacatcacctcacagtatttacatatgatacaggacgggatggttccaggggctcggcctggcctccccgcagccctgccctcctctccagggctggagggaggcggccaggggcccacacccagatagacactttgttctcagctggtggggggcacctggccccttgccccctgcggcctggggcttcacattcacaaacctagaaatagtttaaaaaaggtttctttaaaaaaaaaaaaaaaaaaaaaaagggaaagggtaaaggaggggaaatctgaataaaaaacaggggttgggctgcggcctgtagcaggctccctccgccttcactccagctatgcacaaatccaa

SEQ ID NO: 9566 - DNA, 510 bp, Homo sapiens
  MAP TO CHR21.3; EXPRESSED IN BONE MARROW, SIGNAL = 1.6; EXPRESSED IN HELA, SIGNAL = 3.4; EXPRESSED IN FETAL LIVER, SIGNAL = 4.3; NT HIT: U53007.1, EVALUE 0.00e+00; SWISSPROT HIT: P30042, EVALUE 3.00e-18; EST_HUMAN HIT: BG747409.1, EVALUE 0.00e+00
aacaaagttaggacacgcggtgagggtgggggaggggccggggctccacacctgaaagtccctcaggtccgtgctgggtggctttttccgtaactctgcacacgaagctcacgtggaccagaaaaacaaggtggtcacgaccccagccttcatgtgcgagacggcactccactacatccatgatgggatcggagccatggtgaggaaggtgctggaactcactggaaagtgacgcgcatggacggggcccagctaggcgccaggacttggcctcaccctctggctgaggagctgtcggctgctttccatccagctgggagtctggcaggcccttttttttttttctttgccgaaacctgcaggcgttctctctctaaggaggatgtgctgcagtgcatgggggatgtttcttcctgggtgtggctgggctgctctcacatacagaggccgaggggccaattcgttctctgccacagggacttgcctcactgtgtcccaaaaacaaatcgc

SEQ ID NO: 9567 - DNA, 561 bp, Homo sapiens
  MAP TO CHR2.3; EXPRESSED IN FETAL LIVER, SIGNAL =   1; EXPRESSED IN ADULT LIVER, SIGNAL = 1.8; EXPRESSED IN HELA, SIGNAL = 2.7; EXPRESSED IN BONE MARROW, SIGNAL = 1.5; EXPRESSED IN PLACENTA, SIGNAL = 1.2; NT HIT: gi15296129, EVALUE 6.00e-84; SWISSPROT HIT: Q9NSD9, EVALUE 5.00e-26; EST_HUMAN HIT: W57950.1, EVALUE 9.00e-84
ggagggaaaggggatattttctggataatattgacaattaattgaaataaaactctccctttctttctaaaatcccaaatcaaaactaccaacttcatcaaaaacaaggtgtagcctcttcctgacactgtcactaactctggattcggctcatctgtcttaccttctgatgctttgatcacatatccccccttgtcttcaccaggaggcacatcgagcaactgcataattctgtccagcagcccatgaatgatctcaaacccaggattcttgttgtaataaacagcacagagatgtctgtagttttttgcacctacatctagaaaaataaaggaactggtcacaacgctgtattaaccattgcttaagaaactgatttaccccagtacaaacttagaaaaagtcaacaaaaaagaaaaccaaatattaaacattcagagaaggattcaacctcacaaatgcaaaataagataaaatagtcttttttcagctcatcaaattccctaaggtgttttatttgggggaaagagtgaaaaaccctcaatgctgaccagggaaaat

SEQ ID NO: 9568 - DNA, 562 bp, Homo sapiens
  MAP TO CHR12.3; EXPRESSED IN FETAL LIVER, SIGNAL =   3; EXPRESSED IN BONE MARROW, SIGNAL =   2; EXPRESSED IN HELA, SIGNAL = 5.8; EST_HUMAN HIT: BI771967.1, EVALUE 0.00e+00; SWISSPROT HIT: Q9WU28, EVALUE 2.00e-12; NT HIT: AB055802.1, EVALUE 0.00e+00
tagtcctctcattgacccgctatcccggtcctctgtaggaagtggagttcttgtccacgtccattgctcagctcaaagtggtacagaccaagtatgtggaagccaaggactgtctgaacgtgctgaacaagagcaacgagggtatggggtaggcgggtgagggtaacctaaagtggcgaacctgcttctctcgtcccacctcctaacccagtttttcttacctgaaacgagaaaatccattacatatcgtataccgcttcatgaaccctttgcatgttgcctgcctagaattgaaaagtacaggacattcctctgctcctattgcccctgtttccgttcttttcacactgtctgtgggtgctgtgccctgttggaactctctttaacgtcttacgttggagccgctaaccttccccaggtgtttgtcttcattgctttcacagggaaagaattactcgtcccactgacgagttctgtatcctttccacaggaacggctacctgctgccttctccctttctccttcactcccccaaaaagcggggagggggattgttttgatt

SEQ ID NO: 9569 - DNA, 538 bp, Homo sapiens
  MAP TO CHR2.3; EXPRESSED IN BONE MARROW, SIGNAL = 1.4; EXPRESSED IN FETAL LIVER, SIGNAL = 1.9; EXPRESSED IN BRAIN, SIGNAL = 1.2; EXPRESSED IN LUNG, SIGNAL = 1.9; EXPRESSED IN HEART, SIGNAL = 1.4; EXPRESSED IN PLACENTA, SIGNAL = 0.82; SWISSPROT HIT: P13995, EVALUE 1.00e-23; NT HIT: gi14738632, EVALUE 0.00e+00; EST_HUMAN HIT: BF969618.1, EVALUE 0.00e+00
actaaagcagcctgcctgtcttgtttctatgtaggagtcagacaaaaagctgggtatatcactccagttcctggaggtgttggccccatgacagtggcaatgctaatgaagaataccattattgctgcaaaaaaggtgctgaggcttgaagagcgagaagtgctgaagtctaaagagcttggggtagccactaattaactactgtgtcttctgtgtcacaaacagcactccaggccagctcaagaagcaaagcaggccaatagaaatgcaatatttttaatttattctactgaaatggtttaaaatgatgccttgtatttattgaaagcttaaatgggtgggtgtttctgcacatacctctgcagtacctcaccagggagcattccagtatcatgcagggtcctgtgatctagccaggagcagccattaacctagtgattaatatgggagacattaccatatggaggatggatgcttcactttgtcaagcacctcagttacacattcgccttttctaggattgcatttcccaagtgct

SEQ ID NO: 9570 - DNA, 592 bp, Homo sapiens
  MAP TO CHR1.3; EXPRESSED IN PLACENTA, SIGNAL =   3; EXPRESSED IN BONE MARROW, SIGNAL = 4.3; EXPRESSED IN LUNG, SIGNAL = 1.8; EXPRESSED IN HEART, SIGNAL = 3.7; EXPRESSED IN ADULT LIVER, SIGNAL = 3.5; EXPRESSED IN FETAL LIVER, SIGNAL = 4.2; EST_HUMAN HIT: BI822807.1, EVALUE 0.00e+00; SWISSPROT HIT: O14764, EVALUE 9.00e-43; NT HIT: gi4557608, EVALUE 0.00e+00
ctcggtcagaacctctgctccttcatctgtgcaggtctcgggctgcctgccggagagccccaggctggcctttcgggtgaggctggggtcagagctcagggaggccgaggcttcctcttgttttccgtggccgactgtcatcccacttcgaaacacgcagaggggaaggcagcccgagggctctttctcccaggaagtttctgggcagctgccgccgggcgccaggacaagcgagggtggcctgagtcctgtgctcacatggcgtatgccgcccagtagatgacattgacggccgcaaacgccgcagggaacacagcgcgggcgtaaatgtcaatggtgtctgcgtcgatgggcctgagccgggcacggatgcccccctggcctcctgagcgggctgccccctccttcttcgtctcccctgtctccacccccaccgacctgtaggagcccatcaggttccccgggacgcggcgctgccggcgggagatggccagctcctgcgtgacgccggcagcagagagggagaagaggacaatggcgttcctcacgtccatctgcacgaaggccggtgggggagacagggctgagcact

SEQ ID NO: 9571 - DNA, 503 bp, Homo sapiens
  MAP TO CHR17.3; EXPRESSED IN PLACENTA, SIGNAL = 1.2; EXPRESSED IN BONE MARROW, SIGNAL =   1; EXPRESSED IN LUNG, SIGNAL = 0.76; EXPRESSED IN BRAIN, SIGNAL = 0.98; EXPRESSED IN ADULT LIVER, SIGNAL = 0.99; SWISSPROT HIT: Q9UKN7, EVALUE 6.00e-43; NT HIT: gi14775687, EVALUE 0.00e+00
tggaagtccctcatccagtctgacctaactcctagcccctgcagtgaaggcctgccctcctttcttgctctgagcccagtagaaatgcagagcagccctggccagcctccatgcctgagcttcccagcatagagatctgactcctggcctgacctttaagaccctgccttgggctccactgctggtgccaccgtccctcgtgtcccagcccctatccagtcccactcacttgagaaggtacttgttgaagcacggggaaggtgcaaagccactgaggcaggcggccagcagcagccagccccgctcagcattgtgggcattgtgattgtgccacacctgattggccagctgtgccaggatctcatcccgcagctcaggcaccgccagccccttctgcacgatgtagttcccgaagatgttctcccgggcaccatgcaggtgggggtcgcccatgaagcgcaggatctgggccacgaacagagtctcctgggcatctcagaaag

SEQ ID NO: 9572 - DNA, 600 bp, Homo sapiens
  MAP TO CHR17.3; EXPRESSED IN LUNG, SIGNAL = 1.3; EXPRESSED IN PLACENTA, SIGNAL = 1.3; EXPRESSED IN BONE MARROW, SIGNAL = 1.5; EXPRESSED IN ADULT LIVER, SIGNAL = 1.4; EXPRESSED IN BRAIN, SIGNAL = 1.1; SWISSPROT HIT: Q9UL17, EVALUE 2.00e-27; NT HIT: gi13653281, EVALUE 1.00e-82; EST_HUMAN HIT: AI767220.1, EVALUE 3.30e+00
tcacctctttgacatgcagcccccgggacagaaccctggtgatgtagggctttgcctgtcccgagagggacgtaaggaaggacacagggggaggaccaggcagggaagggcagaggactcagcagaggacaggctagagcaaagcaggaagccagaaacaggagggatgcaatggcgtgggatggagtgggagggggttaaaggtctaggaattaggggtaggggcttggtgggcccaccagggggcgcccagtcccagcgaaacagagcccaccgctcccaggggcgcgcgcacctggcatgctgccctcggcctttccacactgcacccacttgccgctctggtaccgccagtggtgctggtccaccaagaccacgtccacaaacatcctgtagtggctggtgggctccagcccggccacagtaaatgacaggaatgggaacatccgcctggagagaagagagaaagcccccagcacccatcagctccagcttgacagccagtcccccctgcaacagtgcccaggcatcagtggtgtgctgtagccggcttcctcccactcacaagaaccagctggaaggtgtttagggagtttgcca

SEQ ID NO: 9573 - DNA, 566 bp, Homo sapiens
  MAP TO CHR17.3; EXPRESSED IN HELA, SIGNAL = 2.3; EXPRESSED IN BONE MARROW, SIGNAL = 2.2; EXPRESSED IN HEART, SIGNAL = 2.4; EXPRESSED IN ADULT LIVER, SIGNAL = 2.4; SWISSPROT HIT: P49447, EVALUE 2.00e-24; NT HIT: U29460.1, EVALUE 0.00e+00; EST_HUMAN HIT: BE262852.1, EVALUE 1.00e-119
aaacgaggtgaaaatgctggaccaggctggagaggagctgccactcaccaacctcagagcctgggtttggattccatctccccaggctctgaaccagcttctgtctctgtcttttctagaatcttagatttgtccaaccagaagagaccgcaggggtgacaagacccctgcaaactgcctctcagggacccccacaagcccgggaaaagaggagcggcccatgggactcaccatttccctgcaggaagatcaggcctatgaccatgcagagggggtgcgcgttgaactgcaggtcgctctcccaggcaatgccgcctcggtacagcccgagccacgcgccggtcatggccaccaaggtcaggcccagcagctgggagaaggccacgtagtaaggcagtgctgtgggggtggctgccgcggccccgccctccatgctgaggcaaacgctgcaagaaagagcagagctcagaggagcagcgcacagcaccccgagatgcgcacagcccccgcggatgcacacagccccccaagatgcgcacaggccccccgagatgtacacacccctc

SEQ ID NO: 9574 - DNA, 533 bp, Homo sapiens
  MAP TO CHR6.3; EXPRESSED IN ADULT LIVER, SIGNAL = 0.99; EXPRESSED IN LUNG, SIGNAL = 0.77; EXPRESSED IN BONE MARROW, SIGNAL =   1; SWISSPROT HIT: Q01755, EVALUE 5.00e-34; NT HIT: AF260330.1, EVALUE 0.00e+00; EST_HUMAN HIT: AI041049.1, EVALUE 0.00e+00
tgaagtcattagggcttggcctcagctgcagcacaggaaaaatggaggatttcttgcacttaagaagtttattaatgaatgggtatggaccagttggtgtttacatgcttgatccctacagccttggtgtactggctgcagggcctgggatagaagctcactgtctgctggtcactggtgatgttactccaggaagatgatgggcctcctcttgggtccaaggtaccagggctctgagccgacgctatcaaacagactccacttttgtttccagtgcctgggctggggaaatgagggtttttaggatctcagtgtagtagggaccaaacacctgctgattgtgatgtgtcaagttgacaaacttttggcccagttctgccagttctgcttcaatgagagtaaggcctccaggaaggtctaatagagaccgctgcacaccaagaaccaaacagcatttgagaaacaaatggatccgctgatctgtgagcaggaaaagacactgataagggaaaaggcaaacagatttcagggag

SEQ ID NO: 9575 - DNA, 553 bp, Homo sapiens
  MAP TO CHR3.3; EXPRESSED IN HELA, SIGNAL = 4.2; EXPRESSED IN BONE MARROW, SIGNAL = 5.1; EXPRESSED IN PLACENTA, SIGNAL = 4.5; EXPRESSED IN LUNG, SIGNAL = 7.5; EXPRESSED IN BRAIN, SIGNAL = 7.5; EXPRESSED IN ADULT LIVER, SIGNAL = 3.6; SWISSPROT HIT: Q09695, EVALUE 3.00e-08; NT HIT: gi14737649, EVALUE 1.00e-102; EST_HUMAN HIT: T66938.1, EVALUE 1.00e-88
ttttcacgaggctcacacagccatcccaggccagagattcgaggcccaggctaagggtggtggcaatataaatagatgcaaatggagtcaggctatctttggagatgaaactgacaattcctgatggttggatgtgagagaaatggaagaatccagtgccatcttatgtacacggagaggaaaataaccaggatcctaagacacatctaattattaaatccatttttaaaaaacgtaatctggatcttgctgctgtagttcagggtttggggggctcttttaaacacccagccttcattgtgacacgtcttttccagtatgcagaccctgtggctgacctcctagaacgctggggtgtgttccgggcccggctcttcagagaatcatgtgtttttcatcgtgggaatctacgtgaaggacctgagtcgccttgggggagctgagcaaagtgatcattgttgacaattcccctgcctcatacatcttccatcctgagaatgcagtaagtggccccaaagaaagaaaatgtcgtgctccatctgagccctctgtc

SEQ ID NO: 9576 - DNA, 598 bp, Homo sapiens
  MAP TO CHR17.3; EXPRESSED IN LUNG, SIGNAL = 2.5; EXPRESSED IN HEART, SIGNAL = 3.3; EXPRESSED IN BONE MARROW, SIGNAL = 1.4; EXPRESSED IN ADULT LIVER, SIGNAL = 2.7; EXPRESSED IN PLACENTA, SIGNAL = 2.1; SWISSPROT HIT: Q9UJP4, EVALUE 2.00e-13; NT HIT: gi14774927, EVALUE 0.00e+00; EST_HUMAN HIT: BI463857.1, EVALUE 0.00e+00
atgcattcactcaggactcgcgagctgccgtggcaggcactgccctcccctccgccagcgagcatctccccctctccgcgcccgccgccctccgcgctcccgcctccctcgcctacctgtcggccaactccagcacctcgtgcacgctgcccgtgctgacgcggatgcgcccggtgtacatgtactcgattacggcttccactgtgtcgggttcgggccccggctcggagctccacttgcgcatctccacccgtcccgagcgggactcggaaaactggcccgagagcaggggcgtgaagtactcggtggcggcagccagtaccgagcggtgggcccggaactcgcggcctccagccccgccgaagcacagggtaatgtcgcagaagaggccctggcgccgctgctcgttctgccgccaggacagctctgagcagtgagagctgcactcgaaatcctcggcttctgggcccggatcgcccccgctcgcctccattgcagagatccccggcccaggcccgaagtccaccgtgccgctgcctcggacctcggcggccagtcctgccgagccggcggcggcccgtctccatgctctccattt

SEQ ID NO: 9577 - DNA, 569 bp, Homo sapiens
  MAP TO CHR22.3; EXPRESSED IN ADULT LIVER, SIGNAL = 4.1; EXPRESSED IN BRAIN, SIGNAL = 5.3; EXPRESSED IN HELA, SIGNAL = 4.8; EXPRESSED IN PLACENTA, SIGNAL = 5.1; EXPRESSED IN BONE MARROW, SIGNAL = 5.1; EXPRESSED IN LUNG, SIGNAL = 4.4; EXPRESSED IN HEART, SIGNAL = 3.4; SWISSPROT HIT: P90838, EVALUE 2.00e-22; NT HIT: AF155658.1, EVALUE 1.00e-103; EST_HUMAN HIT: BF034715.1, EVALUE 1.00e-103
gacaccaagaggacaggaggaatgaaacagactgagtttactctgtcttctgtaactgagttactcctgtcttccactaattcaaaggcctcaattcacggtagtggagtaaaatacacttcctgcagcacttgctatagcacacggcaccaccgcaagcacaaatgatgggggaaggagttactgcttcagagaagattgggaatcactgttctcatgagtgacagagtattttcttttcacaattgctgcttttcgttttaaatgtaattcacatttgcaacaatctaaatcgtgcccccactgcttaaaactacaaacgtagagctacgtacttggtaatcaacagcaatgaggggatggtgaggagggaaagcgcgggtggatcccttcctgtgtactaacagtgtccgttcctttccgtccaccacatgctgctccactttggcaatgttgtgagaaacatcatagatcacatgtaggtccaagtcatcaggggttgtgttgaagaccttggcgaaagcctaggagaaaacacagaagataaaagcagccagaacttcaggact

SEQ ID NO: 9578 - DNA, 562 bp, Homo sapiens
  MAP TO CHR17.3; EXPRESSED IN ADULT LIVER, SIGNAL = 2.2; EXPRESSED IN BRAIN, SIGNAL = 1.5; EXPRESSED IN BONE MARROW, SIGNAL = 2.1; EXPRESSED IN PLACENTA, SIGNAL = 1.6; SWISSPROT HIT: Q06430, EVALUE 1.80e+00; NT HIT: AB023653.1, EVALUE 0.00e+00; EST_HUMAN HIT: AV735059.1, EVALUE 1.00e-67
cagttgaaaagagggcaaggtgtgggacagtcattgggatggggtaggcattctaggcagagtctgactccaggggctgtggtggtcaagaccaggacttacatggggaggcagatgcaggagcgcagagggcagtagcaatgaggatgacagcgagggctgccgcggagaccttcatggtacctgtgggagaggctgtgcgaggtccacgtgctgtcttgatcctctgcaggaatcctctgcagctcaggctggccctttatagggccagttgaggggcatcccctaaggggagtttccaaaatagcaaccaagcattggccggtatcataagtgaaattgcacaaaacggaaaagaaaactgaaatagcctccggaaattcgagtctctgtctctccctcactgctctctcatctagagtgagctcatcagtttcctctttgaccaagcaccaatggtggaaaaatttctctgctgacatccttagttttaccttccagggaaggggtcctcctcagagagcaggaagccgctttcttggggacaacaaggagtggcagt

SEQ ID NO: 9579 - DNA, 581 bp, Homo sapiens
  MAP TO CHR12.3; EXPRESSED IN HELA, SIGNAL = 2.3; EXPRESSED IN PLACENTA, SIGNAL = 3.9; EXPRESSED IN BONE MARROW, SIGNAL = 4.2; EXPRESSED IN LUNG, SIGNAL =   3; EXPRESSED IN ADULT LIVER, SIGNAL = 3.7; EXPRESSED IN FETAL LIVER, SIGNAL = 2.6; EXPRESSED IN BRAIN, SIGNAL = 3.6; SWISSPROT HIT: P26010, EVALUE 2.00e-42; NT HIT: L23813.1, EVALUE 0.00e+00; EST_HUMAN HIT: BG744254.1, EVALUE 0.00e+00
ttttactccaacccaccaggtaattgctaaatatacaaactacagcaactatggtatgaatggcaccccctagaactgtgcactacacaaccataaggggcagtcctgttcccaaacagacctccaggctcagatccccgccccacctcctcacctggcagagtgcagcctgcagaatggcatcgaagccaccttcaggcgagtccagattgccggacacactctggcgccccacctcccgctcgaaggcttgtgcgtcccccgtcagggacagcacatggtgaaagctgaatggtgactggcagcgctccagccgggtggggcaggggtggcgcagtttggagggtactgtgctcacaaagggcagcaccgttttgtccacaaaggaaccaaaacctgggagaggagaggaatgaaggttgtgccagaagtcgcagggcagcaacagaggacccatgagagcgctctatgggaagtggggtggggaggacggtgatgggagagggtgcacctagggggcagggacctggtaactggcaagcaaagcagtgagaccactggctcagggaagtggcaggtag

SEQ ID NO: 9580 - DNA, 522 bp, Homo sapiens
  MAP TO CHRY.3; EXPRESSED IN BONE MARROW, SIGNAL =   1; EXPRESSED IN ADULT LIVER, SIGNAL = 1.9; SWISSPROT HIT: Q99814, EVALUE 5.00e-48; NT HIT: gi16158187, EVALUE 1.00e-113; EST_HUMAN HIT: BF987694.1, EVALUE 0.00e+00
taagacccatctctgcccacagcatacacacccatggccccctacctgtcatcacagtaggtgaacttcatgtccatgctgtggcggctcaggaaggtcttgctatccagggggatgtccatgtgggatgggtgctggattggttcacacatgatgatgaggcaggacagcaggggctccttgtagccacacagactattgtgaggagggcagttgttgtagactttcacctggcccgtgcagtgcaagacctgagacaggcgtggaagggtcagacatggagccgagagtgctgggggtgggggtagggccttaggcatcccctgcaccgccgttaccctacacctgggactccaacccaggcctgatgttgccctaccttccaggtggctgacttgaggttgacagtacggcctctgtctggtgaccgtgcacttcatcctcatgaagaagtcccgctctgtggacatgtctttgctttttttcccaaaaccagagcctggatgtggaaggatgggaaga

SEQ ID NO: 9581 - DNA, 574 bp, Homo sapiens
  MAP TO CHR19.3; EXPRESSED IN PLACENTA, SIGNAL = 5.4; EXPRESSED IN BONE MARROW, SIGNAL = 3.7; EXPRESSED IN FETAL LIVER, SIGNAL = 5.6; EXPRESSED IN HELA, SIGNAL = 4.3; EXPRESSED IN HEART, SIGNAL = 6.9; EXPRESSED IN LUNG, SIGNAL = 6.3; EXPRESSED IN BRAIN, SIGNAL = 4.6; EXPRESSED IN ADULT LIVER, SIGNAL = 4.9; SWISSPROT HIT: P20785, EVALUE 2.50e-02; NT HIT: gi15303727, EVALUE 0.00e+00; EST_HUMAN HIT: AL517794.1, EVALUE 0.00e+00
agtggacattccagagacgggcatgacagtacagaagagcatgggctgcgctaccccctcagctgacagggctgtggggcacactgggtcccagggcccagccccaagggtcccccaccagccacacccctctagcgcgcgcgcgcgcgcgcgcgcgcgcgcacacacacacacacacacacacacacacacacacacacacacaggcagccagcttcatacactctcaaaaggccaggcctcacccggggagagggcgccagccaggtgagtggtccggggagaattcagctccacctcttcaccccaatcggacacaggctggtggccgctgggtggtgagaaagggctggaaggcgtgccaggggcctggggctccagcaggggctcctccggactgaaggggactccgtgggcctgctcactgcaggggatcccggtgggggcagcctctggggcttggtggtcttgggctggttcctcctcatcaccttcttccacctcgatctcctcctcttcctcatcctcacttatgtcctcccattcttcatcctcttccccctcattctcttcc

SEQ ID NO: 9582 - DNA, 558 bp, Homo sapiens
  MAP TO CHR15.3; EXPRESSED IN BRAIN, SIGNAL = 0.98; EXPRESSED IN HELA, SIGNAL = 3.1; EXPRESSED IN BONE MARROW, SIGNAL = 0.9; EXPRESSED IN LUNG, SIGNAL = 1.2; EXPRESSED IN HEART, SIGNAL = 0.95; EST_HUMAN HIT: BF951402.1, EVALUE 2.00e-93; SWISSPROT HIT: Q9TV36, EVALUE 2.00e-22; NT HIT: AF187554.1, EVALUE 1.00e-114
gatgctctcaaagcaccctcaattataattttttttcttagtttgctgttttgcaaagactgttacttacctcgggtttcaaccaggttagggcaattttaaatgagtatttgttgcttcaataacacatttacagcttcagaaagcaagcagtgttttgcttcataggacctgatagccatgcatcttgagagtgaggaaaagttacttgccaacacactggttccactggtagtgctggaggtagccctgggggcagctgcacctgtagcccccaatgatgttctggcagccatgctggcagcggtggttaccctcacactcgtccacgtctgaaaaagaagcagagccaccatgatgccaactcaacatctctctctgaagccagatggattctaataagaaatctggcccctacacatcctacacattattctaccaccaaaaacttcaagaatctctcttctggaactgctgctaagtccaaggagaaaatcattcagagagccctggcaaagtctacaaataaaaattgtcaggaaattagtgcaaagccca

SEQ ID NO: 9583 - DNA, 546 bp, Homo sapiens
  MAP TO CHR9.3; EXPRESSED IN BONE MARROW, SIGNAL =  10; EXPRESSED IN HEART, SIGNAL =  14; EXPRESSED IN PLACENTA, SIGNAL = 8.8; EST_HUMAN HIT: BG542937.1, EVALUE 2.00e-69; SWISSPROT HIT: Q05932, EVALUE 2.00e-31; NT HIT: U24252.1, EVALUE 0.00e+00
ggctaggctaacagtgctggcatggcaggcgggcctggtactggccttgttgccctggcttggccactggtctgctggctgtctctgtgcctgtggaccctgagtgagccttaacctactatctgggcactgtggttgccaggatgccgtgcgcatgctcaataccctgcagaccaatgccggctacctggagcaggtgaagcgccagcggggtgaccctcagacacagttggaagccatggaactgtacctggcacggagtgggctgcaggtaaggtagagagggcctgtgaccacctcccacccccatttgtgattcccgtagctgaggcagggaccttgtctgtctgtcccaggtggaggacttggaccggctgaacatcatccacgtcactgggacgaaggggaaggtgaggggcaggaccctggggtagggggtctattaagtggctggtggagtagagcctgcccagacaatcccttttctttcaagggctccacctgtgccttcacggaatgtatcctccgaagctatggcctgaagac

SEQ ID NO: 9584 - DNA, 559 bp, Homo sapiens
  MAP TO CHR5.3; EXPRESSED IN BRAIN, SIGNAL =   1; EXPRESSED IN HEART, SIGNAL = 0.8; EXPRESSED IN BONE MARROW, SIGNAL = 1.3; SWISSPROT HIT: Q9Y5E5, EVALUE 1.00e-79; NT HIT: gi14861873, EVALUE 0.00e+00; EST_HUMAN HIT: BG819161.1, EVALUE 5.00e-02
ggggattggatatagggacctggactccaacatgaagaagctagggagaattcatccaaacaggcaagtgttggcctttattttgatggtgttcttgtctcaggttcgcctcgagcctattcgttattctgtgttggaggaaacagagagcggctcctttgtagcccatctggccaaggatctgggcctgggaattggggaactggcctcccggtcagcccgggtgctgtctgacgatgacaagcagcgtttgcagctggatcgtcagactggagatttgcttctgagggagaaactagaccgggaagagctctgtggtcctattgaaccgtgtgtactgcatttccaagtgttcctggaaatgccggtgcaattttttcaaggagaattattgatccaggacataaatgatcactctccaatattccctgaaagggaagtgctcttgaaaatactagaaaatagccagccgggtactctatttccgttgctaatagctgaggatttggatgtgggcagcaatggtcttcaaaaatacacaatcagccccaattctcat

SEQ ID NO: 9585 - DNA, 502 bp, Homo sapiens
  MAP TO CHRX.3; EXPRESSED IN HELA, SIGNAL = 2.1; EXPRESSED IN PLACENTA, SIGNAL = 1.7; EXPRESSED IN LUNG, SIGNAL = 1.1; EXPRESSED IN HEART, SIGNAL = 2.1; EXPRESSED IN BONE MARROW, SIGNAL = 1.6; EXPRESSED IN FETAL LIVER, SIGNAL = 2.2; EXPRESSED IN ADULT LIVER, SIGNAL = 2.6; EXPRESSED IN BRAIN, SIGNAL = 1.7; SWISSPROT HIT: Q15738, EVALUE 4.00e-54; NT HIT: U82671.3, EVALUE 0.00e+00; EST_HUMAN HIT: BF793480.1, EVALUE 0.00e+00
ggaaagctgcagcaattaggcagtgagaatgcgatctgcacgggcttaatagatgcttcaactttgggcaggtgggggtggtgtttctaacttcttgttcttgttctcccgccaggcatttcacatcaccaatgatgagcccatccctttctggacattcctgtctcgcatcctgacaggcctcaattatgaggcccccaagtaccacatcccctactgggtggcctactacctggccctcctgctatccctgctggtgatggtgatcagtcctgtcatccagctgcagcccaccttcacacccatgcgggtcgcactggctggcacattccactactacagctgcgagagagccaaaaaggccatgggctaccagccactagtgaccatggatgatgctatggagaggaccgtgcagagctttcgccacctgcggagggtcaagtgagggacactggaggctgggctctctcgacacgttgctcagccagtcactccttcc

SEQ ID NO: 9586 - DNA, 582 bp, Homo sapiens
  MAP TO CHR19.3; EXPRESSED IN HEART, SIGNAL = 0.83; EXPRESSED IN BONE MARROW, SIGNAL = 1.2; EXPRESSED IN BRAIN, SIGNAL = 0.91; SWISSPROT HIT: P14282, EVALUE 5.00e-03; NT HIT: gi15309002, EVALUE 3.00e-86; EST_HUMAN HIT: BE792048.1, EVALUE 6.00e-82
ggaggagctctttatgcgtgatagttactaatcctttcatgaatacattacaaaccaacttcttcccagtctgtcttgtgtctttcagtgttgctcctggggtccttcagctccagggcccacgaggcatcatggactgtttcacgtaacccttctctctatttctctttccaggtgtcccaggtatccagggcagcccaaatggcagtccccagctcgcggatcctccagttgtcaaagccgaaggccccagccaccctcttggaagagtgggaccccgtgccaaaacccaagccacatgtgtcagaccataaccgcctccttcacttggccagtaagtaggtgcctcaggctaggcatttcctgatgtcctgttcagatcccaagggacaccttatacctctgcctagagcgggcagagggaagctctcccccatgaaagagaagcagaaatcacagggacgtgtggtccggaagcagagggtgttgtctgagagggttttctagcaggaaaaaaaggtgtagaagagaaaatcagggtgcagagcaggaaccagagaaccacgctaaggaacaaatgca

SEQ ID NO: 9587 - DNA, 507 bp, Homo sapiens
  MAP TO CHR19.3; EXPRESSED IN BONE MARROW, SIGNAL = 3.3; EXPRESSED IN PLACENTA, SIGNAL = 8.8; EXPRESSED IN HEART, SIGNAL = 3.3; EXPRESSED IN ADULT LIVER, SIGNAL =   3; EXPRESSED IN FETAL LIVER, SIGNAL = 1.7; EXPRESSED IN BRAIN, SIGNAL = 4.6; SWISSPROT HIT: P20273, EVALUE 2.00e-60; NT HIT: U62631.1, EVALUE 0.00e+00; EST_HUMAN HIT: BG757557.1, EVALUE 0.00e+00
aaggactgaccaccaccaagaagaacaagagcaggaagaggccttacagtagacggtgagggtgctgagaggcgaacggcccttgcccacactgttggtcccctggcaccagtaggcacccgagtgctggaccttcaccggctccaatctcagcttctggctgtggtaggggaggctttggttattccagtcaaaccaggtgtagtgggagacgggagggttggcgtcgctctcacaggtcagggttgcactcttcccctccatcacttggtcccccgggctcatggacacacgcagcctcctgggtgcatctgcatggcgggcagggggagggggtgcgaagtcactaccaggcaggccactggtcccttctctgctccactcccagcctccggccctcactcacacagcacttcaagtgtccaggccttggacgctgtctgtcctatggagttgttcacccagcagctgtaactcccagcatcttctggggagatggagtcaaaa

SEQ ID NO: 9588 - DNA, 546 bp, Homo sapiens
  MAP TO CHR17.3; EXPRESSED IN FETAL LIVER, SIGNAL = 0.87; EXPRESSED IN BRAIN, SIGNAL = 1.4; EXPRESSED IN BONE MARROW, SIGNAL = 1.2; EXPRESSED IN HEART, SIGNAL = 1.3; SWISSPROT HIT: P13646, EVALUE 3.00e-33; NT HIT: AF049259.1, EVALUE 0.00e+00; EST_HUMAN HIT: AL603020.1, EVALUE 0.00e+00
actgtgtttcttggccttggaggctctgcccttcatggaggacccctcctcagcttccaagggctcaccttgtcccggagctcttcaatggtcttgtagtaggggctgtagtcccgctcagggctagctgggctctgcttcaggtgccagtcacggatcttcacctccaggtcagcgttggcctcctccagggcgcgcaccttctccaggtaggaagccaggcggtcgttgaggttctgcatggtgatcttctcattgccagtgaggaggccgccatcacaagcaccaaagtcaacaaagccaccagcaaaacccccaccaaagccacctccaaggccacctccatagccacctccaaggccacctccatagccacctccaaagccactaccagcccctccaccaaaaccacagctcacgccgcctccatagcccccagctgatcccccggacacaaaccgagttgaacaggtagagacaccacggcctcctcccagctggcaagagccacccccgaaaccacctccatagctggcagaggagctc

SEQ ID NO: 9589 - DNA, 559 bp, Homo sapiens
  MAP TO CHR19.3; EXPRESSED IN BONE MARROW, SIGNAL = 4.6; EXPRESSED IN LUNG, SIGNAL = 3.8; EXPRESSED IN PLACENTA, SIGNAL = 6.4; EXPRESSED IN ADULT LIVER, SIGNAL = 4.1; EXPRESSED IN BRAIN, SIGNAL = 7.1; SWISSPROT HIT: Q13526, EVALUE 3.00e-29; NT HIT: gi5453897, EVALUE 1.00e-118; EST_HUMAN HIT: BG751756.1, EVALUE 1.00e-118
cctagctgaattcctgcctgccctcccctccaggccgagtgtactacttcaaccacatcactaacgccagccagtgggagcggcccagcggcaacagcagcagtggtggcaaaaacgggcagggggagcctgccagggtccgctgctcgcacctgctggtgaagcacagccagtcacggcggccctcgtcctggcggcaggagaagatcacccggaccaaggaggaggccctggagctgatcaacggtgagcagggcgagggcaggggcttgggagggggtcttctcccaggtgagcctttgtagaagtcacatcagacccttcaccccagcttgctcagctgccaggcgtggtgttggccaacacaaaaacgccagtgcatgacctgaccctgaccttcacagcagccattctctttcttttccatctggcatttgagggtgagccaggtaggggcagaggacccagcctgggggctggcagacatgggttcaggtagtagctgtgcctctgtgaactctgtgacctttgggaggggactcgtgtcacctcccctaga

SEQ ID NO: 9590 - DNA, 512 bp, Homo sapiens
  MAP TO CHR5.3; EXPRESSED IN BONE MARROW, SIGNAL = 2.2; EXPRESSED IN LUNG, SIGNAL = 2.2; EXPRESSED IN ADULT LIVER, SIGNAL = 2.4; EXPRESSED IN BRAIN, SIGNAL = 2.9; SWISSPROT HIT: P48643, EVALUE 3.00e-44; NT HIT: gi16159223, EVALUE 1.00e-104; EST_HUMAN HIT: BF035842.1, EVALUE 1.00e-104
tcgacagaggtcacatccagcttatgctttgtttttggtttgggtggttcaaatggacatgtgagaattgcaatcttcgcatcttccactttctatgggggaacataaagacattttaattggtggaattaagagttaaccaacagtgcgaagctgtgagatgcaatggctcacttttggcatctgtgggtgactgaaatccttgtccacaatcacgcccttaatcagtttagtgtcctccagcctgccgcccactttgccttctactttgataagctcaaagtcaacgtctctccgctccatatctgctacagtgaggacggcattcacagcaatctcagccatctgtcggtgacaactgttgaccctgaggaaaacaccacaaaacaaacttcattggtttcacaattactgcaaccaaagcaggccacataacacaatgttactcaaagatataaatcaaacgatgttttgagtcttctagaggggaatgccatctcaacctgcatttt

SEQ ID NO: 9591 - DNA, 589 bp, Homo sapiens
  MAP TO CHR17.3; EXPRESSED IN LUNG, SIGNAL = 0.89; EXPRESSED IN BONE MARROW, SIGNAL =   1; EXPRESSED IN HELA, SIGNAL = 1.9; EXPRESSED IN PLACENTA, SIGNAL = 1.2; EXPRESSED IN ADULT LIVER, SIGNAL = 2.5; EXPRESSED IN BRAIN, SIGNAL = 1.5; SWISSPROT HIT: P34896, EVALUE 9.00e-18; NT HIT: gi16165564, EVALUE 3.00e-64; EST_HUMAN HIT: BE047626.1, EVALUE 1.00e-64
aaaagcaaggggtgacattgaaaagcaaggaagcttgagtaaaaacaggaatgttgtttgactcatcatctgtgtatgattctatcctagcctcctgacccattgtctcttcttgtccaggggttgctgtggcactgaagcaagctatgactctggaatttaaagtttatcaacaccaggtggtggccaactgcagggctctgtctgaggccctgacggagctgggctacaaaatagtcacaggtagagacacagatggtgttcagcaggcctgttcttgtggttgtattaaggcttgcttctcagtttgtgcaaccaggatgtggcccaggctctgctgctgcagctgcaatgatgggcccaccttgggaggaggtcagcctcgcctccaactggaaagcctccccctgcctcagaccagccagccgcccccttgggtgagccacagatgatgggaatagtggttgccattggtcaccagcataaggactgcttgtcctcagaacagctttgcaggaggatgacctgaggctcaactgagaggttgggctgtagtggtcacacacctggtaggtggcaccaggactgt

SEQ ID NO: 9592 - DNA, 582 bp, Homo sapiens
  MAP TO CHR20.3; EXPRESSED IN LUNG, SIGNAL =   2; EXPRESSED IN HEART, SIGNAL = 3.3; EXPRESSED IN HELA, SIGNAL = 2.6; EXPRESSED IN BONE MARROW, SIGNAL = 3.2; EXPRESSED IN PLACENTA, SIGNAL = 3.5; EXPRESSED IN ADULT LIVER, SIGNAL = 2.8; EXPRESSED IN BRAIN, SIGNAL = 2.9; NT HIT: gi6005728, EVALUE 0.00e+00; EST_HUMAN HIT: BI027790.1, EVALUE 2.00e-66
tgtgttcagtagtcggcaggcagccaggtgttagatctagggtaacactcatttcagagcccctctacctgcctgagagctgagctgaaatcctcccagccctgatcagagtttgtacaaggattgagtggggtctggcctgggaaggcctgaggagagggtatccgcttcctgcttatattatgtaaaattcttccttgacagatggaattactaaggcaagaggtgaaggaaaaggaggctgactttctggcccaggaagcacagctgctggaggagctggaggcgtctcatatcacggagcagcagctgcgagcctccttgtgggcccaggaagccaaggcagcccaactacagctgcgactgcgcagcacagagagccagctagaagcgctggccgcagagcagcagcccgggaaccaggcccaggcccaggcccagctggccagcctctactctgccctgcagcaggccctggggtctgtttgtgagagcaggcctgagctgagtggtgggggagactctgctccttccgtctggggccttgagccaggtgagacagcctccccagaactaggtcct

SEQ ID NO: 9593 - DNA, 515 bp, Homo sapiens
  MAP TO CHR12.3; EXPRESSED IN FETAL LIVER, SIGNAL = 1.1; EXPRESSED IN ADULT LIVER, SIGNAL = 0.74; EXPRESSED IN BRAIN, SIGNAL = 0.5; EXPRESSED IN HEART, SIGNAL = 0.69; EXPRESSED IN BONE MARROW, SIGNAL = 1.1; EST_HUMAN HIT: BF795671.1, EVALUE 0.00e+00; SWISSPROT HIT: P33479, EVALUE 4.80e-02; NT HIT: gi14784175, EVALUE 2.00e-96
tcttctctcctctcctccccatattccaggaaggaattgccaaggccctcagatatccagcctaccccacacagattgagattgcagaaaataaggctaggataagggtggggtcatgacggctctctcaaaatcaggttaggaagagacccaagaattcagacattctctgcctttcccacgctggcccagagtacctggatgggagtgcgcaggatgccagcactaggtgaacgggggtccgccactcgagccagatgcttgttgtgcggcggaggccgcgctggtgtgactgggacgctcttggctgagcccatctcaaccaggagttgcagggtgggggcaagggccagcccgggacgaggagggaatgcctgtgagaagtgactcaggtctcagcccttatctcttccacgtcggaccttcaaccctaaaccaccctgtcttcccagtttccagtgaagaaacttcctggcgagggaccagaggcctctgcggagttaatgactgctgca

SEQ ID NO: 9594 - DNA, 589 bp, Homo sapiens
  MAP TO CHR16.3; EXPRESSED IN HEART, SIGNAL = 1.5; EXPRESSED IN FETAL LIVER, SIGNAL = 2.3; EXPRESSED IN BRAIN, SIGNAL =   2; EXPRESSED IN ADULT LIVER, SIGNAL = 2.2; EXPRESSED IN HELA, SIGNAL = 4.6; EXPRESSED IN BONE MARROW, SIGNAL = 1.8; EXPRESSED IN LUNG, SIGNAL = 1.6; NT HIT: gi6912539, EVALUE 4.00e-79; EST_HUMAN HIT: BI829849.1, EVALUE 0.00e+00; SWISSPROT HIT: Q9Y5Y2, EVALUE 9.00e-42
aggaagcccacagacatgagcgagatgctctgctcccggtccaggaagacgggtgcccagccgcggtcgcactggtgcacagccctgccctgcgccccgagcatgcgggggatactggggccacacaggtccacatccaggattcccacctgcaaggagcggcacagcctaggccgggggcaccgccaggcctccaccgggatgcgggcagctgcccggggctccgcccagtgaggggtagggcgctcaccttcttgcctgcatggcgcagtgccagggccagctccgtggagatggtgcttttcccaacgcccccctttcctgagaggaccaggatgatgtgcctgacgccggccaggtttccaggctctgggcggaaacacgacagagaaggtcagggctcctggtgcccactgtgcccacacacgcggggtcacccactgcctcttgcacccacgttctgagcggggcagtggtgaatcgccagacccagaggcagcccgtgccccacttcgccccgatgtaaagacctccaggcaggtcccctgcagccccagacccggggggaccctctaagaccacggcactc

SEQ ID NO: 9595 - DNA, 527 bp, Homo sapiens
  MAP TO CHR2.3; EXPRESSED IN PLACENTA, SIGNAL = 1.3; EXPRESSED IN BONE MARROW, SIGNAL = 1.1; EXPRESSED IN HEART, SIGNAL = 1.1; EXPRESSED IN ADULT LIVER, SIGNAL = 1.2; EXPRESSED IN BRAIN, SIGNAL = 1.3; NT HIT: gi15529995, EVALUE 2.00e-90; EST_HUMAN HIT: AW503085.1, EVALUE 2.00e-90; SWISSPROT HIT: Q62245, EVALUE 3.00e-26
ccctagttgcaacagcacagaagaaaaaaactgcatgacatatttaaacacattttaatattatatatctaatgtcttatttctataaagtggtatcttgaatccctactattaggttactggagatattccccaacacataatacaattttattctatatgaatagtacgttagcatctaataagtcataaaaagaaacttaagaaaaaaatagaaaagctcagtttcctaccttgtcagcacacattgccactttaatatcttgttttgtaatttcataatgccgtatatttcttacataattcccaaccagctttaaaatgtctgcagaaatgtattctaagactgctactatgtaaacagaaacctggtggtcaattttataacctaggacctcctgcaaaattaaaagaaaagcatgtttaaacatcatatactgtacatttaacacactgattaaaaataaaaaacatatttgcaccttaacttacactttttttcctgaggcctgtgcttaccaacaaca

SEQ ID NO: 9596 - DNA, 505 bp, Homo sapiens
  MAP TO CHR1.3; EXPRESSED IN LUNG, SIGNAL = 1.4; EXPRESSED IN PLACENTA, SIGNAL = 1.2; EXPRESSED IN HEART, SIGNAL = 1.7; EXPRESSED IN FETAL LIVER, SIGNAL = 1.2; EXPRESSED IN ADULT LIVER, SIGNAL =   2; EXPRESSED IN BRAIN, SIGNAL = 2.5; EXPRESSED IN BONE MARROW, SIGNAL = 2.3; SWISSPROT HIT: Q02094, EVALUE 2.00e-16; NT HIT: AF219978.1, EVALUE 0.00e+00; EST_HUMAN HIT: AL603226.1, EVALUE 3.00e-18
gggagttttataggctcggctcaaggcagccctggctggtgagagccaggggcactggcagggtagctgactggattgtgggctatggctagagcagcccccaagtgccccgcctgtccctgcccgctgcaggcttccaggacgtgcatgccatggtcttcgtgggctttgacttcctcatggtcttcctgcagcgttacggcttcagcagcgtgggcttcaccttcctcctggccgcctttgccctgcagtggtccacactggtccagggctttctccactccttccacggtggccacatccatgttggcgtggagaggtgggcagccgccacccacccagctccccaaggttcactcgggaggcccctgcccatgggccccggatctagccctgtccttcaagtctgcttcctgactcacgattctgggcgtcacttggtttctctaggtgtcctgcctgtccttattgcctgacttcctctcccatccttgaccctcacact

SEQ ID NO: 9597 - DNA, 593 bp, Homo sapiens
  MAP TO CHR1.3; EXPRESSED IN BONE MARROW, SIGNAL = 1.9; EXPRESSED IN HELA, SIGNAL = 2.8; EXPRESSED IN LUNG, SIGNAL = 3.1; EXPRESSED IN HEART, SIGNAL = 1.6; EXPRESSED IN BRAIN, SIGNAL = 2.6; EXPRESSED IN ADULT LIVER, SIGNAL = 1.6; SWISSPROT HIT: Q15428, EVALUE 9.00e-05; NT HIT: gi16168374, EVALUE 0.00e+00; EST_HUMAN HIT: AW504650.1, EVALUE 0.00e+00
accccaagtatgtgtctgccacaagtgtcacttccacaagtgtcaccacagccattgcagagcctgtcagtgctgccccttgcctacatgaggccccgcccccgccagttgactctaaaaagcctttagaagaaaaaacagcacctccagtgacaaacaactctgagatacaagcctcggaggtgctggtagctgctgacaaggaaaaggtggctccagtcattgctcccaaaattacctctgttattagccggatgcctgtcagcattgacctggaaaattcacagaagataaccttggcaaaaccagctcctcaaaccctcactggtctggtgagcgcactcactggcctggtgaacgtctccctggtcccggtgaatgccctgaaaggccccgtgaagggctcagtgaccacactgaaaagtttggtgagcacccctgctgggcccgtgaacgtcctgaaagggcctgtgaatgttcttacggggccagtgaatgttctcaccactccagtgaacgccacggtgggcacagtgaatgccgccccaggcacagtcaatgccgctgcgagtgcagtgaatgccacagcaagt

SEQ ID NO: 9598 - DNA, 560 bp, Homo sapiens
  MAP TO CHR12.3; EXPRESSED IN HEART, SIGNAL = 0.87; EXPRESSED IN PLACENTA, SIGNAL =   1; EXPRESSED IN HELA, SIGNAL = 2.2; EXPRESSED IN BONE MARROW, SIGNAL = 1.3; EXPRESSED IN BRAIN, SIGNAL =   1; EXPRESSED IN ADULT LIVER, SIGNAL = 0.97; SWISSPROT HIT: Q14571, EVALUE 5.00e-15; NT HIT: gi4504792, EVALUE 1.00e-54; EST_HUMAN HIT: BE745875.1, EVALUE 2.00e-54
ctccacttgtgaattgctggagatctctattttaataagctttccacaattttaaaaaagaaaccttttcctgaatgatggcttctattataataatcccatctctcaaacgctattgctctgcaatgattgattgcttctacagttaaaaaacatctattaattacaaaaaaaaattttacatatagttttagtaaaaaaagacaactttgaaagatgtacacctcagtttcctataaatcactcctcactcatccttttactatacatttttcagtttaaaccactcacttctgcatcattgctctagaaaaaaatatgaaaatggtctaaaataggaagtaagcataacttttcacagttggtctctttcaataaataatagatggttacctcaatctgtgcagtgtggttggcataatactttaaggcttcatctccttcatctggatccgatcctggtttgagcatctgctgcaacagtttattgtggcgggccaactagagtagggaaaaaataaaggttttaggtcttcttttcccctttcctagggtcaaac

SEQ ID NO: 9599 - DNA, 516 bp, Homo sapiens
  MAP TO CHR2.3; EXPRESSED IN BRAIN, SIGNAL = 2.4; EXPRESSED IN HELA, SIGNAL = 1.9; EXPRESSED IN BONE MARROW, SIGNAL = 1.1; EXPRESSED IN HEART, SIGNAL = 1.7; EXPRESSED IN FETAL LIVER, SIGNAL = 1.8; EXPRESSED IN ADULT LIVER, SIGNAL = 1.3; SWISSPROT HIT: Q99814, EVALUE 1.00e-35; NT HIT: gi16158187, EVALUE 1.00e-119; EST_HUMAN HIT: BE786454.1, EVALUE 1.00e-119
tttccatgcatctaggggagcagaatttttctagaaaatgtggaaagtctgaatggctctttcccccccattagtgagattgagaagaatgacgtggtgttctccatggaccagactgaatccctgttcaagccccacctgatggccatgaacagcatctttgatagcagtggcaagggggctgtgtctgagaagagtaacttcctattcaccaagctaaaggaggagcccgaggagctggcccagctggctcccaccccaggagacgccatcatctctctggatttcggtgggtgcttcttagctaagccaggcccctggaaccccgttggggctgggaagagttcttactataacaggcctccctggctgcagctttttcttaaccagagctaccccagccccccaagtcttgttaatcacctgttagaggccaggccctgctgagcacaaaagaacaccacacgctcctgccctgataagaccatcccatatccgacctcaccaagtgctgta

SEQ ID NO: 9600 - DNA, 521 bp, Homo sapiens
  MAP TO CHR19.3; EXPRESSED IN BONE MARROW, SIGNAL = 1.9; EXPRESSED IN HEART, SIGNAL = 2.2; EXPRESSED IN BRAIN, SIGNAL = 2.6; EST_HUMAN HIT: AL046928.1, EVALUE 0.00e+00; SWISSPROT HIT: Q9UK22, EVALUE 2.10e+00; NT HIT: gi13376364, EVALUE 0.00e+00
tccagcacatagagtggtgcccagcacacagtaggtgctcaatcagtgtttgttgaacattaaggggttttgctaatgaaatgaatcgatatgtaagcgtcttgacacagggcttgggatgtaagaagggctcgatacttcttagctgttatgattatagatatccaggagtgacagaagggaaaccgagcagacgagaggctgggcgtgtgtgcctttagcgggtcggggggagctggaagctagtctggacccacctgtcggcagcccctctcagtccactgaaggaccgggtcaggtgaggctgagaacttgaccacttccttttcatacacatccagaaggcggacccggagctggtagacgcagccgcagttctctcgagcgccccacctgccaggcagcagtcagcctctatgcccccgtcacccagccagctctctgggtttcggggcgggaggctgagggctggctccatcttgatgaaggtcctgcacatctggaccacatttggagacgtc

SEQ ID NO: 9601 - DNA, 507 bp, Homo sapiens
  MAP TO CHR1.3; EXPRESSED IN PLACENTA, SIGNAL = 2.2; EXPRESSED IN BONE MARROW, SIGNAL = 3.3; EXPRESSED IN BRAIN, SIGNAL = 2.8; EXPRESSED IN ADULT LIVER, SIGNAL = 2.2; EXPRESSED IN LUNG, SIGNAL = 4.4; EXPRESSED IN HEART, SIGNAL = 2.5; NT HIT: U13665.1, EVALUE 1.00e-123; EST_HUMAN HIT: BI760220.1, EVALUE 1.00e-122; SWISSPROT HIT: O77641, EVALUE 8.00e-40
aaaacatcatgctggggaaggaggagccaacagagctgtataattgtgtggagcaatctcacctgtcccacatatgggtaggcatcttcagagtcaataccccggttcttctgcacatattggaaggcattggtcatgtagccccctccacagccatcattctcagacacacaatccactaggttctggggactcagatttaagagtttgccagttttcttcttgagttggccctccagggcacccacagagctaaaagcccaacaggaaccacactgaccctgaaaggcatacagagaaactatcaatctttgctgtttacattttctatatcttctctctacctgcctgaagaaattccatgtgttctaaaaatttcagcacaaatgttgtcattgttgtgagtcttcctcttccgcttaatatctgttgcactgttctactgctattgatttttgctaccatttttactattagctacagtaaagcagagcacagtaccagctg

SEQ ID NO: 9602 - DNA, 502 bp, Homo sapiens
  MAP TO CHR11.3; EXPRESSED IN BONE MARROW, SIGNAL = 1.6; EXPRESSED IN ADULT LIVER, SIGNAL = 1.6; EXPRESSED IN BRAIN, SIGNAL = 1.2; NT HIT: gi14773418, EVALUE 5.00e-84; EST_HUMAN HIT: BI762768.1, EVALUE 8.00e-84
gaggcagaggagatggactgcttagagatgggcggtcctttgacccctgctcagtcagctaagctgaggcggatgtagaggagatcactcattaactcaaacctctaattgcaaacttgtcaaaaatagcaattaccaagaaagctgtgtctggggagggagctttatgtgcccaacagggaaaggttgggggtcggattcagccctttgccccacagcatgcagagtcactcctcttggcaggcacactgtggctaacctggcccctcctctccttcgagctacaggtttggccgcaggcccatcctgacctgcagctacctgctgctggcagccagcggctccggtgcagccttcagccccaccttccccatctacatggtcttccgcttcctgtgtggctttggcatctcaggcattaccctgagcaccgtcatcttgagtgagctgcagtggggcatggagctgggctttggggagcaccatccagaagccaaaagag

SEQ ID NO: 9603 - DNA, 525 bp, Homo sapiens
  MAP TO CHR9.3; EXPRESSED IN FETAL LIVER, SIGNAL = 2.2; EXPRESSED IN HEART, SIGNAL =   2; EXPRESSED IN HELA, SIGNAL = 2.7; EXPRESSED IN BONE MARROW, SIGNAL = 1.2; EXPRESSED IN PLACENTA, SIGNAL = 1.7; EXPRESSED IN ADULT LIVER, SIGNAL = 2.2; EXPRESSED IN BRAIN, SIGNAL = 1.4; SWISSPROT HIT: Q05932, EVALUE 1.00e-25; NT HIT: U24253.1, EVALUE 0.00e+00; EST_HUMAN HIT: AL526394.1, EVALUE 0.00e+00
acgtggtgaatagggtgagccaggtgcagaggcctggagatagaagatggggaggactggggggctacagatagtccggggggatggggcaccaggaacaaaccgagggacacaggagagatgaggcacggaggccagtagcatcagtccctgcagggtgggggaaggccaggacgctcgggaagggagtcctgatgaccccagctgtcccggcagctctccccacctggtgcaggttcgggagcggatccgcatcaatgggcagcccatcagtcctgagctcttcaccaagtacttctggcgcctctaccaccggctggaggagaccaaggtgccgcatgcaggagggctggcgggtgggtatggttgggggtgctacgtgttccagcaccccatctccccagagaaggggctgcatgggctctgggccctgacatgtccctgtgccacaggatggcagctgtgtctccatgcccccctacttccgcttcctgacactcatggccttccacgtcttcctccaag

SEQ ID NO: 9604 - DNA, 506 bp, Homo sapiens
  MAP TO CHR19.3; EXPRESSED IN LUNG, SIGNAL =   4; EXPRESSED IN ADULT LIVER, SIGNAL = 3.1; EXPRESSED IN BRAIN, SIGNAL =   4; EXPRESSED IN HELA, SIGNAL = 6.1; EXPRESSED IN PLACENTA, SIGNAL = 5.3; EXPRESSED IN BONE MARROW, SIGNAL = 2.9; SWISSPROT HIT: Q9JIF0, EVALUE 2.00e-25; NT HIT: AF222689.1, EVALUE 0.00e+00; EST_HUMAN HIT: BI197654.1, EVALUE 2.00e-81
agaggagggagcaaggaatctgggctcgaacccacatggtttattgggagccggataggcaggatgcagagtgaaggaggagccgaggctgggtgccagtgagggagggctagcaggaaggggacagcgaggtcacaggccctctgggagcttaagggagggaggaggggatgaagcgaggtggggacgcatcccggagctcgccctctcatgtcctgcaggaggtggacatctataccgtcaaggtggaagacctgaccttcacctccccgttctgcctgcaagtgaagcggaatgactacgtgcacgccctggtggcctacttcaacatcgagttcacacgctgccacaagaggaccggcttctccaccagtgaggcggggcccacagggctgggggccgttcccgagccagggcggaggcgcacccacgtagtggagggggtgacagaaacgggcagaaggaaccatggggacacgcgtgttccagtgtgagctctgccatgt

SEQ ID NO: 9605 - DNA, 526 bp, Homo sapiens
  MAP TO CHR2.3; EXPRESSED IN ADULT LIVER, SIGNAL = 5.3; EXPRESSED IN FETAL LIVER, SIGNAL = 2.8; EXPRESSED IN PLACENTA, SIGNAL = 3.8; EXPRESSED IN LUNG, SIGNAL = 5.6; EXPRESSED IN HEART, SIGNAL =   7; EXPRESSED IN HELA, SIGNAL = 6.9; EXPRESSED IN BONE MARROW, SIGNAL = 4.4; SWISSPROT HIT: Q34101, EVALUE 1.00e-39; NT HIT: U38269.1, EVALUE 2.00e-65; EST_HUMAN HIT: BE879541.1, EVALUE 2.00e-29
attaggaggaggagggggagagttaggcctagaatatatttgattacgtagtaaggttggaaagtgattttgtcagggtctgatgagatccctgaaggttattatatcctgtttcatgtaagaataaaaggagaacagttgttagagctgcaatgatgaagggaaagataaaacggaaggctaaaagttgtgtaagcgtggctttgtcaactgagaatccacctcagattcattatacaaggtcagtttccatatatgggattgctgatagtagatttgtaattattgtagcacctcagaatgatatttggcctcatgggagtatgtaacctataaatgctgttgctgtggttgtgagtaggaggataatgccaatatttcaggtttttagaaatataaatgacccataatataaacctcggccaacatgtaggaagaggcagatgaaaaatattgaagcgccgttagcatgaaaatagcagattattcagtcataatttacatctcggctgatattggtgactga

SEQ ID NO: 9606 - DNA, 510 bp, Homo sapiens
  MAP TO CHR16.3; EXPRESSED IN FETAL LIVER, SIGNAL = 4.5; EXPRESSED IN BRAIN, SIGNAL = 4.2; EXPRESSED IN LUNG, SIGNAL =  10; EXPRESSED IN BONE MARROW, SIGNAL = 1.8; EXPRESSED IN HELA, SIGNAL = 4.5; SWISSPROT HIT: P21959, EVALUE 9.40e-01; NT HIT: AB014460.1, EVALUE 0.00e+00; EST_HUMAN HIT: AW338866.1, EVALUE 0.00e+00
atctctgggtctctctccccctatcttgctgccacaggcccccagtacctggtgggcaggggcaggatgggggctcaccggggctggggctgatttctgggcaatggcaggaccaccctccagtccactgaggctgggggagctcggggcaggctgaggcccaaggtccgtgcgggaggggtcccagggtcccgagacaggcaggaaggggctcagaagttgctgaagatttcacgcttcctgttccagtccatctgtggcgcgcgcttgttgactcgcatggctcgagccttctccttggcctcggccgccgtggggctcaggtggaggccgctctcctggaagggatcttgcttccaggcactgccatcctggggtgagcacggtgggtggggtgtctggagtgagccctagtcccacaccccagacggtggcccctcctagggagcaaccaacagaggctgcctgctggggctggggctcacgaggacttcctgaacagagacccca

SEQ ID NO: 9607 - DNA, 590 bp, Homo sapiens
  MAP TO CHR3.3; EXPRESSED IN BONE MARROW, SIGNAL = 1.1; EXPRESSED IN LUNG, SIGNAL = 1.5; EXPRESSED IN FETAL LIVER, SIGNAL = 6.3; EXPRESSED IN BRAIN, SIGNAL = 1.2; EXPRESSED IN ADULT LIVER, SIGNAL = 6.1; SWISSPROT HIT: Q06033, EVALUE 1.00e-18; NT HIT: gi16160782, EVALUE 8.00e-99; EST_HUMAN HIT: AV697162.1, EVALUE 1.00e-24
cacctccattgtcatcatgctgactgatggggatgccaatgttggtgaggagcacgggcatggttttgagctagggctggagtgcttggctgctgctcctggctctgtagctggctcattggaaaacctggggcagctcttccctgggttccctgtggtctgggagcccctcaagggcagggtcctgcctccctctgccagggctctccaccacctgccccacaagggctcatggtcgtgactccagcaactctgcatgtgcaggagtccggtctccccagacagagctggtctagaccatccccagggctggggctggactgtgaacacccccttctccaacaggtgagagcagacccgaaaaaatccaagagaatgtgcggaatgccatcgggggcaagttccccttgtataacctgggctttggcaacaatctgaattataacttcctggagaacatggccctggagaaccatgggtttgcccggcgcatttatgaggactctgatgccgatttgcagttgcaggtatgccttgtcttgcacacttccgggcataaggagctcactacttcctcagacagctgctcc

SEQ ID NO: 9608 - DNA, 556 bp, Homo sapiens
  MAP TO CHRX.3; EXPRESSED IN BRAIN, SIGNAL =   2; EXPRESSED IN BONE MARROW, SIGNAL = 1.8; EXPRESSED IN LUNG, SIGNAL = 2.6; EXPRESSED IN HEART, SIGNAL =   2; NT HIT: gi5174668, EVALUE 0.00e+00; EST_HUMAN HIT: AA618466.1, EVALUE 0.00e+00; SWISSPROT HIT: Q07960, EVALUE 3.10e+00
gctgagtacataccaccccccttgcttatagcaacaagacctcaatggtccaaatatgacttttagctttgtccataatctccagtgtggactggaactcagactatgatgctgcagtgacctcaagaattctaatcatagctttcctttacctccagttctctagcctggacagcgctttgttctgtctgccaccagttggggcatgtaccacctggtaccaccaacgctaatcacaatgccaccaatgacagttacatctaacttcaataaagtagaagaaaaagtagttaattattatcttaccactagttcctgggggttgtaatacatctcctgtcaggcgacaccacccagctgggaaaatatctcgagaatcatacttgcaccagtaatcaaaagctccactccagccatcaaatgtgatatgaacttcatcccctttaacatctccaatggtcgcaggacagatgagatacgggttctttttgtcaatagcttccagtttcatccccactttaaaattatttagtgggggctttggtggttcctatca

SEQ ID NO: 9609 - DNA, 579 bp, Homo sapiens
  MAP TO CHR11.3; EXPRESSED IN HELA, SIGNAL =   2; EXPRESSED IN BONE MARROW, SIGNAL = 2.1; EXPRESSED IN ADULT LIVER, SIGNAL = 1.9; EXPRESSED IN BRAIN, SIGNAL =   2; NT HIT: gi14783802, EVALUE 7.00e-90; EST_HUMAN HIT: BF871404.1, EVALUE 0.00e+00; SWISSPROT HIT: Q9Y256, EVALUE 1.00e-35
ttacttccaggatgcccttgcctcagctaatgccttccattcaggtcatctcaagacattgggtttatgttgggtccacacccccgtcctcagcagtattgatgcctaacctgagtttggccagggtaaagttgtgggagaggagcccttggagcctctggggtctcactgtctgacagcccgtcactcacagcttgtcctgaattccctctgcagccccccgctcctgggcccgctgcctcacagacatgcgttggctgcggaaccaagtgatcgccccgctgacagaggagctggtgttccgggcctgtatgctgcccatgttagcaccgtgcatgggcctgggccctgctgtgttcacctgcccgctcttttttggagttggtgagtctggccagattagtcctggtgtgttttcagcatgagagctcagaagggggcttgaggtgaggggcagtcctagaagggaggctgggaggaatgactgtgatgtgattgtcacctttttcccagcccattttcaccatattattgagcagctgcgtttccgccagagcagcgtggggaacatcttcttgt

SEQ ID NO: 9610 - DNA, 534 bp, Homo sapiens
  MAP TO CHR10.3; EXPRESSED IN BONE MARROW, SIGNAL = 1.6; EXPRESSED IN HEART, SIGNAL = 1.5; EXPRESSED IN LUNG, SIGNAL = 1.7; EXPRESSED IN FETAL LIVER, SIGNAL = 1.1; EXPRESSED IN ADULT LIVER, SIGNAL = 1.3; NT HIT: gi16156381, EVALUE 0.00e+00; EST_HUMAN HIT: BF664417.1, EVALUE 0.00e+00; SWISSPROT HIT: P49961, EVALUE 3.00e-50
aaagcgttcacacatgatgctttcaagtgatttttccattcaggttgcaagtaatgaaattctcagggacccatgctttcatcctggatataagaaggtagtgaacgtaagtgacctttacaagaccccctgcaccaagagatttgagatgactcttccattccagcagtttgaaatccagggtattggaaactatcaacaatgccatcaaagcatcctggagctcttcaacaccagttactgcccttactcccagtgtgccttcaatgggattttcttgccaccactccagggggattttggggtaagtttgtgaaatgatgaggtataggatgtcttgtttacaagttatagaatatgtgcctacaaaagatttaaataataggatgcatttttctcttacataatgtcttgaggtagatgattaggggttggttcttcagctcaactatgtcagaacttgggatcagttttttccactatcgttgtgatctttttgtgctaaggtatgttactgctccaagcaccatatca

SEQ ID NO: 9611 - DNA, 569 bp, Homo sapiens
  MAP TO CHR12.3; EXPRESSED IN HEART, SIGNAL = 1.3; EXPRESSED IN FETAL LIVER, SIGNAL = 1.3; EXPRESSED IN ADULT LIVER, SIGNAL = 2.1; EXPRESSED IN BRAIN, SIGNAL = 1.3; EXPRESSED IN HELA, SIGNAL = 2.5; EXPRESSED IN BONE MARROW, SIGNAL = 1.3; EXPRESSED IN PLACENTA, SIGNAL = 1.6; SWISSPROT HIT: Q10107, EVALUE 1.60e-01; NT HIT: gi16187903, EVALUE 0.00e+00; EST_HUMAN HIT: AW594275.1, EVALUE 0.00e+00
catgacagttccacaccctgccccagggcacatcctttgagggctgctgccataattggaagtcacagttaggaccttcttcatcctttgtagggatttgatattcaacagcacagctgaaatactagctcagccatagttttcctgccctaaagaagggctgaaacagctactgagtgacagagttggctgacaaaactgttcttttcttaggtcagtgtggagtatacagagaagatggtgtccatcagtaactaccccctttctgctgccctcacctgtgcaaaacttaccacagcctttgaggaagtatggggggtcatttgacagtagtagaacctgttctgaaaccagaaactgttgatgtcacatcctttgaccctggtctgagctgactgctggaagatgatctttctgcactgagactgtggagtttggggaagccaaggctgtacatttgctatttgtttatcctatgaatactgttcttgcaaacctggttgttttggggttcctaaagtatccagtggtgtaaaactgtttgttccccgggacttcagggacagata

SEQ ID NO: 9612 - DNA, 553 bp, Homo sapiens
  MAP TO CHR2.3; EXPRESSED IN LUNG, SIGNAL = 2.5; EXPRESSED IN BONE MARROW, SIGNAL = 2.3; EXPRESSED IN ADULT LIVER, SIGNAL = 2.1; EXPRESSED IN BRAIN, SIGNAL = 1.7; SWISSPROT HIT: Q14790, EVALUE 7.00e-66; NT HIT: AB038985.1, EVALUE 0.00e+00; EST_HUMAN HIT: BE271526.1, EVALUE 0.00e+00
aagggcatcatctatggcactgatggacaggaggcccccatctatgagctgacatctcagttcactggtttgaagtgcccttcccttgctggaaaacccaaagtgttttttattcaggcttgtcagggggataactaccagaaaggtatacctgttgagactgattcagaggagcaaccctatttagaaatggatttatcatcacctcaaacgagatatatcccggatgaggctgactttctgctggggatggccactgtgaataactgtgtttcctaccgaaaccctgcagagggaacctggtacatccagtcactttgccagagcctgagagagcgatgtcctcggtaagttttgcctactcagccctcctcactgttacactaccttccccccctactccatcacactactatctactcatattcagagcctattagaaagtgctatgtgatttagatcacattaacaggtcagagaactgtccaaggggagtggtttccgttcaactctaaatgtctagctgtagatcacatagctgcatttcccaggt

SEQ ID NO: 9613 - DNA, 512 bp, Homo sapiens
  MAP TO CHRX.3; EXPRESSED IN HEART, SIGNAL =   6; EXPRESSED IN PLACENTA, SIGNAL = 5.5; EXPRESSED IN LUNG, SIGNAL = 4.6; EXPRESSED IN BRAIN, SIGNAL = 8.9; EXPRESSED IN BONE MARROW, SIGNAL = 8.8; SWISSPROT HIT: P27918, EVALUE 2.00e-35; NT HIT: AF158730.1, EVALUE 0.00e+00; EST_HUMAN HIT: BI768946.1, EVALUE 4.00e-55
gcggtaggagggagtagaggtgatcagatgtgtgaatgggggaccaggggtggaaacaaggtatcagggccaggaaaggaggaatcagagacaggaacaaggcctcagcagcaggagctgggcagcagagaagggcaagggggacttaggcatgcaaatcgtgaaccctgagatgctgaccagggcagggcacagctgtgttgcagatgtgggtccgggtggcatcgccagcacagaaggggcccccatgctggggcacagggtgattgcacgtccgttgttccatggtctggcccaggccacaggtcacagggcaggggctcacagggccccaaggcccccagcccccagccactgttggaggaggaaagggagtgaggagaaaggcctcctcaatccttcctctcagcccctagacccttgaagcagactgtccccaaatgaagggctgcatggtcacatggcctaggaactctagaaatggcagagcatctctgccctcaatcaagagc

SEQ ID NO: 9614 - DNA, 594 bp, Homo sapiens
  MAP TO CHRX.3; EXPRESSED IN LUNG, SIGNAL = 2.4; EXPRESSED IN HELA, SIGNAL = 3.4; EXPRESSED IN PLACENTA, SIGNAL = 1.5; EXPRESSED IN BONE MARROW, SIGNAL = 0.88; EXPRESSED IN FETAL LIVER, SIGNAL = 2.2; EXPRESSED IN ADULT LIVER, SIGNAL = 1.6; NT HIT: U52111.2, EVALUE 0.00e+00; EST_HUMAN HIT: AA318466.1, EVALUE 0.00e+00; SWISSPROT HIT: P51572, EVALUE 2.00e-04
cctccagcaggcatactctccccactgaggacttcccctctgcgcctccacccaactctggcttttcaggcacatttcccagcgtgacaggctagcagtggccactgaggccctgaagaatgtggctcccacagtgtaacaccaggacgccccatggtgggtcgggaagctgggctcaccttcttgagctggtcattctcctccatgtacttcttggccgcctcactagcactctccgcctgctttttaaaggcttcattggaggccagcagcgtggcctgctgcgaaatgagagtcaccaggcgtctaagcaggctgcaattatttacaaaaagaagggagaagtgagaaaaagagcatgaagggctggcaggagcacctcctggttgctcccactccacacctagctccagcctggacctgccctcttgccaaggcagccgagtgagaagccgccaacctggtgctggcagcgtgagggaaaaggtggggcccaggagccgtcctctgccgctgtgcccaacggccaccctcagctctcagaggggctggaagcaggagcctggggggctgggaagagcctcgctacagcat

SEQ ID NO: 9615 - DNA, 505 bp, Homo sapiens
  MAP TO CHR15.3; EXPRESSED IN BONE MARROW, SIGNAL = 2.1; EXPRESSED IN LUNG, SIGNAL =  15; EXPRESSED IN ADULT LIVER, SIGNAL = 2.3; EXPRESSED IN BRAIN, SIGNAL = 1.9; EXPRESSED IN FETAL LIVER, SIGNAL = 5.8; NT HIT: gi14749301, EVALUE 1.00e-122; EST_HUMAN HIT: BE928154.1, EVALUE 0.00e+00; SWISSPROT HIT: P35441, EVALUE 2.00e-45
ttccaaatggagcctctgtctactcagagatgacagggatctggattcttgtttccatgatatctgaggattctcaaaagctctgtgtaacagcagcatggtgtaccctcaggtgtgcaagccccgtaacccctgcacggatgggacccacgactgcaacaagaacgccaagtgcaactacctgggccactatagcgaccccatgtaccgctgcgagtgcaagcctggctacgctggcaatggcatcatctgcggggaggacacagacctggatggctggcccaatgagaacctggtgtgcgtggccaatgcgacttaccactgcaaaaaggtagagccaggtcctttgtgtgcctccagaaagagggcccatcaccttatcaaaacacaggctaaggaattttaaatacttaaagtttggacatgaaactgaaagattaaatctcccaaagggagaggggcactaattcctattaaaattaaatcacttggtgccaaaaacatg

SEQ ID NO: 9616 - DNA, 520 bp, Homo sapiens
  MAP TO CHR2.3; EXPRESSED IN LUNG, SIGNAL = 1.4; EXPRESSED IN PLACENTA, SIGNAL = 1.3; EXPRESSED IN ADULT LIVER, SIGNAL = 1.7; EXPRESSED IN FETAL LIVER, SIGNAL = 0.98; EXPRESSED IN BRAIN, SIGNAL = 1.5; EXPRESSED IN BONE MARROW, SIGNAL = 1.3; NT HIT: D87446.1, EVALUE 0.00e+00; EST_HUMAN HIT: AL539401.1, EVALUE 0.00e+00
aaggcaaaccccgtcttaacctgtcagctccacagagtaaggcaaggataaggtggtttactttggtgtgagaaaatcctaataaatacaccttgtgtgtaaaaaaaaccacaaaacaaggcttttgaaaaaagcatcatttatttcaaagtacaacacaaagttgtatttttaagaaatacacattcaatcttgtatctcaagacttggctatgtgcatttcagttcatctttaaaataagttcaggtatacaaatgttacatacctcaagtacaaacagcacagaaaatgcatatggtctcaactgaatgtttttacattcattcaccgttcttaagttgacttacatttctgtaatctgcttttaaaccaagacagccttactttaaaaaaatactctattttcagcacaaagtcctcatacagttttaaaattagatcttggcgcataatattgagaaattattaaaaaccaaacttggtaatttaacaaaattgtcacatgccaggatttctgaa

SEQ ID NO: 9617 - DNA, 530 bp, Homo sapiens
  MAP TO CHR1.3; EXPRESSED IN BONE MARROW, SIGNAL = 9.1; EXPRESSED IN HEART, SIGNAL = 8.6; EXPRESSED IN PLACENTA, SIGNAL = 7.9; EXPRESSED IN ADULT LIVER, SIGNAL =  21; EXPRESSED IN BRAIN, SIGNAL =  10; SWISSPROT HIT: P57735, EVALUE 2.00e-30; NT HIT: gi11427606, EVALUE 1.00e-105; EST_HUMAN HIT: BE718380.1, EVALUE 1.00e-130
ctagtgtccctggaaggcagaggagccttgggctgctctgttgggttctgggcccctggccgcaagtttctgtatttcctgatctctagtactctgatcccgggtgttccagcttgacggctctgctctgatgctgggtccaatgcctctgatcgtatctctgtccatccttctcattcccacccaggtactatcgtggtgcagtgggggccctcctggtgtttgacctaaccaagcaccagacctatgctgtggtggagcgatggctgaaggagctctatgaccatgctgaagccacgatcgtcgtcatgctcgtgggtaacaaaagtgacctcagccaggcccgggaagtgcccactgaggaggcccgaatgttcgctggtgagagcctgccactacccaggctgactcctccaagcttagcccacctttcccttgcagtctcccagcccctgcccccacccatagagcccctagcctggccttcctccatacagtcctctaccccatcccctcttcctcaggatttc

SEQ ID NO: 9618 - DNA, 588 bp, Homo sapiens
  MAP TO CHR1.3; EXPRESSED IN LUNG, SIGNAL = 0.89; EXPRESSED IN HEART, SIGNAL = 0.86; EXPRESSED IN BRAIN, SIGNAL = 1.2; EXPRESSED IN BONE MARROW, SIGNAL = 1.2; EXPRESSED IN PLACENTA, SIGNAL = 1.9; NT HIT: AF053624.1, EVALUE 0.00e+00; EST_HUMAN HIT: BG623111.1, EVALUE 3.00e-93; SWISSPROT HIT: P39098, EVALUE 1.00e-30
acatgggtgagggtatgtggcatcataggagggcatgagttaacactcttgcagataaaatggaatattggcttatttaccagtgctgcttcccagccccactgcctgtatcttggatcgtgagtgaatcgccataggtaccaataggtttcaattacttctggacggaggatataatacttttcagcctgccggacagccacagcctccactgcaccatcaaacttgaatgattcaggacctagctttaatgctgtaacatgacaaaagaaataactgagcaaaataaaccatttatgtttgtttgcaaggacttctttcttccctgaaagaacagaatatgaagtaatttttgttgtttatttttattgttgctgtttgcactcagtgcaaaatgagtcattttaaaagatccacatttggttttcttaaaatagacttataaacattcctgttattctaacataaaatgtttctcagaataatgtgtatcaacatactgctaaatctaattctaccaaaaagagtctagtaatcttttggaaacaaatgcaaactagacatttgcacatcatacagtccattgtg

SEQ ID NO: 9619 - DNA, 589 bp, Homo sapiens
  MAP TO CHR6.3; EXPRESSED IN BONE MARROW, SIGNAL = 1.1; EXPRESSED IN HEART, SIGNAL = 0.79; EXPRESSED IN ADULT LIVER, SIGNAL = 0.7; NT HIT: X87344.1, EVALUE 0.00e+00; EST_HUMAN HIT: BI770984.1, EVALUE 0.00e+00; SWISSPROT HIT: P13765, EVALUE 7.00e-53
tgtcccagatcaagggaaagaataattcatgttgtgaccaagataaacgcagaagtgacacaggctctgtattgagtcagtatagtcctgagtcaggcccagagagtactagaaactaattctcactccactccacagaaacagggctcagcaggctggagtgatcgacaaggcaggtgtagacatgtccaagttcaggagtcatttctagcatcaccacagtctgaaaggtccagtctccattcctgatagggccagtggacatgaccccagctctctcctcctgcccattcaggaaccacttgatcttgatatcccctggatagaagcctgtcacagagcagtgcagcagattatgctggtgcaggagtggggtcctctctgggtacactgtcacctctggttgcactaggaagggaggaaaaatgagacaccgtgaaagaaaaccaccaagctgggacaggagattctttagggactatcactatgtctaatctctttcccagatcacccaagtgaacacaaagtataggcaagtctcagcccccaagatcagtaacagggtatgtcaatgcctgtcaggaggatt

SEQ ID NO: 9620 - DNA, 522 bp, Homo sapiens
  MAP TO CHR17.3; EXPRESSED IN BONE MARROW, SIGNAL = 0.72; EXPRESSED IN LUNG, SIGNAL = 0.83; EXPRESSED IN PLACENTA, SIGNAL = 0.72; EXPRESSED IN ADULT LIVER, SIGNAL = 0.66; NT HIT: gi15313957, EVALUE 1.00e-75; EST_HUMAN HIT: BG436859.1, EVALUE 2.00e-66; SWISSPROT HIT: O95838, EVALUE 3.00e-20
ggaagagcaggaaatgttgcttgttccccatgtggccctcttgactgttatttggttgtcatttacagattggcaaaatcaacactggtcctcattcctttattgggcgttcatgagatcctcttctctttcatcactgatgatcaagttgaaggatttgcaaaacttatacgacttttcattcagttgacactgagctcctttcatgtaagtagaaatctgaaccaaaatgccttgactttggagaaaacaaaatgcatgtggccgaaacaggctcagaattaaggagcccgtggatgaaaatagaattgtagcatcagcagcctttatcagtaagggcccttggcattagaagggcatgcagacggggaagtattgcgttgatcctgccagcatgattcagtgactaagaagggggaaatggtctctttcctgggtggtaatagttggtgtgactcatgatcatattaactatgagtgtcaatgtgaagccttttattaagtgcctatttttgctgggtt

SEQ ID NO: 9621 - DNA, 531 bp, Homo sapiens
  MAP TO CHR1.3; EXPRESSED IN BONE MARROW, SIGNAL = 0.87; EXPRESSED IN FETAL LIVER, SIGNAL = 2.9; NT HIT: X73428.1, EVALUE 0.00e+00; EST_HUMAN HIT: BI770082.1, EVALUE 0.00e+00; SWISSPROT HIT: Q02535, EVALUE 3.00e-42
tgtagcgggacttcttttggttttctttctctttggggcacctctggactcactccccagcatgaaggcgctgagcccggtgcgcggctgctacgaggcggtgtgctgcctgtcggaacgcagtctggccatcgcccggggccgagggaagggcccggcagctgaggagccgctgagcttgctggacgacatgaaccactgctactcccgcctgcgggaactggtacccggagtcccgagaggcactcagcttagccaggtggaaatcctacagcgcgtcatcgactacattctcgacctgcaggtagtcctggccgagccagcccctggaccccctgatggcccccaccttcccatccaggtaagcctcgaagtcgggacagggctgaacacccaggcaaggatgctgcgggaccctcggagctcccgattgcctcgcgtaactcttccctcttttcctctaatcagacagccgagctcactccggaacttgtcatctccaacgacaaaaggagcttttgccactgactc

SEQ ID NO: 9622 - DNA, 566 bp, Homo sapiens
  MAP TO CHR6.3; EXPRESSED IN BONE MARROW, SIGNAL = 0.92; SWISSPROT HIT: Q03519, EVALUE 2.00e-17; NT HIT: AJ251485.1, EVALUE 0.00e+00; EST_HUMAN HIT: BG323656.1, EVALUE 0.00e+00
acctccaactcacaacgtcctctcctgactcacccaaaacagcaaggacaaggaagaagaaggcggcaacgaggagaggcaggtccggcctggagagcttcagcagcctccacatcaagactttgttgttcacctggtcctgctccttctcctgggctccaggagggctcagaacagcccacagtgaccagctgagccccgcagccccgtaccccaccagcagccagctccaaggggctgaagcgactctggctgggggagcacgtgaggcccccgcgaccagggctctcagggagacagtcaggggggtggccagacagagcgggagcagcagtgtccccacaaatcccagcagccctcttagctttagcagcccccacagccctcccagccgcagggtcccctccagccatagtcctggcagcccttgaggaagcaaagtccccagagggccctgaagcagccacagtaaagccgcgtccaccagcagcagggaggtccagggtctcaggtcagggagccgcatggctctgtcaacggatacgagatgagaaatcatgggggtg

SEQ ID NO: 9623 - DNA, 555 bp, Homo sapiens
  MAP TO CHR13.3; EXPRESSED IN ADULT LIVER, SIGNAL = 3.7; EXPRESSED IN BRAIN, SIGNAL =   1; EXPRESSED IN LUNG, SIGNAL = 0.46; EXPRESSED IN BONE MARROW, SIGNAL = 1.2; EXPRESSED IN PLACENTA, SIGNAL = 0.95; EXPRESSED IN HEART, SIGNAL = 1.3; SWISSPROT HIT: P08709, EVALUE 7.00e-63; NT HIT: J02933.1, EVALUE 0.00e+00; EST_HUMAN HIT: AL531727.1, EVALUE 5.00e-76
tccgtgatatttggggagtctcccaccttccgtgactgctgcaggcagtcctgggtcatcagccggggcacgttgaggaccatgagctccagggccgtggcgccacggtccagcagctggccccagccgctgaccaatgagaagcgcacgaaggccagcgtcctctcagagaacgtccgttcgggcaggcagaggggcaccacatggtcagtgaggaccacgggctggtgcaggcggagcagcgcgatgtcgtggttggtggtgcccgggacgtacgtgctggggatgatgacctgcgccacccgccggctctgctcatccccgtcgtgctcgctgaggtcgtgctcgcctggaaggaagaagcccccctcaggccctttccaccacctgccacctcaccccctggtgcatggggatgggctgtggccatttctaggtctgcaggggctgcagtctccttctggggcaaggggacctgcatctaaccccaaggtggggccagcctgccccaggtggcagcctgtggctcgtgtggggacaagtgaactggggtga

SEQ ID NO: 9624 - DNA, 574 bp, Homo sapiens
  MAP TO CHR13.3; EXPRESSED IN ADULT LIVER, SIGNAL = 0.59; EXPRESSED IN BRAIN, SIGNAL = 0.7; EXPRESSED IN LUNG, SIGNAL = 0.93; EXPRESSED IN BONE MARROW, SIGNAL = 0.73; EXPRESSED IN HEART, SIGNAL = 0.66; EXPRESSED IN PLACENTA, SIGNAL = 0.66; SWISSPROT HIT: O79679, EVALUE 4.20e+00; NT HIT: gi7705287, EVALUE 1.00e-111; EST_HUMAN HIT: BE504550.1, EVALUE 1.00e-111
cactcttgtgagcagtgaagcaattattgtagataaacttgctactgtttactctttacttaaaatagcaaattttatatctgaagttgttactctttgctgccatttgaataatatctggaataattgtgtctttacaggatgaatgctatcaagtaagacaagtgtttgcccagaaacttcacaaaggcctttcccgtttacggcttccacttgagtatatggcaatctgtgccctttgtgcaaaagatcctgtaaaggagagaagagctcatgctaggcaatgtttggtgaaaaatataaatgtaaggcgggagtatctgaagcagcatgcagctgttagtggtaagcatataagaaaatggaaaggatactttttcagcctgctagtttcagttttatagaatatagcatgatatatgatattactgttatttattatttgtgattaacaatttttattaccatttttcaataactgcttttcatttaatatgaaggtcatttaaaaaatgcatggtacttaaatatcaacctatatctgtttatgtaaaggactaaatggccaaggaaa

SEQ ID NO: 9625 - DNA, 555 bp, Homo sapiens
  MAP TO CHR19.3; EXPRESSED IN LUNG, SIGNAL = 9.3; EXPRESSED IN BONE MARROW, SIGNAL = 2.9; EXPRESSED IN ADULT LIVER, SIGNAL = 1.5; EXPRESSED IN BRAIN, SIGNAL = 1.1; SWISSPROT HIT: Q08094, EVALUE 5.00e-26; NT HIT: AF287142.1, EVALUE 2.00e-53; EST_HUMAN HIT: BI909368.1, EVALUE 1.00e-76
aggggctgagactgagagtggggagagaagctggaggtggccccagggaggggccgagaccacagggtgtagaggggcagggagaggagtcgggggcacccgggcgagccccacctggctggcacacttgttcgtgcccatctggaggctgatggtcgagtggtccatggggggcaggatatggttcttggggtcatagagatgccttctcgtgccgtaggcagtcatgcccgactggctggcgcatttgttggtgcccatctgcagggaggttcgtgggagaggtcagactgcacccaacaagcttccggtccctccctgaaattgagggaccacagggctccatgccgctgtcccccaatgctgctgtcccccaacaccgtggtcccccaatgccgtggtccctggggctgggggagctgtcgcccacctgcagcccgatgacgcactggccagccttcatggtggcatcgtcgaaattccgctcctgcttctccgagtacttgacgccaatgtccaccccgctctgcagccccttagtcttggcctgggtga

SEQ ID NO: 9626 - DNA, 580 bp, Homo sapiens
  MAP TO CHR2.3; EXPRESSED IN BONE MARROW, SIGNAL = 0.87; EXPRESSED IN HEART, SIGNAL = 0.78; EXPRESSED IN ADULT LIVER, SIGNAL = 1.1; NT HIT: gi14728557, EVALUE 2.00e-93; EST_HUMAN HIT: AU125259.1, EVALUE 3.00e-93; SWISSPROT HIT: O95573, EVALUE 4.00e-23
gccataagcaagggttttcctgtcactatacaaaactaaacctgacaattcaaattcgaatatcacttgaaaagctcttaagaggaaataataaattctttaccttgttgaacttcaaaaaattaacatttggggctcaagagactctccaaattggctgtgtgaccttggataagtaacttaatctcaaaatctctcatatcaaaactgggggattagtttaagtgatttggaaaatcccattcagttttaaaatcctgtggttctctaatttttttctttagctttgttttccggaaagttcgaagcttgctagggggaaatattcgtctcctgttgtgtggtggcgctccactttctgcaaccacgcagcgattcatgaacatctgtttctgctgtcctgttggtcagggatacgggctcactgaatctgctggggctggaacaatttccgaaggtagtgttctccatggtcagaggctggagtgtgatgccagacgtttttttggggtatgggatattttctgcaaatatataggagaagagtagtaaggtgtttgtgaggcagaataatggtgga

SEQ ID NO: 9627 - DNA, 519 bp, Homo sapiens
  MAP TO CHR2.3; EXPRESSED IN BRAIN, SIGNAL = 2.2; EXPRESSED IN LUNG, SIGNAL = 1.4; EXPRESSED IN HEART, SIGNAL = 1.7; EXPRESSED IN BONE MARROW, SIGNAL = 1.4; NT HIT: J03930.1, EVALUE 0.00e+00; EST_HUMAN HIT: AW450908.1, EVALUE 4.00e-70; SWISSPROT HIT: P09923, EVALUE 7.00e-24
ctccaacatggacattgacgtgcgacccccgggccaagggctggggctgggcagaggggaaggtggcacaggctcagatccaggcaaccaaaagcctgatctgggtcagcaggttctggaggtggagttggggatgtagaatgtgcaatacaggctgggccattcccacagccctggggaggggagccaggggctatgcatgaggagggggcacggggccagccaggcccccaaaccacctgccccatccattgtcctcaggtgatccttggcggaggccgcaagtacatgtttcccatggggaccccagaccctgagtacccagctgatgccagccagaatggaatcaggctggacgggaagaacctggtgcaggaatggctggcaaagcaccaggtgatgggggctggtgggtgtgggaggcacggcagggggaggccaagtgtgtgggtctcagggctgtgggctgaagcctggctctgtccctgcagggtgcctggtatgtgtggaaccgcactg

SEQ ID NO: 9628 - DNA, 532 bp, Homo sapiens
  MAP TO CHR9.3; EXPRESSED IN BONE MARROW, SIGNAL = 0.78; EXPRESSED IN LUNG, SIGNAL = 1.3; EXPRESSED IN HEART, SIGNAL = 0.9; EXPRESSED IN PLACENTA, SIGNAL = 1.3; EXPRESSED IN ADULT LIVER, SIGNAL =   1; EXPRESSED IN BRAIN, SIGNAL = 0.79; NT HIT: U51924.1, EVALUE 1.00e-57; EST_HUMAN HIT: AW104969.1, EVALUE 0.00e+00; SWISSPROT HIT: Q01105, EVALUE 1.00e-16
tgagctttggttggaagacctgttcatatttctaatctttcaattatttattacagtattttgatgaaaatccttactttgaaaataaagttctctccaaagaatttcatctgaatgagagtggtgatccatcttcgaagtccaccgaaatcaaatggaaatctggaaaggtatgttttgaggaattatttgacaaaaatagcattttgcctatttcagtttagttttaaccacttacaagtgcttgatactttggtcatgtggctaaatacaaaaccttaaaatataaaacgttccagtgtgctgaagccaagtattacagtagtttagggttctcattagatactacagatgtaggcaggaagatctcttgagcctaggagtttaccctgggcaacatagacccttaccttccaaaaaacaaaaaaaaagagaaaaatctagcccaagtttaagaattgagaactggactaaattttttgttgctgttgttttctgcagtggtgactgagctcttcaaatggcttgccat

SEQ ID NO: 9629 - DNA, 593 bp, Homo sapiens
  MAP TO CHR19.3; EXPRESSED IN PLACENTA, SIGNAL = 1.2; EXPRESSED IN BONE MARROW, SIGNAL = 1.3; EXPRESSED IN BRAIN, SIGNAL = 1.2; EXPRESSED IN FETAL LIVER, SIGNAL = 1.6; EXPRESSED IN ADULT LIVER, SIGNAL = 1.3; EXPRESSED IN LUNG, SIGNAL = 1.7; EXPRESSED IN HEART, SIGNAL = 1.3; SWISSPROT HIT: P48380, EVALUE 2.00e-23; NT HIT: gi14769193, EVALUE 1.00e-82; EST_HUMAN HIT: BE242078.1, EVALUE 4.00e-89
gtaggcctgcacgtcttaggatcactcagcctctgggttccccagggaacgtagagcagggggtgtgttgctgccatgaagtctggcctggggcccgggttccatgctcccctgagggtccccagcctctgtccgcttgtccccagctccatggtgatccgggacctgaccctgcgcagcgctgccagcttcggctccttccacctcatccgcctgctctacgacgagtacatgttctacctggtggagcaccgcgtcgcggaggccaccggagagacgccgatcgctgtgatgggagaggtgaggaccctcctgggtgggacggccggggcttggccgggcctgtggggagagggcggtgtgctctgagcagcccagagagaggacactcgcaggtcccactgctctgccgcccggacagagctgcagctcgataaagaacaagccacagaaacgggcccacccgtgccaggacacagcagtgtctcaaaacatcaaaaccacaagttttatcagcactgggaaggatttggggctctgtccaagttcacagtccccatcgcaccgctggctctggaaggaggttgtccttg

SEQ ID NO: 9630 - DNA, 590 bp, Homo sapiens
  MAP TO CHR1.3; EXPRESSED IN LUNG, SIGNAL =   5; EXPRESSED IN HEART, SIGNAL = 3.9; EXPRESSED IN BONE MARROW, SIGNAL = 1.4; SWISSPROT HIT: P06126, EVALUE 6.60e-01; NT HIT: AB036706.1, EVALUE 2.00e-68; EST_HUMAN HIT: BI821675.1, EVALUE 0.00e+00
actgggccaactacaacacctttggatctgcagaggcggccacgagcgatgactacaaggttggtgccacttctctcctacttgggtgagggtgaggtgtggagtgtggctggccaccagcctgcaggagggagggctggaaggtggggatatggggaagggctggagaagaagagagaaatacaggacttgaatcacaacttcctctcaacaaggctgttagggccctgggtggtggtgggatcatcagctgggagtggggtgtctgagcgtggctggccatctgcctactgatcccagagctctcagcccagctgaggctgcacatgtggaccttctgcctcctggtacctcctggcccagtcaggctcagtgtctgttgctttccagaaccctggctactacgacatccaggccaaggacctgggcatctggcatgtgcccaacaagtcccccatgcagcattggagaaacagcgccctgctgaggtaccgcaccaacactggcttcctccagagactgggacataatctgtttggcatctaccaggtacacagggctgctggctggggggcactttctttgtgaac

SEQ ID NO: 9631 - DNA, 521 bp, Homo sapiens
  MAP TO CHR13.3; EXPRESSED IN HEART, SIGNAL = 2.4; EXPRESSED IN FETAL LIVER, SIGNAL = 2.4; EXPRESSED IN ADULT LIVER, SIGNAL = 2.8; EXPRESSED IN BRAIN, SIGNAL =   6; EXPRESSED IN HELA, SIGNAL = 4.6; EXPRESSED IN BONE MARROW, SIGNAL = 2.8; EXPRESSED IN LUNG, SIGNAL = 4.2; EST_HUMAN HIT: AU140768.1, EVALUE 0.00e+00; SWISSPROT HIT: Q14118, EVALUE 1.00e-37; NT HIT: gi16157344, EVALUE 0.00e+00
aacatcagtggctgtccctcttctaagggggtactggaagaactgagctcagaattggtgaagcttagacttgaaaaggaaaagccaccaaaactaaaatggaaaatgagaactcttcctcatttatgctttatatccagtctcaccttgatgatatctccactggaggcaatcaaatctgttggaatggtcactcgaaatgagcgcccgacgacagccgtgccatcaggaatgccaaccactgtgggaacagcctcgtggaggtctgagagcactgagtgcatggatgcctcaagctggttttcccagtccctgacagcctctgagggttcactgggccagtgggactgagccataaccacagagagcaggaggagaaaggtcctccccgagaggggcagcagcagcgagaggcccacagacatcctcatcccaggtccaagtttgctcaagtcgatagtcttgctaagtaaggaagcaagtgacttggtcccagagctgggttctcaccctctgcacac

SEQ ID NO: 9632 - DNA, 538 bp, Homo sapiens
  MAP TO CHR19.3; EXPRESSED IN FETAL LIVER, SIGNAL = 1.5; EXPRESSED IN PLACENTA, SIGNAL = 1.5; EXPRESSED IN BONE MARROW, SIGNAL = 2.1; EXPRESSED IN HEART, SIGNAL = 1.1; EXPRESSED IN ADULT LIVER, SIGNAL = 1.7; EXPRESSED IN BRAIN, SIGNAL = 1.1; NT HIT: gi16163368, EVALUE 1.00e-101; EST_HUMAN HIT: AW503735.1, EVALUE 3.00e-34; SWISSPROT HIT: P41233, EVALUE 3.00e-17
cctcaagttaaggcacagccaccccactgcccacccgccttgggtctcccaccccggccctcaccgactctgctgccctggctgccattcttcttttcctgcctggtgtccacactgccctccatgtcagtgtcagcctgcgggcagagaggcaccaagtggcttggccttcagggctgaacagagtcccgggggtcaggggtcaggagaaggccggtccccaccttctcattggtggtcaggggcaggcgggccttcaccagcgtcaggtagtagccggagcccaggtgacggcgcaggaagagtggggagccacagcagcacaagcggccacctgccaccacggccacacggtctcccagcagctctgcctcatccaggtggtgggtggagaggatcagcgtgcgacctaggcacgggggaccaacccacaactaccatcaggccgccgcgtctttgcccgagctggggcctctgccaggagttgtctgccccatgaagcaaactcctattcatccctcaaaacctcatccccaga

SEQ ID NO: 9633 - DNA, 576 bp, Homo sapiens
  MAP TO CHR11.3; EXPRESSED IN HELA, SIGNAL = 2.1; EXPRESSED IN BONE MARROW, SIGNAL =   4; EXPRESSED IN HEART, SIGNAL = 3.2; EXPRESSED IN BRAIN, SIGNAL =   4; NT HIT: AJ400877.1, EVALUE 0.00e+00; EST_HUMAN HIT: BG199363.1, EVALUE 0.00e+00; SWISSPROT HIT: Q10007, EVALUE 9.00e-15
ggtccttctatctggagcccatggtcactttccacgtgcacccagaggccccggtgtcatccccttactctgaggagctgccacggctgccttttcccagcgactctcttatcctgggaaattacagtgaaccctgccccttctctttcccgatgccttatccaaattacagagggtgcgagtactcctacgggccagccttcacccggaaaaggaatgagcgggaaaggcagcgggtgaaatgtgtcaatgaaggctatgcccagctccgccatcatctgccagaggagtatttggagaagcgactcagcaaagtggaaaccctcagagctgcgatcaagtacattaactacctgcagtctcttctgtaccctgataaagctgagaccaagaataaccctggaaaagtttcctccatgatagcaaccaccagccaccatgctgaccctatgttcagaattgtttgagttgctgtttccaaatagaaatgaataatatcacaaaatggggtctcttacggcatcattcaatagtttttcctaaatgtaatttccatgtgggcaggaaatagctcaa

SEQ ID NO: 9634 - DNA, 523 bp, Homo sapiens
  MAP TO CHR17.3; EXPRESSED IN LUNG, SIGNAL = 0.81; EXPRESSED IN PLACENTA, SIGNAL = 0.72; EXPRESSED IN ADULT LIVER, SIGNAL = 0.6; EXPRESSED IN BRAIN, SIGNAL = 0.65; EXPRESSED IN FETAL LIVER, SIGNAL = 0.61; EXPRESSED IN BONE MARROW, SIGNAL = 0.86; EXPRESSED IN HEART, SIGNAL = 0.69; SWISSPROT HIT: O42945, EVALUE 9.00e-10; NT HIT: gi14774624, EVALUE 1.00e-111; EST_HUMAN HIT: BE252800.1, EVALUE 1.00e-100
aaagcgtactttttgcacggcttcagtagaaaaagggaagcacatagcagagacaagcagctatcgctggagaacaggtgcaagacaaggctcaccttatttccgcctaggtttttgaaggtccgatagatattgagcagggtcatgtgatccccctcgctggatatgaacttcttgcggaccccttgcacttcctctcgccgggaaggagggttgtggaggacgctgtccacagacagcagggagacaatggtcaggatctcctctgtacagtggaatttgggggacatgaggatggtctgcaaagcaaaatttaaaattgtgtaaacccagctttctcctagctttagaatgcactatttctgtacattgcttttgcagtttcccttctaaggagttaaagggcaggtatttctaaaaccatggcgatgtacattagtgttatttcactctttaatattcaataaaacaggtgactgccttccctacagagttccaaatttcttgtgggtaggggctctta

SEQ ID NO: 9635 - DNA, 517 bp, Homo sapiens
  MAP TO CHR14.3; EXPRESSED IN LUNG, SIGNAL = 3.7; EXPRESSED IN BONE MARROW, SIGNAL = 1.1; SWISSPROT HIT: Q00978, EVALUE 4.00e-64; NT HIT: gi13631481, EVALUE 0.00e+00; EST_HUMAN HIT: BF530066.1, EVALUE 0.00e+00
ggtagggctgttctatccccagactactcactgctgctcaccttcatctacaacgggcgcgtggtgggcgaggcccaggtgcaaagcctggattgccgccttgtggctgagccctcaggctctgagagcagcatggagcaggtgctgttccccaagcctggcccactggagcccacgcagcgcctgctgagccagcttgagaggggcatcctagtggccagcaacccccgaggcctcttcgtgcagcgcctttgccccatccccatctcctggaatgcaccccaggctccacctgggccaggcccgcatctgctgcccagcaacgagtgcgtggagctcttcagaaccgcctacttctgcagaggtgaggctgttctctctgggcacatgagcttccaccccctacctcttagtaccccctgggcccaacttgttgggtcctgctacctccctatctgccagcagatcctccatgtagcctatgcatggcactcctgcgcttgtgtgttgcatatcc

SEQ ID NO: 9636 - DNA, 600 bp, Homo sapiens
  MAP TO CHR9.3; EXPRESSED IN ADULT LIVER, SIGNAL = 4.6; EXPRESSED IN LUNG, SIGNAL = 5.4; EXPRESSED IN HELA, SIGNAL = 3.4; EXPRESSED IN PLACENTA, SIGNAL = 3.5; EXPRESSED IN HEART, SIGNAL = 5.8; EXPRESSED IN BONE MARROW, SIGNAL = 4.5; EXPRESSED IN FETAL LIVER, SIGNAL = 3.7; SWISSPROT HIT: P46501, EVALUE 2.60e+00; NT HIT: AY048592.1, EVALUE 0.00e+00; EST_HUMAN HIT: AU130178.1, EVALUE 0.00e+00
attggcaaatcttgcctttgtttattttggtgtcagtgttttctgcttaatcattggctttgttggcatctgcgtttatttacttgtacaccacatgcagtttacatcttccttaactactctccttcccaggtaaattccaattatattcgacatccagctaagagggcccatctcttctcacctctatcctagtcagtatgttcagcaaatatttattgagtgctgacactgtgggcaaaacattgtactggttaattgaggagaaaagtagataattcccttattcagtaaatgtctactgggtacaatctagtgaatgattacagtatggcctaattgtcttgtttgagatgtattattcgttacaatattttacaccattcatatcttaatataattatagaacccaatatactatcaaagataagtaattgtgtggttatatgccatttaaaattatcccgtgtttgtctgatcccattattacaaataattaaaaaatgatttgttttaatctgtaataaactgatttattgtgcagtgactgtaatatactggagttatattaaattgtttactcagcctcaccaaacacat

SEQ ID NO: 9637 - DNA, 551 bp, Homo sapiens
  MAP TO CHR1.3; EXPRESSED IN LUNG, SIGNAL = 0.59; EXPRESSED IN HEART, SIGNAL = 1.7; EXPRESSED IN BONE MARROW, SIGNAL = 1.5; EXPRESSED IN FETAL LIVER, SIGNAL = 0.63; EXPRESSED IN ADULT LIVER, SIGNAL = 1.4; SWISSPROT HIT: Q15431, EVALUE 1.00e-08; NT HIT: X95654.1, EVALUE 3.00e-55
tggaatgcaacagttccaagtcagtgaacaaaaaagacaaggtctctgtctctgtggagcatatagttgaaacatttgaaaaaggtaagagcatggaaaaaggaaaagaagagtacatgtattttacaaaagctccccaggttaatctattatgccctcctccaaccgaaccaactcagattgagaagtacagtactagaaagcattacaacaaacttgtaatgaaagtcaatgtttagaacataacaagaggaatacataaggcacattatattatcttatataaactcttacttgtcttttcctctaattgattaactttatctctggattcctctagcagaaatgttaaatctttcattttattttctttctcagtgatttggatcaatagtagtgatacctaaaatatttaaataatacattatcaatatgaaaatttaaatatgacaccttaacatttataatacctacaattattttatgtacttgtctacatgcttttcagctggtccacttaaccctcccaccctggtctctactccctggca

SEQ ID NO: 9638 - DNA, 576 bp, Homo sapiens
  MAP TO CHR6.3; EXPRESSED IN LUNG, SIGNAL = 9.2; EXPRESSED IN HELA, SIGNAL = 6.4; EXPRESSED IN BONE MARROW, SIGNAL = 4.2; EXPRESSED IN ADULT LIVER, SIGNAL = 5.1; NT HIT: gi11417670, EVALUE 0.00e+00; EST_HUMAN HIT: BG392633.1, EVALUE 0.00e+00; SWISSPROT HIT: P30281, EVALUE 3.00e-15
caagtatcttgggtggggtgaagggcactggccctaggggttcttttcttgccaagtggtgtgctggagtgggggtggggggtttggtgtcagatgcagggctgctctcacactcccttgccacatcctcttgctagtttctgagaactaaagagcgattcctggggccgggctgtggcctaacctccccagacttccccatgtgttgggagctgtccttcccctgcacctgctgccagatgctatggggggagtgtttgctcctcactcttctcccatgttcccaggactgcctgcgggcctgtcaggagcagatcgaagctgcactcagggagagcctcagggaagcctctcagaccagctccagcccagcgcccaaagccccccggggctccagcagccaagggcccagccagaccagcactcctacagatgtcacagccatacacctgtagccctggagaggccctctggagtggccactaagcagaggaggggccgctgccacccacctccctgcctccaggaaccacaccacatctaagcctgaaggggcgtctgttcccccttcacaaa

SEQ ID NO: 9639 - DNA, 571 bp, Homo sapiens
  MAP TO CHR19.3; EXPRESSED IN PLACENTA, SIGNAL = 1.7; EXPRESSED IN HEART, SIGNAL = 1.4; EXPRESSED IN BONE MARROW, SIGNAL = 2.2; EXPRESSED IN BRAIN, SIGNAL =   2; SWISSPROT HIT: P20813, EVALUE 3.00e-25; NT HIT: gi14572198, EVALUE 0.00e+00; EST_HUMAN HIT: AW577437.1, EVALUE 1.00e-100
aaggcaggtgaagcaatcagaatatattaagtgctcaaataatcagtatctctcgttgtttttctcaagttggggatagtacctgccctctggtgtctgggaaagaaattgtgggtccagcttacctaaggagaaggggataaaagcttcagtctttttcagtgccccattggcatccagaaagtggtcaggattgaaggcgtctggtttttcaaagtagtgtgggtcatggagagcagtgctcaggatgagaaatacttctgtgtcctgagggaggatcacaagatcaaaagatattgccattccctccaaccctccacacactccacaaaaaagaaatacaaaaaacaaaaacaacgggactcaattaaggagctaacaaaaggttgagttcggggattaagagaatccaggatgcccaaacaggagggctatggggttccagccggtcttaccttggggatgatgtaccctcggaagctggtgtgttgggtgacaatgtggggcacacccatggggagaaggtcggaaaatctctgaatctcatagatgactgcctctgtgtatggca

SEQ ID NO: 9640 - DNA, 502 bp, Homo sapiens
  MAP TO CHR6.3; EXPRESSED IN BRAIN, SIGNAL = 1.1; EXPRESSED IN HELA, SIGNAL = 2.1; EXPRESSED IN HEART, SIGNAL = 0.82; EXPRESSED IN BONE MARROW, SIGNAL = 0.84; SWISSPROT HIT: P26640, EVALUE 1.00e-25; NT HIT: gi16174853, EVALUE 5.00e-84; EST_HUMAN HIT: AL524535.1, EVALUE 8.00e-84
aggtctcaaggccaactctggcaaaactgagcccagggctctgctgcccacctgcccccaccatcccctgccccgctgtgctccttctcaccaagtagacatcacagagctcatagagccagaagctgtactgggcagtggtgacggccgggaagtcgtaggcctggaagccttgattgctgagcctcacagcctctgtcaggcggctgcggatccagcggtccaccaggctctcatggcctccgggcttggggagagagggtgtatcagccggcgggccaggggagggtgccagaaccccatgggggcaggagtcatgggcaaatcttcatccagagtctgatgagtccaaagcaaccacctatgtgccaggatctgggaagaagtgacaggccccagcccccaatgcgctgggctttccctttaactgtctgtctctgtgtctatctgtccccccagctacatggaggctgctccggacaggggtacagcctgtgtgagt

SEQ ID NO: 9641 - DNA, 552 bp, Homo sapiens
  MAP TO CHR22.3; EXPRESSED IN ADULT LIVER, SIGNAL =  13; EXPRESSED IN BONE MARROW, SIGNAL = 2.4; EXPRESSED IN HEART, SIGNAL = 3.2; EST_HUMAN HIT: T53470.1, EVALUE 4.00e-98; SWISSPROT HIT: P21964, EVALUE 2.00e-19; NT HIT: Z26491.1, EVALUE 0.00e+00
caggtgttcacaccacgttcactgaaaacccactatcaccaggcccctcagtgcttcccagcctggggctgaggaaagacccccccagcagctcagtgagggtctcacagctctgggtaaactgccaaggtggcaccaggaggggcagggacagagtggggccttgtcatcccagaaccctaaagaaaactgatgaatgcttgtatgggtgtgtaaagatggcctcctgtctgtgtgggcgtgggcactgacaggcgctgttgtataggtgtgtagggatggcctcctgtctgtgaggacgtgggcactgacaggcgctgttccaggtcacccttgtggttggagcgtcccaggacatcatcccccagctgaagaagaagtatgatgtggacacactggacatggtcttcctcgaccactggaaggaccggtacctgccggacacgcttcttttggaggtgagccccaaccaggatggcatccgtgccagctgctgcccagagcccattcagtcagcctcagcctctccaaagagccaggcattccagtaga

SEQ ID NO: 9642 - DNA, 545 bp, Homo sapiens
  MAP TO CHR17.3; EXPRESSED IN BONE MARROW, SIGNAL = 1.6; EXPRESSED IN HEART, SIGNAL = 2.4; EXPRESSED IN PLACENTA, SIGNAL = 1.6; NT HIT: gi13540548, EVALUE 0.00e+00; EST_HUMAN HIT: BG395842.1, EVALUE 0.00e+00; SWISSPROT HIT: Q12809, EVALUE 2.00e-25
  unsure 65
gctgtcttcacgccctactcagccgccttcctgctcagcgaccaggacgaatcacggcgtggggncctgcagctatacctgcagtcccctcactgtggtggatctcatcgtggacatcatgttcgtcgtggacatcgtcatcaacttccgcaccacctatgtcaacaccaatgatgaggtggtcagccacccccgccgcatcgccgtccactacttcaagggctggttcctcattgacatggtggccgccatccctttcgacctcctgatcttccgcactggctccgatgaggtgagcagaccccctccaggccagcagccatggctgtcctctgcacgctggcctcaagccctccctgctgcacagcactgggtgcggagagtatctggcactgggcacctttgctgaagcacgtggaggtggagaggaggccccaaacatctgtcacctcccagccctggagaaggacctgccaaggctgcacccccaggcctctgtccctctgccccctctctgagcaggccctggtaagaggagcaggctg

SEQ ID NO: 9643 - DNA, 583 bp, Homo sapiens
  MAP TO CHR1.3; EXPRESSED IN PLACENTA, SIGNAL = 1.2; EXPRESSED IN BONE MARROW, SIGNAL = 1.2; EXPRESSED IN BRAIN, SIGNAL = 1.3; SWISSPROT HIT: P10155, EVALUE 1.00e-23; NT HIT: gi14737397, EVALUE 1.00e-100; EST_HUMAN HIT: AA968959.1, EVALUE 1.00e-100
aatggatctctggatcgtgctgctgcttatggttaaatcatatctaatgtgaaatttcgaattacatccagagctccagtatcaaagccgcacatatccaacatgcctctatcatctgggtctgcaatggtgaaaccatttgatgtcattccacaaacaatcaatttagctggaatatccattttctgtagaaaaagaccaaaatacatattaaaaacataaatgtaaggaaatgcaaaatacctccaaaattaaaacactttaacatttctctaccagagctttttaaatacaaagtcatttttttgcgggggtcaatcttttaaggctagaatatgggagttttagaagaagggacaataaaattgtataagaatctgcctgaaatttctacttctctcttcaattactttacttgttctatgggctgcagtgtacattattgagcagcctaggcactttgtacttatgaaacctgtcaggttattaagggtgccagatatttttatcaacatatcaaatgctggggcagtgtgtatgagtatatataaggacatatctctgggatgatcaacttttggct

SEQ ID NO: 9644 - DNA, 573 bp, Homo sapiens
  MAP TO CHR12.3; EXPRESSED IN BONE MARROW, SIGNAL = 0.93; EXPRESSED IN FETAL LIVER, SIGNAL = 0.87; EXPRESSED IN BRAIN, SIGNAL = 0.83; EXPRESSED IN ADULT LIVER, SIGNAL = 0.91; EXPRESSED IN PLACENTA, SIGNAL = 1.2; SWISSPROT HIT: P29475, EVALUE 8.00e-92; NT HIT: gi14764345, EVALUE 0.00e+00; EST_HUMAN HIT: BF209999.1, EVALUE 8.10e-01
atcatcgtaggcatgctgaggcccattcccgggacccgaggccccatccactgccaggggctgttctttgccggccggtggctggtgggacagatccacggctttggtggggggacccaggggctgtgtcacccggatggtcttgggggtcccatcacctgtaaaggtggtctccaggtgcgtggtgaaaccttcagggcccctcagaatgaggaccacgtgggtctcagaggcaatgcctctgagtacctccagggcgctgtcatagctcaggtccaccaagggccggccgttgaccgcaagaatgatgtctccggcctggatgaggccactctgctctgcggcgcccccacgaatcaggtcagagatgatcacgggcggcttactgacccgctccttcaccagaaatcccaggcccccaactttgcgcttgaagagacgaacagaaatgacattgggctggatttgctgaacaccgaacatgtgatcctccatggtaactagcttccgaggggtcctgtctgaagacctcacaatgctatcaggccaagatgatttcaccaggaggatcca

SEQ ID NO: 9645 - DNA, 518 bp, Homo sapiens
  MAP TO CHR22.3; EXPRESSED IN LUNG, SIGNAL = 3.2; EXPRESSED IN HELA, SIGNAL = 2.4; EXPRESSED IN PLACENTA, SIGNAL = 1.8; EXPRESSED IN BONE MARROW, SIGNAL = 1.8; EXPRESSED IN FETAL LIVER, SIGNAL = 1.4; EXPRESSED IN BRAIN, SIGNAL = 2.1; EXPRESSED IN ADULT LIVER, SIGNAL = 1.7; SWISSPROT HIT: P35240, EVALUE 1.00e-24; NT HIT: Y18000.1, EVALUE 0.00e+00; EST_HUMAN HIT: AA969242.1, EVALUE 3.00e-86
tgtctcactgtctgcccaagccctgatgcatgataccctcttgccggcagagtggaatacatggaaaagagcaagcatctgcaggagcagctcaatgaactcaagacagaaatcgaggccttgaaactgaaagagagggagacagctctggatattctgcacaatgagaactccgacaggggtggcagcagcaagcacaataccattaaaaaggtacccagggtctctttcttgtattttgctgatcaggaccatcattaatgaaatgtgcggttggcatctggtttcctcagtagccaagtcactagactattggcatcttttgtatgtacttagttgaggaaattttttaacttatgccagaaagggaatttaatctgccaatgactatgaacccattggctggatggaagttgagcttgtgttaaaagctctgatgtaatgaacccctgttacagggtggattttgagccctcatttagcagtaaagcataatgcccttttaagccaaggggtgt

SEQ ID NO: 9646 - DNA, 536 bp, Homo sapiens
  MAP TO CHR21.3; EXPRESSED IN LUNG, SIGNAL = 3.3; EXPRESSED IN HEART, SIGNAL = 2.2; EXPRESSED IN PLACENTA, SIGNAL = 2.8; EXPRESSED IN BONE MARROW, SIGNAL = 2.4; EXPRESSED IN BRAIN, SIGNAL = 1.7; EXPRESSED IN FETAL LIVER, SIGNAL = 3.1; EXPRESSED IN ADULT LIVER, SIGNAL = 2.5; SWISSPROT HIT: O15393, EVALUE 1.00e-29; NT HIT: AL163285.2, EVALUE 0.00e+00; EST_HUMAN HIT: BF675496.1, EVALUE 5.00e-79
ctcacagccctaggaagcaggtgcaatactctccccatttaaacacaaggatgccggggctgcaagggttgagacctgctcaaggtcacagggtggctgtaggccagccctgagcccccacccggcccgcgccgcccctggcatacttttccacgcagtgggcggctgtcacgatccactcgggggtgatgatggagcctccgcacacgtggacgttctggacgtgcaggctgacctgccagggccaggcccccgggagcgcgctctcgccgcccacaatcctgctctggcggcttgagttcaagttgaccccgcaggctgaggatgacaaacaggaggccagtggggtgagaccagcagaagccgcccagccacccagcgcccgcccctcccaagggtctcccaggctgcaaggacagggcaggggcaccactgctggggatggacttagggggctcctgggggtctcctcttggggaagggaggatgcccctccagcccacccagacccaggaagcaccacttccctgaacact

SEQ ID NO: 9647 - DNA, 554 bp, Homo sapiens
  MAP TO CHR1.3; EXPRESSED IN LUNG, SIGNAL = 0.95; EXPRESSED IN ADULT LIVER, SIGNAL = 1.2; EXPRESSED IN BRAIN, SIGNAL =   3; EXPRESSED IN BONE MARROW, SIGNAL =   1; NT HIT: AF019406.1, EVALUE 0.00e+00; EST_HUMAN HIT: AA604996.1, EVALUE 0.00e+00; SWISSPROT HIT: gi399162, EVALUE 7.00e-08
cctgagtcccagacagaaggtcctgggggagatggtttcctggactggggatgggtgcatgtccacccagaggggacctggtccttcccgccaggatgcctgccaggctctgtctgggcctgatgctcaaggccccttgatggatccaggctctgtaaggcgggcagaggcataggccgaagctccaaggcaggcggcaggttcacagaagcccggcagccccacggggcctggcaggccaggtcgacctgcctctcctggagcccctggggaccctcgatctccatccttgccgttgattgcctggccaggccggccagggagtcctgtgaacaggagaaagtcaagacattaggggcacctcttgtctcaggcccagaattttgaaggtggggaaacttttcagatggagaaaatgaggccaaaacaccataggagaaaggactctgccccagaggcagagattctgtgattgtcccctacccccagctcccaatcagtgagctttgggagcaaacatcccttccatcacctctgtgaagtgatggtggtgg

SEQ ID NO: 9648 - DNA, 513 bp, Homo sapiens
  MAP TO CHR17.3; EXPRESSED IN BONE MARROW, SIGNAL = 4.6; EXPRESSED IN PLACENTA, SIGNAL = 6.4; EXPRESSED IN HEART, SIGNAL = 4.3; EXPRESSED IN FETAL LIVER, SIGNAL = 2.9; EXPRESSED IN ADULT LIVER, SIGNAL = 3.9; EXPRESSED IN BRAIN, SIGNAL = 5.4; SWISSPROT HIT: Q14451, EVALUE 3.00e-28; NT HIT: AF274875.1, EVALUE 0.00e+00; EST_HUMAN HIT: BI768816.1, EVALUE 1.00e-73
ccccatcctcactgtacacctttactacctgcgccccaggaattgcacacgacttgaggggaggcaaagggtgattcattccctttccgcacctgctagaccctcagggactcctaaccaagatcccctgcctccatggaagcggctgtgtatctcccacagacccagaacccgtgcatccctcccttcccttctgagggacaactcacatgggggcggctggcatcgcgggggagcagcccccttgcactggaggggcccccgagaattgggctctgtgagggaggactgcagagctcagggaaggggttggggatagaggggagggaggtggcacgcctctcctcctctcgaagtttcctgtggcaagaagaaaaagggagagaggtgtggggaagggagcagtggcctgcaagcctctgtgtattatccagcactgacctcccccaagccccacgccccatcgtacctgccggtggttgggatgaggagaggctgggacctctttacctc

SEQ ID NO: 9649 - DNA, 555 bp, Homo sapiens
  MAP TO CHR2.3; EXPRESSED IN HEART, SIGNAL = 6.2; EXPRESSED IN BRAIN, SIGNAL = 7.5; EXPRESSED IN HELA, SIGNAL = 3.6; EXPRESSED IN BONE MARROW, SIGNAL = 7.3; EXPRESSED IN PLACENTA, SIGNAL = 5.4; SWISSPROT HIT: O15232, EVALUE 1.00e-14; NT HIT: Y13341.1, EVALUE 3.00e-58; EST_HUMAN HIT: BF826916.1, EVALUE 4.00e-58
tcacttgcctgtggaatgtcttaaagtgtttggctcgatcgtagtaccttggttggctccaggcagaaggagaaaaccttccagaaaggatatgtttagtgttcagtctttgaagatacgagctgaccttgtcctggaatgccagtgtagcttcacatccacaagcatcttcagtggaaacaagtcttcgtgcttcctcagtggctgaagacaatgacagtacacaaatatactatctaggaatagctatataggaatcataacaaatcaggaaatccacagttgaatatttccaccgttaagacttacctaagtgcattttccaagaggtaaagggatagatgaacaaacaaaaagacgagaaaatacttatcacagaaaaattcatcttaggatacattggggaaaatgtttataattgtcaaagctgagtgatgcttaagtgagggttccttattttattctctgtacttttgtgattgccagaaattattcatgatataaagtaaatttagaaaaacatggttggtatagggggaggccagggatatagaa

SEQ ID NO: 9650 - DNA, 598 bp, Homo sapiens
  MAP TO CHR17.3; EXPRESSED IN ADULT LIVER, SIGNAL = 0.89; EXPRESSED IN BRAIN, SIGNAL = 1.1; EXPRESSED IN PLACENTA, SIGNAL = 1.9; EXPRESSED IN BONE MARROW, SIGNAL =   1; EXPRESSED IN HEART, SIGNAL = 0.86; SWISSPROT HIT: P02535, EVALUE 5.00e-22; NT HIT: gi14775973, EVALUE 1.00e-119; EST_HUMAN HIT: AL576392.1, EVALUE 1.00e-117
ttggtttaccctccctctccatcgagcaggcggcggtaggtctcgatctccacctccaggcgtgtcttgatgtccagcaattgctcgtactctgcgttctggcatttagtctcaccccagatctggcagatctcctcctccagggcactgatctgcgtttgaatttctgacagctgagccacgtagccagcttctgtgtcagccagggttccctccagggagcttttctaagagaaaaagcaaataaaaaattcatgatgaaaataaatcattggatgattttttaaaaatgcaattttatgtggcactagaagtgcaccttcgccatataacctatattgttatatcattgcttctttaattttggttggcacttctttttaaactaaatcttttatgcaaaatagagtacattatctttaacttttaatgctttctataatcataatgcagttctccttaacactgccttttttatgtgcctagtgaacctcttggcaaagaaagaaaactgcatttgcttaactccctgttggaaaatgtgaaaagctatttgcacataccatggccagttgggactgaagctcaatttccaggg

SEQ ID NO: 9651 - DNA, 518 bp, Homo sapiens
  MAP TO CHR22.3; EXPRESSED IN BONE MARROW, SIGNAL = 1.1; EXPRESSED IN PLACENTA, SIGNAL = 1.4; EXPRESSED IN LUNG, SIGNAL = 2.3; EXPRESSED IN FETAL LIVER, SIGNAL = 0.65; EXPRESSED IN ADULT LIVER, SIGNAL = 0.73; SWISSPROT HIT: P36543, EVALUE 1.00e-02; NT HIT: gi14776833, EVALUE 1.00e-57; EST_HUMAN HIT: AU138853.1, EVALUE 9.00e-56
atatgcctgactccaaagcgcctgctcatgacttcagaaaacttcttagcttaatactgcaaccaggatctacttacattttcttctgctgctcaatctgtttctctttcttctcataatattccataatctttagtctttgggtttgcacaagccgacctttctctatgttgaactcttcttctgcctagagggaaattagtcaatattaattcattacatcaagttttgattaacagttttaaacagctggtgacctgcgttacttgcttatgaacactaatttcatatataaaacagaaaatttattgtgattcattttcaaggattctaatttattcaaaaggaaagatcagcaattttcattataaatgacgtactaggaaactaaaaatttcgtcaagggtaacagtaaccgacaagttactaaaggatataattgggtagaatattctgctcatgaaaaaaattaccacacgttcgaaacttaatccattagcttactggtgggccaataa

SEQ ID NO: 9652 - DNA, 570 bp, Homo sapiens
  MAP TO CHRX.3; EXPRESSED IN BONE MARROW, SIGNAL = 0.97; EXPRESSED IN HEART, SIGNAL = 1.4; EXPRESSED IN ADULT LIVER, SIGNAL = 1.5; NT HIT: L13322.1, EVALUE 0.00e+00; EST_HUMAN HIT: AW838689.1, EVALUE 4.00e-86; SWISSPROT HIT: P22304, EVALUE 5.00e-20
tccaaccatctgtcctttcctgcatacatcattctctttttttcctaaattcatctttcctttccaccatctttcactcactatctcgcttcctcacccaggttggaggccatgaccaaagcctaaccctgccacccaggactcaggcttcctcctcgagccccactcccacccttgctgaggcacagcgccctccctggctaggctgttaaggtgcagggtccagccttgggcctcttagtaacctagcacctaccatgagggagggttcagtgtcagtgcaggttacctcaccaaagcccctccctcctgtgtagatgctctgaacgttcttctcatcatcgtggatgacctgcgcccctccctgggctgttatggggataagctggtgaggtccccaaatattgaccaactggcatcccacagcctcctcttccagaatgcctttgcgcaggtatgtctgggaacctctagctgtgggtgtgtgctgcttcgtgcactgagggttgggggcggggagcttcagctattgtcagatggcacagattgtgcgggacatcttgttagagg

SEQ ID NO: 9653 - DNA, 566 bp, Homo sapiens
  MAP TO CHR1.3; EXPRESSED IN BONE MARROW, SIGNAL = 0.94; EXPRESSED IN LUNG, SIGNAL = 0.93; EXPRESSED IN HEART, SIGNAL =   1; EXPRESSED IN FETAL LIVER, SIGNAL = 0.49; EXPRESSED IN ADULT LIVER, SIGNAL = 0.83; NT HIT: AF101079.1, EVALUE 0.00e+00; EST_HUMAN HIT: AW067903.1, EVALUE 1.00e-116; SWISSPROT HIT: P12107, EVALUE 5.00e-07
gaggctggaaagtggtgaagggcattttcagcaggctctcctcctgacagatctttttttcctgctacctacctcgtctccctttattgtcccgcctacattcatctctttctccagtttccaattccaacctggtagcagctacaatctggattgtatttaagggaattgcttttttttttttttcttgaagagcggggaggaagggtaaagtggggggaggggcgcagaagcagtaggaccgacggcaatctcccacctccccaaatccattttttcttacctcctctgacctctctagcttggaagaggaaggtcaatgcgagggttgttacggtgaaatcccagagccaccgtttcgttttccacctagaggaccacggctccatctccgagccccgcactcacaactgtgaactcaacccacgaaattgcgactgcagaccaacttcgtcctttccaaggtatcgccagggatgtttgctacacagccattggggagggagagggggaaaaagtcaaagggctttttcttctaaatttgatggtttgcgttcttcgtgtct

SEQ ID NO: 9654 - DNA, 505 bp, Homo sapiens
  MAP TO CHR1.3; EXPRESSED IN LUNG, SIGNAL = 1.5; EXPRESSED IN HEART, SIGNAL = 1.3; EXPRESSED IN ADULT LIVER, SIGNAL = 1.4; EXPRESSED IN BRAIN, SIGNAL = 1.4; EXPRESSED IN BONE MARROW, SIGNAL = 1.4; NT HIT: M17883.1, EVALUE 0.00e+00; EST_HUMAN HIT: BI520380.1, EVALUE 9.00e-93; SWISSPROT HIT: P04746, EVALUE 6.00e-26
tgctgaaaaggagcaagaaagaagagagagaaaccattttcctgtctgttatttttaaaggaaactagaattcacttaccccaacattgttacatctagtcaccatgtttctaaattcatcttcatttccagatcttgtgcataatttatagctaactggttggtatctttcccaccaaggtctgaaagggttgtaaattgcaacattttcatttggtggagagacctacaaattaaacagtcttcataagtaccaaattctgtcttactgtgtatcattgaatgttctagaaactaatcaatagtataaaagattcttgaatcttggtataggcagctatctcttgaaaatattaacagcacattggagggctcttggtgaagaaagattatctcagaaacaaaatataaagttgccaagaatactacatagattttccctcagaaatctcttttacttagaatacttacctgtgaagtaaaatgttgcccaagcttcacagat

SEQ ID NO: 9655 - DNA, 512 bp, Homo sapiens
  MAP TO CHRX.3; EXPRESSED IN BRAIN, SIGNAL = 1.1; EXPRESSED IN BONE MARROW, SIGNAL = 1.2; EXPRESSED IN LUNG, SIGNAL = 0.57; EXPRESSED IN PLACENTA, SIGNAL = 1.1; EXPRESSED IN HEART, SIGNAL = 1.2; EXPRESSED IN FETAL LIVER, SIGNAL = 0.91; NT HIT: gi13651268, EVALUE 2.00e-56; EST_HUMAN HIT: BG288765.1, EVALUE 2.00e-56; SWISSPROT HIT: P51810, EVALUE 4.00e-15
tggcactgagctaacaaacgatggtacagaacttgtgcgggcagaggcctgcacattttcatttattgaacctgcttactttctgcagctgtgttctgctgatgtctctggaggatgacaaatgaggtcaactgtcctggagaattccaggacaacatgtgtcactgtctgagcccgaggcatggggccgctcccagtggccgtgtacccagagagcttccctagtatttacctgcagtcactgtcttttggaacaggatggggttcgccacgagaaccagcagcaggggcaggtacatggtgacatagtgggggatggcgtggtccaggccccgctcacacctgagagaggaaaaccaaagtcattcttctcaaaagcaaagttttggctaaaagacatctacttatctggaagtcaagataagaggatgagaacaaaaagggaaatgcataaatctgctgctgactgcccaaaggaaatgtgagtcatttctcatgtctggaacaagcca

SEQ ID NO: 9656 - DNA, 587 bp, Homo sapiens
  MAP TO CHR22.3; EXPRESSED IN ADULT LIVER, SIGNAL = 4.9; EXPRESSED IN BRAIN, SIGNAL = 6.7; EXPRESSED IN LUNG, SIGNAL = 8.1; EXPRESSED IN HELA, SIGNAL = 5.1; EXPRESSED IN BONE MARROW, SIGNAL = 6.5; EXPRESSED IN PLACENTA, SIGNAL = 6.3; NT HIT: M59199.1, EVALUE 0.00e+00; EST_HUMAN HIT: BE891987.1, EVALUE 1.00e-108; SWISSPROT HIT: P17050, EVALUE 8.00e-31
gaggaggacagttggagcagctcccatcagagtcctcaaccataagcaaccagaaggggtagccctggttggggactgggcgactcctgtacctcgccaggtgttgcccccagggaggctggcagcctttctctcaggagaacccagttcctcagccctccccttccttccctccacaccctagtaccttgtgaatcctgcgtccctggatgcctaagggatcctggttgattttgatcatgagtggattctgcagaatgtccatgttctgggcggagatggtacgcaggtctgtggacatcaagaggggggctgccagcaccgtccacagggccatctgggcccgggattgctctaagctgagaccaaagttcccaatgagcagctgggggcagagaagaggagtagtcagctctcatctcctcaaggaggtagacacagggaccatccccaaacttgtagccgaggaagagcaattagggattagggaaagatggctgtatgtggaggaggcctggttcagcaaacaccattccctagccctgtggccttgggggagttaagtcaccttccatctgagcttcagc

SEQ ID NO: 9657 - DNA, 593 bp, Homo sapiens
  MAP TO CHR11.3; EXPRESSED IN ADULT LIVER, SIGNAL = 3.5; EXPRESSED IN FETAL LIVER, SIGNAL =   3; EXPRESSED IN HELA, SIGNAL = 4.5; EXPRESSED IN PLACENTA, SIGNAL =   3; EXPRESSED IN BONE MARROW, SIGNAL = 3.9; NT HIT: gi15312056, EVALUE 1.00e-121; EST_HUMAN HIT: M85534.1, EVALUE 1.00e-116; SWISSPROT HIT: Q9PJT6, EVALUE 2.60e+00
aactgctattgccacaacccaacctgggtcaactttgcaagaagggagacttgcactcttccttatgaaagagtgaggctaaccctccagccacacttcagtcaatgctgcaagcactgatggagagcttgctgtgtttgcagccctgtgtcaggagctctgcttccaggcagatgatgcttcatatcacatatgctttctttgactaacaggaatgaattcagggcatggacggacatcaagcctgtgaaaccaataaaggccaagccccagtacaagcccccagatgataagatggttcatgagaccagctacagtgctcagttcaaaggagaggccagcaagccaacaacagctgacaataaggtcattgatcgcagaagaatacgcagcctctacagcgaacccttcaaggaacccccaaaggtgagacagaccttgtgggaacccatcagcacagcctggaccataagggttaactgcagcagagcatggggtgggctgctgtcaaatctggcccagcctccacgggcacctttaaaatccctgcttcctctaaagcacactgagacccagggccatcttcaatagga

SEQ ID NO: 9658 - DNA, 554 bp, Homo sapiens
  MAP TO CHR9.3; EXPRESSED IN ADULT LIVER, SIGNAL = 1.4; EXPRESSED IN HELA, SIGNAL = 2.3; EXPRESSED IN BONE MARROW, SIGNAL = 1.5; EXPRESSED IN LUNG, SIGNAL = 1.3; EXPRESSED IN HEART, SIGNAL = 1.5; EXPRESSED IN PLACENTA, SIGNAL = 1.4; EXPRESSED IN BRAIN, SIGNAL = 1.5; SWISSPROT HIT: O15287, EVALUE 5.00e-32; NT HIT: gi4759335, EVALUE 1.00e-111; EST_HUMAN HIT: AL529494.1, EVALUE 1.00e-111
cacccaagagtcccagagagaatccaggttttccgaccaccaacccagccgcctgtccagtacatgatgatgctactgcagctggagagaaaggaggaggaaggaaggaggagaccctcagcttcaggtcactttccctattacctggctgccattcagggtctctagtaacaaggccaggtccccaagacggtcagcactcaaccagagggcagcctgcaggccaaccaggcggtgcagggcagacagcagctccggcagaaggcaggaagcacgaaggacagagtcccacagctccctgagcccctgttccaacctgggcccctgctgctcctgtgtctccagcactgtagagtatacacacacacatagacacacacacagctgaagtagcacctcatcctccatctccccacacactctggctttcctctcctgcaggaccccaaaggtcacaataataatacctcaacctggtctgaagagcacagagaagggcacctctctccatggaggtgacagatgttgtttatcctcccatctccctgcaataa

SEQ ID NO: 9659 - DNA, 576 bp, Homo sapiens
  MAP TO CHR8.3; EXPRESSED IN HEART, SIGNAL = 1.7; EXPRESSED IN PLACENTA, SIGNAL = 1.8; EXPRESSED IN LUNG, SIGNAL = 1.2; EXPRESSED IN ADULT LIVER, SIGNAL = 2.7; EXPRESSED IN BRAIN, SIGNAL = 1.7; EXPRESSED IN BONE MARROW, SIGNAL = 1.6; SWISSPROT HIT: P17097, EVALUE 2.00e-18; NT HIT: M29580.1, EVALUE 2.00e-65; EST_HUMAN HIT: AU121729.1, EVALUE 0.00e+00
gtgggtgctgactgatgatgcaggggaaggggccccaaggtgcagcctcacctagtccagccacactgctgtggttctccagcatcacttccctgtagagggccctctggccagggtccagacactgccactcctcccgagagaagtgcacagccacatcgccaaatgttaccacctcctgaaaggacacacaccagcaccccaggaatccctgggtgccagcccccttctggcgctgcctcatgacatgtctcaggcagctgccccatggggttgggcgagacgctcaccaggactcctctgcctctaatattctggggaggggcagtctcggggaggaggaaggaacccagtccatggtggtcatacaaccctcccccctcaagagcctcaattaggccctggtttgggcaggggtttgctcactaccttggggttgggggcaagggggccttcctaagcccagcaagggccaaggtagggtctgggcccagggccagtgggcagagcaggaggtgggccttcacaggacatgcgaggggaaggaggcagtcaagcttcctaccatgaggctca

SEQ ID NO: 9660 - DNA, 532 bp, Homo sapiens
  MAP TO CHR2.3; EXPRESSED IN LUNG, SIGNAL =  12; EXPRESSED IN PLACENTA, SIGNAL =   6; EXPRESSED IN HEART, SIGNAL = 8.9; EXPRESSED IN BONE MARROW, SIGNAL = 8.4; EXPRESSED IN BRAIN, SIGNAL = 9.3; NT HIT: gi4885068, EVALUE 3.00e-55; EST_HUMAN HIT: R10249.1, EVALUE 1.00e-126; SWISSPROT HIT: O77683, EVALUE 7.00e-16
tttttagtggtggaggcaggtttacacacaagaccacctggccccaggtgcttccctacttcacccaggtaacttcaggccctagtctttgaaccatacagatttcacttaagatcctggccctcttcttgaatttatgtcagacacatgtgaggcttcattcatcatatatttctaagcaggcttttgtgtgtctgtttgaattcttttccaagaattaggggaagtgggagttgggtcgtgatgtgacagtcaaaggacttagccggaaagggtagagttaatgcatgacagacaaggggactctcatctgaaaatttgtgtgtctttgtttcttctcaggttctccttactatgacaatgtccgccccctctcttaccctgattcggatgctgtgctgatttgctttgacatcagtagaccagagaccctggacagtgtcctcaaaaaggcaagtgctgggaaatgatgacacacttcagtactgggtgatgtataaatagaaacgtggggtttgttgggaagctcaaa

SEQ ID NO: 9661 - DNA, 520 bp, Homo sapiens
  MAP TO CHR11.3; EXPRESSED IN HELA, SIGNAL = 2.4; EXPRESSED IN PLACENTA, SIGNAL = 4.5; EXPRESSED IN LUNG, SIGNAL = 2.5; EXPRESSED IN HEART, SIGNAL = 4.2; EXPRESSED IN ADULT LIVER, SIGNAL = 5.5; EXPRESSED IN FETAL LIVER, SIGNAL = 3.9; EXPRESSED IN BRAIN, SIGNAL = 4.6; EXPRESSED IN BONE MARROW, SIGNAL = 4.3; NT HIT: gi14784111, EVALUE 2.00e-55; EST_HUMAN HIT: BI753338.1, EVALUE 4.00e-55; SWISSPROT HIT: Q92785, EVALUE 9.00e-16
ctatgtgttagccaaggccctgaagcttatatatctatttttcttttccacagactattccacctaaccccctaggccctcactgtcagaatttctcccttgctctagaactcaaaggggggcctacttaattagaaagtgtttggtattactttctaatactgggttagggcctgacttctatctttcttcctgccacaggattggcctccggacagctgtactcctaccctgcccggcgctggcggaaaaagcggcgagcccatccccctgaggatccacgactttccttcccatctattaagccaggtaaggcacatacttcctgagcagaggcgtggcctgctgcatggtgagagcctgctaatcactgtgatataccaggcccagtactagatcccaaatatactcaaatgaatatgatgtgattctttcctttaaggacctcagtctagaaggggagacaggtaaacagataagttatggtgccaagtgaactagggtgtcttaattcctgggc

SEQ ID NO: 9662 - DNA, 556 bp, Homo sapiens
  MAP TO CHR14.3; EXPRESSED IN FETAL LIVER, SIGNAL = 7.6; EXPRESSED IN ADULT LIVER, SIGNAL =  12; EXPRESSED IN BRAIN, SIGNAL =  15; EXPRESSED IN HELA, SIGNAL =   7; EXPRESSED IN PLACENTA, SIGNAL =  22; EXPRESSED IN BONE MARROW, SIGNAL =  12; NT HIT: gi14751406, EVALUE 6.00e-87; EST_HUMAN HIT: BE933580.1, EVALUE 9.00e-87; SWISSPROT HIT: P50281, EVALUE 2.00e-27
agagccttggcttcccttaccacaggtcttcccgggatcggggtcctgcttccaagcactctctcacctccacccagaggagcttgctgactggctttgtgcttaaataccagataaaaagctagacctcagaatttggccactttggattgaaaacatgggcagcaggcttggaggtgaaaccaaagctgctggtggggaagcagggaggctgagggaagggactcaggctgctatcgtcactgtccccatccttccaggaaatgacatcttcctggtggctgtgcacgagctgggccatgccctggggctcgagcattccagtgacccctcggccatcatggcacccttttaccagtggatggacacggagaattttgtgctgcccgatgatgaccgccggggcatccagcaactttatggcgagtagtctacacccacgcctgctccctcctctgctgcttgttccctcctggtctacgcatttcccctcttttatgccttgcagtctccgcaccgccccctgccaacctgcccctgcctctatcagctccac

SEQ ID NO: 9663 - DNA, 566 bp, Homo sapiens
  MAP TO CHR2.3; EXPRESSED IN BONE MARROW, SIGNAL =   1; EXPRESSED IN FETAL LIVER, SIGNAL = 1.2; EXPRESSED IN ADULT LIVER, SIGNAL = 1.2; EXPRESSED IN BRAIN, SIGNAL = 1.3; SWISSPROT HIT: Q00416, EVALUE 1.40e+00; NT HIT: AB052741.1, EVALUE 0.00e+00; EST_HUMAN HIT: BI826583.1, EVALUE 5.00e-76
gttgtgcctttttggagtggtacaaatttggtaagttcctaataattatgtgataaccccactaaaatataagccctgttctataagagatggatttttgtctattttgttcacttttccctgatgcataggaagttcttactacatatttattgaatgtatgactcctaagtgggtatatccaggttcttctagtagttcttgtctataaaatacaatgaaagtacaatatcatgattcttaacagtgtaaaaaatagaattactgaaattgggaatctaggattcttgcaaccttattagtgttattcttttcctttcttcaggtgacttgatggagggtgagctctattctgctctcaaggaagaagaagcatccgaatcggtttctagtaccaatttcagtggtgaaatgcacttctatgagcttgtggaagacacaaaagatggcatctggctggttcaggtatgaaaagcagtaataatttgataattcgagagccctaaaaaaattatttttaccaaaatagtatgtaccagccagtgacacttccgtgtccttgtgtc

SEQ ID NO: 9664 - DNA, 566 bp, Homo sapiens
  MAP TO CHRX.3; EXPRESSED IN BONE MARROW, SIGNAL = 1.3; EXPRESSED IN FETAL LIVER, SIGNAL =   2; EXPRESSED IN ADULT LIVER, SIGNAL = 1.3; EXPRESSED IN LUNG, SIGNAL = 1.1; NT HIT: U82671.3, EVALUE 0.00e+00; EST_HUMAN HIT: BF305562.1, EVALUE 5.00e-79; SWISSPROT HIT: Q15738, EVALUE 5.00e-24
ctaggtgcctgctctgaaccacccaaaaggatgttgcctctgtgtggatcccacaggcttctcatgccccaaaccccttttgactggggactagttagtggggagaaggtgattaaagggacaacttggtttccatcccatgtacttcggtatcattgattcttttatgagaatgtatttccatattgattatagaattataagacaaggaacctacaagccacaggttggagggtgaaaacatgagaatgccattgacctgtcaaagcaggaatgattattttgtctttctttgcttttccaggatctgtacccagctctgaaaggtgtaaacacagttttccactgtgcgtcacccccaccatccagtaacaacaaggagctcttttatagagtgaattacattggcaccaagaatgtcattgaaacttgcaaagaggctggggttcaggtaaggggaaggctggagtgagtgctgtcaggagcacgtgatggccctttctaagggtgcaaggccgtagttcttgcagtctccctgggcctaggcggggttgcttcttaaagtg

SEQ ID NO: 9665 - DNA, 564 bp, Homo sapiens
  MAP TO CHR19.3; EXPRESSED IN BRAIN, SIGNAL = 1.4; EXPRESSED IN PLACENTA, SIGNAL = 0.65; EXPRESSED IN BONE MARROW, SIGNAL = 0.98; EXPRESSED IN LUNG, SIGNAL = 1.5; EXPRESSED IN HEART, SIGNAL = 0.87; NT HIT: U81557.1, EVALUE 7.00e-59; EST_HUMAN HIT: BE396279.1, EVALUE 0.00e+00; SWISSPROT HIT: P10078, EVALUE 6.00e-48
tagggtttctctcccgtgtgaactctctgatgttgagcaaggtaggcaaactggctgaaggcttttcgacataccttacattcgtaaggtttttctccagtatgaactcgcagatgttgaactaggtgtgcattctgactgaaggctttcctacattccttacattcatagggtttttctccagtatgaatcctctgatgttgaacaagatttgatctctggctgaaggcttttccacactctatacatttatagggtttctctccagtatgaattctttgatgaagagtaagggatgaactctggctgaagactttttcacagtcattacatttcaaaagtttcttctctgcacagacactcttgggcttaatagccattaaattttttttaaagcttctcttttgtgtgtcatgtttatgtactttctcctctttggggattatcttttgtgtacaaagcagtgggttctgatgaaaacttccccaagatttatattcttgttctctctcatcaaaaaggggttcttcatgagtgattatctcttccttgaaacacgccttc

SEQ ID NO: 9666 - DNA, 505 bp, Homo sapiens
  MAP TO CHR12.3; EXPRESSED IN LUNG, SIGNAL = 0.98; EXPRESSED IN HEART, SIGNAL = 1.4; EXPRESSED IN BONE MARROW, SIGNAL = 0.94; EXPRESSED IN BRAIN, SIGNAL = 1.5; EXPRESSED IN ADULT LIVER, SIGNAL =   1; NT HIT: gi14763128, EVALUE 2.00e-99; EST_HUMAN HIT: BG696525.1, EVALUE 2.00e-99; SWISSPROT HIT: Q01064, EVALUE 1.00e-28
ctcctctttcccaaaaacccagagattaccttgagacagttgagaaccgcagtagagtaagtggggcccacagaggtgtatgttctccggaacatcctgagagagaacaatgagaagaagcccacatatgaaggtctgggagtggaggtgtggccagctggggatgtggggatgagccatgggatcatatggctggtggtcatggaagaccagggtggctgggaaagaggggcacagctaaaggcagagggaggctgagtgtgggcgagcctcaccgttccacgaagatcccagcctgcacagcgtgcacaatgcttcggaacttgggcttctcctctgctcggcggcctttggcccgggcctgctgggtgaaggtggaggccagccagtcccgcacctccgaaggcacggcatctgaccgcagctcctgcagctcgtcctccgtgtccaagatttgcctgagaccccagaaggggagtcacagaggaaagacagcaggtgcttc

SEQ ID NO: 9667 - DNA, 528 bp, Homo sapiens
  MAP TO CHRX.3; EXPRESSED IN FETAL LIVER, SIGNAL =   1; EXPRESSED IN BRAIN, SIGNAL = 1.5; EXPRESSED IN LUNG, SIGNAL = 0.88; EXPRESSED IN BONE MARROW, SIGNAL = 1.3; EXPRESSED IN ADULT LIVER, SIGNAL = 1.6; SWISSPROT HIT: Q9BZS1, EVALUE 1.00e-23; NT HIT: gi14759883, EVALUE 5.00e-75; EST_HUMAN HIT: AW409157.1, EVALUE 4.70e-02
acagtgaggatcaggatggcctctcacccacctgcctttctgcccagctgcccacactgcccctagtcatggtggcaccctccggggcacggctgggccccttgccccacttacaggcactcctccaggacaggccacatttcatgcaccaggtatggacggtgaatgggcagggaggagggagcaggtgggagaactgtggggaggggccccgagtcaggctgaaccacagcccacatgtgccccccagctctcaacggtggatgcccacgcccggacccctgtgctgcaggtgcaccccctggagagcccagccatgatcagcctcacaccacccaccaccgccactggggtcttctccctcaaggcccggcctggcctcccacctggtaacacctcagcccgtaccccatggcttcacagaacccccaagtccccagatccttggctgtgagcagtgtaggctattctgaattgcagtactctgggggtcaaaggtgtcaggtctcagaggcttggaaactccac

SEQ ID NO: 9668 - DNA, 588 bp, Homo sapiens
  MAP TO CHR1.3; EXPRESSED IN HELA, SIGNAL = 8.4; EXPRESSED IN BONE MARROW, SIGNAL = 7.6; EST_HUMAN HIT: BE881562.1, EVALUE 0.00e+00; SWISSPROT HIT: P13912, EVALUE 3.00e-54; NT HIT: gi16158281, EVALUE 0.00e+00
gagcctttggtcttggtttgtttgtctgcatttatttgcttttggctttgtggctttcggttttctttggtaacagaacggcctggatgttaggcaaaacgccgccctgggcgatggtgactttgcccagcagcttgttcagttcctcgtcgttgcggatggccagctggaggtgacgagggatgatgcgcgtcttcttgttgtcccgagccgcgttgcccgccagctccaggatctcggcggtcaggtactcgaggaccgccgccatgtagacgggcgcgccggcccccacccgctccgcgtagttgcctttgcgcagcaagcggtgcactcgccctaccgggaactggaggccagcgcgggacgagcgcgacttggccttggcgcgggccttgcctccttgtttgccacgaccagacatgactgaaatcaaggttaaacacagacaacgctcagaacctcgcaacaaaataagattgaaagagaaccaagaggaaagcctttataagctttcctaggggtggggtcaagaacgagtttttcattggtcctaatatggcttcagaaccggccaatcaagtcaagagt

SEQ ID NO: 9669 - DNA, 547 bp, Homo sapiens
  MAP TO CHR8.3; EXPRESSED IN LUNG, SIGNAL = 0.69; EXPRESSED IN BONE MARROW, SIGNAL = 0.79; EXPRESSED IN FETAL LIVER, SIGNAL = 0.59; EXPRESSED IN PLACENTA, SIGNAL = 1.1; NT HIT: X05608.1, EVALUE 0.00e+00; EST_HUMAN HIT: AV725536.1, EVALUE 0.00e+00; SWISSPROT HIT: P07196, EVALUE 6.00e-26
ctccatcaaaagatccccaggcattaagtattgataaatcccagccctgctcctgcttgcctttgtgtttagggtactcagagcaagttgtgaaacacaggtgttttttaacctcaccttgcatctgcatccccaggaaactcttggaaggcgaggagacccgactcagtttcaccagcgtgggaagcataaccagtggctactcccagagctcccaggtctttggccgatctgcctacggcggtttacagaccagctcctatctgatgtccacccgctccttcccgtcctactacaccagccatgtccaagaggagcagatcgaagtggaggaaaccattgaggctgccaaggctgaggaagccaaggatgagccccccctctgaaggagaagccgaggaggaggagaaggacaaggaagaggccgaggaagaggaggcagctgaagaggaagaaggtatgataagaaaaaacccctgcaacttcaagtgtaaactgggtgtggagatttgttaggaggtggataagacaaatgaagccttgctca

SEQ ID NO: 9670 - DNA, 569 bp, Homo sapiens
  MAP TO CHR3.3; EXPRESSED IN BONE MARROW, SIGNAL = 2.2; EXPRESSED IN LUNG, SIGNAL =   3; EXPRESSED IN ADULT LIVER, SIGNAL = 2.3; NT HIT: gi14733256, EVALUE 1.00e-129; EST_HUMAN HIT: AL046768.1, EVALUE 1.00e-129; SWISSPROT HIT: Q04637, EVALUE 3.00e-08
ctttccctccattcctctcccagactctcaccggcatcccgcccacggtcccgatcctccgtgaggctagctgccttgcgcagcccctcaggctgggagggccgttctctactccgctcctccacttccttgctgaagctccgcttggtagcaggtgtccgcgcacgatcaagccggtccccacggtcccctccccgttcactccgctctaggcggtctcctcggtctccagctttctcgcctcgttctcggctcaagctactcctggaagacagacagacaaattttcactcacttgcactgcccaggcactcatgtaattacacaacatgctgagcaactgttgggccttgttcttagcataatgagtatgccccaatctaacccaagggctccaaccaggacaggtatgaagaaatttccaacctatggcaacaaccagaacccaatcacggtacccccagtgtgaataacaaagatgtccaggaaacctcacctctgcaccacacgtctattatctgtgctttctgtgggtaccgcttgttgaagggctgagaagcgattcaaag

SEQ ID NO: 9671 - DNA, 558 bp, Homo sapiens
  MAP TO CHR9.3; EXPRESSED IN ADULT LIVER, SIGNAL = 3.3; EXPRESSED IN LUNG, SIGNAL = 7.1; EXPRESSED IN HEART, SIGNAL =   3; EXPRESSED IN HELA, SIGNAL =   3; EXPRESSED IN BONE MARROW, SIGNAL = 2.3; NT HIT: gi14745912, EVALUE 5.00e-63; EST_HUMAN HIT: AL601158.1, EVALUE 1.00e-95; SWISSPROT HIT: P04083, EVALUE 1.00e-16
ttaggcaggatatcggaagccctgattagattctatcctaagagcaacagaagatcactgacagtgttttaaatagatagactagtttattagatttgcagtttagaagttccctttttttgtaattattggacagtgtagagaccggatggtgagagatgagttaggaagttgtgacagctctctatacctaccgctaatgtagaggattatttattttcatttcattaccattcgtgtaaggtgtgtgtgtgtgtgtgtgtgtgtgtgtgtgtatagctagtttctctatagaaattatatggaagagtaagaaggcttcactttaaaattcatgtttttaatgagagtattttctgaatatgagacacttaccctcatttattttggccagggtgttggaactcgccataaggcattgatcaggattatggtttcccgttctgaaattgacatgaatgatatcaaagcattctatcagaagatgtatggtatctccctttgccaagccatcctggtatgttttgattcctctaatgccatcccaacaaatgaaag

SEQ ID NO: 9672 - DNA, 596 bp, Homo sapiens
  MAP TO CHR15.3; EXPRESSED IN ADULT LIVER, SIGNAL =   2; EXPRESSED IN BRAIN, SIGNAL = 2.1; EXPRESSED IN BONE MARROW, SIGNAL = 1.9; EXPRESSED IN PLACENTA, SIGNAL = 1.8; EST_HUMAN HIT: AU132726.1, EVALUE 2.00e-57; NT HIT: gi13653763, EVALUE 1.00e-57; SWISSPROT HIT: P29762, EVALUE 4.00e-17
aaaatcccttctgccatgtgagcgtggggacctcatagagcctaagcattccaagcctgatgagaggggagcttggcttaaagcatgtcaccgccactgggatgtattagtgtggatagtggcaggcactccagcctgtctccagcccctattccatcctctgagccactcctctttcctgccaaccatttaacaatgatttcctctgacctgaactgtcatctcgggttttctgctctaattttaatccagggcaaatggtgtctttctctgaacggccgagtgaggaggacatatttgtggggcccatctggggccccctctgggggaacttcaggattatttcagggtcaagggttccctaccaggataagttcatcgttggccagctcacgggtccagtaggttttggggccgtccccttcaagaagagtttgcgtgcagtggatcttgttctcattctcccaagtggctaaactctgcaggcgggaaaaccattagtgacattaattagagtctcagcagcgggagcagggacaacaatgagcattgaaaaataattgctctgcagagaatcaacacatggtccctgtcag

SEQ ID NO: 9673 - DNA, 521 bp, Homo sapiens
  MAP TO CHR20.3; EXPRESSED IN ADULT LIVER, SIGNAL = 1.1; EXPRESSED IN BONE MARROW, SIGNAL = 1.2; EXPRESSED IN LUNG, SIGNAL = 3.7; EST_HUMAN HIT: BG910409.1, EVALUE 0.00e+00; NT HIT: gi14771356, EVALUE 0.00e+00; SWISSPROT HIT: P40381, EVALUE 5.60e-01
cagaaagacccttcaggcagggtgaggaggagggcagatgggaaggggcaaggctggaggcaagtaacgttggcaagagatgaggggaacatgacttatggctgagccagtgtgggccgagaggacacagaagcatccagacttggtattcagtttgagtgagtgggccaggggctatagaatgaccttctcatgactttctctttgggtatcttaaatccaggacacaaatgatatcacatatgcagacctgaacctgcccaaggggaagaagcctgctccccaggctgcggagcccaacaaccacacggagtatgccagcattcagaccagcccgcagcccgcgtcggaggacaccctcacctatgctgacctggacatggtccacctcaaccggacccccaagcagccggcccccaagcctgagccgtccttctcagagtacgccagcgtccaggtcccgaggaagtgaatgggaccgtggtttgctctagcacccatctctacgcgctttcttgtcc

SEQ ID NO: 9674 - DNA, 549 bp, Homo sapiens
  MAP TO CHR11.3; EXPRESSED IN HEART, SIGNAL = 1.3; EXPRESSED IN PLACENTA, SIGNAL = 1.2; EXPRESSED IN BONE MARROW, SIGNAL = 1.5; EXPRESSED IN FETAL LIVER, SIGNAL = 2.1; EXPRESSED IN ADULT LIVER, SIGNAL = 1.8; EXPRESSED IN LUNG, SIGNAL = 1.3; EST_HUMAN HIT: AV719930.1, EVALUE 0.00e+00; NT HIT: gi14763556, EVALUE 1.00e-129; SWISSPROT HIT: P43004, EVALUE 3.00e-40
tcactgaattttcacacggcctatgagagaagtataagcatcacctccaactgacaaacaaggaagtcaaggctcatgaaagttaagtaacttgccccaaatcaggcagagggaaaaggtagagccagtactcaaccctatgtctctctgactccagaccttgacctctcaactaccacataatactgcttcctcactgaaccttttctgttctttgtccccagggacaggatgagaacttcagtcaatgttgtgggtgactcttttggggctgggatagtctatcacctctccaagtctgagctggataccattgactcccagcatcgagtgcatgaagatattgaaatgaccaagactcaatccatttatgatgacatgaagaaccacagggaaagcaactctaatcaatgtgtctatgctgcacacaactctgtcatagtagatgaatgcaaggtacatttcccattcatggatatcgagacttgtatatagtagtgcatgcttgatttctttaaaaaaaaaaaaaccgtaaagccctgcatgtat

SEQ ID NO: 9675 - DNA, 537 bp, Homo sapiens
  MAP TO CHR6.3; EXPRESSED IN LUNG, SIGNAL = 2.8; EXPRESSED IN HEART, SIGNAL = 2.1; EXPRESSED IN PLACENTA, SIGNAL = 1.5; EXPRESSED IN BONE MARROW, SIGNAL = 1.7; EXPRESSED IN FETAL LIVER, SIGNAL = 1.8; EXPRESSED IN BRAIN, SIGNAL = 1.1; SWISSPROT HIT: P28065, EVALUE 1.00e-19; NT HIT: X87344.1, EVALUE 0.00e+00; EST_HUMAN HIT: BI085592.1, EVALUE 3.00e-68
gggctgagcaaaagagtgagcaattgaaagcttcttaccagttggtggtgtgggactctggttcccctgtacatgtgggagggaggctgcagtttgagctattgcagttacagttttcaggggtcgtttagcagggatgatggtaacagtataggagaatgagacttaaaattctatcaacctttattcctaatatttccctcaggatagaactggaggaacctccacttgttttggctgctgcaaatgtggtgagaaatatcagctataaatatcgagaggacttgtctgcacatctcatggtagctggctgggaccaacgtgaaggaggtcaggtgagtttctcccaaagcactctctcctctgggcttccccactctcctgcagaggaagatggaagtcctatgtcattctagcaatgagttccaaggacactacctctgaaagcatagtactttggggatatgagataccagggcttcattgcagggtgcagagaccacttaatgtctcagtgggaaggaagggcttgatgat

SEQ ID NO: 9676 - DNA, 594 bp, Homo sapiens
  MAP TO CHR3.3; EXPRESSED IN HELA, SIGNAL =   3; EXPRESSED IN PLACENTA, SIGNAL =   3; EXPRESSED IN BONE MARROW, SIGNAL = 2.9; EXPRESSED IN ADULT LIVER, SIGNAL = 3.6; EXPRESSED IN BRAIN, SIGNAL = 4.7; SWISSPROT HIT: P56539, EVALUE 3.00e-64; NT HIT: gi14725910, EVALUE 0.00e+00; EST_HUMAN HIT: AA418663.1, EVALUE 2.00e-66
tcatggggtatggagcagtccctaaagagaaagagctcgccagcagcccctgtgaagaagtcccccggggaccagtctggcccaccaccccctgccctgccaccgctgttgccccacctggctttagacctccttccgcagcaccaccttgatgctgctgcagacctggcccagggccgcgaagagtgggttgcagaaggtgcggatgcagagtgagtagatgtggctgatgcactggatctcgatcaggtagctcttaatgcatggcaccaccgcccagatgtggcagaaggagatgcaggcgaacaggaagccccagagcagggccagtgggacgcccagcagcgtggacaacagacggtagcaccagtacttggagacagtgaaggtggtgtagctcaccttccacacgccgtcaaagctgtaggtgcccacaggctctgcgatcacgtcttcaaaatccacctgcaggggtggcaaggggaagcctcaactcacagaagccacccgcttctcaagcttttgggtgtgtgcgtgcatgtgtcagaatcccctagaggtcaggttaaccttggtggctggaccctacctgta

SEQ ID NO: 9677 - DNA, 574 bp, Homo sapiens
  MAP TO CHR8.3; EXPRESSED IN LUNG, SIGNAL = 3.9; EXPRESSED IN HEART, SIGNAL = 5.7; EXPRESSED IN BONE MARROW, SIGNAL = 3.6; EXPRESSED IN BRAIN, SIGNAL = 4.9; EXPRESSED IN ADULT LIVER, SIGNAL = 4.7; SWISSPROT HIT: Q9UPE1, EVALUE 1.00e-59; NT HIT: gi14752654, EVALUE 0.00e+00; EST_HUMAN HIT: AI038250.1, EVALUE 0.00e+00
ctactgtctggctgtgctgggatatgtaggggaaaagatttgttgcaatgaaagttgtaaaaagtgctcagcgtgatacagacacagccttggatgaaataaaattgctcaaatgtgttcgagaaagttatcccagtgacccaaacaaagacatggtgatccagctcgttgacttcaagatttcaggcatgaatgggatacatgtctgcatggtcttgggagtacttggccaccatctcctcaactggatcatcaagttcaactatcaaggcctcccacccagtacgttgtctgaagagtatcatttgacatttccttcaagggttagaatatctacacagtaagaccaagattactcatactgacataaagccgcaaaacatcttgatgtgtatggatgatgcatatgtgagaagaacggcagctgagaccactgaggggcagaaagcaggtattcctcctccttcagggtctgcagtgagtacggctccacagcagaaacctataggaaaaatatctaaaaacaaaaagaaaaaactgaaaaataaacagaagaggcaggctgagttattgg

SEQ ID NO: 9678 - DNA, 562 bp, Homo sapiens
  MAP TO CHR19.3; EXPRESSED IN BONE MARROW, SIGNAL = 0.97; EXPRESSED IN PLACENTA, SIGNAL = 1.2; EXPRESSED IN HEART, SIGNAL = 1.7; NT HIT: AF149289.1, EVALUE 0.00e+00; EST_HUMAN HIT: AL532786.1, EVALUE 8.00e-72; SWISSPROT HIT: Q92876, EVALUE 6.00e-23
ggggtacagtagaggagggcgtaacagaggaagagtcctccaggtcaactgaaactactgaagaaggtgggaccagtggaagagagaaaagtggaggagggacctaagagaaaaggaaaaccaataggaaatgaggactcctggagaagagactattaatgaggaagacagccaatgggggggaagaatgatagaaagagggaccaattaggaggcagggacgatggtaatgagatgtaagaatgagagacaaacaggaagaggggtgccaatagaaaagagggaccaatagaggatggaggacttataggggttggggggtgactggggaggatgaggggagtgcaaggcctgggctgagtctggcccatctctcccctaacaggtgatttccctgacaccatccagtgtgcatacatccacctggtgtcccgtgaggagtgtgagcatgcctaccctggccagatcacccagaacatgttgtgtgctggggatgagaagtacgggaaggattcctgccaggtgaggtgacccggatctgccacttacacagccagggaca

SEQ ID NO: 9679 - DNA, 540 bp, Homo sapiens
  MAP TO CHR1.3; EXPRESSED IN BONE MARROW, SIGNAL = 3.5; EXPRESSED IN LUNG, SIGNAL = 4.6; EXPRESSED IN PLACENTA, SIGNAL = 2.7; EXPRESSED IN HEART, SIGNAL = 3.4; EXPRESSED IN ADULT LIVER, SIGNAL = 3.7; EXPRESSED IN BRAIN, SIGNAL = 4.2; NT HIT: AF195508.1, EVALUE 0.00e+00; EST_HUMAN HIT: BG953129.1, EVALUE 0.00e+00; SWISSPROT HIT: P50342, EVALUE 3.00e-20
aggtgaaagtctccgtggtggacacagagacctgccgccgggactatcccggccccgggggcagcatccttcagcccgacatgctgtgtgcccggggccccggggatgcctgccaggtgagcctgccaggccgtgacagaggatgggggcggctgaagcccagggaggggctccccatcttctcggctcccaatgctcgccttctctgtcctcaggacgactccggggggcctctggtctgccaggtgaacggtgcctgggtgcaggctggcattgtgagctggggtgagggctgcggccgccccaacaggccgggagtctacactcgtgtccctgcctacgtgaactggatccgccgccacatcacagcatcagggggctcagagtctgggtaccccaggctccccctcctggctggcttcttcctccccggcctcttccttctgctagtctcctgtgtcctgctggccaagtgcctgctgcacccatctgcggatggtactcccttccccgcccctgactgatggcaggaatccaagt

SEQ ID NO: 9680 - DNA, 583 bp, Homo sapiens
  MAP TO CHR20.3; EXPRESSED IN ADULT LIVER, SIGNAL = 1.8; EXPRESSED IN BRAIN, SIGNAL = 1.6; EXPRESSED IN HEART, SIGNAL = 1.6; EXPRESSED IN BONE MARROW, SIGNAL = 2.2; EXPRESSED IN PLACENTA, SIGNAL = 1.5; EST_HUMAN HIT: AL557252.1, EVALUE 1.00e-64; NT HIT: M13792.1, EVALUE 0.00e+00; SWISSPROT HIT: P00813, EVALUE 5.00e-18
tggagaatcttccccacatctccccgcccccaccctatattcaggcctctcctcccctcacaacacgaagccctgaactaggagatagatggcccgggttcaagccctgcactgcctctgaccctgtgttcttagctcccatattctgccatttctctgtagaacttgaagcaatttcagtccatcacacccacatctcagaagggaaaactgaggcctaaaggcactggagagactcactaagtgtacacaatggtgagaaagacagctgtggtttcagagcaacttctctggcccccacaggctgagggacaggcctggtcctagtcatagggatcaatgctgccctaggacctgtgggttgggggcaactcacgcgatagcaggcatgtagtagtcaaacttggccaggaagtctggaagggtgagcggcttgtccatgccaatgacgttcagcagcccctctgctgtgttagctgggagggcgatccctctcctcctggaaacaaaacagtgagtggtggaccaacccggggcaggatccaggcaggcctgacaggccaggatggagcagactcaggag

SEQ ID NO: 9681 - DNA, 600 bp, Homo sapiens
  MAP TO CHR6.3; EXPRESSED IN BONE MARROW, SIGNAL = 1.8; EXPRESSED IN LUNG, SIGNAL = 1.2; EXPRESSED IN PLACENTA, SIGNAL = 1.6; EXPRESSED IN ADULT LIVER, SIGNAL = 1.8; EXPRESSED IN BRAIN, SIGNAL = 4.5; EST_HUMAN HIT: AA297070.1, EVALUE 3.00e-99; NT HIT: gi4504140, EVALUE 1.00e-120; SWISSPROT HIT: Q14833, EVALUE 5.00e-33
ccttcctctgctgtgaggagagcggccgccccgcaggctcctgcaccagggaggtcaacagtcccctcatctgcacacccacgtctgcaaaggcctcacagtcgccgttgaccggagtcacccagagcccagtgaggccatggaccaaaccacagtgctcaaagaagaggccgaggcccacctggcaacagccaggcagtcagagcctgtatcaggccccggctgggagctcctggtgggtcagtcactgtgccgggacacccccgagcctggcatgactctgcggccaggcgtttgactcaccgtcctcacgggacttctggatgaaggcctccacaccgctctcaccatagctgccctccgaggccactgtggacacatagttccacttgagggcacggacgatgtccaccatggcctgggcctggtacgtgtccgagggcaccacgcgggagaagaagtcgtagcggctgttgtcactcaggtctggcgctgtggaggcgtagctgatctggggtatctgaggggcgagaggggctgctgagggtggcgactggctccccaccctgcctagccagccccattcccctacacaccaac

SEQ ID NO: 9682 - DNA, 506 bp, Homo sapiens
  MAP TO CHR17.3; EXPRESSED IN LUNG, SIGNAL = 1.2; EXPRESSED IN HEART, SIGNAL = 1.9; EXPRESSED IN FETAL LIVER, SIGNAL = 1.9; EXPRESSED IN ADULT LIVER, SIGNAL = 1.5; EXPRESSED IN BRAIN, SIGNAL = 1.9; EXPRESSED IN PLACENTA, SIGNAL = 2.3; EXPRESSED IN BONE MARROW, SIGNAL = 1.9; SWISSPROT HIT: Q92800, EVALUE 5.00e-29; EST_HUMAN HIT: BG328297.1, EVALUE 1.00e-116; NT HIT: AB004818.1, EVALUE 4.00e-88
ggggatggaagagaggagagcatttcaaacagagtagccccactcacggtgaaggaagcagtcgtatttaaagcagcgccggcaaaaaagtgtgtggaaggagtgcagagattgctcccgctgcacagacttggcattggggccatcgatgttgggtgtgcactgagggggaagtgcattggggtctgacatctctgttagttctcgatacctatttaagaaaagagagataagagttcctccgaggaactgcctccactgaggaaatacagattgggtactgacagtagctcacctacggtctgccaagggaggatgggtgttttttataggtctggttgataagagaatggtagataactagagtgggtccaccattgtaattatgctgggttgggcaaatgttggaaagtaaggggagggaaggatttgttaagatggtgctggagttaactctccagaaaaatggcagagtaaatgttctctgcccagactcactcaaaagc

SEQ ID NO: 9683 - DNA, 584 bp, Homo sapiens
  MAP TO CHR12.3; EXPRESSED IN FETAL LIVER, SIGNAL = 1.5; EXPRESSED IN ADULT LIVER, SIGNAL = 1.1; EXPRESSED IN PLACENTA, SIGNAL = 0.86; EXPRESSED IN BONE MARROW, SIGNAL = 1.1; EXPRESSED IN LUNG, SIGNAL = 1.7; EXPRESSED IN BRAIN, SIGNAL = 1.4; SWISSPROT HIT: P45973, EVALUE 2.00e-31; NT HIT: gi16186737, EVALUE 1.00e-91; EST_HUMAN HIT: AV715075.1, EVALUE 2.00e-91
tttttggggaaaagggaaaggaagcttacctctctcttttttttagatttgatgtcatcggcactgtttgagaaattggatttcctcttgttactttctgacttctccctgggtttattattttcaccctccttcatcttcttatactttttcataaattcagaaattagctcagggcaatccaagtttttctcaggttcccaagtattgtgctccctgggtaagaaaaatgggaaaattaaaaaaaaaaggggggggtaaagaatgaggaaaaaaatccaatgccttatttcaaaaaaaacattcggacaaaaaggacagagaaaccctatgctttaaagaagataacaaatttgatcctagatttctacccaggaaaaatgaaaaaaaaaaaaaagcccacacaaagacttatttacaattgtttacagcagcattttaatagccaaaaacagaaaacaaattcaaatgttcatcaatggatggtgacatggaaaaacaaaatgtggtatatccatacaaaggaatattatccaacaacaataagcaaaatattaaaacatgctacaacttggaagaacccc

SEQ ID NO: 9684 - DNA, 501 bp, Homo sapiens
  MAP TO CHRX.3; EXPRESSED IN ADULT LIVER, SIGNAL =   1; EXPRESSED IN FETAL LIVER, SIGNAL = 0.6; EXPRESSED IN BRAIN, SIGNAL = 1.1; EXPRESSED IN BONE MARROW, SIGNAL = 1.3; NT HIT: gi14758606, EVALUE 9.00e-92; EST_HUMAN HIT: BE546038.1, EVALUE 1.00e-91; SWISSPROT HIT: O14829, EVALUE 2.00e-28
ttttcccttctcctccttccacagaatggtctcccctcagagaggaacccgtatgtttttaatggtgactttgtagatcgaggaaagaattccatagagatcctaatgatcctgtgtgtgagttttcttgtctaccccaatgacctgcacttgaacagagggaaccacgaagattttatgatgaatctgaggtaacccaggcctttagattttctcttttaaaagtttcgcactctggaaaatgctgccatatttaattcctaatagagatagaagtgagtgtattggaagagggatgagggggatctcaaggaggacttcaattcttacccctttcaccacccccattattctgctgagtatcagttgccctgaaactcccttcctatcttttcttccagttctgtccgttcttctcccttctattatgttctttctcttgctcccatgcccgaccttcacaggctaaattgtgtgttgggtaggtgtgtgaggccaggt

SEQ ID NO: 9685 - DNA, 573 bp, Homo sapiens
  MAP TO CHR19.3; EXPRESSED IN ADULT LIVER, SIGNAL = 0.73; EXPRESSED IN BRAIN, SIGNAL = 1.8; EXPRESSED IN BONE MARROW, SIGNAL = 1.8; EXPRESSED IN LUNG, SIGNAL = 1.4; EXPRESSED IN HEART, SIGNAL = 0.72; EST_HUMAN HIT: BG009446.1, EVALUE 3.00e-22; NT HIT: AF208977.1, EVALUE 0.00e+00; SWISSPROT HIT: Q62101, EVALUE 2.80e-01
gagtcactctgcttccctggccctgtagggaacggccaatgtgaccaacctaccaagtgacacacatgctgagggggcaggagctcctctgaccacatgaacgacaaagaaacagccagcagcaacctgggctacttgtcacctaagggatgggcccgggctcctcctggagcgctgggactctcaccccagctggactctagggggcagataaacacaccatctggggaaagaaaggcgtctctgccatgaaatgaagatggcctttctagaaagagaggaaacctgagcatacctgagatcgggactcataagccctggagtccctgtcgtcctctctgtccatttcaaagcttgttttcgccaccacaggaagggaaagatcccgcggaggcatccctgggaagaaaaaaggcatcaacaagaagcagggcccagtccatcctgcaggtcccaggtttgtcccactcaactatgaagccagctggggtgtgagtgtatgagagcaagtgcctttctcttctctgcattctgtggcagcctctgaggagtcccataaaaccagtggcccta

SEQ ID NO: 9686 - DNA, 579 bp, Homo sapiens
  MAP TO CHR3.3; EXPRESSED IN LUNG, SIGNAL = 1.7; EXPRESSED IN FETAL LIVER, SIGNAL = 1.7; EXPRESSED IN ADULT LIVER, SIGNAL = 1.7; EXPRESSED IN BRAIN, SIGNAL = 1.7; EXPRESSED IN HELA, SIGNAL = 2.5; EXPRESSED IN BONE MARROW, SIGNAL = 1.9; SWISSPROT HIT: P35249, EVALUE 8.00e-36; EST_HUMAN HIT: AA481159.1, EVALUE 0.00e+00; NT HIT: gi14735119, EVALUE 7.00e-62
agttactctggccctttccgttctcccaaagccttcccaggaaagtatggaacttaggtgtggaacagaaatgactgggggcacgggggccagttggcagagtgtatgtctagtctcacctagaaacatctttaataccgaacattcaattacctaggtaataccagctgagaaaattgatggagtatttgctgcctgtcagagtggctcttttgacaaactagaagctgtggtcaaggtaaagtcagcttactaactttggggaaaggaatattaagtcatcataccaaaagttttttttattataggatttaatagatgagggtcatgcagcaactcagctcgtcaatcaactccatgatgtggttgtagaaaataacttatctgataaacagaagtctattatcacagaaaaacttgccgtaagtaggtactttgcacatgtcaatggaacatttaactacctgaaggatgctaatttcttaaatttttctcgtaggaagttgacaaatgcctagcagatggtgctgatgaacatttgcaactcatcagcctttgtgcaactgtgatgcagcagtt

SEQ ID NO: 9687 - DNA, 596 bp, Homo sapiens
  MAP TO CHR1.3; EXPRESSED IN LUNG, SIGNAL = 4.3; EXPRESSED IN HELA, SIGNAL =   3; EXPRESSED IN PLACENTA, SIGNAL = 3.8; EXPRESSED IN ADULT LIVER, SIGNAL = 4.5; EXPRESSED IN FETAL LIVER, SIGNAL = 2.3; EXPRESSED IN BONE MARROW, SIGNAL = 4.5; EXPRESSED IN HEART, SIGNAL = 5.7; EXPRESSED IN BRAIN, SIGNAL = 5.5; EST_HUMAN HIT: BE295836.1, EVALUE 3.00e-99; SWISSPROT HIT: O15350, EVALUE 2.00e-33; NT HIT: AF077619.1, EVALUE 0.00e+00
cactggagagaggggctatgactcataggatctctggggccccagaaggccgctgcccctcagactctgcccagaccacttgcccctgcccaggagcatgggcccccccaggtcccactcagaactgggaaaatgggggctggtggaggcactgaaagccctccgcaggggaatggctaagcccatgctgtcagccccactctctcccagttaggcagcccccggctgtgctgtccgggatgctgggcaaagtgccaccgtgggcagaggagctgggggccctcaccttcgttgaagtccctcccgagctcgtggttggggcagcgtttcacgacgtcggtcacgtgctccgctttcttgtaaacaggcatggcccggatggcggtgcctgggggtggcggggtggacaccttgatctggatggggcatgtcttggcgatctggcagtagagtttcttcaagagcggggagtactggagtgggggagagggagcgggtgagaccagtggtcccaactgcacccctgtccaggccaccccccattgggagccacgtcctccccatgggtgccccttccacaacccccagatgaagac

SEQ ID NO: 9688 - DNA, 517 bp, Homo sapiens
  MAP TO CHR6.3; EXPRESSED IN BRAIN, SIGNAL = 3.1; EXPRESSED IN LUNG, SIGNAL = 3.3; EXPRESSED IN BONE MARROW, SIGNAL = 3.9; EXPRESSED IN HEART, SIGNAL = 4.1; EXPRESSED IN FETAL LIVER, SIGNAL =   3; EXPRESSED IN ADULT LIVER, SIGNAL =   4; NT HIT: Y15061.1, EVALUE 0.00e+00; EST_HUMAN HIT: AL574599.1, EVALUE 0.00e+00; SWISSPROT HIT: Q9Y2C3, EVALUE 2.00e-09
gagagaggctgagcaggaaggaggccaggttttgcacagcgaggaagtgcctcttctgtacttgggccgggtgcactggcgcgtgaacccctctcggacaccggggggcaggcaccgcgtatcagaggagcagtggcctcacacctggggcccctttccaccctatgcctcaggcacggggtatgtgctgtcagcgtctgctgtgcagctcattctcaaggtggccagccgggcaccccttctcccattagaggatgtctttgtgggggtaagtgcccgacgaggaggcctcgccccaacacagtgtgtcaagctggctggtgccacccactacccgctagaccggtgctgctatgggaaattcctgctgacgtcccacaggctggacccctggaagatgcaggaagcctggaagctggtgggtggctctgacggggaaaggactgcgcccttttgctcctggttccagggagtcctgggcatcctgcggtgtcgagcaatagcctggcttcagagc

SEQ ID NO: 9689 - DNA, 533 bp, Homo sapiens
  MAP TO CHR3.3; EXPRESSED IN LUNG, SIGNAL = 0.73; EXPRESSED IN HEART, SIGNAL = 0.78; EXPRESSED IN ADULT LIVER, SIGNAL = 0.68; EXPRESSED IN BRAIN, SIGNAL = 1.3; EXPRESSED IN HELA, SIGNAL = 2.3; EXPRESSED IN PLACENTA, SIGNAL = 0.48; EXPRESSED IN BONE MARROW, SIGNAL = 0.9; SWISSPROT HIT: P29994, EVALUE 2.00e-20; NT HIT: gi16164870, EVALUE 1.00e-104; EST_HUMAN HIT: AI222657.1, EVALUE 1.00e-102
taggtcccttgctggaaatgtatcattcttttttcatcttacctgtctgaattcaaacaccatctctgctgctgacaagctgggtgtccttagggaaagcaccttcatcgctctgtgttaataatcagtattttccttgtgggattaaaagggttaaaagagatgaacatgggtaaagcatttagtgcataaagtgttggtgcgtagtaagtatgcagcaaacattagctgttctgattgtgcttagtaaaaacaatattccatcttcttagggggaggttccggatccagctctatgagcaggggtgagatgagtctggccgaggttcagtgtcaccttgacaaggagggggcttccaatctagttatcgacctcatcatgaacgcatccagtgaccgagtgttccatgaaagcattctcctggccattgcccttctggaaggaggcaacaccaccatccaggtaggaaggcagcttggctactggtatggcatccctgctgagcaggaggagagtctgttctgggagccag

SEQ ID NO: 9690 - DNA, 576 bp, Homo sapiens
  MAP TO CHR19.3; EXPRESSED IN HELA, SIGNAL = 4.2; EXPRESSED IN BONE MARROW, SIGNAL = 2.1; EXPRESSED IN BRAIN, SIGNAL = 3.9; SWISSPROT HIT: P42736, EVALUE 3.20e+00; NT HIT: U63131.1, EVALUE 1.00e-100; EST_HUMAN HIT: BF848343.1, EVALUE 0.00e+00
tcacatcgaagcacttctggagttcctgggggtacagaggggctggggtcaggggctgggtccctgtggccctggggggtcccgctcagggtcttcctgctgcccgcctgggccggggagccccacctcagggagggactcgtagacctcgacggggtccaggccgccggggccgagccgcttcttgcgctcctcctcctcgtactccttcatggccttctcgatgcgcagcttggcacggccccgcacacgctccttgaaggcttccagctcgtcgttgaagccctccatgtactggcgatcggctgtctatgggggttgggcagtgctcactggacctggcccaacgctcaggagggactggggggcccaggaccctccagccacagctcctcagaggcgccccacggttccccaagtctattcctgacctacatgaagggctccccaaggcctgggctcccccgccggggacctcatctggcatttgccaaagaccacctgcttgggagccctgctctactgcagatctgagacactcatgtcctcagtgtccctgcatgggcacctctaact

SEQ ID NO: 9691 - DNA, 581 bp, Homo sapiens
  MAP TO CHR12.3; EXPRESSED IN FETAL LIVER, SIGNAL =   4; EXPRESSED IN ADULT LIVER, SIGNAL = 6.2; EXPRESSED IN BRAIN, SIGNAL = 8.2; EXPRESSED IN HELA, SIGNAL = 7.5; EXPRESSED IN BONE MARROW, SIGNAL = 7.7; EXPRESSED IN PLACENTA, SIGNAL = 6.1; EST_HUMAN HIT: BI766211.1, EVALUE 8.00e-75; SWISSPROT HIT: P34535, EVALUE 9.00e-05; NT HIT: AF351620.1, EVALUE 0.00e+00
ggtaaagagctagggtggggtggcagtgggtagaaccccagctggacagctccttccttagctctgtgattgctacagctggttctggaagccacaggcgccctcaggacaaatggggcttcttcagcacagggtagtgagtgctgagctaagcaaggacactgtccccttctctgcccaggctcgagctgtgcacctttaccctggcaattgccctgggtgctgtcctgctcctgcccttctccatcatcagcaatgaggtgctgctctccctgcctcggaactactacatccagtggctcaacggctccctcatccatggtgtgtggctcctggaagctgcttggggtagggatagggagcagagagcagatagagttgggtggactcaggcagccgtgcgccaagcagtcatatgtcgcaccttcccactctgcttctcctgcaaatggtcagtctcctgtgggttgcccctccccttactgaccacttctgctcttccttttttgctctaggcctctggaaccttgtttttctcttctccaacctgtccctcatcttcctcatgccctttgcatatt

SEQ ID NO: 9692 - DNA, 506 bp, Homo sapiens
  MAP TO CHR2.3; EXPRESSED IN HELA, SIGNAL = 2.5; EXPRESSED IN BONE MARROW, SIGNAL = 2.7; EXPRESSED IN PLACENTA, SIGNAL = 1.6; EXPRESSED IN ADULT LIVER, SIGNAL = 2.1; EXPRESSED IN BRAIN, SIGNAL = 2.8; NT HIT: gi14732823, EVALUE 2.00e-49; EST_HUMAN HIT: BF197347.1, EVALUE 1.00e-114; SWISSPROT HIT: O54889, EVALUE 5.00e-13
gggaacaaactgaaaccacctcctgctatcccccacctgcctttgctgacacctgtaaagctgccaacccgcctctgcacatacctgcatcgtgttcacagttgaacctttggctcccgactgcaccatcatctgcaggctgttctctgggaactgtctgtgtaggccaaaaggcatgcatgcctgcagattaaatcagcacagtggtcagtgacttcaccttctttaaaaatcccagaatcaggatgtaaatccaggaagcagaagcaatacagccagaatatttattcagacctaagtaccaaatcccactcgaggtaagagaaagcctcattcagcattaatccttccctggaacccctgagaggtcaaacaggtgctccctgccctgcactcgctggacttcctctgccaggatccccgaggtttcattcattggccaaagagcagcaaaaagggagaaggaaaaggagaagtagaggggctggcagatccagttcgtgatt

SEQ ID NO: 9693 - DNA, 539 bp, Homo sapiens
  MAP TO CHR13.3; EXPRESSED IN BRAIN, SIGNAL = 3.4; EXPRESSED IN BONE MARROW, SIGNAL = 4.2; EXPRESSED IN HEART, SIGNAL = 3.5; EXPRESSED IN PLACENTA, SIGNAL = 3.9; EXPRESSED IN FETAL LIVER, SIGNAL = 3.1; EXPRESSED IN ADULT LIVER, SIGNAL = 3.4; NT HIT: gi14753410, EVALUE 0.00e+00; EST_HUMAN HIT: BI838275.1, EVALUE 2.00e-16; SWISSPROT HIT: Q9Y6H8, EVALUE 8.00e-58
ctctcttcagctgctcctcctcctccctctctttcttcttctcttccatgcgcacgatgtgcagcacgtggcccaggtagatgagggtgggcgtggacacgaagatgatctgcagcgcccagaagcggatgtgggagatggggaaggccctgtcgtagcagacgttctcgcagcccggctgctgggtgttgcaggtgaagtctgactgctcatcgccccacacgtcctccgccgcggcccccagcaccaagatgcggaagatgaacagcacggtcagccaaaccttgccgatgaccgtggagtgctcctgtgcattttctaagagtcttcccagaaagctccagtcgcccattgcttcagattcctaacctgtaagaggaaaatgctcatgaacaccgggctgcaacggctgagtgccgggtccgcacccatgggcggcggcagcggcctggatggtactgggatggggctgatgggcagcttctccacaggacaggcatcgcagctccccaggacctggacgagcaggcactacacaa

SEQ ID NO: 9694 - DNA, 589 bp, Homo sapiens
  MAP TO CHR3.3; EXPRESSED IN BONE MARROW, SIGNAL = 1.5; SWISSPROT HIT: P15086, EVALUE 3.00e-23; NT HIT: gi14729501, EVALUE 4.00e-79; EST_HUMAN HIT: AW583449.1, EVALUE 6.00e-79
tgaaaatgaaggcatagccctgccctcagcttcttcaatcttatcgtttggcacagtttcagccgggtttagagttttctcctcttgccaatcatcatacggctttccttattttcctgagagatacacatcctttcacatataaagtgtagtttaccatagcatacaagcacactgggaattttgcattacagattacgtactttctgaagtattaaacacatcatttctacaaagtgaagtggtgatacgtttaataaggttggagtaattttttaaaacagcccccataacatttatgatccagtttactagaaaattggcctactcaaaatattttgcacagtgaaacatttgtaatgaaaaaagaaactggcaattttttaaagctccttcctagatttaaagttttttttcactgctgtttgcacatttcagatcctgctgctgggggctctgacgactgggcttatgaccaaggaatcagatattccttcacctttgaacttcgagatacaggcagatatggctttctccttccagaatcccagatccgggctacctgcgaggagaccttcctggcaatcaa

SEQ ID NO: 9695 - DNA, 579 bp, Homo sapiens
  MAP TO CHR2.3; EXPRESSED IN HELA, SIGNAL = 2.3; EXPRESSED IN LUNG, SIGNAL = 1.5; EXPRESSED IN BONE MARROW, SIGNAL = 1.7; EXPRESSED IN HEART, SIGNAL = 0.88; EXPRESSED IN ADULT LIVER, SIGNAL = 1.8; EXPRESSED IN BRAIN, SIGNAL =   2; NT HIT: U73737.1, EVALUE 0.00e+00; EST_HUMAN HIT: AU119474.1, EVALUE 0.00e+00; SWISSPROT HIT: P52701, EVALUE 1.00e-56
atttgatgggacggcaatagcaaatgcagttgttaaagaacttgctgagactataaaatgtcgtacattattttcaactcactaccattcattagtagaagattattctcaaaatgttgctgtgcgcctaggacatatggtatgtgcaaattgtttttttccacaaattcggttttttgagagggcacttctcttgctagcacatgtatcgctaatatttttctttcttaaggcatgcatggtagaaaatgaatgtgaagaccccagccaggagactattacgttcctctataaattcattaagggagcttgtcctaaaagctatggctttaatgcagcaaggcttgctaatctcccagaggaagttattcaaaagggacatagaaaagcaagagaatttgagaagatgaatcagtcactacgattatttcggtaactaactaactataatggaattataactaactgaccttaagtttcaaagaaacagtaaaaggggaagggatgatgcactatgaaaaaacaaaaaaacttttttttttttttttttaattttaagggaagtttgcctggctagtg

SEQ ID NO: 9696 - DNA, 577 bp, Homo sapiens
  MAP TO CHR1.3; EXPRESSED IN BRAIN, SIGNAL = 1.6; EXPRESSED IN BONE MARROW, SIGNAL = 1.4; EXPRESSED IN PLACENTA, SIGNAL =   1; EXPRESSED IN LUNG, SIGNAL = 0.68; EXPRESSED IN HEART, SIGNAL = 1.4; EXPRESSED IN ADULT LIVER, SIGNAL = 1.4; NT HIT: gi14733736, EVALUE 0.00e+00; EST_HUMAN HIT: BI836812.1, EVALUE 0.00e+00; SWISSPROT HIT: P47711, EVALUE 1.00e-08
gccctttatagtggctgctgcggttgtagctccgagactatattggagggggtgaggaaggacaagggggccagcaggtgggggacagcggcagacccctcccccaccccgatgctttggtccaaacaccacctctgagggctcccttgcttgggcttctcccaagattcccatccaccctcagaggacacagctactgcctcaactgggaggattcggaaagcttcagaaggtcagaaggcattggtagagggttccgggggaggctgggactacctccccccggagtgtttgaaaagccaggctggttcaggttagatactgaggtggggatgccagagctccatgctgaggaacagggtagagggtgtgggcttctagcacccaggggtctgcccccggcagtggggccgccagtagaaacgcagtcgcttctggtaggtgtccaggttgcgcttcaggcagaaggccacctccttgtcacaggcacacagctgctgctcacaccagcttcccttgtcagctgtggacggagaagggggagctatgtgtttgtccttttccgagacagaggcag

SEQ ID NO: 9697 - DNA, 559 bp, Homo sapiens
  MAP TO CHR1.3; EXPRESSED IN ADULT LIVER, SIGNAL = 0.89; EXPRESSED IN LUNG, SIGNAL = 0.92; EXPRESSED IN PLACENTA, SIGNAL = 0.65; EXPRESSED IN HEART, SIGNAL = 1.2; EXPRESSED IN BONE MARROW, SIGNAL =   1; SWISSPROT HIT: P44893, EVALUE 9.10e+00; NT HIT: gi5032156, EVALUE 1.00e-104; EST_HUMAN HIT: AW387767.1, EVALUE 1.00e-101
ttgaaagcctcaaaacaaagacataattctatacccaagtaggcacttaatacaagttatgaccagttgaaataatagcatcttttacctttgatcacgcctaaacacagttccaaatatacaagcctcaaggataagttcgctataatttttagcacttgataaagatccttgggacacatttgaagcagacactatccaagactgacagcagtaacttatcagtgtattgaagactccagtctttatagcagacatttcaattatcttgtacataatctggaataaaatacaaccgtcattttatccttgatttagtttttaaaaaatcagtgctgctaaaaactgttacttagtttcaacataatcatgaacagtctaaaaactgttaaattcattactgttagaataactttgcgagatgatcaataatcagagaatgctatttcatctcttgataataaaaataaataaaattttactgatagtgatattcatccaggactcttcaagagaaacaactgccaaagcagtagaatcaaaggggaaaaacacctca

SEQ ID NO: 9698 - DNA, 518 bp, Homo sapiens
  MAP TO CHRX.3; EXPRESSED IN BRAIN, SIGNAL = 0.79; EXPRESSED IN BONE MARROW, SIGNAL = 1.1; EXPRESSED IN PLACENTA, SIGNAL = 0.77; EXPRESSED IN FETAL LIVER, SIGNAL = 0.67; NT HIT: gi14767920, EVALUE 1.00e-54; EST_HUMAN HIT: BF087701.1, EVALUE 3.00e-03; SWISSPROT HIT: P48038, EVALUE 7.20e-01
tagctcttcgagcttcagccctttcaccttgcccaactcccacgccgactccagctaagaaagatggggaggaaactggagaaggagggccagggaaagagagacacccaggaccctgggccctgaattcccccggccctcatagtcacccacaggtgccactgcctggctgttgccattatcctgatgtgtcctgccctccacccaaagttgatctggctcccccttctcaccttatttttggagagattcagggtcttgactttgggagccttctctgtaatgtcagaaaggccatccagctggtacagtttgttgttgcacaagttcaaagacaacagctttgggtcaagaagagttagagtggcggctactatcttgggcctcagagacaaatctgccctccaccttatcccttccacccctctaactaaataccagcactgagcctaaggcttcacctcagggaaatttctttcagtgatcttcagggtggcagccatgcagtttcttcgatt

SEQ ID NO: 9699 - DNA, 600 bp, Homo sapiens
  MAP TO CHR16.3; EXPRESSED IN ADULT LIVER, SIGNAL = 5.3; EXPRESSED IN BONE MARROW, SIGNAL = 1.1; NT HIT: gi14777242, EVALUE 0.00e+00; EST_HUMAN HIT: AI913581.1, EVALUE 0.00e+00; SWISSPROT HIT: P29372, EVALUE 5.00e-58
ctctcgtgtcctggaggaagagctagctccagacatgggttgatcacctagaggagctctggctaaggcacagttttctagaaataaaacatttattcggtttttaaacaattaaaaaatcttgtctgggcaggccctttgctcaggcctgtgtgtcctgctcagccactctgtcgaccacactgacccaggggctgccccggacatagaagcggaggggtttccgggcccactcccctgcatggccgacgcccacccgggctgctgccactacagccggctcactgggctccaggggaccacgctccagccatacagcttcatcctgtgccaggtccctctggtcaaagctcttgttgatggccagggcctggcacagcttggaggggccactgcagagctcgcggtccttgaggacacggctggcggtgcctttccggagggtgctgcgaagctgacgcatggtctccagaccttccaggggctccagtgctcgcagcaagacgcaagccccgtcccctgtgggacggacagtttggaagtggagcctccctaggctcctgtcctctctgccctagtacacatccagacatcctgtgc

SEQ ID NO: 9700 - DNA, 559 bp, Homo sapiens
  MAP TO CHR22.3; EXPRESSED IN BONE MARROW, SIGNAL = 0.97; EXPRESSED IN FETAL LIVER, SIGNAL = 1.5; EXPRESSED IN BRAIN, SIGNAL = 0.78; EXPRESSED IN ADULT LIVER, SIGNAL = 0.95; NT HIT: Y18051.1, EVALUE 3.00e-92; EST_HUMAN HIT: BI518664.1, EVALUE 4.00e-92; SWISSPROT HIT: O75791, EVALUE 4.00e-29
tgcccagtgatgagtgagtcatccatatctacatctcctgctcaaagagaactccaccatcccagatgtgagcagcctggaggtggtgacattatcaccgtgtaacatacaattttgttttgccttgatctccaggcatgaggatgacgttcaacacttcaaggtcatgcgagacaacaagggtaattactttctgtggactgagaagtttccatccctaaataagctggtagactactacaggacaaattccatctccagacagaagcagatcttccttagagacagaacccgagaagaccaggtatgctccagatccagtcgaccccaatctagagattttaggcagcctgagttctcacatgaaccaccaggaaaaatgcataggatgggtagatcctctgagtatactgaaagacagagctcagagctctgaggtcagatctcaacttaacacttcctagtcgtgtgactttggaaagttctctgcgcctcagtttcctcatccataaagtagggacaatggtaatatctacctcccagaatggctgtgaaggtt

SEQ ID NO: 9701 - DNA, 581 bp, Homo sapiens
  MAP TO CHR3.3; EXPRESSED IN BRAIN, SIGNAL = 1.4; EXPRESSED IN BONE MARROW, SIGNAL = 1.6; EXPRESSED IN PLACENTA, SIGNAL = 2.6; SWISSPROT HIT: P19836, EVALUE 9.00e-22; NT HIT: gi16158770, EVALUE 4.00e-76; EST_HUMAN HIT: AI917256.1, EVALUE 0.00e+00
tcatagcctttcgcaggttcccaagacatcatccaaccgaagaagagagaggaagtttaagagacaccgttttccatttattgacagaaatactgcactatataaattactcatttatttagttggctgtatggctttatacgaatgtgttggtaccagaccgtaacggcagaaactgtctgtttcattctttttgtgaacagttaacatagtggtaattcattcactgaacttttgggagtgatcatcaaagccaactgcaaagccagttcagctgagatggagtgggaggtgatatgtctcctacagagtcagggaactctggggtaaggctggaactcacgttgataaagctgacattgagctcctttgctgtgtagcccctctgcaggttccgcctcgcatacacatcataatcccgcacaattcgggtgatgatgtctgatgtggagataccttctgtcctctgtgttggagcaaacatgcctaactcagaaacacatacagacaaacactgtgaggttctggttagctcaggtattaagactaaatggaaattgggggcaacattcctttccttt

SEQ ID NO: 9702 - DNA, 546 bp, Homo sapiens
  MAP TO CHR19.3; EXPRESSED IN FETAL LIVER, SIGNAL = 0.88; EXPRESSED IN BRAIN, SIGNAL = 0.9; EXPRESSED IN BONE MARROW, SIGNAL = 1.2; EXPRESSED IN LUNG, SIGNAL = 1.1; EXPRESSED IN HEART, SIGNAL = 1.4; EXPRESSED IN PLACENTA, SIGNAL = 1.1; NT HIT: AF164623.1, EVALUE 0.00e+00; EST_HUMAN HIT: AA436049.1, EVALUE 0.00e+00; SWISSPROT HIT: Q9UBX7, EVALUE 5.00e-26
acaccatttccagctccaaccatccccaaactcgtttttgagcctaaccccatcctttatcccacccataatcccagctttatcgctaaacctatcacctttcccagtgcctacccatcctgtctcggccccactcctaagcaccgtccccacctcctccctggctaacaccatgctcaacgctttctctgaccgacattctctctccccgtgcccagggtgactccgggggccctctggtctgtaaccagtctcttcaaggcattatctcctggggccaggatccgtgtgcgatcacccgaaagcctggtgtctacacgaaagtctgcaaatatgtggactggatccaggagacgatgaagaacaattagactggacccacccaccacagcccatcaccctccatttccacttggtgtttggttcctgttcactctgttaataagaaaccctaagccaagaccctctacgaacattctttgggcctcctggactacaggagatgctgtcacttaataatcaacctggggttcgaaatcagtgaga

SEQ ID NO: 9703 - DNA, 501 bp, Homo sapiens
  MAP TO CHRX.3; EXPRESSED IN PLACENTA, SIGNAL = 2.1; EXPRESSED IN HEART, SIGNAL = 2.4; EXPRESSED IN BONE MARROW, SIGNAL = 2.7; EXPRESSED IN FETAL LIVER, SIGNAL = 3.7; EXPRESSED IN BRAIN, SIGNAL =   2; EXPRESSED IN ADULT LIVER, SIGNAL = 2.6; NT HIT: gi14768302, EVALUE 1.00e-103; EST_HUMAN HIT: BF880349.1, EVALUE 0.00e+00; SWISSPROT HIT: P51617, EVALUE 3.00e-33
agggctgaaggagttgtgtggggaagcgagggggaaaggctggagaagtggtgagggttatctgatggccttccagggtccctgccagggtgcgacactcacctccttcagcctcttcacagcatacaccgtgttcctcatcaccgcccggtacacgcacccaaagccaccctccccgatcttgagctcctccgagaagttgtgggtgccccgggaaatctcacagaggggccagcaaaacggaaaggggcgggctccctgcaggagggacactgagctctctgggcctggctgtgggaagagagcctggatcaggtggggtccctgtctcttcccttctgcccaaggctccaggctctccccaccacagctgcctcccagctgacccagcttggctgactggggctctgcgctacatcaaaggctgaattccttcctccttgtctcgaatcttccctggggggcaggggacacctaccttggtagaagaaggggctggag

SEQ ID NO: 9704 - DNA, 524 bp, Homo sapiens
  MAP TO CHR22.3; EXPRESSED IN BONE MARROW, SIGNAL =   2; EXPRESSED IN FETAL LIVER, SIGNAL = 2.3; EXPRESSED IN ADULT LIVER, SIGNAL = 3.3; EXPRESSED IN BRAIN, SIGNAL = 3.2; NT HIT: X52150.1, EVALUE 0.00e+00; EST_HUMAN HIT: AI459538.1, EVALUE 1.00e-110; SWISSPROT HIT: P15289, EVALUE 3.00e-20
tcactcagttcgccatcaaggttggggtggtggggccagggttccaaggagagggcctgcggactgaccgggagcgatatgacctggccagaaggccaaggcaggctctcggacaccgccctcgtaggtcgttccctttccacaccgcaagagaccggagcagccgcctcgggacatacgcatggtctcaggtctgggacacaggaggcgctcatgagccatggagccacagcctctgagccaccgagggtgaccagtggccccacacctctaagtcacaaagcttgcccggaggtgcccagcatgagcccggcacctcccaggcctaccaagaccagctctctgtgcactgtgtctcctgactacaccttgggcccctgcaacgtggccagcatctcctggcaccccctcacccactatgttcttggcaagcagctgaactgcaaggcctccagggccctggcccgtgacagggccggagcacccagctgccctgctggcatacccattgtctgcagtgaaga

SEQ ID NO: 9705 - DNA, 522 bp, Homo sapiens
  MAP TO CHR4.3; EXPRESSED IN FETAL LIVER, SIGNAL = 3.9; EXPRESSED IN BRAIN, SIGNAL =   3; EXPRESSED IN LUNG, SIGNAL = 4.1; EXPRESSED IN HELA, SIGNAL = 3.6; EXPRESSED IN PLACENTA, SIGNAL = 2.5; EXPRESSED IN BONE MARROW, SIGNAL = 3.4; EXPRESSED IN HEART, SIGNAL = 2.8; SWISSPROT HIT: Q08288, EVALUE 2.00e-05; NT HIT: gi8923397, EVALUE 2.00e-99; EST_HUMAN HIT: AI887937.1, EVALUE 3.00e-99
aaggaagaagtcagcagaatggattcaatttttaaatacacaaatgttcatttcacaagcttgactttgtcctttaataacttaaaggtagggttcttgctgattttcttgttaaagatgaccaggagttcctcttcggatctgtgatgctcatctgtcactgtgtagtactgagctaaaaccttcacaaagaaaaacatcaaatgagtgtatttgacctggaaaattatcttaaaatgttctgtctttaacccagaaatagaacaacaggaaaaaataaaagaaacccaggagcaagcgacaccggcgtgctctccttggaaaacccaggcggcagccacgtgcaggggtttggctatgtgtgagtcatcctgagaaacaaagtgaaataaaggagaagaaaccactgctctgggataggcaaaagagagcaaatatctagaaaataatttccaaacaataaaaattaaataaatggagcctctcttcaaagtcttataaacaagcccaaaatctaggcac

SEQ ID NO: 9706 - DNA, 551 bp, Homo sapiens
  MAP TO CHR21.3; EXPRESSED IN BONE MARROW, SIGNAL = 0.92; EXPRESSED IN HEART, SIGNAL = 0.79; EXPRESSED IN PLACENTA, SIGNAL = 0.67; EXPRESSED IN ADULT LIVER, SIGNAL = 0.9; EST_HUMAN HIT: AW015600.1, EVALUE 3.00e-06; SWISSPROT HIT: P48051, EVALUE 1.00e-46; NT HIT: S78685.1, EVALUE 0.00e+00
ggggagaagagaagggtttgcccagctagggcactaaactttggattcattctccaggtttgccacatcaccatttctttctgtttgctcttcgaggttcttttcttcctcttcagtctccagttctgcatgttggttgagtttgctggatacagaccaactcaggggcagctctgccctgctggctaactcggccagctctttggcactaagggatggggtgctggtctcataggtctcatggaagctgttgtagtcaacttcgtagaacccgtcctccagggtcaggacaggtgtgaaccggtaaccccacaggatctcactggtgatgtaggagcttcgagcttggcatgtcatccctgcagagagaagaatggaggctttagcatatgtaagtgtgggctttccatggccaaggagtcacagagagccaggaggagtactgcatgcagctgttgagactgacctgcatacgatgccacacttagtaggtgtcattcatgttgtagacacatgctaatgtgccatggagattccaggcctcttaaggg

SEQ ID NO: 9707 - DNA, 594 bp, Homo sapiens
  MAP TO CHR20.3; EXPRESSED IN LUNG, SIGNAL = 4.4; EXPRESSED IN ADULT LIVER, SIGNAL =   2; EXPRESSED IN BRAIN, SIGNAL = 1.7; EXPRESSED IN FETAL LIVER, SIGNAL = 2.2; EXPRESSED IN HEART, SIGNAL = 2.7; EXPRESSED IN HELA, SIGNAL = 2.8; EXPRESSED IN BONE MARROW, SIGNAL = 1.7; NT HIT: AF040249.1, EVALUE 0.00e+00; EST_HUMAN HIT: AA182439.1, EVALUE 0.00e+00; SWISSPROT HIT: P12643, EVALUE 2.00e-46
tgagcttcggtcggtcttacctagactcgtgagtgtgccaagccaggagggcatcctggaggaggcacgccagccaaatgggagaccgggccgcgggggcgcgaggggggaggactgggcggggaactcgggtgactcacgtcggtcctgtccgcaggtcgaccatggtggccgggacccgctgtcttctagcgttgctgcttccccaggtcctcctgggcggcgcggctggcctcgttccggagctgggccgcaggaagttcgcggcggcgtcgtcgggccgcccctcatcccagccctctgacgaggtcctgagcgagttcgagttgcggctgctcagcatgttcggcctgaaacagagacccacccccagcagggacgccgtggtgcccccctacatgctagacctgtatcgcaggcactcaggtcagccgggctcacccgccccagaccaccggttggagagggcagccagccgagccaacactgtgcgcagcttccaccatgaaggtgaggcatggagcagggcgtgggggcggggagtcaccctgcaaagccctccaccgtgggcagactgcagccgtccctgtagag

SEQ ID NO: 9708 - DNA, 574 bp, Homo sapiens
  MAP TO CHR1.3; EXPRESSED IN FETAL LIVER, SIGNAL = 2.2; EXPRESSED IN ADULT LIVER, SIGNAL =   1; EXPRESSED IN BRAIN, SIGNAL = 1.6; EXPRESSED IN BONE MARROW, SIGNAL = 1.5; NT HIT: U04636.1, EVALUE 0.00e+00; EST_HUMAN HIT: BE673090.1, EVALUE 0.00e+00; SWISSPROT HIT: P35354, EVALUE 5.00e-75
gactcctttctccgcaacaggagtactgacttctgttacagaagatgttaagtaacataaggagtttaatataaatattattaaataattaaattaatagacatggttcatataaataaataaatatgatcattagacttctacagttcagtcgaacgttcttttagtagtactgtgggattgatatcatctagtccggagcgggaagaacttgcattgatggtgactgttttaatgagctctggatctggaacactgaatgaagtaaagggacagcccttcacgttattgcagatgagagactgaattgaggcagtgttgatgatttgaaaacccacttctccaccaaaagtgcttggcttccagtaggcaggagaacatataacattacccataagtcctttcaaggagaatggtgctccaacttctaccatggtttcaccaaagatggcatctggccgaggcttttctaccagaagggcaggatacagctccacagcatcgatgtcaccatagagtgcttccaactctgcagacatttccttttctcctgtgaaggcgatgaagacagaga

SEQ ID NO: 9709 - DNA, 591 bp, Homo sapiens
  MAP TO CHR6.3; EXPRESSED IN LUNG, SIGNAL = 1.7; EXPRESSED IN HEART, SIGNAL = 0.9; EXPRESSED IN PLACENTA, SIGNAL = 1.1; EXPRESSED IN BONE MARROW, SIGNAL = 1.6; EXPRESSED IN FETAL LIVER, SIGNAL = 1.9; EXPRESSED IN BRAIN, SIGNAL = 1.1; EXPRESSED IN ADULT LIVER, SIGNAL = 1.1; NT HIT: AF100544.1, EVALUE 2.00e-68; EST_HUMAN HIT: BI025355.1, EVALUE 3.00e-68; SWISSPROT HIT: O02812, EVALUE 2.00e-18
tggctgctttcctcatacaaccacagagttgagtagttgtgacagaggtcttacttacaaagttgaaaatattactatctggcccttcattgaaaaaaatttgctgacttctgatttagatacatagaaaagacaaggagaaaacaccaaaaataataacagaagctttatttggataatgggataataggtcattttgctttttatctttatgcttttttttggtattttgttatagaccctttaatttggaaatagccttataaataccccaaaataatatttagaacagctttttaatggtgggttttttcccttttttctccttagtgctgcttttgacacaaaaacggggttacgtgtggcagtgaagaagctctccagaccatttcagtccatcattcatgcgaaaagaacctacagagaactgcggttacttaaacatatgaaacatgaaaatgtaagttattcattcaaggaagaatacattttgatcttgaatagactggggaaaaatgttttaattactgcagatggaaatacgctggagtgcatcaaacgttggtccctgctccttgtcctggggtgtta

SEQ ID NO: 9710 - DNA, 556 bp, Homo sapiens
  MAP TO CHR6.3; EXPRESSED IN LUNG, SIGNAL = 2.1; EXPRESSED IN HEART, SIGNAL = 1.6; EXPRESSED IN BONE MARROW, SIGNAL = 1.1; NT HIT: gi14726045, EVALUE 0.00e+00; EST_HUMAN HIT: AA256096.1, EVALUE 0.00e+00; SWISSPROT HIT: P33449, EVALUE 6.90e+00
aacaaagttgcctgattccgcgcaggtgcacaggccccggatgtacacccggaaaggggagtgtggctgtagaatcatccatccgtctacagctaaaacaatttgccaataaagtacatgtttttcctaagccaaaaataaatacgttaacagaaaaatgatttaggatatagcttgaatgcttaaatatgtgcacctttacaaacctctcagtgtattcttggagttcttgaaatgttgttttaatatttgttgccagtaatgttctttcttcacagccgctccaggaattatgaagttctgggcctttctcagaagactgtaatgtacctgaagtttttgaaatattgcaaacccacagagtttaggctggtgctgccaaaaagaaaagcaacatagagtttaagtatccagtagtgatttgtaaacttgtttttcatttgaagctgaatatatacgtagtcatgtttatgttgagaactaaggatattctttagcaagagaaaatattttccccttatccccactgctgtggaggtttctgtacctcgcttgg

SEQ ID NO: 9711 - DNA, 530 bp, Homo sapiens
  MAP TO CHR20.3; EXPRESSED IN LUNG, SIGNAL = 1.6; EXPRESSED IN PLACENTA, SIGNAL = 0.96; EXPRESSED IN BONE MARROW, SIGNAL =   1; EXPRESSED IN BRAIN, SIGNAL = 0.73; EXPRESSED IN FETAL LIVER, SIGNAL = 1.3; EXPRESSED IN ADULT LIVER, SIGNAL = 0.94; SWISSPROT HIT: O75362, EVALUE 2.00e-67; NT HIT: gi11421959, EVALUE 0.00e+00; EST_HUMAN HIT: BF237807.1, EVALUE 0.00e+00
cctggacttgactctggctctccaaaccccattcctggccagcgttgtctggagatgggaatagagagggggagacggggagacagacagacacaggcggaacagcacgggacggagacagggcagcttacccagatggattccttcgggaagcccatcctcagatccgtcttcagaaccaccttcccctcgatccacggctccattttcatccagaggggcggcgaggtcaggagaacacgtccccggctgcctcccgtccacagacatggtgggcgactccgcgccggccctccggtccttcttgtggaccctggagtgcaagaccagctggtggtaggttctgaaagctttgccgcactcggagcagtgagtgggcttctccttgctactgggtaacttgggatccgcgtccacggagggcgcttcgccgtgggagtgtttgcacttctctttctcttgcgagaggcctgcacaactgcccttatttgtttctccaagctccttctcggaactcgaatcgtcgttgt

SEQ ID NO: 9712 - DNA, 558 bp, Homo sapiens
  MAP TO CHR1.3; EXPRESSED IN HEART, SIGNAL = 2.5; EXPRESSED IN ADULT LIVER, SIGNAL = 2.4; EXPRESSED IN BRAIN, SIGNAL = 2.7; EXPRESSED IN PLACENTA, SIGNAL = 2.8; EXPRESSED IN BONE MARROW, SIGNAL = 2.4; NT HIT: Y10658.1, EVALUE 3.00e-76; EST_HUMAN HIT: AL521322.1, EVALUE 5.00e-76; SWISSPROT HIT: Q08211, EVALUE 4.00e-22
gtaccagtagtggggatgggaaaagttggatcaactgtttgcagttttataagcacgtttagaaagcagagcaattcttgattgcttcaaatcaaagtgcttaaatacaaatggagagcttgttcatggatattacagaatcagattttaatgtgaaccttctgttatatgagaaaaaaaaatctgagccacttaaattatttttggatacaacacaatttaagctttttcagtagctcatgcattctcttatttttatatttatatttatagagtatatttcctaaagttagctgtttgttgtctcttaatggactactgaattacgactttttaaaatctcagaattacccaggtcagtctcttagtacttttttttttttttaaaggttcaggtggaaggttataattacactggcatgggaaattccaccaataaaaaagatgcacaaagcaatgctgccagagactttgttaactatttggttcgaataaatgaaataaagagtgaagaagttccagcttttggggtaagtacctatggcgaagcacttgaga

SEQ ID NO: 9713 - DNA, 599 bp, Homo sapiens
  MAP TO CHR1.3; EXPRESSED IN BONE MARROW, SIGNAL =   1; EXPRESSED IN FETAL LIVER, SIGNAL = 0.6; EXPRESSED IN BRAIN, SIGNAL = 0.78; NT HIT: U04636.1, EVALUE 0.00e+00; EST_HUMAN HIT: AA296431.1, EVALUE 4.00e-24; SWISSPROT HIT: P35354, EVALUE 2.00e-54
tccgtggcagaaattctaaagttactgactagtcttttgttttggttttcaataataatgcttaccctgccagcaatttgcctggtgaatgattcaacaaactgggtaattccatgttccagcaatatagagttgttgtagataaactgttgatagttgtatttctggtcatgaatttgaaaggtgtcaggcagaaggggatgccagtgatagagggtgttaaattcagcagcaatacgattttggtactggaattgtttgttgaaaagtagttctgggtcaaatttcagtttgaagtgatagccactcaagtgttgcacataatcttcaatcacaatcttaatagtctctcctatttgcacaaaataaataataaaaacatttattgcatctgatcacaagctttcaagcaactggaatgcaatttttaaaatttgctattccttcatttctgttttcttccttgtcagtatcaaaagatagctattttatcagtcatgcttacatatttaatgtatatagaatgtgtgagttttcatttaccacatcttgtcatttactcaaaacataacaaagatagcacactaattttccctggg

SEQ ID NO: 9714 - DNA, 587 bp, Homo sapiens
  MAP TO CHR3.3; EXPRESSED IN BONE MARROW, SIGNAL = 1.7; EXPRESSED IN ADULT LIVER, SIGNAL = 2.1; EXPRESSED IN PLACENTA, SIGNAL = 1.5; NT HIT: AF277168.1, EVALUE 0.00e+00; EST_HUMAN HIT: BG677169.1, EVALUE 1.00e-120; SWISSPROT HIT: O60683, EVALUE 9.90e-02
cacaaccaaagccttccttcctgtctgtgcttcagatctgcatgttgacgttcgaacacgagatggaaaaggcctttgccttccaggcaagccaggacaaagtgtgcagtatctgcatggaagtgatcctggagaaggcctctgcttctgagaggagatttgggattctctccaattgcaatcacacgtactgtttgtcctgcatccggcagtggcggtgtgccaaacagtttgaaaacccaatcattaagtaagtacagccaggggtcttagctgtgggagctaggagaatgtttgatttgagactttattccgtccacttttaagccctccgttaccctcaagagtaactggtgagttctggcccctggctgcatgaacttcagcaagtcatttactcttcctgagcctaagtgcctgttcctataaaagatgggcaacaattcctaccaagctttctgggtgttggggaggaactcagcaaagatgatctgtgtaaaaaggtgttaaatggcactgacctgttttcatctcctagccttgtgtttgaaatccagtagtacctgcctgtagcccagttgcctgtt

SEQ ID NO: 9715 - DNA, 509 bp, Homo sapiens
  MAP TO CHRX.3; EXPRESSED IN HEART, SIGNAL =   1; EXPRESSED IN BRAIN, SIGNAL = 1.2; EXPRESSED IN LUNG, SIGNAL = 0.94; EXPRESSED IN BONE MARROW, SIGNAL = 1.4; NT HIT: gi14764752, EVALUE 1.00e-107; EST_HUMAN HIT: BG256074.1, EVALUE 1.80e-01; SWISSPROT HIT: P13638, EVALUE 1.00e-16
gggaggactactgaacgcacggccttcccctgtagcacctgtctaacataacctgttgccactcacacatgctttaggttataatgacagtcttcaagaggaaatgaatgtagattgtcccccggggcagtacttcatccaagatggcaatgaggatgaggacaagaaggcctgccaatttaagcgctccttcctaaagaactgctctggtctggaggacccaacttttggatactctactggacagccctgcatccttctaaagatgaaccgggtatattggcttttcatatctggtggtgataagcgaatgaactagataggagggctctggccactccatttgtcttggtctctgtcttcacacaccacaggtttggccatttttctgacagtatcataaatacaaataaccagataaacctatcaatttcttcccccccgcccaccgagcacttcctatggccattcttctccctcacccccaaacctgtcacttgatggccttt

SEQ ID NO: 9716 - DNA, 540 bp, Homo sapiens
  MAP TO CHR11.3; EXPRESSED IN BONE MARROW, SIGNAL = 1.9; EXPRESSED IN LUNG, SIGNAL = 1.8; EXPRESSED IN FETAL LIVER, SIGNAL = 1.2; EXPRESSED IN ADULT LIVER, SIGNAL = 1.5; EXPRESSED IN BRAIN, SIGNAL = 1.7; NT HIT: gi14772151, EVALUE 1.00e-75; EST_HUMAN HIT: BI255861.1, EVALUE 2.00e-75; SWISSPROT HIT: Q09743, EVALUE 1.00e+00
tgttaaaggggttactgcggagttgactttggcattgggggtttcggataagactctcttttaatgggggtttctcaattcagggactctatactgggcaaggttaagtaaccctcatgtaactgggtgtgtttgtttttctcagggagagtgtgaagtacactcagcaaacaatggaggaggctctggggagagtgaagcttatgcaggccgacctagggggcactgaaatcttggcaccactccagaacatttacaggggaccctccatcccaggccaccccctacaggtaagaagtggaacagagctaacagaagagacaggaagtgtgaaatctctaagaatctatgcccctgagcttcatgcagtatgttgaaatatagtttgcaattcacagtcttctatcatatagtaaacagaaaaaaaaaagatgatgcatttgtcttcttccttaactccatgcgatggacactggaaggccttttatggagtgccacaataactgagatgcagctaggaggggaggtgctaaaaattcc

SEQ ID NO: 9717 - DNA, 530 bp, Homo sapiens
  MAP TO CHR3.3; EXPRESSED IN BONE MARROW, SIGNAL = 1.2; EXPRESSED IN LUNG, SIGNAL = 0.88; EXPRESSED IN HEART, SIGNAL = 1.3; NT HIT: AB026898.1, EVALUE 0.00e+00; SWISSPROT HIT: Q9Z0E8, EVALUE 4.00e-04
cagcatgcctgagcagataggggtggccccctagatagaaaaggagagagctctcagtgattactgagggcaaatcaaggagactggagacagaggcagccggtggtcagggtgttacctagcagcagtggaggccatgtgaggcttagacaggggaagggctgaccaccagggaggagcagagggcagctcgaggtcagtggtggccttcaaggccctgacatctgaatcacctcatgctggcacaggatggccacagctgaggccacgagagggccagcagggggtctctgggcatcatagaacggtgagataagagaggggctggccacgcaggattctcccggagtccccgcggtggctgatgatgaaagggaaggtgaaggaggccaagcaggtgctgtgctacgccgcaagtgtgaacaagaagaccattccttcaaatctgctggacgaggtaaagggcttctggccaggagtggggccggagcagtgggctgtggaagggccccttccctcctcatcctttc

SEQ ID NO: 9718 - DNA, 533 bp, Homo sapiens
  MAP TO CHR4.3; EXPRESSED IN PLACENTA, SIGNAL = 1.1; EXPRESSED IN LUNG, SIGNAL = 1.1; EXPRESSED IN HEART, SIGNAL = 0.99; EXPRESSED IN BONE MARROW, SIGNAL = 1.3; EXPRESSED IN BRAIN, SIGNAL = 1.3; NT HIT: gi14733412, EVALUE 1.00e-102; EST_HUMAN HIT: BF035577.1, EVALUE 1.00e-100; SWISSPROT HIT: P43427, EVALUE 2.00e-07
accctctgatccctccagtcatgcaaggatgcccaccgggccccaggactcactgcattgaggccacagagctggtagcaggccatggtgacaatcacggtgaccacctgccagcggacgtagggagctctcagcagctccagcacggacaccaggcggatgctcctctgcacgcggctctcagccaggacctcctctacctcttgggaaatgtctgctttacccaagaacgtttggaaggctgcaaacagaggcacacatggactttcagcagggattagagtgtccatcatgtctaatgctgggccctgcagggacgggtcccacctcctagccacacaccttagctgggggcggaacttggcaggggcctttgaaactatggagtccaaagcccttgtttaaaaatgggaaaacagaggcccagagagatgccatgatttgctcaacatcacccagctggctgggagaaaagctgagaacgtgggtctcttgactgtccgcaacgcaaggcagagcacacccagagttca

SEQ ID NO: 9719 - DNA, 557 bp, Homo sapiens
  MAP TO CHR1.3; EXPRESSED IN PLACENTA, SIGNAL = 2.2; EXPRESSED IN BONE MARROW, SIGNAL = 2.5; EXPRESSED IN FETAL LIVER, SIGNAL = 1.3; EXPRESSED IN ADULT LIVER, SIGNAL = 2.3; EXPRESSED IN BRAIN, SIGNAL = 1.5; EST_HUMAN HIT: BI025218.1, EVALUE 0.00e+00; NT HIT: AF217621.1, EVALUE 0.00e+00; SWISSPROT HIT: Q61670, EVALUE 8.00e-31
cgctttaggtcttccgactgtcgtgtaaaattcctccttagaggggccattcggtgtatgtgcgaagggctttctgaatgagggtggaatcgacagttaacacgaaacagtttcaagccttacggggacccccaggctggcaggtcaaggactggacactgaacagccctcttgtctttcttccctctggctcccgttctgcggcaggtccctatgctgtgctcacgaaggacaccatgccgcagacgtacaaaaggaagcgttcatggtcgcgcgctgtgttctccaacctgcagaggaaaggcctggagaaaaggtttgagattcagaagtacgtgaccaagccggaccgaaagcagctggcggcgatgctgggcctcacggacgcacaggtaaggcagttctggctccagcgcacagcgccctcgggcgggcagcagcgcacggcctagtctggtaggtcccctccatcccggccgactggcctcctgcggtgcaaacgcaagatcttgactttcaagaggctttgtggactacgcaacttgaggcaggagaag

SEQ ID NO: 9720 - DNA, 502 bp, Homo sapiens
  MAP TO CHR6.3; EXPRESSED IN BONE MARROW, SIGNAL =   1; EXPRESSED IN PLACENTA, SIGNAL = 0.92; EXPRESSED IN HEART, SIGNAL = 1.1; EXPRESSED IN FETAL LIVER, SIGNAL = 0.76; EXPRESSED IN BRAIN, SIGNAL = 0.72; SWISSPROT HIT: P41182, EVALUE 3.00e-13; EST_HUMAN HIT: AW815648.1, EVALUE 1.00e-61; NT HIT: gi4557362, EVALUE 2.00e-68
tgccatctcaagtcatcagcagatacaaagtactgggaaggaccatagtgccatcagtccaggatgggacaacgcagaatctggtgttggctttaactacgggctatataggacatgggagggtgactcacagacattttctacaaaggtcagaaggtctacccagaaaatactgcgcacctggcattcatgtggcttttctcccgtgtgtaccaggtagtgtttctgcaggtgggcgagctgagtaaagcccttgttgcaagtctgacatttgaaaggccgttctccactgtgcactctcaggtggacctgggaagaagccacatgtgttagctctgctctcaagctggctctgagacctaacatttctgctccaagactcaagtgttgatgcaaatatcttaagaaaagcatcaagacagtcttaaaaagaagaaatcttcatgttttcagaatggtgtttttcttaaaagcacaaaaatcacaggctagcagggagttt

SEQ ID NO: 9721 - DNA, 562 bp, Homo sapiens
  MAP TO CHR12.3; EXPRESSED IN LUNG, SIGNAL = 5.7; EXPRESSED IN HELA, SIGNAL = 4.3; EXPRESSED IN PLACENTA, SIGNAL = 4.9; EXPRESSED IN BONE MARROW, SIGNAL = 5.3; EXPRESSED IN HEART, SIGNAL = 5.5; EXPRESSED IN ADULT LIVER, SIGNAL = 5.4; EXPRESSED IN BRAIN, SIGNAL = 5.4; SWISSPROT HIT: O15528, EVALUE 2.00e-28; EST_HUMAN HIT: BF529340.1, EVALUE 1.00e-102; NT HIT: AF256213.1, EVALUE 0.00e+00
ttcaaacactccccttgacccctctctaggatatgcctttctaggatgtaatggaacagtggggagatccttccaaaagtagccccagaaaacttccccatcacccaccaggacctgcctttgtccctgtctgaatatcctcttcttcatgcctgccctattctgagcccaaactgacaagtttgttttcctttgcaccagacgctggtcactctgtgtcactatgccacttcaagggaccctgcccagttcccagagccaaattcttttcgtccagctcgctggctgggggagggtcccaccccccacccatttgcatctcttccctttggctttggcaagcgcagctgtatggggagacgcctggcagagcttgaattgcaaatggctttggcccaggtgagtgctctagattttataccttccccagactggagagaccctaaccctctaaagttgtgagctctttcccctgacaagcataggaaatcatataagacctggtagaatgaatcttctgaaatatgataagcccattataggcctggagtgtaagtgaggg

SEQ ID NO: 9722 - DNA, 596 bp, Homo sapiens
  MAP TO CHRX.3; EXPRESSED IN PLACENTA, SIGNAL = 1.7; EXPRESSED IN HEART, SIGNAL = 1.7; EXPRESSED IN BONE MARROW, SIGNAL = 1.1; EXPRESSED IN FETAL LIVER, SIGNAL = 1.6; EXPRESSED IN BRAIN, SIGNAL = 1.7; EST_HUMAN HIT: AL570136.1, EVALUE 0.00e+00; NT HIT: gi14760411, EVALUE 0.00e+00; SWISSPROT HIT: Q12816, EVALUE 5.00e-27
gcctaagcacaagttctggctttgatggtgggctaggtaccagcgctggcttcggtggaggaccaggcaccagcactggttttggtggtggactgggcaccagtgctggcttcagtggcggactgggcaccagtgctggctttggtggtggactggtcactagtgatggctttggtggtggactgggcaccaatgctagtttcggcagcacacttggcaccagtgctggctttagtggtggcctcagcaccagcgatggctttggcagtaggcctaatgccagcttcgacagaggactgagtaccatcattggctttggcagtggttccaacaccagcactggctttactggcgaacccagcaccagcacgggcttcagtagtggacccagttctattgttggcttcagcggtggaccaagcactggtgttggcttctgcagtggaccaagcaccagtggcttcagcggtggaccgagcacaggagctggcttcggcggtggaccaaacactggtgctggctttggtggtggaccgagcaccagtgctggctttggcagtggagccgccagtcttggtgcctgtggcttctcgtat

SEQ ID NO: 9723 - DNA, 588 bp, Homo sapiens
  MAP TO CHR2.3; EXPRESSED IN PLACENTA, SIGNAL = 4.1; EXPRESSED IN ADULT LIVER, SIGNAL = 4.9; EXPRESSED IN BRAIN, SIGNAL =   4; EXPRESSED IN BONE MARROW, SIGNAL =   4; EST_HUMAN HIT: BF689775.1, EVALUE 2.00e-72; NT HIT: gi15294734, EVALUE 6.00e-75; SWISSPROT HIT: Q99743, EVALUE 8.00e-10
aaagtcaagatgctgggtggtgaggtgacaatgttgaggaaataataaaatggaaagtcagttacgaaaatgtaaataataaaaacaaaaggcgagaaagggtaataaacgctgcttttcggctgcaagctctctgaggctttaggttacgtatatgtatatactctacccaagcatctttggaatcgtccccaaacaactatggtatttgtctcagcagcttctgaggttgtcgacatatttagaactaaagtcacgcccactgattctttcctcttgatgctgacatgaggactgtttgatgtgtgtgtttcaggacaagggctcaagcctggaacctcggcagcactttaacacactcgacgtgggtgcctcgggccttaataccagtcattcgccatcggcgtcctcaagaagttcccacaaatcctcgcacacagccatgtcagaacccacctgtgagtgcgagtccatggatggggagtgggatgtccacatcagaccagagggacagccccacagagggtcccgggcccaagtggaatcagggcagtctgtgcctccgacagaggttgccgtgcagtttat

SEQ ID NO: 9724 - DNA, 597 bp, Homo sapiens
  MAP TO CHR1.3; EXPRESSED IN BONE MARROW, SIGNAL = 6.4; EXPRESSED IN BRAIN, SIGNAL = 6.9; EXPRESSED IN ADULT LIVER, SIGNAL = 7.1; EXPRESSED IN LUNG, SIGNAL = 4.4; EXPRESSED IN HEART, SIGNAL = 6.8; EXPRESSED IN PLACENTA, SIGNAL = 6.1; SWISSPROT HIT: P26480, EVALUE 3.00e-01; EST_HUMAN HIT: AL521421.1, EVALUE 0.00e+00; NT HIT: gi15294491, EVALUE 0.00e+00
tttatggctcaagactgcccttaccgaaaacgaccacggatggccaaagaggaatgtgaaaagtttcatgcctgctgcttttaccaagaatgtggtggccactacctaaatttacccctttctgtcaatgctaatgttggaagtgcctccactgctgcctcctctccctccgcctcttcttcctcctcatcttcctcttcctctccccctttgcctttaccgagttgttcccgccaggtggattttgatgtaggtagtgcatctatttacaagagtgatggccagatacctgccaatgaaatctttgtcactaatgtcagatcacttggtgttcaggaaaaggccaaattaaatgatgagaaagcaaatgatgacaccaacagagatggtggccccctcagccacgaacctgtgggaaatgaccttgcttttgagtgcaaaggccaattttatgattattttgagaccggatataatgaaagaaacaatgtaaatgaatcttggaaaaagtccttacggaaaaaggaggcttcaccaccaagtaacaaactgtgctgcagcaaaggaagtaaaatatgagccatcttctcaccgaac

SEQ ID NO: 9725 - DNA, 545 bp, Homo sapiens
  MAP TO CHR11.3; EXPRESSED IN BONE MARROW, SIGNAL = 1.2; EXPRESSED IN HEART, SIGNAL = 1.3; EST_HUMAN HIT: BG187573.1, EVALUE 5.00e-73; NT HIT: X06028.1, EVALUE 8.00e-68; SWISSPROT HIT: P09693, EVALUE 7.00e-19
gatgatcggcttcctagctgaagataaaaaaaaatggaatctgggaagtaatgccaaggaccctcgagggatgtatcagtgtaaaggatcacagaacaagtcaaaaccactccaagtgtattacagaagtatgtaatcccctttggtctgtttgttgtgaaattaatcagtatttgctgttctggtgagctttttatctggggtgaaagtggaaatagatcctcaacagtaatattatcgcctgttctcttaatttcagcttgcctcttttaaaatactgtaagatacttccctcaccctattgaaaaactacagccagtcctgtaaaattttgtttacctttgggtgggctccatggattcaagcaattcagcactgagttgaatgaaggggttggggagacagaggtgatcataaggtgagcagcagtgagaactggagcgcagtggagcatgaagagtatctagtcttccttctgttccagatacttcctggtagttagactacatgggcttccccaggaatcctgggggacttaagagcat

SEQ ID NO: 9726 - DNA, 599 bp, Homo sapiens
  MAP TO CHR11.3; EXPRESSED IN PLACENTA, SIGNAL = 3.2; EXPRESSED IN BONE MARROW, SIGNAL = 4.6; EXPRESSED IN HEART, SIGNAL = 3.1; EXPRESSED IN ADULT LIVER, SIGNAL = 3.4; EXPRESSED IN BRAIN, SIGNAL = 4.9; EST_HUMAN HIT: BF513152.1, EVALUE 0.00e+00; NT HIT: L37203.1, EVALUE 3.00e-33; SWISSPROT HIT: P51839, EVALUE 3.00e-24
ctctctcagaaccctgccacatcatgtaaacaatcccggactagcctgctggaggaagatagactgtggaacagaattgagttccacaaggctccagagacatgagagaacccaactgagatcagcagagcagctacctcacccatggctgaccacagatgtatgagtgtgtccagaagaactttctggtggccccataggtttgtgaacaataataaatgcttatcattttaccctattgagtttgggggtatttattatacagcaatagctagctgatataaatacataaataaatgaatggaagtaattgtaccatcaaggcacagtagtaaagggaggaatggaatgccagcctcctggtattctcaccttatacaggtcatggctgcccagaacagcatcaaacagcatgtagagatcgttgagcaagcccaccgcctcaatgggttcactcagggctgagatgatggtgaaacccacaatgtcactgaagtatatggtaacctggtcaaaataccctggttccacagttgcccccattttccgagcttcagccacagacctgaagggatgggaggggccagacacataaggta

SEQ ID NO: 9727 - DNA, 578 bp, Homo sapiens
  MAP TO CHR1.3; EXPRESSED IN BONE MARROW, SIGNAL = 2.8; EXPRESSED IN BRAIN, SIGNAL = 4.1; EXPRESSED IN PLACENTA, SIGNAL = 2.3; EXPRESSED IN HELA, SIGNAL = 2.9; SWISSPROT HIT: P49746, EVALUE 1.00e-20; EST_HUMAN HIT: AW510819.1, EVALUE 0.00e+00; NT HIT: AF023268.1, EVALUE 0.00e+00
tccgtaagcgttacctctgcactttcaggacacacatccagggggtcgaccacagcatcattgtcaaagtcatcctcacacacatcaccaacgccattgcctgggcagagtgaggctgggtgctcaggaaggccctggccactgccattaggcaacaataccatctgttgggcctgcattcctgacatctttcccaccttgcccttcctcacttcccaacagggcttgctgcctccacctgggcaaaggcaacaccagtctaacgtgctctgggtccgcaggcttaccatctgagtccttctgattgggattgggtaccaggcggcagttatcgggaccaggaggcacataatctgggatgccatcattgtcatcatccccatcacactcatctccaagtccatcgttatcagagtccagctgggagctatttggcagctgtgggcagttgtccttggtgtcctgatgcccatccccatcgctaatcagaagaacaggtaccaaataaaggatttaaaggtactccttgtccttcccttcgcttctgcctgggagtctctggagcctgctctccatac

SEQ ID NO: 9728 - DNA, 578 bp, Homo sapiens
  MAP TO CHRX.3; EXPRESSED IN LUNG, SIGNAL =   4; EXPRESSED IN HEART, SIGNAL = 2.3; EXPRESSED IN BRAIN, SIGNAL = 2.4; EXPRESSED IN ADULT LIVER, SIGNAL = 2.3; EXPRESSED IN PLACENTA, SIGNAL = 2.8; EXPRESSED IN BONE MARROW, SIGNAL =   3; EST_HUMAN HIT: AL135268.1, EVALUE 1.00e-52; NT HIT: gi14765703, EVALUE 7.00e-53; SWISSPROT HIT: O95239, EVALUE 7.00e-20
tgtttcagcaaaaggcacagagctagaaaggcttgtatgtgtcaagagaaacaaatgaaagtgatatgcctatttacactgcccctacttggcttaccgataactgggtaatcaattgctgcaggttacaaattatctctacattttctttcaattcctggtcttccaaagtctccactagcttttgaagatccagtttgcagctgaaaattcaaacaaaaagaacccaagggttattcatatgacaaaggccagaggctccacgattatatactaagatgctataggttgctaacaaatatctggtgggcaacttacgccgcatgctgcctgagctcttctagcttggcgttcattttttcattcgcttgctctgtctgcaacaaagacccaggagatcatcagtggcggtgcctgacagcctcacataattatgctctcctactcctatgaattaaaagctaggtagagaggctgtctcctttgctgtaacagaggatttagtgggctttggttattcagtgaaaaatgtgttttttaaaagagtcatggaaattagcccttcagtcaacatgagc

SEQ ID NO: 9729 - DNA, 577 bp, Homo sapiens
  MAP TO CHR17.3; EXPRESSED IN PLACENTA, SIGNAL = 4.4; EXPRESSED IN LUNG, SIGNAL =   2; EXPRESSED IN ADULT LIVER, SIGNAL = 3.7; EXPRESSED IN BRAIN, SIGNAL = 4.4; EXPRESSED IN BONE MARROW, SIGNAL = 6.6; EST_HUMAN HIT: BI044580.1, EVALUE 3.00e-28; NT HIT: Y08829.1, EVALUE 8.00e-34; SWISSPROT HIT: P18054, EVALUE 5.00e-14
cacttgggcaagaagagagcttagtatgcatggattggacaggactggtcctaaaactaccttcatcacaaaaaagctgcatgtccctggagaagactcccctcattgggcctctttcctcaccgtgaaatgagaggacttggacctgatgctctggatgcttccttcagctctgccactaggacactggtactgatggaggatgatggcaagaagctaggttgaatgtaagtgacttgccctttgccctgtccctccaggtgtagtctttgaactctaaccatccacgcactcttcctttccacagaacagatccctgtttcaggctgacttcatcccgctggatggaattccagccaatgtgatccaaagagggaagcagtaccaggctgcagccctcgtcatgctgaagatggagcctcctgggaagctgctacccatggtcatccaggtgagggccctggacctccctgcctacactgtgctctgttcattttaacctctgctcccagggacccagcctcctgccttttggctcccaaagctacccccactcagcaggtccagtccttgtgtt

SEQ ID NO: 9730 - DNA, 506 bp, Homo sapiens
  MAP TO CHR5.3; EXPRESSED IN ADULT LIVER, SIGNAL = 7.8; EXPRESSED IN BRAIN, SIGNAL = 2.4; EXPRESSED IN FETAL LIVER, SIGNAL = 4.4; EXPRESSED IN BONE MARROW, SIGNAL = 2.1; SWISSPROT HIT: P22352, EVALUE 2.00e-39; EST_HUMAN HIT: BG570196.1, EVALUE 0.00e+00; NT HIT: D16362.1, EVALUE 0.00e+00
ttccaactagagggctctgcagaccctgactagggtctcattggcccattttacagaaaggcccagaaggacccagagtgaacatactaagggtctcacaatcttctagagccacagctggcgctggcagtcttctaactcccaaactggggctcttttctcagggccaggctattccccaggaaggcctgggaaggaagagggtcagggggcctcaagcaaggttgacactcctcttatccctgctctagaactcctgtcctcccacctcggagctcctgggtacatctgaccgcctcttctgggaacccatgaaggttcacgacatccgctggaactttgagaagttcctggtggggccagatggtatacccatcatgcgctggcaccaccggaccacggtcagcaacgtcaagatggacatcctgtcctacatgaggcggcaggcagccctgggggtcaagaggaagtaactgaaggccgtctcatcccatgtccaccatgta

SEQ ID NO: 9731 - DNA, 528 bp, Homo sapiens
  MAP TO CHR8.3; EXPRESSED IN LUNG, SIGNAL = 2.1; EXPRESSED IN HEART, SIGNAL =   2; EXPRESSED IN BONE MARROW, SIGNAL = 1.3; EXPRESSED IN ADULT LIVER, SIGNAL = 1.2; NT HIT: gi14751378, EVALUE 1.00e-97; SWISSPROT HIT: P06858, EVALUE 3.00e-30; EST_HUMAN HIT: AU122496.1, EVALUE 2.00e-97
gccgttcctcaactcaactcaatgccttcctggcttacttagatctgccttggaagggacagacctgtctctgaacactgttctgttatttgatttttctatctgtgccaatgggtttccaatcaagtttgttttttccatttcatgcaggtgtattgggctgatgtatctatgacaagtggtaggtgggtattttaagaaagcttgtgtcatcatcttcaggtaacaggaatgtatgagagttgggtgccaaaacttgtggccgccctgtacaagagagaaccagactccaatgtcattgtggtggactggctgtcacgggctcaggagcattacccagtgtccgcgggctacaccaaactggtgggacaggatgtggcccggtttatcaactggatggaggtaagactgggagaaggagacttatgtgtccaaaacagtgtttttgactggagccagaaaaccggctgttctttcttccttttctcttagatttaaatattttctgggggcattcaaatcttcaga

SEQ ID NO: 9732 - DNA, 593 bp, Homo sapiens
  MAP TO CHR17.3; EXPRESSED IN FETAL LIVER, SIGNAL = 0.76; EXPRESSED IN BRAIN, SIGNAL = 2.3; EXPRESSED IN ADULT LIVER, SIGNAL = 1.5; EXPRESSED IN LUNG, SIGNAL = 1.8; EXPRESSED IN HEART, SIGNAL = 1.4; EXPRESSED IN BONE MARROW, SIGNAL =   1; SWISSPROT HIT: Q16534, EVALUE 1.00e-33; NT HIT: M95585.1, EVALUE 1.00e-119; EST_HUMAN HIT: AV656051.1, EVALUE 2.00e-13
  unsure 295
  unsure 525
  unsure 572
gttttgcctgatgtgacgtgagtcaagtcatactcaacctgctgtgttctcagaaatgcagtgcggatgagtaagataaatcatgttagcatcatatataagtgagctgaagactcttaccactcatctcagagcaccattaagtagctgcctactgggtctctctagggtgttcatgaattaaaactcctgtgttgttccaggtcagctgttgccagcaaaccgcaatacaccaagtcccattgatcctgacaccatccaggtcccagtgggttatgagccagacccagcagantcttgccctttccagcatccctggccaggaaatgtttgaccctcgcaaacgcaagttctctgaggaagaactgaagccacagcccatgatcaagaaagctcgcaaagtcttcatccctgatgacctgaaggtaaattggaactggtaatcagtctttgggcaaatggagagtgggatccacagacagattaaaagggtgaccccaggatgatcccagaagctagtgcatngaaggatttctgatttctgatcctgtttcttggcatgtgacttctanggccagttgtttcctctctgg

SEQ ID NO: 9733 - DNA, 511 bp, Homo sapiens
  MAP TO CHR1.3; EXPRESSED IN LUNG, SIGNAL = 1.1; EXPRESSED IN HEART, SIGNAL = 1.1e+02; EXPRESSED IN BONE MARROW, SIGNAL = 1.1; EXPRESSED IN FETAL LIVER, SIGNAL = 1.1; EXPRESSED IN PLACENTA, SIGNAL = 0.95; NT HIT: AY044273.1, EVALUE 0.00e+00; EST_HUMAN HIT: R57592.1, EVALUE 6.00e-57; SWISSPROT HIT: P45379, EVALUE 3.00e-15
ccgatggagagagagtggactttgatgtaagcggtggctgtgggttgagtaggcctgggctggggatagtcccaagggccctcagtgacagagattttgtgaccttgggctggggtagagcataggtgggatggggtgcagcaccagccaggctgggtgcccatccatgagcgtggtcctgggttcaggccacagttaccccttccctggccaggcgccaggccctgccagaggtcttttgcactgcgttggggggtgtctagcccacccatctctcctctggactctttggagtggcagcctctgagccgcagcggtccacccacaggacatccaccggaagcgcatggagaaggacctgaatgagttgcaggcgctgatcgaggctcactttgagaacaggaagaaagaggaggaggagctcgtttctctcaaagacaggatcgtaggtgtccagtctgcccacctaacattctctgatggcccagtctgtcctccatcccttttgtga

SEQ ID NO: 9734 - DNA, 502 bp, Homo sapiens
  MAP TO CHR19.3; EXPRESSED IN HELA, SIGNAL = 2.3; EXPRESSED IN HEART, SIGNAL = 2.8; EXPRESSED IN BONE MARROW, SIGNAL = 2.3; EXPRESSED IN PLACENTA, SIGNAL = 2.1; EXPRESSED IN FETAL LIVER, SIGNAL = 1.8; EXPRESSED IN ADULT LIVER, SIGNAL = 2.7; SWISSPROT HIT: P06687, EVALUE 9.00e-37; EST_HUMAN HIT: AL529994.1, EVALUE 1.00e-112; NT HIT: X12911.1, EVALUE 0.00e+00
gatctggttctcttgctgggtgattgtgagttagatgggaaaaagggggagagtgggctgtgaaaagcttagagggatgggaagaagttggggtgcggtgtccgtaaataaatgtgcagagccttgcacagggcagggtccaggcactcacgttgtcaccagaggggtcgtcctcggtgcccgcctggataccgtaggccaggaagcagaggatagccccgatccacagcaggatggagaagcccccgaagagctgccggcaaaacttgacccactctggggtggtaggcggtggcgtgagtgcgttaggcccatcccgggccaggatctcctgggctttgctgtgggtcaaaccctgagggacagaggactcacacagaaccctccctgggcaaccctggcaccccaggccttcaccagacccccagaacttaagacaccagccacagcccctcctccctcagacccaggggtcctagcccccagctcctcctccctagtt

SEQ ID NO: 9735 - DNA, 596 bp, Homo sapiens
  MAP TO CHR9.3; EXPRESSED IN LUNG, SIGNAL = 3.3; EXPRESSED IN HELA, SIGNAL = 3.2; EXPRESSED IN PLACENTA, SIGNAL = 3.3; EXPRESSED IN BONE MARROW, SIGNAL = 3.6; EXPRESSED IN BRAIN, SIGNAL = 4.5; NT HIT: J04809.1, EVALUE 0.00e+00; SWISSPROT HIT: P00568, EVALUE 2.00e-25; EST_HUMAN HIT: F00654.1, EVALUE 6.00e-88
acacccactcagggctactgtcatcccctgcctctcaccccaccagggcccactcaccagtggaaccagctgccccttctccatgatttccgacagcttcttgcccctggccgagcctgagctgacctcggaccgcaggaggtccccggtggagaggtgggtgtagccatacttctgcacgatcttctcacactgggtgcccttccctgagccaggcccacctgcaaacgcccacccattcataaaccccgagacacagggtcccaggaggaacaggggctgccagggtctcccagagagggaggggcagagcccagggtgcagccccaggcccgggctccctccagtgccagtgaagacccttgctgcaccacccgcctgcccgcaactcacccaccacaaagatgatcttggttttcttcagcttctctgcgggagagaaaaggggagcagggctcagtcactcgctggacccacagccagaggcacctctggagtcccaggcctgtgctgggccccaggcggagggacagacaccgctggcgctcctgtcagggaggcagacaagtcacagcccagagtcagcagggatgtga

SEQ ID NO: 9736 - DNA, 533 bp, Homo sapiens
  MAP TO CHR11.3; EXPRESSED IN BRAIN, SIGNAL =   2; EXPRESSED IN LUNG, SIGNAL = 2.7; EXPRESSED IN BONE MARROW, SIGNAL = 0.91; EXPRESSED IN HEART, SIGNAL = 0.86; EXPRESSED IN ADULT LIVER, SIGNAL = 1.6; EST_HUMAN HIT: BG485369.1, EVALUE 0.00e+00; NT HIT: gi15310664, EVALUE 1.00e-109; SWISSPROT HIT: Q15293, EVALUE 8.00e-37
agccgggatttatcttttggcttctaaactcagttctttctactccaccacatggccttcatcatgaataaattactgcatcattatccccaagaagctgcctaccagctgtttgagttaggtctctggattggttgtcgcctttcctaaagctcaggaggtcaagtttgttttatgggggtgggggaggtttaccttcccactttcctttgtaaccaacaataaccttcccttctagcggatatgttttcccatgaggagaatggccctgagccagactgggttttatcagaacgggagcagtttaacgaattccgggatctgaacaaggacgggaagttagacaaagatgagattcgccactggatcctccctcaagattatgatcatgcacaggctgaggccaggcatctggtatatgaatcagacaaaaacaaggtatttcccattcttctggaatcactgattgaagggagacagtttacataagatcggttttgtttgctttttcggcgatagcattgacccatgtg

SEQ ID NO: 9737 - DNA, 549 bp, Homo sapiens
  MAP TO CHR1.3; EXPRESSED IN BONE MARROW, SIGNAL = 1.6; EXPRESSED IN BRAIN, SIGNAL = 1.3; EST_HUMAN HIT: AI808539.1, EVALUE 1.00e-104; NT HIT: gi15294491, EVALUE 1.00e-105; SWISSPROT HIT: P33730, EVALUE 1.00e+00
gaagagggctgaagggaatctgagaacaataagaaatggggttttaaagatccgcccatgaaatgcagattgctgaacacagaggctgagctaatagcagctagagagtttgctgaggttttctttgaaaaaataataaaatgtttcagggtaaaggggagggccgagaagtaaaagtttcccaaagcaaagaaatgaagatgccaaggccgtcccttggcttgctcttgattagggctgttttcttcattcttgttttttttttttttcttttcagatctgaggctgtcagagatgactctggttctgtccatgaatagattctgcgagcccattgtctcggaaggagctgctgaaattgctgggtaccaaacactatgggaggctgacagctacggaggcccaagccccccagggccagcacaagctcctttgcagggagaccggggagctggtcccccactggcaggtattgcccttgacctgcgcccatcccccccacccctcgctgccctttgcagccagcctggtggacaggaggtggtgtct

SEQ ID NO: 9738 - DNA, 556 bp, Homo sapiens
  MAP TO CHR2.3; EXPRESSED IN LUNG, SIGNAL = 0.88; EXPRESSED IN BONE MARROW, SIGNAL =   1; EXPRESSED IN FETAL LIVER, SIGNAL = 0.57; EXPRESSED IN BRAIN, SIGNAL = 1.3; EXPRESSED IN PLACENTA, SIGNAL = 0.69; SWISSPROT HIT: P07315, EVALUE 3.00e-46; EST_HUMAN HIT: BF726870.1, EVALUE 0.00e+00; NT HIT: M19364.1, EVALUE 0.00e+00
tgcataaaatccccttaccgctgagggccccttttgtgttgttcttgccaacgcagcagccatcctgctatatagactggctgtgcagccgcaggccccatcacactgaactcgcatcatccgtgtcaaccagccatggggaaggtgagcagaacacaaattaaataaaatgaaaaaaaagttgcctttatataatgcctgttaggagcaaataatgtaattcggaacgattcttcctttgcagatcaccttctatgaggacagggccttccagggccgcagctacgaaaccaccactgactgccccaacctgcagccgtatttcagccgctgcaactccatccgggtggagagcggctgctggatgctctatgagcgtcccaactaccaaggtcaacaatacttgctgcggcgaggggagtaccccgactaccagcaatggatgggcctcagcgactccatccgctcctgttgtctcatcccccaagtgagttttctagatttccatcatgccgccagagtccccactgtattgtcaatgtgggttacagggagg

SEQ ID NO: 9739 - DNA, 537 bp, Homo sapiens
  MAP TO CHR12.3; EXPRESSED IN PLACENTA, SIGNAL = 1.2; EXPRESSED IN LUNG, SIGNAL = 1.2; EXPRESSED IN HEART, SIGNAL =   1; EXPRESSED IN BONE MARROW, SIGNAL = 1.2; SWISSPROT HIT: P08151, EVALUE 2.00e-42; EST_HUMAN HIT: BF309357.1, EVALUE 1.00e-128; NT HIT: gi14758570, EVALUE 1.00e-128
gaggcctccatcctccttacttcctttggtgctgtgtgctcctcccctgccccctgtgttgtcaccactttttcccatttcttctgcattcttccgctttgatccgtttgccttctgtctccactctccactcaacagaagccgtatgtatgtaagctccctggctgcaccaaacgctatacagatcctagctcgctgcgaaaacatgtcaagacagtgcatggtcctgacgcccatgtgaccaaacggcaccgtggggatggccccctgcctcgggcaccatccatttctacagtggagcccaagagggagcgggaaggaggtcccatcagggaggaaagcagactgactgtgccagagggtgccatggtgagagagcccaggcaaccctcacctccataccccagcccaccctgtggacatctttctagttacttcccaacccatccattccctcctatagaagtcactcttctgtgaccagtctgcctgtctcttgtcttagtgttgctctttgggcttccccaaatctagagg

SEQ ID NO: 9740 - DNA, 521 bp, Homo sapiens
  MAP TO CHR6.3; EXPRESSED IN BONE MARROW, SIGNAL = 2.6; EXPRESSED IN HEART, SIGNAL = 1.8; EXPRESSED IN BRAIN, SIGNAL =   2; SWISSPROT HIT: P05305, EVALUE 8.00e-21; EST_HUMAN HIT: BI821379.1, EVALUE 4.00e-92; NT HIT: J05008.1, EVALUE 0.00e+00
gacctgctctttctctccccagcagtcttaggcgctgagctcagcgcggtgggtgagaacggcggggagaaacccactcccagtccaccctggcggctccgccggtccaagcgctgctcctgctcgtccctgatggataaagagtgtgtctacttctgccacctggacatcatttgggtcaacactcccgagtaagtctctagagggcattgtaaccctagtcattcattagcgctggctccactggagcccagttttagagtttcttttctagggactctgaaggtagtccttctaacaccatccaagtgcctcagtggggacagtttccctctattcctgaaaataacgacagcttcgttcttagcaaccaaggggagggtcttctgaggccccgtagctcaggctactcatgatgggacaagcaggaggccactgcacgtttcaaatgaggaactttcagtgagagggcctcagggggacactctcacagtggcatctgatggggtttcgggaataat

SEQ ID NO: 9741 - DNA, 589 bp, Homo sapiens
  MAP TO CHR17.3; EXPRESSED IN ADULT LIVER, SIGNAL = 0.65; EXPRESSED IN BRAIN, SIGNAL = 0.95; EXPRESSED IN PLACENTA, SIGNAL = 0.71; EXPRESSED IN BONE MARROW, SIGNAL = 0.99; EXPRESSED IN HEART, SIGNAL = 0.79; NT HIT: U49395.1, EVALUE 3.00e-70; SWISSPROT HIT: Q93086, EVALUE 1.00e-21; EST_HUMAN HIT: BI911331.1, EVALUE 1.00e-101
ggaaccctgactctcagcagccccaggagtggcttgcagaccttctcactgagccaaaaacaaagaggcatccagctatttgaaatccctgccagacattccctgaggagcaagggcttccccaccctactctgagcaacccttgggtcgccaaagcgcggatggaaaggatgcggcagaggccgcaagactcggcttcacggagagaaacaggcaagaacacgcgctctcctctcccagaggcacccccagcttcagtcgctggccactctgctggggtccacacctctcctgggccatctgtccctgcacctcccgctctgacgcccacccccaggaaggggcctcaatagtgctggcacccagatgagtgagtgccactgatcatggtcaggtcacaagtgggcacaaggcagcggttacctgaagttgtacccggaggagacagactttgaaagtttattgtccagacggctaaaagaatagtgagggtggcactcagaggcagctttatcaagatcacagttccattcaatattaattcctatcacgccacccttgataaaagagagatgagggtcagcacaca

SEQ ID NO: 9742 - DNA, 507 bp, Homo sapiens
  MAP TO CHR1.3; EXPRESSED IN LUNG, SIGNAL = 1.6; EXPRESSED IN PLACENTA, SIGNAL = 1.3; EXPRESSED IN HEART, SIGNAL = 1.7; EXPRESSED IN BONE MARROW, SIGNAL = 1.5; EXPRESSED IN BRAIN, SIGNAL = 1.4; NT HIT: gi14722846, EVALUE 6.00e-53; EST_HUMAN HIT: AW160833.1, EVALUE 9.00e-53
caacacctaaagcctggagctggctgaggccctgcaggctgggccctcaccatcttggtgtaaagggcccggatggaggggctgcctacaaggagctctgagatctcccccttcttcttcttcaagcagaactgggaaagccaggcgtcaaacaattccgggggccctgcagagggacagatgctgacggtcagttgccttggtctgggaaaagaacactgggcttacagaacatatctaaggctggacatggaaaatgaagaaagcttgtgtattcaaagccacttagccaagggtagggggtcaggcagggtgaaggggcgggtgccgcacctgagtgatctccagaaggggctgcagtctccattttctcatatccctgctggctttttagcccatggcacctggctgctgaatctcctcatctctgaaacagctgttctcaggtctcatgaccccagctgccaaagccaacatctatttctctgtcttccctcgtgtgaccat

SEQ ID NO: 9743 - DNA, 555 bp, Homo sapiens
  MAP TO CHR19.3; EXPRESSED IN HEART, SIGNAL = 3.7; EXPRESSED IN BONE MARROW, SIGNAL = 2.7; EXPRESSED IN FETAL LIVER, SIGNAL = 4.1; EXPRESSED IN ADULT LIVER, SIGNAL = 3.6; EXPRESSED IN PLACENTA, SIGNAL = 6.4; EXPRESSED IN HELA, SIGNAL = 4.6; EXPRESSED IN LUNG, SIGNAL = 3.7; EXPRESSED IN BRAIN, SIGNAL = 2.9; EST_HUMAN HIT: AA860416.1, EVALUE 1.00e-113; NT HIT: gi14765050, EVALUE 3.00e-52; SWISSPROT HIT: O95049, EVALUE 4.00e-14
tcccctaaacctggtgactgggtcattagcatccagtcacctagggtaggtccaggagtcagctgcccacatgagtctctgatgcacatcaaagctagagggtattagaaacagacaaccccatggggatactagaaaccgacatttggctgtggattagtagtagctggggaaaaagggggttttatgcctggccatctgcaacctttgagatacaagcaacaacactgaaggtaaatgctttggggcccagttctgctgtccttgctgtatgactccgtgggactgcccgccccaaccctgccttgtctccctgctctcaggacaagaagcccggcctcacctgtagaatgagatctccttcctgcagcccacggtgccgggcagccaggcccgaatctgtaatgtgcttgatgaagatctgactgcccagcttgacgccaaactctgtaaggggggaggagggaaactgaggcaggactctggagacgggtgcctgggagcattctcctgctgtaagcagtccaggtgcgggccctcccatcctaacacctt

SEQ ID NO: 9744 - DNA, 549 bp, Homo sapiens
  MAP TO CHR4.3; EXPRESSED IN BONE MARROW, SIGNAL = 1.7; EXPRESSED IN PLACENTA, SIGNAL = 1.4; EXPRESSED IN HEART, SIGNAL = 1.4; EXPRESSED IN FETAL LIVER, SIGNAL = 1.1; EXPRESSED IN ADULT LIVER, SIGNAL = 1.3; EXPRESSED IN BRAIN, SIGNAL = 2.2; EST_HUMAN HIT: BF593044.1, EVALUE 0.00e+00; NT HIT: AB008830.1, EVALUE 0.00e+00; SWISSPROT HIT: O60760, EVALUE 7.00e-27
atgtggattatctggcaggctgatgtagctgtcttatctgatgagagagatgcccccgagaaaaacaaacttgaaggcaacatggatcagctagagtttggtttggggccttcgttttatccagttagcgacggcaggaatggcttggactttcttccgtaaagtcaccagccttggatggttgtctaacaggtcaggcttaaagaccaaaagtgtggtactgcaaatctcccagtagaagtctgcccaagttacctagtttaaaggaaacaaacttttcatttgaacatagaaagtgtagctgtatcagcattccaaaattgaaattagtttcttaatctaaaagattcaaaacaatcttgttattacaaaagcagaatgtttatatgataaaagttcagaaaattactgatatcacactccagcaatcaggttactactattaaacattttcgtgtataagatatttttctatgctgatagatgttgttttactaacatgagatcttaatggtacatactcttgtaaccttgtccagtctccacctc

SEQ ID NO: 9745 - DNA, 542 bp, Homo sapiens
  MAP TO CHR5.3; EXPRESSED IN FETAL LIVER, SIGNAL = 2.3; EXPRESSED IN BONE MARROW, SIGNAL =   4; EXPRESSED IN LUNG, SIGNAL = 2.8; EXPRESSED IN HEART, SIGNAL = 2.6; EXPRESSED IN PLACENTA, SIGNAL = 2.9; EXPRESSED IN ADULT LIVER, SIGNAL = 2.9; EXPRESSED IN BRAIN, SIGNAL = 4.8; EST_HUMAN HIT: BI562286.1, EVALUE 1.00e-101; NT HIT: U83601.1, EVALUE 0.00e+00; SWISSPROT HIT: Q01109, EVALUE 1.00e+00
taagaagcttggggcagaagtgcaatatacttgtggccctgtcgccctcaggtggtaaagccacaactcagcttggcctcctgactccccccaggattctgccaacaccccgctttcctcaagatgacactgcttctgtcggctactctaagtaatgtatatctcacattgtgttgtaatcaagtttcccttcttcccaatacattacttggtcctggaagatacgaactgcttctcttgctcctctgcgttcaccgtcacaaagcttatcgtgccacactgtggccggtgagccctccaagaaagtcgaagatagaaactggcccatcttaggccagggcagtcccagactcaaggattgttgctggaagtcagggagactccccttccctgatgactcagaacaggaagtgacagcagagatggggcattgtgacagcaatgcctgccagcacccccagcctgagctgatggaggtggggcgggctcctggggatcccaggctacctttccatctccccacaacactgccttgtcaggaa

SEQ ID NO: 9746 - DNA, 572 bp, Homo sapiens
  MAP TO CHR19.3; EXPRESSED IN ADULT LIVER, SIGNAL = 1.9; EXPRESSED IN PLACENTA, SIGNAL = 1.7; EXPRESSED IN HEART, SIGNAL = 1.3; EXPRESSED IN BONE MARROW, SIGNAL = 1.5; EST_HUMAN HIT: AW070519.1, EVALUE 0.00e+00; NT HIT: gi16162713, EVALUE 0.00e+00; SWISSPROT HIT: P17141, EVALUE 5.00e-14
ggaaagcacagagaagccaccacaaggggaggtggcctttccgcaccacccccgacgctcactcacaggcccccggagttacccgtgtgaggagtgcgggtgcagcttcagctggaagtcgcagctggtcatccaccgcaagagccacacaggccagcggcgtcacttctgcagtgactgtggccgcgccttcgactggaagtcgcagctggtcatccaccgcaagggccaccggccggaggttccatgagcagccagacagcacagtccctcggggcctcggtgttctcggggcctggatacagcctctggggcaccagcagaagactctggaggcagcaggggatgccagagtgaacaaggggtcccaagccagttccctgcccctggtctggtctcccccaaaagacctgggtgcaaggaaaaggagctgctctctctcttcttgcccctgcctcctagagggaggtctgggttcccttctatggctgaccagtgcctgtggggtgactgccaagcaccaggctccctccctccctgtgacatggcctgggctgacaacactccctctc

SEQ ID NO: 9747 - DNA, 540 bp, Homo sapiens
  MAP TO CHR11.3; EXPRESSED IN LUNG, SIGNAL = 1.4; EXPRESSED IN FETAL LIVER, SIGNAL = 0.79; EXPRESSED IN BRAIN, SIGNAL = 2.8; EXPRESSED IN PLACENTA, SIGNAL = 2.6; EXPRESSED IN BONE MARROW, SIGNAL = 2.1; SWISSPROT HIT: P40227, EVALUE 1.00e-39; EST_HUMAN HIT: AL551335.1, EVALUE 8.00e-81; NT HIT: AF068483.1, EVALUE 1.00e-100
caagagccaggaagacagagaaaaactagtagaaggtgaaagaaaattcattggatatagagtttaaaaataatagaactgaaaaagtttgtggtgattcagttaaaggatttgttattatttatcaaaatggaattgaccttttgcttaggtgctcttgaaaaagaaggcatagtagctctgcacagagcttaaaggagaaatatagagaggctgtcttttgtcttgtgatgaggtgactctaattcttttgatgacctaactcctgactatgtaggatatgcaggacttctctgtgagtatacatttggagaggaaaaattcacctttattgagaaatataactatcctagctctgtcacattattggccaaagaaccaaataagtatacacacactcaaatcaaagatgctgtaagagatggcttgagggctgtcaaaaaaagctattgatgatggctgtgagttccaggtgctagtgcagtagcagtggcaatggcagaagtccaattaaatataagtccagggctcaactcagag

SEQ ID NO: 9748 - DNA, 530 bp, Homo sapiens
  MAP TO CHR14.3; EXPRESSED IN FETAL LIVER, SIGNAL = 2.2; EXPRESSED IN ADULT LIVER, SIGNAL = 1.8; EXPRESSED IN BRAIN, SIGNAL = 3.2; EXPRESSED IN LUNG, SIGNAL = 3.6; EXPRESSED IN BONE MARROW, SIGNAL = 2.3; EXPRESSED IN HEART, SIGNAL = 1.2; NT HIT: X76770.1, EVALUE 1.00e-117; SWISSPROT HIT: P51003, EVALUE 2.00e-09; EST_HUMAN HIT: BF903156.1, EVALUE 0.00e+00
aaagctcagggggtaaggagattgggtttgtcaggtttgagaattcttacattatatttggtttagccttcattttgaaaagtgggtttgttaagtagttgaaattcagttttttaaatgccagtttattttttgcatgtaaagttattcatgaaatcaaattcagagaaacaaaaacttacaacttgatactgatttggttattttaatttgtatatactcatatatttgctgcttaggtacatcgagtgaaagcattcctcaaactgccacacaaccagccatttctccaccaccaaagcctacggtctccagagttgtttcttcaacacgtctggtaaacccaccacctagatcttcaggaaatgcagcaacttcaggaaatgcagcaacaaaaatacctactcctatagtaggagtcaagaggacatcctcacctcataaagaagagagtcccaagaaaaccaaaacagaagaggtatatatatgaaaaacatattagttagccatggcaacaccaactgcctatt

SEQ ID NO: 9749 - DNA, 590 bp, Homo sapiens
  MAP TO CHR20.3; EXPRESSED IN BONE MARROW, SIGNAL = 1.9; EXPRESSED IN LUNG, SIGNAL =   7; EXPRESSED IN BRAIN, SIGNAL = 1.2; EXPRESSED IN ADULT LIVER, SIGNAL = 1.2; EST_HUMAN HIT: AU140905.1, EVALUE 9.00e-84; NT HIT: gi12742414, EVALUE 0.00e+00; SWISSPROT HIT: O43516, EVALUE 4.40e-02
tgggcagtatgctctaagggggcccgagtgcctggcgtggggggaggttgaggggtcagctgcaaggaccagggtgtgtctgcccacaggaaacctgggcctgctcttgctgccacctctttgtactgtagtcagtgcccccatgcctgcccatcccctcccccggtcactcagggccccctttacctgtactggttctccatggccctgctctcagctcgctctggaacccaggagtaactgtctgccgcattctggggcttcttctccttcttctcctccctcttcgctctccgcttgcgatagaccagtagccccagagccagggccagcaggagtaggatggccaccacggtgcctaggatgtagaataaaagcagcttttgcccgtcagtgccatcgttgttttgtgtggccacggaggagtccccacctgcaggctcctgggggccagaggcagctgtggcgtgatggatgctgggctccctccagacgcctggggacccactgggggccagcatcttgagtggggcagatgtgatgggggcgtcagatgacagcgaaggtctacttgtggtgggtgtagcctt

SEQ ID NO: 9750 - DNA, 524 bp, Homo sapiens
  MAP TO CHR19.3; EXPRESSED IN LUNG, SIGNAL = 0.81; EXPRESSED IN HEART, SIGNAL = 0.82; EXPRESSED IN BONE MARROW, SIGNAL = 1.1; EXPRESSED IN FETAL LIVER, SIGNAL = 1.3; EXPRESSED IN BRAIN, SIGNAL = 0.71; EST_HUMAN HIT: BF062364.1, EVALUE 0.00e+00; NT HIT: gi16177765, EVALUE 0.00e+00; SWISSPROT HIT: O76099, EVALUE 1.00e-45
tcttttggactcccagttgcacaatttgattatgttacagctcacctgcttcaaggatgtggacatttctaatttcttctgtgacccttctcaactcctccaccttaggtgttccgacaccttcatcaatgaaatggtcatatatttcatgggtgccatatttggctgtctccctatctcagggatccttttctcttactataaaattgtttcccccattctgagagttccaacatcagatgggaagtataaagccttctccacctgtggctctcacctggcagttgtttgcttattttatggaacagggcttgtagggtacctcagttcagctgtgttaccatcccccaggaagagtatggtggcttcagtgatgtacactgtggtcacccccatgctgaaccccttcatctacagcctgaggaacaaggacattcaaagtgccctgtgcaggctgcatggcagaatcatcaaatctcatcatctccatcctttttgttatatgggatagaaatggcagcaaa

SEQ ID NO: 9751 - DNA, 587 bp, Homo sapiens
  MAP TO CHR2.3; EXPRESSED IN BONE MARROW, SIGNAL = 5.8; EXPRESSED IN PLACENTA, SIGNAL = 5.3; EXPRESSED IN HEART, SIGNAL = 3.9; EXPRESSED IN BRAIN, SIGNAL = 5.3; EST_HUMAN HIT: BG166629.1, EVALUE 1.00e-101; NT HIT: AF102062.1, EVALUE 0.00e+00; SWISSPROT HIT: P38361, EVALUE 3.00e-10
ccaaaatgtttaagggccagacaagtaaaatctaaaaagaacaatgacaataagaacatcatgaacttatacaaacttggttactttagagatttgtgttagcactcgacagtgttatatctctgaaaaaaatgagtactgacatttgtagaacctgctccacctacttacctagagggtgtgatcggtgtcagatccttccccatggtctggataactcttcttccccaaacccacagaccaacacagataccaacaccaccatagagtagaagccatattggtgttgccacttttgaagaaacatctcctgtgtcataaaccaaatataaagcaaccagaggcccaatggcattgctggaagaaacaaagagggcagaagtgacttttcaggcagaactagatcttggcaagacccaatctgctgaatgatctaccaggttgtctaaagtacagctttcaagctcatctggcaaaagggcctttctttctaaagacataaatggaaccccaacatacacaacagaaaaatgaacacagctctgatggagggaatgccaggcaaatggtggcctctttcctcctat

SEQ ID NO: 9752 - DNA, 502 bp, Homo sapiens
  MAP TO CHR3.3; EXPRESSED IN BRAIN, SIGNAL = 0.8; EXPRESSED IN ADULT LIVER, SIGNAL = 1.3; EXPRESSED IN LUNG, SIGNAL = 1.7; EXPRESSED IN PLACENTA, SIGNAL = 1.1; EXPRESSED IN HEART, SIGNAL = 2.5; EXPRESSED IN BONE MARROW, SIGNAL = 1.1; EST_HUMAN HIT: BF246447.1, EVALUE 1.80e-01; NT HIT: AB026898.1, EVALUE 0.00e+00; SWISSPROT HIT: Q9WTN3, EVALUE 1.40e-01
tcagcagggttctgtgtgtcccagaggccctggctcagagcccacccagaatggacaaggttgcctggtctcccacaggtggtgcccctgcgggctgtggtggccgtgcctgagctgcagctctccaccagctgggtggactttgggacctgctttgtgagccagcagcgagtccgggaggtctacctgatgaacctgagcgggtgccgaagctactggactatgctgatgggtatgtcctaccctgccacctacccaccgttcccctacagggctgtgccaagagaagaccccccaggaaggggcccctgtgcgccgtccctgcatgctggctcccagggcaggcaccacttggaatttctgcagagcagccagtcccccaatcccacatgatctcagggttgccctgccctgcagtgctgagcaagaccagaggtacaggcccgggggtgggtaaagtcttcctgtgggagtacatggggctgcctgcactcatgtgtct

SEQ ID NO: 9753 - DNA, 572 bp, Homo sapiens
  MAP TO CHR3.3; EXPRESSED IN BONE MARROW, SIGNAL = 1.1; EXPRESSED IN LUNG, SIGNAL = 1.2; EXPRESSED IN BRAIN, SIGNAL = 0.88; EST_HUMAN HIT: BG109758.1, EVALUE 8.00e-78; NT HIT: gi16158791, EVALUE 6.00e-78; SWISSPROT HIT: O75030, EVALUE 1.00e-21
tgttttcctccattttcatcgcagagacatgcgctggaacaagggaaccatcttaaaagcatccgtggactatatccgaaagttgcaacgagaacagcaacgcgcaaaagaacttgaaaaccgacagaagaaactggagcacgccaaccggcatttgttgctcagaatacaggtacgcagcctgagttgtgtaaagtttactgctttttaccgacttcaagacagtagaaacagggatataatgagccataggggagttgacttacgtgatcctaacacagtcaatccttattatttgtggattctgtgtgtgtgaatttgcctacttgtaaccccaaagtcagtatctgtggcacttccacagtcattcttggacatgtgcagagtggcacgtttgagctgcccatggcacgcatttccaggtgaggtcgaatgaccctgcctgaggttgactgtctgctgtcttgtttcagctctcatcctctaaacaagtgctcctttcgtggtctgttgagtactttctacatttttgtggtttctgttggtgatttcgctgtttaaaatgaccccca

SEQ ID NO: 9754 - DNA, 530 bp, Homo sapiens
  MAP TO CHR9.3; EXPRESSED IN BONE MARROW, SIGNAL = 1.9; EXPRESSED IN ADULT LIVER, SIGNAL = 4.3; NT HIT: X85117.1, EVALUE 0.00e+00; SWISSPROT HIT: P27105, EVALUE 2.00e-10; EST_HUMAN HIT: BF903257.1, EVALUE 1.00e-130
ctctccacaactctccccagcaccttatctcctccaaatcccaatgaatacagcctctgtcagcatctgggctgggctgaggagatttagcttgccttctctctttctaacagtctactctggatgatgccactgatgcctggggaataaaggtggagcgtgtggaaattaaggatgtgaaactacctgtgcagctccagagagctatggctgcagaagcagaagcgtcccgcgaggcccgcgccaaggtaactttttttttaaacttgtttttcttactgagttttctcttttattaataattataaaaaaacgtaaaacatgcttgctgtaaaaacttgaaataatcttgaagtggtaaagttagaagtgaaaaccctccccgtaacttcaaatcatattcccccagaggtcaccactcctaacagttgagtgtatttggattttatttgaccaggtttttggattactggcttgtttgttttacaaaagtagggttatactgcacatgttgttctgcgctctgcttt

SEQ ID NO: 9755 - DNA, 548 bp, Homo sapiens
  MAP TO CHR2.3; EXPRESSED IN ADULT LIVER, SIGNAL = 1.6; EXPRESSED IN BONE MARROW, SIGNAL = 1.3; EXPRESSED IN HEART, SIGNAL = 1.5; EXPRESSED IN PLACENTA, SIGNAL = 1.1; NT HIT: gi14747215, EVALUE 4.00e-85; SWISSPROT HIT: O75746, EVALUE 1.00e-33; EST_HUMAN HIT: AV721959.1, EVALUE 6.00e-85
atgtaaaaccaccgctggagaagttcataagtgaccaaggtaacaccaaactggggagaggatcgaaacactcgagctgaaaaagagaagcaggggcaggggagacttgaaaccaggacaaatgtggtaaagatagccactgagtcacaggggaggacgctagagccagccagccattctgtatggctccagcccctgcctacctgcagtccctttccaaaatgctgagggcccttcttcccggagaatcttcctgaaacagtcgatgacaccactgtatgtcgtctggccagcgcgggcagccacctgcagtcttgtcttgatgacatcagcaggggtcaccagagatgcagctgggacacctttcaggagaaaaccacatttaatttatctagagtaccttataaaagataggaatactgctaacatctactatagagcctgcaacttcaaccacttgagcggaactcaaaactctttacatagatgtctggccattaatgggaaaagggcatagaagcctattagctgttgcagtgtgatcaggg

SEQ ID NO: 9756 - DNA, 556 bp, Homo sapiens
  MAP TO CHR17.3; EXPRESSED IN BONE MARROW, SIGNAL =   2; EXPRESSED IN HEART, SIGNAL = 3.2; EXPRESSED IN PLACENTA, SIGNAL = 2.5; EXPRESSED IN ADULT LIVER, SIGNAL = 3.3; EST_HUMAN HIT: BI599690.1, EVALUE 0.00e+00; NT HIT: gi14773213, EVALUE 0.00e+00; SWISSPROT HIT: Q9JK42, EVALUE 8.00e-22
agaggagaagactgaggcccggagtccgtgacttgctcagggtcacacagcccagcctcctccccctccctctccctcccttagagggagctgcttgcttgaatgggcaggagcgggacacaggagggaccacccttttgtggtctttccaggcccccgtgtctggcagctgggctgccgctgagctggggtggggtggtctgctgaggagtggacaaggcacagggaggtgggaggggctgaccctgacactccccaggccctgtccacggactcggtggagcgcctgcctgtctacaacaagtcagcctggcgccactaccagaccatccaggaggccggcgactggtgtgtgcccagcacggagcccaagaacacgtccacgtaccgcgtcagctaagggccgccgtgcatctgcacctgagaggacggactgccgcctctgggtccccccaccgtggtgcccctcaccatcctcctgggggagcagggggtgggttctccctgatgaccaggttctgtctctatggaagtcactgcggtgataggtctgtga

SEQ ID NO: 9757 - DNA, 521 bp, Homo sapiens
  MAP TO CHR10.3; EXPRESSED IN ADULT LIVER, SIGNAL = 4.9; EXPRESSED IN BONE MARROW, SIGNAL = 4.1; EXPRESSED IN HELA, SIGNAL = 6.1; EXPRESSED IN PLACENTA, SIGNAL = 3.4; EST_HUMAN HIT: BI457851.1, EVALUE 0.00e+00; NT HIT: AF037207.1, EVALUE 0.00e+00; SWISSPROT HIT: O76070, EVALUE 3.00e-05
gttgtggtgattccagacccgaatgcaggtcgaacagcaagcatggaccccaccccatgccggcgctcagtgggtactgaaactgaagccagccgcagccccccgtgttgtttcctggggtgtggagtggagtgatgccgcctccgcccagcagcctttctgggcccaggagaggactgggcaggtctgagggccggggctcaccttgcgcaccaccccggaggtgaccgcgatgttctccgcctcctccacggtcttggtggccacagtgttgacgctgctcaccacagcctcgctcacggcgttggcctgctccttggtcttctcggccactatgggaggacactggctggcctccaccccagccccagccccaaggcaggcctgctggagtcaggctcgcagccccttcccaggagctcagagccctggccctgctgggaccctcccctgctccctctgactccagggcacctctgatgctggtgggggtaaggagacgcccaccctagtttagcctc

SEQ ID NO: 9758 - DNA, 584 bp, Homo sapiens
  MAP TO CHR1.3; EXPRESSED IN HEART, SIGNAL = 0.55; EXPRESSED IN PLACENTA, SIGNAL = 0.67; EXPRESSED IN BONE MARROW, SIGNAL = 0.67; EXPRESSED IN ADULT LIVER, SIGNAL = 0.6; EXPRESSED IN BRAIN, SIGNAL = 0.77; EST_HUMAN HIT: N36741.1, EVALUE 4.00e-98; NT HIT: gi14730833, EVALUE 1.00e-100; SWISSPROT HIT: P21214, EVALUE 4.00e-20
ttttgtggggacctaggatgtatgtgcagccaagcactgatcagaggaaagacttactggaaaaaccgggaaaatctgttgaatgagcaattttttccaatctgactcttacagaatcatttgcttaagatgtgtggaaaacgagttccgtgtgggaaaataatgactttggtgattgctaaggtcacatatcagtttgactgtaatttaggaaattagcaaccaaaaataattttaaattgcctactcagtgctgtgactgctaacaatgtggaattctttttaaaaacgaattgcgttcattttccgtctttccctatgttgtctctcctctcctgtgtcctttcaggtcctgagcttatataataccataaatccagaagcatctgcttctccttgctgcgtgtcccaagatttagaacctctaaccattctctactacattggcaaaacacccaagattgaacagctttctaatatgattgtaaagtcttgcaaatgcagctaaaattcttggaaaagtggcaagaccaaaatgacaatgatgatgataatgatgatgacgacgacaacgatgatgcttg

SEQ ID NO: 9759 - DNA, 543 bp, Homo sapiens
  MAP TO CHR1.3; EXPRESSED IN LUNG, SIGNAL = 1.8; EXPRESSED IN HEART, SIGNAL = 1.3; EXPRESSED IN BONE MARROW, SIGNAL = 2.4; EXPRESSED IN ADULT LIVER, SIGNAL = 1.3; EXPRESSED IN BRAIN, SIGNAL = 2.4; EST_HUMAN HIT: BF969479.1, EVALUE 0.00e+00; NT HIT: gi14725404, EVALUE 0.00e+00; SWISSPROT HIT: Q28147, EVALUE 3.00e-52
aaggcctaggaaagagccagggcagtctattgaaaaggatataagaagcctttctctacaatgcaagtgttgtgaagacaggtctttatgggctatttcaaccccacccccaattgtcatattacatggttaggatgccaggagacattctgaaagacgataccgcacacatggaaagtttttctccctagttcattagctccccatcacccttccaccccattcccacccaatcccacccttctccatgaccaaaaatatcaaatcagcaaggaaggtgtgggcttcttgcctggccaagcctcttttgcatatttcttcttcttgggttcatttacagcttcagggttatagactgcagggtttggtgcagggttcatgttcactgctgacggcacaacaggagtcaagtccacatcaggggcaaggtttgggtatggcatgggcaagccaccgatgagtgctgtcccatggatgccatgtggctgggagcctgcttcactgtgtgtggggggcaggcccccgtagagtcctccgctgaag

SEQ ID NO: 9760 - DNA, 528 bp, Homo sapiens
  MAP TO CHR3.3; EXPRESSED IN HEART, SIGNAL = 3.1; EXPRESSED IN PLACENTA, SIGNAL = 1.4; EXPRESSED IN ADULT LIVER, SIGNAL = 2.3; EXPRESSED IN BRAIN, SIGNAL = 2.2; EXPRESSED IN BONE MARROW, SIGNAL = 1.9; NT HIT: gi15451859, EVALUE 0.00e+00; SWISSPROT HIT: P56539, EVALUE 4.00e-44; EST_HUMAN HIT: AA418663.1, EVALUE 0.00e+00
gtgaacgcaaagacttgcagtagctgcctcttggcaaatgatcttcccccacgcccaggcatgggggcatcatggtggggctgggggagagcgaagggccattgtgcttctgtggctgggccgtcttttctttctggcttccctacaccgtgtgctccatcatggggtatggagcagtccctaaagagaaagagctcgccagcagcccctgtgaagaagtcccccggggaccagtctggcccaccaccccctgccctgccaccgctgttgccccacctggctttagacctccttccgcagcaccaccttgatgctgctgcagacctggcccagggccgcgaagagtgggttgcagaaggtgcggatgcagagtgagtagatgtggctgatgcactggatctcgatcaggtagctcttaatgcatggcaccaccgcccagatgtggcagaaggagatgcaggcgaacaggaagccccagagcagggccagtgggacgcccagcagcgtggacaacagacggtagcacca

SEQ ID NO: 9761 - DNA, 515 bp, Homo sapiens
  MAP TO CHR5.3; EXPRESSED IN ADULT LIVER, SIGNAL = 1.1; EXPRESSED IN BRAIN, SIGNAL = 1.2; EXPRESSED IN BONE MARROW, SIGNAL = 1.6; EXPRESSED IN LUNG, SIGNAL = 0.99; EXPRESSED IN HEART, SIGNAL = 1.3; EXPRESSED IN PLACENTA, SIGNAL = 1.7; EST_HUMAN HIT: AW604175.1, EVALUE 4.00e-70; NT HIT: L37738.1, EVALUE 0.00e+00; SWISSPROT HIT: P20700, EVALUE 2.00e-23
tttgataggtgatgggagcctttatttaaactacttcttttgtttgtcccttcagcagagagggagaagacctcaagtcatcagtatggtttgatgtcttatgctttttaaatctgttccagctatgctaagaaggaatctgatcttaatggcgcccagatcaagcttcgagaatatgaagcagcactgaattcgaaagatgcagctcttgctactgcacttggtgacaaaaaaagtttagagggagatttggaggatctgaaggatcagattgcccaggtaaggtcaagcctactcttgagccgtatgtgacaggttaattgcctcatctgccttaagccatagtttgattgattgattgattttcaaatgtattttatttttgaaattttatatatttgttttctgatggtttacttgaagaaaagtcttgaggtagctaacatgcaaaacattatcacctcccaggcattatatctggattggccagatcttgtggttcccttcttcttccc

SEQ ID NO: 9762 - DNA, 542 bp, Homo sapiens
  MAP TO CHR6.3; EXPRESSED IN LUNG, SIGNAL = 1.9; EXPRESSED IN HEART, SIGNAL = 1.9; EXPRESSED IN PLACENTA, SIGNAL = 1.7; EXPRESSED IN BONE MARROW, SIGNAL = 1.8; EXPRESSED IN FETAL LIVER, SIGNAL = 2.6; EXPRESSED IN BRAIN, SIGNAL = 1.6; EST_HUMAN HIT: BG771084.1, EVALUE 0.00e+00; NT HIT: gi14747574, EVALUE 0.00e+00; SWISSPROT HIT: P20488, EVALUE 1.00e-03
agatgacagcgagtgggaagatgtggatgatgagaagggagatagcaatgatgactatgactctgcaggcctattgtcagatgaagactgtatgtctgtgcccggaaaaactcacagagctatagcagatcacttgttctggagtgaggaaacaaagagtcgcttcacggagtattcgatgacttcctcagtcatgaggagaaatgaacagctgaccctacatgatgagaggtttgagaaggtaaggtccccacataagggatgctttagtactatcttatgttaaatttttttttttaatacctgtcagctttagcccaggttgaagtgctcaccaaccacaaagtcaatcataggaagtttacaactatccagctataggttcgtgtagccagcataaagcagaagggtatcagtgcagtacaggagcacaaagactgcaaagggagcatagaactgtgcagaagaagagtaattggttaggaggatgtgacttttccaatttacatcacacgcttacaccaggaggtggctcaaatgat

SEQ ID NO: 9763 - DNA, 515 bp, Homo sapiens
  MAP TO CHR19.3; EXPRESSED IN FETAL LIVER, SIGNAL = 2.1; EXPRESSED IN BRAIN, SIGNAL =   2; EXPRESSED IN ADULT LIVER, SIGNAL = 1.9; EXPRESSED IN BONE MARROW, SIGNAL =   2; EXPRESSED IN HEART, SIGNAL = 1.6; SWISSPROT HIT: Q9RRR1, EVALUE 3.20e-01; EST_HUMAN HIT: BF755177.1, EVALUE 1.00e-119; NT HIT: gi11424606, EVALUE 3.00e-95
accatccttaacatgcagcccctgggcctgcactcccacgtgacaatagcaggtagcaggtggggtgaggaggggcacacttcacacagggcacatgccaactggccgcagtccccgccactcccaactgccttactccagcctgctgcactcattcccactattgcccggccctgcaggtgggtaggtatagagtccaaggtctaagagaaagttgcctagcgacaggtctgcagctagggatgtggcttccattcccattctcagaacggggtcccctcccactgtcctggtgctgagacgacccagtccctggccgcccatggacagagtgtaccttcatagagaatgccctggttgtccctggtctggaaggacttcagcttccactgtcgcccactcttgtctgtcagcactgtccctgtgggcaaagcttcaagtgaggtggtcactcggctccgcttcagcgtctgagggctctgcctggtcttctgagggctacagctggtcttctg

SEQ ID NO: 9764 - DNA, 556 bp, Homo sapiens
  MAP TO CHR5.3; EXPRESSED IN LUNG, SIGNAL = 1.2; EXPRESSED IN HEART, SIGNAL = 0.89; EXPRESSED IN ADULT LIVER, SIGNAL = 1.1; EXPRESSED IN BONE MARROW, SIGNAL = 0.87; NT HIT: gi11417110, EVALUE 0.00e+00; SWISSPROT HIT: O95450, EVALUE 4.00e-78; EST_HUMAN HIT: AI417257.1, EVALUE 0.00e+00
gtcttgtcccgctattgctccatcccaggctacaacaagctgtgctgcaagtcctgtaacctgtacaacaacctcaccaacgtggagggcaggatagagccaccgcctgggaagcacaacgacattgacgtgttcatgcctaccctcccagtgcccactgtagccatggaggtgcggccatcaccaagcacccccctggaggtccctctcaatgcctccagcaccaatgccacagaggatcacccagaaaccaatgccgtagatgaaccctacaaaatccatggcctggaagatgaagtccagccacccaacctaatccctcgacgaccgagcccctatgaaaagaccagaaaccaaagaatccaagagctcattgatgagatgcggaagaaagagatgctcggaaagttctaataaaatggaaagatagcatccctagcatttttttcttgcttatagagatattccatgggatagcaaatcctgtgtcatggagatgaagtcaaaattcctgattccaaaaggttttgagaaaacaaagagggggaatgacgta

SEQ ID NO: 9765 - DNA, 560 bp, Homo sapiens
  MAP TO CHR10.3; EXPRESSED IN BONE MARROW, SIGNAL = 0.88; EXPRESSED IN LUNG, SIGNAL = 2.5; EXPRESSED IN BRAIN, SIGNAL = 0.77; EXPRESSED IN FETAL LIVER, SIGNAL = 0.67; EST_HUMAN HIT: AW173009.1, EVALUE 1.00e-103; NT HIT: gi4885348, EVALUE 1.00e-103; SWISSPROT HIT: Q62833, EVALUE 2.00e-32
ttgatccactgaaagggaggagcaggtgtgagccccttatcagccaaggaggccgcaggcagggtcaccgcagaggccatctgggtgcaggggagcagggtgaggctcctctgttccctcacaccccagctcccaggatcctgaggagggaagtggaagtgagtggccattgtcacaacctccccatggcactgttcttgtgctcccaggtcaacctggcctatgcctacgagaccaaggatgcactgtgcttggtcctgaccatcatgaatgggggtgacctgaagttccacatctacaacatgggcaaccctggcttcgaggaggagcgggccttgttttatgcggcagagatcctctgcggcttagaagacctccaccgtgagaacaccgtctaccggtgagtggaaggcaccaaggacttccaagtctaagtccgagggggtggggccagcccctccacaccctcgggcaggtggttgccatcgctctgggaatcagccctggtcagcaccaggggaggatgcagagtcagacagactttccactccaggaagctg

SEQ ID NO: 9766 - DNA, 571 bp, Homo sapiens
  MAP TO CHR5.3; EXPRESSED IN ADULT LIVER, SIGNAL = 1.3; EXPRESSED IN BRAIN, SIGNAL = 1.2; EXPRESSED IN BONE MARROW, SIGNAL = 1.7; NT HIT: D16361.1, EVALUE 1.00e-119; SWISSPROT HIT: P22352, EVALUE 1.00e-23; EST_HUMAN HIT: BF724299.1, EVALUE 4.00e-83
ccagtcatcagctttagggcagtctccctgagagcccagtaaatgttctgaaattgacatgtgatgtggaagtaattagcaaaataagtcattctccagggttccatagcactcacttattaagtgcttaatattaataagtgcttattaggtgcttaatattaataagtgctttttaagcacttaatattaagtacccgaaaagcacttattaagtgctttcataatcattatcttaaacaaggaattaggagacgtcagtgctagtccagttccaattctcggtgattactttgagaaagtcactctctctgttgggatctttcattcttttgaaaacggagatgtccaagttcctttccagctctaactgctccttttatggcctgtgttccagatggactgccatggtggcataagtggcaccatttacgagtacggagccctcaccattgatggggaggagtacatccccttcaagcagtatgctggcaaatacgtcctctttgtcaacgtggccagctactgaggcctgacgggccagtacattggtaagagcccacccttcctc

SEQ ID NO: 9767 - DNA, 537 bp, Homo sapiens
  MAP TO CHR4.3; EXPRESSED IN BONE MARROW, SIGNAL = 2.8; EXPRESSED IN LUNG, SIGNAL =   1; EXPRESSED IN HEART, SIGNAL = 2.1; EXPRESSED IN PLACENTA, SIGNAL = 1.9; EXPRESSED IN FETAL LIVER, SIGNAL = 1.1; EXPRESSED IN BRAIN, SIGNAL = 2.2; EST_HUMAN HIT: BG326527.1, EVALUE 3.00e-49; NT HIT: AF200708.1, EVALUE 7.00e-59; SWISSPROT HIT: Q9UPY5, EVALUE 2.00e-14
atcccactccaaatccttccagtagaaatttggaactgtaagcaaaaagaacatgatgtgagaggcaatcccgcaatgcaaaaagtctaaagacactttgtcttcaatcatttttgtgttgtttttcctttttcacatatatagctataatactcacttatgcccacagctgtaatgagcttgatcgcaagttcagggatttcacattgaataaaaaatggttccagaatgtagcgtccaaatgccagggatatcacagcagtagctgcagggctaaaaaaaaatgtatatatttaggttaaccacaggggaaaaaactgcattttcattaattttttctaccttgagtgtatttagcatatggaacatgttaaatatgaaagtccatagttttcagaattccgtacttgattaggttgccatagacattccaaatgaagtacttcctgtaacactggtggctagattttaaacttcacatattcttgggaacaagggtaagtactatcaacttttcccctgctctcccatatttga

SEQ ID NO: 9768 - DNA, 537 bp, Homo sapiens
  MAP TO CHR11.3; EXPRESSED IN HEART, SIGNAL = 0.71; EXPRESSED IN ADULT LIVER, SIGNAL = 0.65; EXPRESSED IN BRAIN, SIGNAL = 1.1; EXPRESSED IN BONE MARROW, SIGNAL = 1.1; EST_HUMAN HIT: BI764547.1, EVALUE 1.00e-126; NT HIT: X07819.1, EVALUE 1.00e-126; SWISSPROT HIT: P09237, EVALUE 9.00e-63
gccaatcatgatgtcagcagttccccatacaactttcctgaaatgcagggggatctctttgccccacatgtttaaagcctttgacactaatcgatccactgtaatatgcggtaagtctcgagtatatgatacgatcctagtagcaaacaagaaaacaatgtttgacccctaggaaacaggctttattgtttttgccaaaatgagccagagcaaaactaacctgtaggtgaccactttggaagtccattttgggctatttggaaatagtgagtattctgcaacatctggcactccacatctgggcttctgcattatttctatgacgcgggagtttaacattccagttataggtaggccaaagaatttttgcatctccttgagtttggcttctaaactgttggcattttttgtttctgagtcatagagataaaatctcttgagatagtcctattgaaaagagagtaattaatctatagttcttgtttattatattcttttatcttagaagcctatatatctcttgcctttggttcctgt

SEQ ID NO: 9769 - DNA, 512 bp, Homo sapiens
  MAP TO CHR2.3; EXPRESSED IN ADULT LIVER, SIGNAL = 1.3; EXPRESSED IN HELA, SIGNAL = 2.1; EXPRESSED IN BONE MARROW, SIGNAL = 1.3; EST_HUMAN HIT: BG420336.1, EVALUE 0.00e+00; NT HIT: AF102059.1, EVALUE 0.00e+00; SWISSPROT HIT: P45268, EVALUE 1.00e-17
gggttccagaaatagggagcttcaaaaacgaagccacgagttgccacacagcagaacctgaaacatagtaaagttttattaagtaaatatcaaaattccattatgtaagtggcacattcagaaaggttaatcggaaaggttatgcacaaaaatggaaccacccatgatacaaatttgctcacccaccacgaagaggacaaaacataaaaagaacttaccaaacatagcactgactgagccggccatcagcagcccttgagtcgagttgtacatctccacgtcaatcaagcccttccggatggtttcgctcactttggcccccagtaagacagagcccactgtttcaaagatgctagctaggatgcaggcttgcttcagggtcactacacctgagcccacagctgtaccaaaagaatttgctacatcattggctcccacggagaatgccaagacaaatgcaataatgaagcccaggatgagcatccataggtagtccaccaaaggaccagaag

SEQ ID NO: 9770 - DNA, 537 bp, Homo sapiens
  MAP TO CHR12.3; EXPRESSED IN LUNG, SIGNAL = 0.85; EXPRESSED IN HEART, SIGNAL = 1.1; EXPRESSED IN PLACENTA, SIGNAL = 0.93; EXPRESSED IN BONE MARROW, SIGNAL = 0.81; EXPRESSED IN FETAL LIVER, SIGNAL = 1.5; EXPRESSED IN ADULT LIVER, SIGNAL =   1; EST_HUMAN HIT: AI916293.1, EVALUE 0.00e+00; NT HIT: gi6754411, EVALUE 3.00e-36; SWISSPROT HIT: P28284, EVALUE 3.40e-01
accaccccctcatattttccatccacctcctcgctcctgccctcccccgccctccccaacccacgcccgggtgggccaatcgctgctcggtattccaggcgctttctcaggtttctgctgatcttgcagcgcccagaaatggaccgagcggacccgccgccgcacgcaccctgctccactccaagctcctaagggctcctggcgcgccgcgtagccttggcgaggtccgcgctggggtgcggagagcgaagggaactggagagccatgtagatccaggctctcgcccgcccgcctccttcgggatcgaatcaagggctcccatagtgttaggagggggcgagagtgctgtttatcgtcatttgcctcggagcttcgagagagggtggtattttgcttttccgccccgcatcctccggaactccctgcaccggagagaggacggcgtctccaggttgctggcaaccggtgagaatgggggtagggaaggaacattttcgccgtagctgctccgtaaagcgattgtccaactgagaggg

SEQ ID NO: 9771 - DNA, 526 bp, Homo sapiens
  MAP TO CHR11.3; EXPRESSED IN BONE MARROW, SIGNAL = 0.67; EXPRESSED IN ADULT LIVER, SIGNAL = 0.66; SWISSPROT HIT: P97434, EVALUE 2.80e+00; EST_HUMAN HIT: BE703269.1, EVALUE 2.00e-90; NT HIT: gi14783690, EVALUE 2.00e-80
tttgcccttgaagagacctggggcttggccttagaagcttccaagtaatgggcccagtcactcatttccctgttcagcacgtgtatcgagcttctgctatgcatcagacccaatgggaggcaggaggtgaacaagacagaaagaggtcctgccctcatttcagggggtagacaagaaaaaggtggttgtaacactagggactgaggctgaggggacttgggagtctgtctggggcttctattcccagcaggctctgggatcagcctgcctagtgcatctggaatatcgtacaggctccatcctccgccgctggaagcggaactggtttgccctgtggctggacgggaccctgggatactaccacgatgagacagcgcaggacgaggaggaccgtgtgctcatccacttcaatgtccgtgacataaagatcggcccagagtgccatggtgagcagaagccccttcctctgtggcaccgtgactgtgggcagagcctcccgctgtctccgagaacacttgctgttgga

SEQ ID NO: 9772 - DNA, 584 bp, Homo sapiens
  MAP TO CHR6.3; EXPRESSED IN LUNG, SIGNAL = 0.8; EXPRESSED IN ADULT LIVER, SIGNAL = 1.2; EXPRESSED IN BRAIN, SIGNAL = 1.1; EXPRESSED IN BONE MARROW, SIGNAL = 1.3; SWISSPROT HIT: O00294, EVALUE 5.00e-29; EST_HUMAN HIT: BE780807.1, EVALUE 6.00e-88; NT HIT: AF034922.1, EVALUE 0.00e+00
agtgatgagccccaagacacctgcttagaatatctgaggctcctgagagcacagtgtcagtgcctatggaggagagagtgaccctgtgggatgtcccagctctcgggataaaggctggtgtgtgtgtgtgtgagggggtgaggggagcttgaatgaaggtcagcatcctgggggtggtggagaagagccagacctgggccctcaggtactcacggtcatcagcgtggacaatctggaagttcttgactgaggcctgggtgacccggccttggaagttgagggtgtaggagccactgtcatcgttccagacaggtggcttgttgtgcagttctatgaggctctccagcgtcttgttctgccagcgcaccagcaggccgtcactagcctggggtgccccaggggagtagacagggagaggacagttagagatggctgagatggctcaggactgaccggagaaggggcctgggcatgtgtgcacaggggtgtggcctggacatcttcatccattagggtatctgagaataggcttggcatctgtggcatccttgtggacagggttcacatctgtgagaatggggctt

SEQ ID NO: 9773 - DNA, 597 bp, Homo sapiens
  MAP TO CHR11.3; EXPRESSED IN HELA, SIGNAL = 4.8; EXPRESSED IN BONE MARROW, SIGNAL = 4.2; EXPRESSED IN ADULT LIVER, SIGNAL = 4.1; EXPRESSED IN FETAL LIVER, SIGNAL = 3.9; EXPRESSED IN BRAIN, SIGNAL =   4; NT HIT: gi12736589, EVALUE 1.00e-106; SWISSPROT HIT: Q15293, EVALUE 3.00e-34; EST_HUMAN HIT: AA457719.1, EVALUE 1.00e-106
cattttggattgtgcaggtgtttgatcttttgctggaccagcatcacacaagccttgataatataacagccttgtgcctgtgtgtgggtttctttttttttttttttgtactgcaggaagattgttgatcgaatcgacaatgatggggatggctttgtcactactgaggagctgaaaacctggatcaaacgggtgcagaaaagatacatctttgataatgtcgccaaagtctggaaggattatgatagggacaaggatgataaaatttcctgggaagaatacaaacaagccacctatggttactacctaggtaagaggtgctgcaggagcgatgacacagtgggggcccagatcacaagctttttgtagactctctcttctcttatcatatccactcccttcagggagatgtcacagcctcctaagtagaacctgcttgtataacaccctcctctgtaaactcagaatgtactgagttgcttacactgaatgaagttacaggtgggagggaagggctgtgagggctaataaaaaaaatcccttagattgagaccccatctcaacttcgtctcagatgcacacacggagaagaaagca

SEQ ID NO: 9774 - DNA, 523 bp, Homo sapiens
  MAP TO CHR12.3; EXPRESSED IN LUNG, SIGNAL = 1.7; EXPRESSED IN BONE MARROW, SIGNAL = 1.5; EXPRESSED IN FETAL LIVER, SIGNAL = 1.5; EXPRESSED IN ADULT LIVER, SIGNAL = 1.7; NT HIT: gi13650342, EVALUE 1.00e-60; EST_HUMAN HIT: BF856908.1, EVALUE 2.00e-59
ctggatagccacaggaggagactttctaagagatggttgctgtgtttgttggtgtgaggggcccaaagttgaaattttatagatatacatcttcaatgttctgttttccctgttaacacccagattttccttttattcttaggaatccagcactacgccctgccctctactgactggaggcaggcctctgcctactttagaagttaaaccacccgataggccttcgagcaaaagcaaagatccaccgagagaagaagagaaagaaaagaaaaagaaaaagcacaaaaaaagatctcgaacaagatcacgttctcccaagtaccattcgtcatccaagtccaggtctagatcacactcaaaagcaaagcattctcttcccagtgcctatcggacagtgcggcggtcgaggtgggtgtgaagggggcagcacctctggtaccctcatgacccccatgtccttcacaggacacccagtagagctaggtagaacgtttaaaatcagtgccgctttcattaagcagac

SEQ ID NO: 9775 - DNA, 566 bp, Homo sapiens
  MAP TO CHR1.3; EXPRESSED IN HEART, SIGNAL = 0.88; EXPRESSED IN FETAL LIVER, SIGNAL = 1.1; EXPRESSED IN BRAIN, SIGNAL = 0.71; EXPRESSED IN HELA, SIGNAL = 4.6; EXPRESSED IN BONE MARROW, SIGNAL = 0.96; EST_HUMAN HIT: AI583204.1, EVALUE 0.00e+00; SWISSPROT HIT: P55001, EVALUE 1.00e-05; NT HIT: gi13639107, EVALUE 0.00e+00
cacacccgcatcattatctggccacctagccacccacctgatgtttattcaacacatattatccaccaggcccacttccaggacaccctgagctcccctccttgctacttttcatcctcaaaacactcccatcaccagagttgggggaggggcagcggttcccatcacccagctccaccctgaccctgcctccttcctgcccccaatagctgacctctgtcgggacaagttctccaaatgtggcgtgatggccagcagcggcctgtgccaatccgtggcggcctcctgtgccaggagctgtgggagctgctagggtggtgctggcatcctgagtcctggccctcctgggatctggggccctcgggccctgcctgacctggtgcttttttccccatccccatgttccttttattctgtaaaaagttagtggactgcagccctgggggttgcaggctgcggtgcctcaggcccctccttcagcctgtggccacctctggggcacaatgggggctccccactgcccagtctgcccctcgggttgggggagtatcccaggcctctctgtg

SEQ ID NO: 9776 - DNA, 570 bp, Homo sapiens
  MAP TO CHR5.3; EXPRESSED IN BRAIN, SIGNAL = 0.62; EXPRESSED IN LUNG, SIGNAL = 1.6; EXPRESSED IN PLACENTA, SIGNAL = 0.8; EXPRESSED IN BONE MARROW, SIGNAL = 0.93; EST_HUMAN HIT: BI907591.1, EVALUE 0.00e+00; SWISSPROT HIT: Q64692, EVALUE 4.00e-15; NT HIT: gi15296457, EVALUE 0.00e+00
tccaatgcacaaggtgtctcatctgaaaagaaacctgagccccagggaggcggcgcggagcgaccctggcagagctggcgcaaacagggcgagaggtcgctgggcagcgttcgaggaccagagggagctcggccacagaagaccccagtgatctgatcccgggatcccggctccaagctctcctcgcattttacagatttcacccccgcgactatctccccaaaacggagcctttatatcaagagaaggtgcgggagctggggcaaccaggactttctcgggcacccaagatgcgctccattaggaagaggtggacgatctgcacaataagtctgctcctgatcttttataagacaaaagaaatagcaagaactgaggagcaccaggagacgcaactcatcgggtaaatgcaaagcttcatttcaggatatgacaaaaagtcaagccataaatgaaatgtgaatatagagggtagagtgatggttaggatagcatgtgtgtttgtttgagcttgcgcgtggttagtgtcatgaattaaataacaaaggctgttgttgagatgtgcgtgct

SEQ ID NO: 9777 - DNA, 546 bp, Homo sapiens
  MAP TO CHR4.3; EXPRESSED IN HEART, SIGNAL = 1.1; EXPRESSED IN ADULT LIVER, SIGNAL = 2.4; EXPRESSED IN BONE MARROW, SIGNAL = 1.7; NT HIT: gi13628067, EVALUE 1.00e-121; SWISSPROT HIT: P28332, EVALUE 8.00e-42; EST_HUMAN HIT: R94266.1, EVALUE 1.00e-114
aaaatgttgaagggggtgtgggatgactaggtagatagcagagaactcaaggatgtttggagtcaggcttgggatttttcctttggtatgataagagatgacaaagatgcaagaggcctttcaactccatatcccaataattcccttccaaatgggtataaatgcccctcaccttggcagtattgattgcagcaccaaacccagtggaaaagccacagctaattaggcatactttctctagaggagcgactgcatcaatcttggcaactgagatttcctttatcactgtgtattcacagaaggtgctggtattaccaaagtgatatattgattttcccttgcaggtaaacctgctggtaccatcagacatcagttgggtttttgactgtcttttatagacaaaacaaaaaacaaaacacaaagtttattttgaattagaaagcttagatcttctccaatgaaagtgaattaagttttcaaaaagaaaatattagtaaaaacttacttgaattgtatacaaaaattgccctcagaattcaggcaaga

SEQ ID NO: 9778 - DNA, 600 bp, Homo sapiens
  MAP TO CHR20.3; EXPRESSED IN LUNG, SIGNAL =   7; EXPRESSED IN HEART, SIGNAL =   4; EXPRESSED IN HELA, SIGNAL = 4.4; EXPRESSED IN PLACENTA, SIGNAL = 2.8; EXPRESSED IN BONE MARROW, SIGNAL = 4.6; EXPRESSED IN BRAIN, SIGNAL = 4.4; EXPRESSED IN FETAL LIVER, SIGNAL = 3.7; EXPRESSED IN ADULT LIVER, SIGNAL = 3.5; NT HIT: U09366.1, EVALUE 9.00e-74; SWISSPROT HIT: P52736, EVALUE 6.00e-17; EST_HUMAN HIT: BG818388.1, EVALUE 8.00e-66
tgatatctcacctgcctcccccagggcagccttatccctgcccctcaccctgccatgggcaaggctggcttctgagtgagcagggctcagttttgtgttacaggcacacatggcattcagggatgtggctgtggatttcacccaggatgagtggaggctgctgagccctgctcaaaggactctgtacagagaggtgatgctggagaactacagcaacctggtctcactgggtaagcctgatatctgttaggattcccattcttattgctgggaattttaggctatgcttgaagcagccatcttgctttgttacttgacctttgggttggaccaaaaagcaactacattttattcgtgtttccccagggagggtctgattttgcagagtggaaaatgggtagatttgttgtgtgtgtgcatatgtgtattgtgtgtgctactctgcatttctaggccttttttctcaggctggggttctcatcctatgttaacttgttttaaatgagaggggtgttcatctactcggcatggaatagaatcagtgtactctcatctgagttcactgcccactcatcccttccatttctgagagccccactc

SEQ ID NO: 9779 - DNA, 525 bp, Homo sapiens
  MAP TO CHR4.3; EXPRESSED IN HELA, SIGNAL = 3.5; EXPRESSED IN PLACENTA, SIGNAL = 1.2; EXPRESSED IN LUNG, SIGNAL =  14; EXPRESSED IN BONE MARROW, SIGNAL = 1.1; EXPRESSED IN FETAL LIVER, SIGNAL = 6.6; EXPRESSED IN BRAIN, SIGNAL = 0.91; EST_HUMAN HIT: BG542933.1, EVALUE 0.00e+00; SWISSPROT HIT: P19875, EVALUE 3.00e-28; NT HIT: X54489.1, EVALUE 0.00e+00
ctgggaatatcctctggcaccagaacagattaataaccttaatggcaactttgtgaaaataataattttttcagtcctgcagctaaccctgggttttcctgatttactttttagggggcagacgccagtatttctgaccaacagctccagtcgcctgtgtacatggaaattataacttactttttcagcatcttttcgatgattttcttaaccatgggcgatgcggggttgagacaagctttctgcccattcttgagtgtggctctgcagagagaagggaatctcgtgagacaggaggtcgggctgaggacagggtttggggcagcgggagagtcggggaccccagcagtggcagcggcagcgatgggcgagacttacatgacttcggtttgggcgcagtggggtccgggggacttcaccttcacactttggatgttcttgaggtgaattccctgcagggtctgcaagcactggcagcgcagttcagtggccaggggcgctcctagggaagaagagactcgctga

SEQ ID NO: 9780 - DNA, 594 bp, Homo sapiens
  MAP TO CHR2.3; EXPRESSED IN ADULT LIVER, SIGNAL = 1.3; EXPRESSED IN BRAIN, SIGNAL = 0.86; EXPRESSED IN LUNG, SIGNAL = 0.85; EXPRESSED IN BONE MARROW, SIGNAL = 0.87; EST_HUMAN HIT: BI823626.1, EVALUE 7.00e-57; SWISSPROT HIT: O95754, EVALUE 7.00e-32; NT HIT: gi14738413, EVALUE 6.00e-81
tctgcctgtgacctctgttgcttccctcagtgggtccctgatagcccatctcctccctgtcgccctgcagggggggtcctctatgctgccactgtgaaaaactacctggggacggagccaattatcaccagagcagtgggtcgtgccgaggactggattcggacagataccttgccttcctggctgaacggtggggagagggagaggggtcctctggggagaccgatggggtggagtctgggaagtcctaggttgtgtctgtgaggatctgaggccactggtattcccagccccagcctttgtcgcagccgtggccttgagcccagccgaatggggggatgaagatggagacgacgaaatctacttcttctttacggagacttcccgagcatttgactcatacgagcgcattaaagtcccacgggtggcccgtgtgtgtgcggtgagaccccatcccagctgtctgtctgtcatctcctgctctgtctgtcccccgtcttatcttttcctctttgggtctctgtctttgaatctctcctgtgtctcctattttctctgccttgacttctcttctgggagcttgaggaatgtgag

SEQ ID NO: 9781 - DNA, 592 bp, Homo sapiens
  MAP TO CHR2.3; EXPRESSED IN PLACENTA, SIGNAL = 1.3; EXPRESSED IN HEART, SIGNAL = 1.5; EXPRESSED IN BONE MARROW, SIGNAL = 1.8; EXPRESSED IN FETAL LIVER, SIGNAL = 1.5; SWISSPROT HIT: O75746, EVALUE 2.00e-25; NT HIT: gi4507006, EVALUE 3.00e-86; EST_HUMAN HIT: T33085.1, EVALUE 4.00e-86
ggtgacatagacccatgttgggacaaacacataatttggacaccaagaaatataaaccacaagaagaagaaatgaagaccttatttgcagattaatattgctaatcaccagaaagaatgcaaaaagggaaatgagcaaagagaaaataaaaagagagaaacagacctagtctggctaggcatactacatattggcttccataattagtgagttaaaatctgctgctggtgagatcaaatcactaacttcagcagctgggatttgcttactcacccctgtagagtccaaagaagccctcataacgcaagactttcttaaaacagtcaaagctgtttttgtacattagctccccaacaacagagccagagccacgctggttttgcattcgggtcttcaccagatctataggatacactgcagtggctcccacagctacaaacagaacaatttttaggcttaaaaaagaacacaattaaatggagagtccataaggatgacaaatcttatcttaaaggatgagaaaataaaacacaacatgtattctcacaaaagagagtttattatttttctttccctcacaaacaccttaggg

SEQ ID NO: 9782 - DNA, 546 bp, Homo sapiens
  MAP TO CHR9.3; EXPRESSED IN PLACENTA, SIGNAL = 1.5; EXPRESSED IN ADULT LIVER, SIGNAL = 3.9; EXPRESSED IN FETAL LIVER, SIGNAL =   3; EXPRESSED IN BRAIN, SIGNAL =   6; EXPRESSED IN BONE MARROW, SIGNAL = 1.9; EXPRESSED IN LUNG, SIGNAL = 3.3; EST_HUMAN HIT: BG753672.1, EVALUE 9.00e-90; NT HIT: AF288147.1, EVALUE 0.00e+00; SWISSPROT HIT: P49813, EVALUE 1.00e-03
tgggtctccaccttagcaactgcagatcttgctggtctctatagccttgcaagctaaagccttataacaaatctctctctccccttctctctctgtctcgacacacacacacacatacacacacacacacacacacacaccctattggttctctctttctctggagaaccctaatacaacacattaaaagaaaaatctgcaaaggcaaagttataccaatgtcattgccatggaaggaaaaaggaagtggtggctttaggaagcatccacctgtccctccccaggtcccctcgctagtgacaatgtgcttccctttagcacctactcacatcagggtccagctcatccagctcattttccagggtcctcagctcttcctctgttagggctccaaggatttcatcttcatccaggtcacggtatttctctagttctcgtctgtacgacatcgtggaagaacttgtctgtgtctcctgaatttctgtgctgagtaatacctaccagaaagacaagaaccttagaaagacccgtctcagatttgctctc

SEQ ID NO: 9783 - DNA, 533 bp, Homo sapiens
  MAP TO CHR21.3; EXPRESSED IN BONE MARROW, SIGNAL = 1.9; EXPRESSED IN HEART, SIGNAL = 1.4; EXPRESSED IN ADULT LIVER, SIGNAL = 1.7; NT HIT: AB063285.1, EVALUE 0.00e+00; SWISSPROT HIT: P50747, EVALUE 2.00e-19; EST_HUMAN HIT: BE708069.1, EVALUE 0.00e+00
ttcaaatgcccctgaaaaacatcctgtattaaatgtctaacactgattgtaactgcacaaaagaagaatgataacctgagcaataatgccaccggttaaacatcttttttcataatattcgtttatcaaagaacattctgagggcctgattcaaagaagcaagacacaaagcacaaccaccttccattcccataaaaaacaaacctgtgatcaaagaacttcaatttcctttcccacgatttaactcttctaggacaagagtacttccaccttgctaataggtctggtcaaacgtattcctctacaactctatcccctccccgtctattggtaagagaggatgatcaatggaacaggactcctctgagcagatgcagacctgctcacaccttacccatccaggagacgcatcgttgtgggggtcacttcggcaaacaaaattactttccccaactgcttggtctgcagattttggcgatagatctctaagttgaaatgttctgatgagaaggcctccatgttggtcaccacag

SEQ ID NO: 9784 - DNA, 574 bp, Homo sapiens
  MAP TO CHR4.3; EXPRESSED IN LUNG, SIGNAL = 0.47; EXPRESSED IN BONE MARROW, SIGNAL = 0.92; EXPRESSED IN HEART, SIGNAL = 1.1; EXPRESSED IN BRAIN, SIGNAL = 0.62; EST_HUMAN HIT: BF770348.1, EVALUE 1.00e-124; NT HIT: M73963.1, EVALUE 3.00e-30; SWISSPROT HIT: P25490, EVALUE 3.00e-62
gaagcaagctcccttgaatgttctttggaatacatgaaaaaaggggtaaagaaagagcttccacaaaagatagttggagagaattcgcttgagtattctgagtacatgacaggcaagaagcttccgcctggaggaatacctggcattgacctatcagatcctaaacagctcgcagaatttgctagaaagaagccccccataaataaagaatatgacagtctgagcgcaatcgcttgtcctcagagtggatgcactaggaagttgaggaatagagctgccctgagaaagcatctcctcattcatggtccccgagaccacgtctgtgcggaatgtgggaaagcgttcgttgagagctcaaaactaaagagacatttcctggttcatactggagagaagccgtttcggtgcacttttgaagggtgcggaaagcgcttctctctggactttaatttgcgtacgcacgtgcgcatccacacgggggagaaacgtttcgtgtgtccctttcaaggctgcaacaggaggtttattcagtcaaataacctgaaagcccacatcctaacgcatgcaaatacga

SEQ ID NO: 9785 - DNA, 502 bp, Homo sapiens
  MAP TO CHR21.3; EXPRESSED IN BRAIN, SIGNAL = 2.1; EXPRESSED IN BONE MARROW, SIGNAL = 0.74; EXPRESSED IN HEART, SIGNAL = 0.75; EXPRESSED IN PLACENTA, SIGNAL = 1.1; EST_HUMAN HIT: AW197823.1, EVALUE 1.00e-57; SWISSPROT HIT: Q13009, EVALUE 3.00e-29; NT HIT: gi4507500, EVALUE 1.00e-125
gggctcctctactgggtttctgtctttcattcaatgtaatattgttccgtttagctattaacaatcagctatgaacaaagggtgaagaacactgacagtcacagtaaagaacttagcatcctggatgacaggctgtcgaggagatatccgatgatgtttcacgattccaaaacagcaaaaaaaaaaaaaaacccttttagagacctaacaattttgtccggacctaaacacggaagaacgattacctgatctaatattgttttctttttctttgagtcagtgactgaagacagctgcatttcacccattttcttcatcttttcatccatgtcaatcttctgttccagttttttgatctctgatttcaggagtcggagcgtgtcttccttgtggtggtgcctcgcgaccgcagtggcgcaggcagagtggatggcggtgatccagttttcaagctccgtctggctagtggtctgtaccaggaagaaggggcaggaagaaaaag

SEQ ID NO: 9786 - DNA, 533 bp, Homo sapiens
  MAP TO CHR1.3; EXPRESSED IN BONE MARROW, SIGNAL = 1.5; EXPRESSED IN HEART, SIGNAL = 0.96; EXPRESSED IN PLACENTA, SIGNAL = 1.1; EXPRESSED IN BRAIN, SIGNAL = 1.5; SWISSPROT HIT: Q99087, EVALUE 2.00e-12; NT HIT: D86405.1, EVALUE 4.00e-88; EST_HUMAN HIT: BF818390.1, EVALUE 0.00e+00
gccaatctgagcagttctccctatatggagctcatcttcgtcttcttcttctgttgttttcctgtagactgggttgtcaaaattcatgcttttggtgttcttccgcttccagtttctccagatcaggtatccactcatgcacaggagggctatcaccactggaggaaggacacaggacactggacctccagcaggctccaacccactgctcagacatctgtacaaggcttgtcaccactccacttttactaccctttgctcctcaggctctgtttctgcatgttcttttactgctgtttgaaagcccatctctcatcccttctttcctttactaactattcatccttcaagatcctgttcaaatgtgaagtcttccccaactgtgggcagagtcagttgctctctcatgtgtgctcccagatcacacacagtatcttactttatgtatctgtactcccaactagatagctctttcaaggcagggactgtgtcttttttttgtttttaaactctctacgcccagttcctagcac

SEQ ID NO: 9787 - DNA, 521 bp, Homo sapiens
  MAP TO CHR17.3; EXPRESSED IN BRAIN, SIGNAL = 1.7; EXPRESSED IN BONE MARROW, SIGNAL = 2.2; EXPRESSED IN HEART, SIGNAL = 1.7; EXPRESSED IN PLACENTA, SIGNAL = 1.6; SWISSPROT HIT: P13501, EVALUE 5.00e-13; NT HIT: AF043341.1, EVALUE 6.00e-56; EST_HUMAN HIT: BF856757.1, EVALUE 0.00e+00
tggaggataggtggaagtgggtagggcatcctctcagaggactcctcagggaacaggctctgggagggctccatggggctgagactcacacgactgctgggttggagcacttgccactggtgtagaaatactccttgatgtgggcacggggcagtgggcgggcaatgtaggcaaagcagcagggtgtggtgtccgaggaatctggaagaggaaaggaaggagggagacccttttattcattgctactgcacacttgacattgtgctggacactttatatgatttatttagaaagaactgttatcttccttgacagaaactgaggctcagagaggtaaagtcacttggccatggataaacagtggcagagtggggattccaatgcctcatctaatccttgagccaagcttgtatccatccctctacaccataaccttctgccctgggctttcagggcctcctcctggcttgtcctgggtcctctggcttcattcttgcccttccagcatcctcaatggattt

SEQ ID NO: 9788 - DNA, 599 bp, Homo sapiens
  MAP TO CHR11.3; EXPRESSED IN PLACENTA, SIGNAL = 1.5; EXPRESSED IN HEART, SIGNAL = 2.1; EXPRESSED IN HELA, SIGNAL = 2.7; EXPRESSED IN BONE MARROW, SIGNAL = 1.6; EXPRESSED IN FETAL LIVER, SIGNAL = 2.1; EXPRESSED IN ADULT LIVER, SIGNAL = 2.2; EXPRESSED IN BRAIN, SIGNAL = 1.8; EST_HUMAN HIT: BF526465.1, EVALUE 3.00e-90; SWISSPROT HIT: P01267, EVALUE 2.00e-03; NT HIT: AJ400877.1, EVALUE 0.00e+00
cagccctgtgaagtagggagatccaggatttttaaaaatctctcttcaaccatcaagtgcttgtgctacaaaaataattcgaacccctgtgatccctattctcaaggagctcatggtctagggagagacagagctgtaaacacctctaacggggcaatgaggatcaagctgtgcagaggtgtgcagagagaaccaaggcagggcacactgcgtattcagggagtttgcatgccgtgggtggtgtggtcagtgccatctatttgccttcatctctagaactcacatcatccttccttggcctttgtgtccacactgaccaggttgtttcccttttggctagtcagttgcagggctgggacctattatgatggagcacgagaacgctgcattttatgtccaaatggaaccttccaaaatgaggaaggacaaatgacttgtgaaccatgcccaagaccaggaaattctggggccctgaagaccccagaagcttggaatatgtctgaatgtggaggtaaggatgctgtctgttccttcctactcctcccatctctgatgtcattgtttagacagaaggcatctcaaggactccagacaatgca

SEQ ID NO: 9789 - DNA, 586 bp, Homo sapiens
  MAP TO CHR11.3; EXPRESSED IN ADULT LIVER, SIGNAL = 0.77; EXPRESSED IN LUNG, SIGNAL = 0.82; EXPRESSED IN HEART, SIGNAL = 0.86; EXPRESSED IN PLACENTA, SIGNAL = 0.84; EXPRESSED IN BONE MARROW, SIGNAL = 0.96; SWISSPROT HIT: P03137, EVALUE 3.80e-01; NT HIT: X12511.1, EVALUE 0.00e+00; EST_HUMAN HIT: AF121051.1, EVALUE 1.00e-100
ccgaaagagaagccagagtgcccggaacaccacaggggaagcttgaagacttgtacccctttggagtctttttattttaaaagaccaatttaatcaccacttcttctggctccttgaagatgaaaaaagttcccttgcaatcgtccattcatcagagaattaatgaagcctactcaccagcagatgatgtaatcctggtggcttcccccatcagatctaggctgcctgccccacggataccttctgggctaattgcctgctttgcacctgttccttctcgggaggccctggcaccctagcacctggtgcctgtgccatctcccctctctgccaggacacccagaggcccttgtgaatagcaaagcccacttaacggctgagggcaggtgggggtatttccttcccaattctgctcaaggcccgttgctgttctttgaggatgttgcaaatccagggtttggagggctgggcctcttggtggcctggttgtctatctgatagggcggagccttcacccttgcagcgagctctctcacaccagatgtgctctgcgtggaatcctaggccatcaggggattccttagca

SEQ ID NO: 9790 - DNA, 508 bp, Homo sapiens
  MAP TO CHR14.3; EXPRESSED IN BONE MARROW, SIGNAL = 0.74; EXPRESSED IN ADULT LIVER, SIGNAL = 0.95; EXPRESSED IN LUNG, SIGNAL = 0.97; EXPRESSED IN HEART, SIGNAL = 0.79; EXPRESSED IN PLACENTA, SIGNAL = 0.68; EST_HUMAN HIT: BE671706.1, EVALUE 5.00e-85; SWISSPROT HIT: Q15436, EVALUE 1.00e-26; NT HIT: gi14747688, EVALUE 3.00e-85
tgccagcaaatgaatacctgttttctaataaggcaaaaatatttaacagtcaaaattaccttagttccctttttaacatatttggcattgtctttgtcaatgtcatgccacgatcttataggtgtcttcaactcatctccaaccaccattccaggcccctgagtagcaggaccaccaatgaacatcatgatacgagcaccagtgttgggaaaagtacactattaaaaaaaaagtcaagagtttaaaagaaaacatatgaatatacatttctgataataattttttatatattccttctaaataagagaaaagcatatattttctaagaaataaaataatcaaatgtttacaatgaaatttaaaaacaaaggtatctgaacaactttcttttaaaatcctatggtatatagtagcacattcctaattctaaactaatctatgagcctaatccctataaacatggatatttctcctgcttaactcatctcagacagggaagagtggagag

SEQ ID NO: 9791 - DNA, 503 bp, Homo sapiens
  MAP TO CHR1.3; EXPRESSED IN BONE MARROW, SIGNAL = 1.2; EXPRESSED IN ADULT LIVER, SIGNAL = 1.6; EST_HUMAN HIT: BG611408.1, EVALUE 1.00e-106; SWISSPROT HIT: P54577, EVALUE 9.00e-31; NT HIT: gi4507946, EVALUE 1.00e-103
tccggaatccaagagttcaccaggctgcttctctaatggacgatgatcctcttcctcctgacgtctctccctggcagcacccagatgcagacagcctgtatgtagagaagattgacgtgggggaagctgaaccacggactgtggtgagcggcctcgtacagttcgtgcccaaggaggaactgcaggacaggctggtagtggtgctgtgcaacctgaaaccccagaagatgagaggagtcgagtcccaaggcatgcttctgtgtgcttctatgtgagtgaggacttggagtggggcacaggacctggggaggccaggaagagtagggaatcagcccatatgatgtccttccacacaccaggtggaagctctgagaacacgtgcctcttccttgctgatgccaaaagttgatgcatgaaggacttatcgtacaagtactgttaatgaagcattttacctacagttaattttgttaaaatagaaatggagggctcaaaccagtaca

SEQ ID NO: 9792 - DNA, 502 bp, Homo sapiens
  MAP TO CHR17.3; EXPRESSED IN BONE MARROW, SIGNAL = 0.8; EXPRESSED IN HEART, SIGNAL =   1; EST_HUMAN HIT: AI924482.1, EVALUE 1.00e-112; SWISSPROT HIT: P30838, EVALUE 2.00e-21; NT HIT: M77477.1, EVALUE 1.00e-112
acacccaacaaggtggagagggaaacctggggcgtcctgggggcaggatgctgagccctgtgcttacttctcctccgcagggaacagcggcatgggatcctaccatggcaagaagagcttcgagactttctctcaccgccgctcttgcctggtgaggcctctgatgaatgatgaaggcctgaaggtcagataccccccgagcccggccaaggtgagagggggaaggcgctgtgggggagaccgggctgtgcgggaccagggcctggggatcactgcccactccgtgtccctttcacagatgacccagcactgaggaggggttgctccgcctggcctggccatactgtgtcccatcggagtgcggaccaccctcactggctctcctggccctgggagaatcgctcctgcagccccagcccagccccactcctctgctgacctgctgacctgtgcacaccccactcccacatgggcccaggcctcaccattccaagtctccacc

SEQ ID NO: 9793 - DNA, 512 bp, Homo sapiens
  MAP TO CHR12.3; EXPRESSED IN LUNG, SIGNAL = 1.5; EXPRESSED IN HEART, SIGNAL = 1.5; EXPRESSED IN ADULT LIVER, SIGNAL = 1.2; EXPRESSED IN BONE MARROW, SIGNAL = 1.3; EST_HUMAN HIT: AL583551.1, EVALUE 1.00e-114; SWISSPROT HIT: P11047, EVALUE 2.80e+00; NT HIT: gi4759277, EVALUE 1.00e-114
agtaacgatggcctgtggagccagactgcctgcaactctgccactacctgtctgccctcagacaagttcctttatatacctgagctccaccgttctcatctgtacggtagacatactaatatatccacctcatagggttgttttgagggtaattgaattatatataagcagtttagagcagtgcctagtacattgtaagtactcttcctactcattacagatggcaggagagctggctgacaaaaaggaccgtgatgcatcaccttccaaggaggaaaggaagcgatcacggactcctgacagagagcgggatagagaccgggaccggaagtcttccccatctaaagatagaaagcggcatcgttcaagggatagacgtcgaggaggcagccgttctcgctctcgttcccgttccaaatctgcagaaaggtaaagtaactttgtatgttattacatgggaagggagagtacgtttcagatttcttccttcttggttcttctgatgcctccag

SEQ ID NO: 9794 - DNA, 596 bp, Homo sapiens
  MAP TO CHR20.3; EXPRESSED IN BONE MARROW, SIGNAL = 2.2; EXPRESSED IN BRAIN, SIGNAL = 1.9; SWISSPROT HIT: P16818, EVALUE 3.40e-02; EST_HUMAN HIT: AL449556.1, EVALUE 0.00e+00; NT HIT: gi11420835, EVALUE 0.00e+00
ccaaaaccacacagcaaatcacttcctagcccatctgattctgtgccaattgccggtcgcctttcccaccctccaccagggtttctcaccctccctggctccaccccacctctgcgggcccccagctggcctcacctccatcagcataggtctcggtgccatagccgtcttgcaggccattgttccaggtgccctcatacttggcaccgctgcttgagctctgccggattccgtagcgtcccttgaagccatgtgtccactcgcccttgtagagccagcgccccttggtctctatgcccagcccatgccgtttgccctggctccagtatccctcaaaggtgtttccgctgggccaggtgtagacacctgccacctcaaagccaaagttccaggagccagagtattcgccctggcccttggggcctgtgcacagtccatgcccatgggcctttcccccctcccagcccccgcagtacgcccctccatcatcaaagtcgaagcggcccccactcatctcatcatagcccctgacaacctccccgtcctccagcgtgggtgcagagggcgtgggtgatgcctgcaacactcctccagtg

SEQ ID NO: 9795 - DNA, 570 bp, Homo sapiens
  MAP TO CHR17.3; EXPRESSED IN LUNG, SIGNAL = 1.9; EXPRESSED IN PLACENTA, SIGNAL = 1.6; EXPRESSED IN BONE MARROW, SIGNAL = 0.78; EXPRESSED IN FETAL LIVER, SIGNAL =   2; NT HIT: gi14774929, EVALUE 0.00e+00; SWISSPROT HIT: Q61576, EVALUE 3.00e-19; EST_HUMAN HIT: BF929306.1, EVALUE 0.00e+00
ccagagatgtctcctctgccattgttttagttggctcctggacctcatcccagcagagggagggtgactgtcagcaggtcagtcccaccgccactgtccccctcgcagtgggcctctgtgtctcaggcctggccaggctccctgcccctcagagctcctcgtggacccgctcctcgtcctcatctgacttcagcttgagctcgtcgactgtgatcttgccgtcctggttgcggtcctggttctggaacatgtctcctatggttttctcagggtcctgcccaggcatgaggcgtcctttgccctcactcacttgagccttgatgaaggtggagaactggggcaggggagagccgggggagcgggcagtgagggtcatggccttgggaggggcaggggccccgggtggaggccagtgagtgctttctttttcttcttttttcccaggctcccccgcaccctgtaactcaggaagggctgggaaaggcactggtgctggggtcctggtgggggctggggtggaggcgtggcatggggatagtctgtgactggtctcaggtagggaacagcctg

SEQ ID NO: 9796 - DNA, 568 bp, Homo sapiens
  MAP TO CHR17.3; EXPRESSED IN HELA, SIGNAL = 6.6; EXPRESSED IN PLACENTA, SIGNAL = 6.6; EXPRESSED IN BONE MARROW, SIGNAL = 9.3; EXPRESSED IN FETAL LIVER, SIGNAL =  11; EXPRESSED IN BRAIN, SIGNAL =  11; EST_HUMAN HIT: AA323846.1, EVALUE 2.00e-54; NT HIT: gi14772403, EVALUE 1.00e-54; SWISSPROT HIT: Q13368, EVALUE 2.00e-14
aagtacgttgcttgatgggccagttggccctccaggcagttgtgtgtttttgtatctgtattccactagagctcctgggaggactcccggaaaggatgggggaagcgggagagaagtcatgttgggaggtcccctttgctttgctaatttaggaaagctgaggaactaaaggccttttcccctttggtggtgttttaggttcctggaacatggtgaatataaggaaaatctgtatggaaccagcctggaggccattcaggctgttatggccaaaaacaaagtttgtttggtggatgtggagccagaagtgagttgctgggcctgctggccatttctggttaacggaatttataactaggggattgtacattttacacaacacttaacctcagtctaaggaatttttagtctagaacactggctgttcaatttctttgggtcttcctttgagaatcaaatgaaagccttgtaccccaaaacatgcccctctatccacaaatgctgcattaattgtagggagcttgtggacactctggtggcccacagacccaggctagtaactcctgcg

SEQ ID NO: 9797 - DNA, 584 bp, Homo sapiens
  MAP TO CHR11.3; EXPRESSED IN BRAIN, SIGNAL = 3.7; EXPRESSED IN BONE MARROW, SIGNAL = 3.4; EXPRESSED IN HEART, SIGNAL =   5; EXPRESSED IN FETAL LIVER, SIGNAL = 1.7; EXPRESSED IN ADULT LIVER, SIGNAL = 2.9; SWISSPROT HIT: P51787, EVALUE 1.00e-09; EST_HUMAN HIT: AI344314.1, EVALUE 2.00e-54; NT HIT: AJ006345.1, EVALUE 0.00e+00
ctctcctctcttgcctggtgcctccgtgttggtgccaggcagacggcaagtggtgggcactaggcgagtagatagcactctggccagagagcaaggcttccccagcaccaagtctgactccttgagctccagtcccctccagcccagcccttcacgcacatgtaggcactcactgtgagatgtgggtgatgggtgtcagcagagtctccccttccaggtccaggtcctcggcgaagctgttggttctcatgaaatggggcatgctcacttccagcagtgttgggctcttccttactgaggagaaagtgtggggacagcacgttaggcctcccacccaacctgccagtgctgtggagccaggcctgtgagctcccagggccaggtgaggagtggagcttgtgcctggaagctccagccctgacaatcagttttatagttgggtgttggggtgggtgggtgtttaagatggccccaaagtgcctgacacctcagtgtctgaggagaataaaggccagtgaatcatcttcggagtggtaactgtgcctggggctgtgctcaggtgtccaagactctccccacctcag

SEQ ID NO: 9798 - DNA, 545 bp, Homo sapiens
  MAP TO CHR6.3; EXPRESSED IN HEART, SIGNAL = 1.2; EXPRESSED IN ADULT LIVER, SIGNAL = 1.2; EXPRESSED IN BRAIN, SIGNAL = 1.5; EXPRESSED IN BONE MARROW, SIGNAL = 1.1; SWISSPROT HIT: P54944, EVALUE 1.30e+00; EST_HUMAN HIT: BF109418.1, EVALUE 4.00e-55; NT HIT: gi14747178, EVALUE 3.00e-55
ttccaggattgttttgctgcttagcatattttattagagcaatatgggctagctttagtattggcttaagaaaagtttaagtaaaaaggcagctcttgacaattatacaaaatgaatcccgttgtgttgagagtcaattctatgctgcatgtcctccatgttatatacttggaggtatgtaatttgatttatagcatagcaaatctatggaatactgaactttatttatgtaatacagcttcataaagaaattgaacaaaaggacaatgaaattgcccgcctgaaaaaggagaataaagaactggcagaagtagcagaacatgtacagtatatggcagagctaatagaggtaggtaatttaatagttatctggttcaaatttatgtatttttctataaagttgaggtagtgtagtgtgatcactttgaagtgttagggctctggaatcagatttcctggatttaagacttaacttccttcctaacaccattaagtttgctgggtagagtgggtttatccggtcagggcttcatcttcctcatcca

SEQ ID NO: 9799 - DNA, 576 bp, Homo sapiens
  MAP TO CHR8.3; EXPRESSED IN BONE MARROW, SIGNAL = 2.1; EXPRESSED IN HEART, SIGNAL = 1.7; EXPRESSED IN PLACENTA, SIGNAL = 1.8; EXPRESSED IN ADULT LIVER, SIGNAL = 2.1; EXPRESSED IN BRAIN, SIGNAL = 1.5; SWISSPROT HIT: O74957, EVALUE 1.70e-01; EST_HUMAN HIT: BF997582.1, EVALUE 1.30e-02; NT HIT: gi8922369, EVALUE 1.00e-54
cactgggtctcaagtctggctgtatgtcataatcgcctggaacagatttaaaaaatacagatgcctcagaatagttggggggaagcctggcatcaatattttttaaagctctttaagtaaaagtaattttaatataaaaccaggatttccaatctctcctcaaaaagacaccataattgtcaaagatatgaagaaaagtcaagaggtaaatatattttggggtgaacagtgagcccatcttagctagcaggccagaattatttaagaaagagaaagagtaagttactgatgggcccacctctgcatatgatcagggctcaggtttgcggtgttgagaacacagacataatgcgtaggaatgccacagccctgccgtacatgatgggcaagaagatagaaatccaccctaggaaggaaaaccataaatcagtgatatggtcggattcagccagacagagctggcaaagatcctggagatcgttctagctccttcaactaaagctcagagagctcaaatgactggatcaaggacacagaggccagaccaggattagaacccaggtctcctgactcaag

SEQ ID NO: 9800 - DNA, 593 bp, Homo sapiens
  MAP TO CHR20.3; EXPRESSED IN LUNG, SIGNAL = 6.2; EXPRESSED IN HEART, SIGNAL =   4; EXPRESSED IN PLACENTA, SIGNAL = 3.5; EXPRESSED IN BONE MARROW, SIGNAL = 5.2; EXPRESSED IN BRAIN, SIGNAL = 3.4; EXPRESSED IN FETAL LIVER, SIGNAL = 5.8; SWISSPROT HIT: P41146, EVALUE 2.00e-56; EST_HUMAN HIT: BI754749.1, EVALUE 0.00e+00; NT HIT: gi14772196, EVALUE 0.00e+00
gttaagggactcagggccactgtagcttgtggtggccaagaggagccccttgccctttgctgcctggtccagccagcatggccaagtgaagcctttcttctccctctactccgcaggcacaccaaaatgaagacagccaccaatatttacatctttaacctggccctggccgacactctggtcctgctgacgctgcccttccagggcacggacatcctcctgggcttctggccgtttgggaatgcgctgtgcaagacagtcattgccattgactactacaacatgttcaccagcaccttcaccctaactgccatgagtgtggatcgctatgtagccatctgccaccccatccgtgccctcgacgtccgcacgtccagcaaagcccaggctgtcaatgtggccatctgggccctggcctctgttgtcggtgttcccgttgccatcatgggctcggcacaggtcgaggatgaaggtcagtggggtgtcccctcctcccctcaccaggctccctggctcccgggtggctcctctgggcccacgtgccctccacgtctcctgggcccactctgaccccgtttctctccctgcagaga

SEQ ID NO: 9801 - DNA, 586 bp, Homo sapiens
  MAP TO CHR1.3; EXPRESSED IN FETAL LIVER, SIGNAL = 3.6; EXPRESSED IN BRAIN, SIGNAL = 2.6; EXPRESSED IN LUNG, SIGNAL = 2.6; EXPRESSED IN HEART, SIGNAL =   3; EXPRESSED IN BONE MARROW, SIGNAL = 2.5; SWISSPROT HIT: Q16610, EVALUE 5.00e-66; EST_HUMAN HIT: AL542842.1, EVALUE 0.00e+00; NT HIT: U65934.1, EVALUE 0.00e+00
tgggcaggcagataaagaagagacagtggttgtcctctgctcccctggcacattggggaggcccagggtagggccagtgaacgggacctgaggttcctccagacccaggcctagtgctctaacccttaaaacacacatactgtctggggttaaaggacaccccccggcatcaagaacccaaccttaccacaagtttggcacactctaggcggtttgtgtggctgcggcagtggcagcagcgggaatatccaatctccaggaaattgagggtctcaccctggcgagtgaggtgggagtagctggactgtggtaggttccagggaccatataccacatgctgacggttaggaaggcagatttggttcagattgtctggagaaggccgcccaggggggaagccatccagccggtggccccagcccccttgggaccggtcctgttggcagtgctgggctgcattccaggactcaggttctggatggctctggtccccaaatggagctggcgttcctggaatggggaaaacagtgggaagcggggacatgtgaaggaacccacaaaggctggatgagctgggaggattgaa

SEQ ID NO: 9802 - DNA, 542 bp, Homo sapiens
  MAP TO CHR1.3; EXPRESSED IN HELA, SIGNAL = 5.4; EXPRESSED IN BONE MARROW, SIGNAL = 1.3; SWISSPROT HIT: P24539, EVALUE 3.00e-29; EST_HUMAN HIT: AL578092.1, EVALUE 2.00e-97; NT HIT: gi4502298, EVALUE 1.00e-97
aagttaatggcctatgggggaggctgaaggagacttatttcatacagcatcacttttaaatatgtttttgccatatgctgttataatttctaggtacatattacctattaaataaaagaatttcacgtaaaatacaaaagaagtgggcattctcactggcagaatcttcagagtagaagtattccttcaagtatacaaacaatatttatcatttcttaattttgccccagaataacattgctatggctttggaagttacttaccgggaacgactgtatagagtatataaggaagtaaagaatcgcctggactatcatatatctgtgcagaacatgatgcgtcgaaaggaacaagaacacatgataaattgggtggagaagcacgtggtgcaaagcatctccacacagcaggtacacaacatttttgtaggttctgatgttgtactggtatctcttaacaagtatctgctgatgttttgttaaggtaggaatagctggcaaggagtctttagcctagaagtagcagtgtaaccccggtttgtt

SEQ ID NO: 9803 - DNA, 594 bp, Homo sapiens
  MAP TO CHR2.3; EXPRESSED IN PLACENTA, SIGNAL = 7.3; EXPRESSED IN LUNG, SIGNAL = 8.1; EXPRESSED IN HEART, SIGNAL =  31; EXPRESSED IN HELA, SIGNAL =  13; EXPRESSED IN BONE MARROW, SIGNAL = 7.8; EXPRESSED IN BRAIN, SIGNAL =  13; EXPRESSED IN ADULT LIVER, SIGNAL =  26; NT HIT: gi5835834, EVALUE 5.00e-29; SWISSPROT HIT: O79429, EVALUE 2.00e-25; EST_HUMAN HIT: BG254292.1, EVALUE 2.00e-23
gaggggtgtgtgatattgggacatggctgggggtttatattaataattgtggtaataaagttaatagcacctgcctctactatagcggatgcaaataatagtaggaaagagggtgagaggagtcagaagcttctactatttatgcagggaaatgctatatggggggggtgaattatcagaggaactaatcagttgccaaagcctccaattataattggcattactataaagaaaattatgacaaatgcatgagctgtaatgatgacattataaatttgatcatctcctaaaagagtacctggttggcccagttcagcttgaataaggaggcttaaatctggacccactatccctgctcatgcactgaatagtagatagaatatcccgatatctttatggttggctgagaacagtcaacagttggtgaacataagtgaagtgagaaaaaggtaaaatggctgagtaagcattagactgtaatctgaaaacagaggtcaagacctctttttaccagccccgaggtgattttcatgttgaattgcaaattcaaacaagcagcttcaatcttgctagggcttctccctcctgtctcct

SEQ ID NO: 9804 - DNA, 505 bp, Homo sapiens
  MAP TO CHR15.3; EXPRESSED IN ADULT LIVER, SIGNAL = 1.1; EXPRESSED IN BONE MARROW, SIGNAL = 0.99; NT HIT: Y08833.1, EVALUE 0.00e+00; SWISSPROT HIT: P49641, EVALUE 4.00e-37; EST_HUMAN HIT: BG982802.1, EVALUE 9.00e-19
ctctaggctcatggtctggctttgactgatgagggaagaattgtactcaggcctcagctggtagaccccaagcagagaccctccctgtggcataaggagctgtgtgtgattgctttctggttttttggcagagccaaatttctgtgctgcagaaccgcattgagcagctggagcagcttttggaggagaaccatgagattatcagccatatcaaggactccgtgctggagctgacagccaacgcagagggcccgcccgccatgctgccctactacacggtcaatggctcctgggtggtgccaccggagccccggcccagcttcttctccatctccccgcaggactgccagtttgctttggggggccggggtcagaagccagagctgcaggtaagagtcagagctggcagggacgtacagtggccacgactggggtactgagctgcagttcacctggcagatgctcactgtgtcggaggagctgccgtttgacaacgtggatggtg

SEQ ID NO: 9805 - DNA, 572 bp, Homo sapiens
  MAP TO CHR19.3; EXPRESSED IN BRAIN, SIGNAL = 2.3; EXPRESSED IN LUNG, SIGNAL = 1.2; EXPRESSED IN BONE MARROW, SIGNAL = 1.5; EXPRESSED IN PLACENTA, SIGNAL = 1.9; SWISSPROT HIT: P17024, EVALUE 3.00e-76; EST_HUMAN HIT: AU133067.1, EVALUE 1.00e-18; NT HIT: gi13652274, EVALUE 0.00e+00
ttgaaggctttcccacattctttacatttataaggtcgagccccagtgtgtattattacatgtgctcgaaagcttgcagaataaaagaaggcttttccacattctttacattcatagggtttctctccactatgagtccttttatgccttcgaaaagaactgagaaaactgaaggctttaccacattctttacatttgtagggtttttctccagtgtgagttctttcatgagttcgaaagtatgtgggacaactgaaagccttaccacattgcttacattcatagggtttctctccagtgtgagtccttttgtgtctttgaaaagattggtaacatataaaggctttcccacactgtttacattcatagggtttctttccagtatgagcatgtttttgaaaagactggtaatatataaaggtttttccacattgcttacattcatagggtttctgtccagcatgagtcctttcatgtctttgaaatggctggtaatatataaaggctttcccacactgtttacattcatagggcttcactccagtgtgagttctttcatgtttgcgaaagca

SEQ ID NO: 9806 - DNA, 568 bp, Homo sapiens
  MAP TO CHR1.3; EXPRESSED IN BONE MARROW, SIGNAL = 2.1; EXPRESSED IN HEART, SIGNAL = 1.7; EXPRESSED IN FETAL LIVER, SIGNAL = 4.1; EXPRESSED IN ADULT LIVER, SIGNAL = 1.4; EXPRESSED IN BRAIN, SIGNAL =  14; SWISSPROT HIT: P54227, EVALUE 4.20e-02; EST_HUMAN HIT: AL575997.1, EVALUE 0.00e+00; NT HIT: gi13638282, EVALUE 0.00e+00
tgcggaagaacaaagaatccaaagaccctgctgacgagactgaagctgactaatttgttctgagaactgactttctccccatccccttcctaaatatccaaagactgtactggccagtgtcattttattttttccctcctgacaaatattttagaagctaatgtaggactgtataggtagatccagatccagactgtaagatgttgttttaggggctaaaggggagaaactgaaagtgttttactctttttctaaagtgttggtctttctaatgtagctatttttcttgttgcatcttttctacttcagtacacttggtgtactgggttaatggctagtactgtattggctctgtgaaaacatatttgtgaaaagagtatgtagtggcttcttttgaactgttagatgctgaatatctgttcacttttcaatcccaattctgtcccaatcttaccagatgctactggacttgaatggttaataaaactgcacagtgctgttggtggcagtgacttcttttgagttaggttaataaatcaagccatagagcccctcctggttgatactt

SEQ ID NO: 9807 - DNA, 511 bp, Homo sapiens
  MAP TO CHR13.3; EXPRESSED IN LUNG, SIGNAL = 0.96; EXPRESSED IN BONE MARROW, SIGNAL = 1.1; EXPRESSED IN HEART, SIGNAL =   1; EXPRESSED IN FETAL LIVER, SIGNAL = 0.82; EXPRESSED IN BRAIN, SIGNAL = 1.1; SWISSPROT HIT: P45217, EVALUE 2.80e+00; EST_HUMAN HIT: AU136520.1, EVALUE 1.00e-82; NT HIT: gi16188347, EVALUE 9.00e-83
tctcaggcagaaggaagagctagttcaaaaacctgaggaagaaatacacttgtacattcaaggaagaacaaggtgcccagcttggctggagcggaatgagcaagcggagattgtaggaaacatgtagccagagaattatataagaaaaggtttggaaagttaaatattttttatctctatagtttagaagaaaagatgatagctgcttatgaaaactcaaaatgggaacctgttaaatgggaaaatgatatgcactgtgctgttaagatccaagataaaaatcagtggcgaagaggccagatcatcagaatggttacagacacattggtagaggtaaattacagagttaaaagtgtaattgtgaaggtgaatgaatgcattttgtatttttttccctggagttaaaacagttttcattgagtttttcagtttgccaaaaaaatatttcgaaatgttgtttgtctgtagacttaaagttattattttcttaggtcttgctgtatgatgtggg

SEQ ID NO: 9808 - DNA, 501 bp, Homo sapiens
  MAP TO CHR14.3; EXPRESSED IN BONE MARROW, SIGNAL = 1.1; EXPRESSED IN ADULT LIVER, SIGNAL = 1.7; EST_HUMAN HIT: AA417598.1, EVALUE 1.00e-60; SWISSPROT HIT: Q38488, EVALUE 3.50e+00; NT HIT: AF283991.1, EVALUE 0.00e+00
gcagtctgaagaggagtgggcaaggcggacgagggtggggctcaagcgtccgtccggtaaaagtgagctggaagaaccgaggcccagcgtgaggaggaaccgcgaactacttgcagaagggcgaacgtctgctgctgaaggtggagagggagtaccaatgtacgaggctttatagaaatggccgtttggtaaagggcagtgactctggagctttttctctagggatcccgcccgtcctccccggttgagcctcggccccaacagcccagtgcctcacccaagtgccccgagtcctgcttccgcctccgctgcagcctctcccgcagagagtccagctgcttcttgtgggcctggatagagctccacgtgtccgacatcctagtctcccagccctgacacctctcgaataaggcgcggcggactagcacctcccagcactcgctccaggatatagccaattctcacgcggacaccccgaaggctaaccggaaaatgacccct

SEQ ID NO: 9809 - DNA, 583 bp, Homo sapiens
  MAP TO CHR4.3; EXPRESSED IN LUNG, SIGNAL = 2.4; EXPRESSED IN BONE MARROW, SIGNAL = 2.3; EXPRESSED IN BRAIN, SIGNAL = 3.9; EXPRESSED IN FETAL LIVER, SIGNAL = 3.1; EST_HUMAN HIT: W28389.1, EVALUE 0.00e+00; SWISSPROT HIT: P12235, EVALUE 1.00e-22; NT HIT: J04982.1, EVALUE 0.00e+00
tgcctggtcatatgtgaagcacctgcacaggggcaggttccccgcaaggtcagagcatggagctggaggtgcagtggcctctctccctccacctgctttctgctgagaacaggcacttcatagccgttcggcttctgggctctgtccacagggatgctgcctgaccccaagaacgtgcacatttttgtgagctggatgattgcccagagtgtgacggcagtcgcagggctggtgtcctacccctttgacactgttcgtcgtagaatgatgatgcagtccggccggaaagggggtaagcttgtgctctactcatctaaacttgtttggttttgcccgaggagaacattttacagggctcctttcagtcttccttactggaaattaattttcaaaattatttgataaggacttagggaagaaagatggtattaattccccctaacgttctcaactatcctattagggaaaagtattttccattttattagagatgataagaacatgaatagtaagacatttagatgtgaatttaactaggtatccagcattatagagaccctaggccctcttcccttagagcctg

SEQ ID NO: 9810 - DNA, 566 bp, Homo sapiens
  MAP TO CHR12.3; EXPRESSED IN BONE MARROW, SIGNAL =   1; EXPRESSED IN PLACENTA, SIGNAL = 0.76; NT HIT: gi11525737, EVALUE 2.00e-59; EST_HUMAN HIT: BF446005.1, EVALUE 7.90e-01; SWISSPROT HIT: P34678, EVALUE 2.00e-03
cgagggaaagctacatgcacttagtcttgcctgagagtttagggaaggccttcatgataagaacagacttaggtagagttctgaagcccaaataatcattgagcatcccacccctcgcctccgctccttatggagagattagtgactcttgctgtgtgctctgtaggagtccttcaatcatgggcatcctggctgctaacaggcacttcctgggagagatcgggtctctggatggtggaatgctcatctatggaggagagaacgtggagcttagcctgagggtgggtacatttcccttttctttatgggacaaagcagaaaggggaataatagaaaggtagtaggacccctggaatcctagaacaaggctgaatgtcattggctcaaaggtggatacattcttatgtttctaggcaactgggccaaggacggggggcaataggacttctggagtggacactcctggtatagcccatataatctgggaggtggggtgggaaggggtcaagttgggattgaatagatagatgtccctatttcacttgaggactctgggcatttttcaa

SEQ ID NO: 9811 - DNA, 514 bp, Homo sapiens
  MAP TO CHR19.3; EXPRESSED IN HELA, SIGNAL = 2.5; EXPRESSED IN PLACENTA, SIGNAL = 0.86; EXPRESSED IN BONE MARROW, SIGNAL =   1; EST_HUMAN HIT: AW608724.1, EVALUE 0.00e+00; SWISSPROT HIT: Q13360, EVALUE 1.00e-101; NT HIT: gi15302165, EVALUE 0.00e+00
tttcactgaccctttgtcccttcagaactgtgtcagaactcactctggagagatgccctatgaatgcagtgactgtgggaaagccttcatttttcagtcttcccttaagaaacacatgagatctcatactggagagaagccttatgagtgtgatcactgtggaaaatcctttagccagagctctcatctgaatgtgcacaaaagaactcacactggagagaaaccctatgactgtaaggaatgtgggaaggctttcactgttccttcatcccttcagaaacatgtgagaacccacactggagagaaaccctatgaatgcagtgactgtggaaaagccttcatcgatcagtcatcccttaagaaacacacacgctctcacactggagagaagccttatgagtgtaaccagtgtggaaagtccttcagcacaggctcttaccttattgtgcacaagagaactcacactggtgagaaaacctatgagtgtaaagaatgtgggaaggcctttaggaat

SEQ ID NO: 9812 - DNA, 591 bp, Homo sapiens
  MAP TO CHR13.3; EXPRESSED IN HEART, SIGNAL = 0.95; EXPRESSED IN PLACENTA, SIGNAL = 1.2; EXPRESSED IN FETAL LIVER, SIGNAL = 0.94; EXPRESSED IN ADULT LIVER, SIGNAL = 1.1; EXPRESSED IN BRAIN, SIGNAL = 1.5; EXPRESSED IN BONE MARROW, SIGNAL = 1.1; EST_HUMAN HIT: AI636348.1, EVALUE 0.00e+00; NT HIT: gi14756990, EVALUE 0.00e+00
catacgaaaaagtgattgtgaaggatttttatttgcatgattatagttaagcaaatttcatttcacatttttgtaatgctgtacagcagttcacaaaaaaatgttcattgtagattttgttatgttcaatgccaatgagtctgtaattttacgacctgtctgttctttttttgggtggattacgatgtaaatttttcttttctttctttctttttttttttttttgtgtagaaaaataggtgcaataatgatcaaagttttgatgtcttgagtctccatcttaggggattatcttacgtttaagcttaacatttcatgtagtaagatttggagagccacatactttacagtaaaattaagtgtgtataaaacattaattgctaacaattgttagcaaactatttcagtgataatgttcattttgaaaatatgtactgtataacattaagaaaatatttaactccctgtaacaagttccattatgaaaatcttattcctcagtgaggttatcttgctgcactctgtagcaaatttgtttaatctacattataataaaatttcttgctgcagtgcaacaggaggctttttcag

SEQ ID NO: 9813 - DNA, 529 bp, Homo sapiens
  MAP TO CHR17.3; EXPRESSED IN BONE MARROW, SIGNAL = 1.3; EXPRESSED IN HEART, SIGNAL = 1.7; EXPRESSED IN PLACENTA, SIGNAL = 2.8; EXPRESSED IN ADULT LIVER, SIGNAL = 1.6; SWISSPROT HIT: Q14451, EVALUE 4.00e-16; EST_HUMAN HIT: AA010229.1, EVALUE 1.00e-110; NT HIT: AF274875.1, EVALUE 0.00e+00
tgaatccaggagtttccagcaggccagggtgcagggagaggagtctaggtgtctgaattggggctcagaagccccgggcaggatccaggggcctgagcagttcctgcttccccaggccaggggccaggcctggccaggtcttcaccttgacacagaaaccgaagtcagtgggcatcccgtagagcttgcggccctgcgtcaccacgtacacgttggactcgttcacatctgccacgtactgcaggtgcctcggatcctaagcagcatgagtgagcaggacttggtacaggtagatcccgcccactattacctccccccacaagccaggtggggagatttcaggaccagagaggggcaggggaatacccagggtcacacagcaaatagaagtagagccaggacttaaactaagatcatcttttctcctgctacctccctgggcaggtgagctaggcaaggatgtagggagagatggtaaactggaggtggctggcctggggggcccagggggagaagggctcagaggttc

SEQ ID NO: 9814 - DNA, 529 bp, Homo sapiens
  MAP TO CHR1.3; EXPRESSED IN BONE MARROW, SIGNAL = 1.1; EXPRESSED IN FETAL LIVER, SIGNAL = 1.5; EXPRESSED IN BRAIN, SIGNAL = 1.4; NT HIT: AJ300440.1, EVALUE 1.00e-124; SWISSPROT HIT: P30957, EVALUE 2.00e-13; EST_HUMAN HIT: BI769638.1, EVALUE 5.00e-79
cataccagggttccataccgctttatatttcccccggtagattgcatgatgaagaaatactggaaggaaaagtttgatttggctttgccaggaaacacttgacgtcattaccctaccttgaatattaacttcagcaacatgtggctcaaattctagatgttcatcagcttcagtgaggaggatacttaccttgtattatggccaagagaatgacaataacaaagaagaagaaagtgatgtcaaagatgattcgatagatctcatattcatctcctgctgggtcttcgatttcatccccgatccctcctccagcacgaactccaacatacatgtggaacatatagcactggaaaaaagacatggtatcacttcttggagggacattacccatttttttttctcgacaaacccgagttatctctgtagttcctaatcctcactctggaaatgagaatttttgcattctatattgcctctttttgtttcagtatttctagttgtgaagcaaacatttggcttttgcatgttg

SEQ ID NO: 9815 - DNA, 527 bp, Homo sapiens
  MAP TO CHRX.3; EXPRESSED IN ADULT LIVER, SIGNAL = 1.4; EXPRESSED IN BRAIN, SIGNAL = 1.9; EXPRESSED IN BONE MARROW, SIGNAL = 1.3; EXPRESSED IN HEART, SIGNAL = 0.92; NT HIT: gi13629957, EVALUE 0.00e+00; EST_HUMAN HIT: BF688808.1, EVALUE 0.00e+00
acaccaccaagttcctccagcagggtatggccagctttagtcccctgagccccatacagggcatcgagccaccaagctatgtggctgctgctgccaccgctgctgctgcttctgccgttgctgccagccagttcccaggtccgttcgacagaacggatattccccctgagctgccacctgccgactttttgcgccagccccaacccccactaaatgatctgatttcgtcacctgactgcaatgaggtagatttcattgaagctctcttgaaaggctcctgtgtgagcccagatgaagactgggtgtgcaacttgaggctgatcgacgacattttggaacagcatgctgctgctcaaaatgccacagcccagaattctgggcaagtcacccaggatgctggggcactttaaatctgagcaggatgcccatagaaacccccatggtgacatcactctaggaagtggtgtcgatccatacccgcagttgtctcccgttacaatttgagtggtgttgtcagcccatgctta

SEQ ID NO: 9816 - DNA, 524 bp, Homo sapiens
  MAP TO CHR1.3; EXPRESSED IN HEART, SIGNAL = 1.4; EXPRESSED IN BONE MARROW, SIGNAL = 1.3; EXPRESSED IN BRAIN, SIGNAL = 1.1; NT HIT: AY044083.1, EVALUE 0.00e+00; SWISSPROT HIT: P28845, EVALUE 7.00e-46; EST_HUMAN HIT: BG742376.1, EVALUE 3.00e-99
aaacagggctgtgagcaatctctcatttaagccccccgttacttcagagactaccccccaaaaatctgcagctaagactgatgccatttctgctgtatcactgcaggtggtatcccactgcctggagcttggagcagcctcagcacactacattgctggcaccatggaagacatgaccttcgcagagcaatttgttgcccaagcaggaaagctcatgggtgaggctgtttctcttacctcctcctctgaactttgcccttggggtcaccaagagcttttgggaggagaatgggaaaggtatcaaccccagatgatttcttaatatagccatctcttgcaggaggactagacatgctcattctcaaccacatcaccaacacttctttgaatctttttcatgatgatattcaccatgtgcgcaaaagcatggaagtcaacttcctcagttacgtggtcctgactgtagctgccttgcccatgctgaagcagagcaatggaagcattgttgtcgtctcctctctggc

SEQ ID NO: 9817 - DNA, 547 bp, Homo sapiens
  MAP TO CHR1.3; EXPRESSED IN ADULT LIVER, SIGNAL = 1.9; EXPRESSED IN FETAL LIVER, SIGNAL = 1.7; EXPRESSED IN BRAIN, SIGNAL = 1.2; EXPRESSED IN BONE MARROW, SIGNAL =   2; EXPRESSED IN PLACENTA, SIGNAL = 1.7; EST_HUMAN HIT: AW812234.1, EVALUE 0.00e+00; NT HIT: gi16157341, EVALUE 0.00e+00; SWISSPROT HIT: O68988, EVALUE 7.80e-01
tggctagaaggacatcacccgatggccatgccccagagaggctggggacagcagcaccatccgcagtgaggaacagggcctcctagcgcccttgctagcacctactcccgagacgcgaggggaacgcgggactcccggctcatcgagggactcacttctcctggaactggaggaatccgggtttgacctggggcttggcgttctctagagaagtcgttgccaagggcgaggcgggcaggtgaggcactgacgctgggatctgaggcatctggggtatggtggaagccagctgcttccaggcgagcagggtgggggtggagggcacggaggccgggctgggagcgggcccctccagagaggacaccgtggccgtggtgacaggagggaccggaggggacgagggggccatgggaggtttggtctcggcggccgaggccggaaaggcagcctctgtgtttccttttgctgctcctccctctgtccggaagtggaagctgcgagaggtagaagagggggtctcatggggggcagtgaagacaggtgtgga

SEQ ID NO: 9818 - DNA, 567 bp, Homo sapiens
  MAP TO CHR12.3; EXPRESSED IN BONE MARROW, SIGNAL = 0.71; EXPRESSED IN LUNG, SIGNAL = 2.7; EXPRESSED IN BRAIN, SIGNAL = 0.55; EST_HUMAN HIT: AU118827.1, EVALUE 0.00e+00; NT HIT: gi4503558, EVALUE 5.00e-75; SWISSPROT HIT: P54849, EVALUE 1.00e-20
ctcatgcccttgttctcctcgtcctgtgtctacagatgccctcaagacagtgcaggccttcatgattctctctatcatcttctgtgtcattgccctcctggtcttcgtgttccagctcttcaccatggagaagggaaaccggttcttcctctcaggggccaccacactggtgtgctgtgagtatctcatgggtagactccagtttacacttttaagtccatcttaccatgggtgtttctggcaacttgaacagattagcacatggttcagtgaaacttccttgtgcaattttctcctctggttatttgttctcttgtggagaaccttggattgctgcttaggttaagaaccctcatctgcttcattgttcaaaaccagtgctcctgggtagctaccaagtggcagtgcatatctgttagtagcacgtgtgtacaagacacttcaagaaggcagaaaggtaggagttctcagaaagatgaaaccactgccacaatgcacatcattattgtgattctcacttaattgttgttctttcccaatatactcggtttggtggaaggacatgct

SEQ ID NO: 9819 - DNA, 576 bp, Homo sapiens
  MAP TO CHR5.3; EXPRESSED IN HEART, SIGNAL = 1.5; EXPRESSED IN PLACENTA, SIGNAL =   1; EXPRESSED IN BRAIN, SIGNAL =   1; EXPRESSED IN FETAL LIVER, SIGNAL = 1.1; EXPRESSED IN BONE MARROW, SIGNAL = 1.1; SWISSPROT HIT: Q57907, EVALUE 2.20e-01; EST_HUMAN HIT: BG209561.1, EVALUE 0.00e+00; NT HIT: gi11417344, EVALUE 0.00e+00
aagagcgtgaacaacccaacctgtccaaaactttataacttcattattttttaagtaaataattttttattcctaaaatgctagagtctcacctcattatctattttcttcttgcagtgatacaatttcttcttgggattttcacaaatggcatcattgtggtggtgaatggcattgacttgatcaagcacagaaaaatggctccgctggatctccttctttcttgtctggcagtttctagaatttttctgcagttgttcatcttctacgttaatgtgattgttatcttcttcatagaattcatcatgtgttctgcgaattgtgcaattctcttatttataaatgaattggaactttggcttgccacatggctcggcgttttctattgtgccaaggttgccagcgtccgtcacccactcttcatctggttgaagatgaggatatccaagctggtcccatggatgatcctggggtctctgctatatgtatctatgatttgtgttttccatagcaaatatgcagggtttatggtcccatacttcctaaggaaatttttctcccaaaatgccacaattc

SEQ ID NO: 9820 - DNA, 540 bp, Homo sapiens
  MAP TO CHR22.3; EXPRESSED IN BONE MARROW, SIGNAL =   5; EXPRESSED IN HELA, SIGNAL = 8.9; EXPRESSED IN PLACENTA, SIGNAL =   4; EXPRESSED IN HEART, SIGNAL = 5.8; EXPRESSED IN BRAIN, SIGNAL = 7.4; NT HIT: gi14778212, EVALUE 0.00e+00; SWISSPROT HIT: P33529, EVALUE 2.30e+00; EST_HUMAN HIT: BG748324.1, EVALUE 0.00e+00
atcctggacaagggtgagtgtggcccacatctcaacagccacatcctcgtcttgctgttgggatggacagatggacaactccgggccgcaccctccaccccaaccccaggcctcaggacctgcctgcacactgcccacgcgccatccaggtaaagtgcttagagagcgacagggaaaggtgcaaagtgagtgaaaagtaccataattagtaccatcatcttgtcggaggaacttggaggccggcagcccgctcagggtttgagaagaagccagaacactgctctgagcagctgccccaactctgctgcctccttccctcccctgctctcagactggagggcgtttctccactcgcctggccccagcacaaaggaagagatcgggttccctgcctgggagcccagacatgggtgggagtgggatgggggtggagcaggagggcccacagcttcctggtctgagtcccaggcatctgcagcctccctctcctcctcttgggagcaatgggcagctgatccccccagtctaccccaccttcct

SEQ ID NO: 9821 - DNA, 573 bp, Homo sapiens
  MAP TO CHR11.3; EXPRESSED IN FETAL LIVER, SIGNAL = 1.7; EXPRESSED IN BRAIN, SIGNAL = 1.6; EXPRESSED IN ADULT LIVER, SIGNAL = 1.9; EXPRESSED IN BONE MARROW, SIGNAL = 1.3; EXPRESSED IN PLACENTA, SIGNAL =   2; EXPRESSED IN HEART, SIGNAL =   2; NT HIT: AF061022.1, EVALUE 0.00e+00; SWISSPROT HIT: P16112, EVALUE 6.30e-01; EST_HUMAN HIT: BI822243.1, EVALUE 0.00e+00
cggctcttttacccacaaagacccggcccctcccggaaacctcaggttttgggaagggaggggttggattgaggggagagggttgtgctctggggagggagcccccagcttccaatatagatgcccgggggtgggcccgaccctccagatcactggaatttgggttcccacctccctctggtccccggccccagggctggccgtggaggtgaaggtacccacagagccgctgagcacgcccctggggaagacagccgagctgacctgcacctacagcacgtcggtgggagacagcttcgccctggagtggagctttgtgcagcctgggaaacccatctctgagtcccatccagtgagctgagagcgactgcatgaagctgggttggcctggagggacaggagcccaggatgagggcatggggtcgggagggggagtttggggatcagtatgcttggatgaaaaggtaagtgggctctccctagatcttttcagagctgcagtctgcctgaccgtgtatcttcctttcctcttccatagctcctatttccaactcccctgccttagtgtatcca

SEQ ID NO: 9822 - DNA, 553 bp, Homo sapiens
  MAP TO CHR20.3; EXPRESSED IN HELA, SIGNAL = 2.5; EXPRESSED IN BONE MARROW, SIGNAL = 1.6; EXPRESSED IN ADULT LIVER, SIGNAL = 2.1; EXPRESSED IN HEART, SIGNAL =   4; SWISSPROT HIT: Q62230, EVALUE 8.00e-35; NT HIT: gi16194859, EVALUE 0.00e+00
aggaatgagagtgaggcagctggaccctcctgcagccaacgaccgttgtggtaccaagtatagagtgtgggtgcgtgggcagcagggtccgcacaggtcactgtgatgggggcaccttcaggcacggcagcctccggagccaggatcacccgcacacctgtgccaaggaggccaggatcagccgggcccagccggacaccacagtgggcttccatcccagtgggcttggcctaggccctgccttaccctccagccgcagctccagggacgtgttggcctggcccagagggctgcgggcagagcagctgtagaaaccctcatccctgggctgtggccctcgcagctccaggcgcagggtgttggggacagaggctgctgtcgaggaggccaagaggcgaccggcgtggctgagggccagctgggcgggcgggcggctgtccacagtgcacagtaccagggccagctgcccgccatggctctccaggaggtaggtcaggcgcaggttgcggggcgcgtctgcagggcatgagaggcttacacggagtcacaggca

SEQ ID NO: 9823 - DNA, 530 bp, Homo sapiens
  MAP TO CHR19.3; EXPRESSED IN FETAL LIVER, SIGNAL = 1.3; EXPRESSED IN ADULT LIVER, SIGNAL = 1.9; EXPRESSED IN BRAIN, SIGNAL = 1.8; EXPRESSED IN BONE MARROW, SIGNAL = 1.8; EXPRESSED IN HEART, SIGNAL = 2.1; SWISSPROT HIT: P15265, EVALUE 4.40e-01; EST_HUMAN HIT: AU122398.1, EVALUE 1.00e-127; NT HIT: gi14759860, EVALUE 0.00e+00
ctctcttcttcctgtcccccatcttcccatcgatgctgccttatgtgtatatataagggacatcctcctacccccatgagtgcccccaagttcctcacgtgtccccctacatacttgttatggtagaccaccggtgtgaaggcctcgcgggtaaattcactgcagctggacttgccaaagatgacctgggagagtggattcatgagggacccatgggggatgccctaccccccttccctggggcacagccactgaccggcagagcctggctggggtcctcgcctgtcatgtactgcactcgcacagcaaggttgcgcacggagccctggcggctgctgaagttgaggctgtgcgggtacacgtacagcaggttcctgtggggggcaggatgggggtgtcagagggacaggggccctgaaggtgcacatacaaggctggggtgatgggacaaggctggctgggagcacagacagtccaggaagagtaggtcatgaggctggggcattgagggcccggtgagaggtaataca

SEQ ID NO: 9824 - DNA, 532 bp, Homo sapiens
  MAP TO CHR19.3; EXPRESSED IN FETAL LIVER, SIGNAL = 3.1; EXPRESSED IN ADULT LIVER, SIGNAL = 2.1; EXPRESSED IN PLACENTA, SIGNAL = 1.8; EXPRESSED IN BONE MARROW, SIGNAL = 1.8; SWISSPROT HIT: Q9Y285, EVALUE 1.00e-35; EST_HUMAN HIT: BI754713.1, EVALUE 2.00e-72; NT HIT: AF042347.1, EVALUE 1.00e-72
taagggctgtgctttcaacctgggacccagcgctgcagaaagggggtgcctggctctgagcctcacccctgcctggacaccctccccacatttccctctaggtcatcgaggctgaacttcggtccaccaagcactgggagcttactgcggagggcgaggagattgcccgggagggcagccatgaggcccgtgtgtttcgaagcattcccccagagggcctggcccagagcgagcttatggtaggagctgcggggtgaatggggagtgagtgatgggatgaaggtggccctcgtgccccactcactgcagcctctcttttccagcgactgcccagtggcaaagtgggcttcagcaaggccatgtccaacaagtggattcgggtggacaagagtgcggctgacgggccccgggtgttccgagtggtgcgttcctgcgggctggtcagggggcaggtggacgggcacatgggcccctggccctcatacccctcacactccttatcctggcaggtggacagcatggaggatgaggt

SEQ ID NO: 9825 - DNA, 565 bp, Homo sapiens
  MAP TO CHR22.3; EXPRESSED IN ADULT LIVER, SIGNAL = 1.8; EXPRESSED IN BRAIN, SIGNAL = 1.8; EXPRESSED IN FETAL LIVER, SIGNAL = 1.3; EXPRESSED IN BONE MARROW, SIGNAL = 2.6; NT HIT: gi14778700, EVALUE 0.00e+00; SWISSPROT HIT: Q24342, EVALUE 3.00e-05; EST_HUMAN HIT: BI838442.1, EVALUE 0.00e+00
acttgtcacctgttccctggtcctggaaacccacgtgtcaagcagcagctccaggcgcaagcggtggaaagcccgggtcgtcttcactgcaatgaagacatcgtgtagctgtagcttagggggccccgggttcggctggctcagctcgggggtcccttgtacccgctgcggggacaggttcaagtggtaccgcagacacaggagccccatgcacaggagggtgaggagggctccagccaggccccgcgggagccggcactgcattggttggccctgggaccccagacagctcagcccccaaatcccaaccagacagggaggggaagctggtcaggcaggggctccagcagaggcaaaagtctggcaggcatcaggggctggcaaggagggaagaggtaggagctgaggctctggacccagaggctgagccatggcagcacgatctcgaccgccgccagtcctccacctgctcccgctgtccggcctgccgcagcctccgggaccgcctggccccgccccgcttagcccgaggggcggggccagacgaagggaaccccagacagag

SEQ ID NO: 9826 - DNA, 598 bp, Homo sapiens
  MAP TO CHR11.3; EXPRESSED IN LUNG, SIGNAL = 0.65; EXPRESSED IN HEART, SIGNAL = 0.64; EXPRESSED IN BONE MARROW, SIGNAL = 0.89; EXPRESSED IN ADULT LIVER, SIGNAL = 0.62; NT HIT: U63445.1, EVALUE 0.00e+00; SWISSPROT HIT: Q09428, EVALUE 8.00e-27; EST_HUMAN HIT: BF935000.1, EVALUE 0.00e+00
tggcatagacagtctggtcgagggtgcactccttcacaggcagagagtgatttggagttccagggtgcccatgggctcagcccttcccccatccccactcccaacctctgccatgggccgccagtcacacctggctgagggagcagttcctggctgcaggggtcagggtcagggcgctgtcggtccacttggccagccagtagtcgatggccaccaggaccatgtgcttgagcagctgtgagaagaccagcaacgacaggagcaggatgccggcggaggacaggtacttggcgcaggctcgccatgggatctcagcacgctggtgcagcatggacgacaggttgtcatcctcctcgctctcagctgcctcctctgcaggccgcaagaacccactctgtggctacacatttccatccctctgagggtgaatcagggcattttatccccacttactgaggggacaacgggggcacacagagggaagccatttaatcaaaggcacactactgcaccacacccagaaccccaaaccttagcctctctgtggctgatcagacctcaggccataatttcactcccagtcccattgcctgtacct

SEQ ID NO: 9827 - DNA, 600 bp, Homo sapiens
  MAP TO CHR1.3; EXPRESSED IN ADULT LIVER, SIGNAL = 0.61; EXPRESSED IN BRAIN, SIGNAL = 1.2; EXPRESSED IN BONE MARROW, SIGNAL = 0.79; NT HIT: X98001.1, EVALUE 1.00e-107; SWISSPROT HIT: P53611, EVALUE 7.00e-35; EST_HUMAN HIT: AL597799.1, EVALUE 0.00e+00
ctctggctcatgggagaaactaaagcactgtttgtattgtcagccatagattaactaatcctgtgcttctcagataattgtttttttctgataatagttgtgtctgaagatggcttctaacattgagcagcacagattttaaactcactactgatcagtgctgttaaggtcaggagaggtaaaaatagcagcatggctaatgagttacctttgtgtttaatctctttataacttgttaccagttcaaatgacagatttaagaaattgtgtattattttaggaatactgtatgtctgagtatttgagaatgagtggcatctattggggtctgacagtaatggatctcatgggacaacttcatcgcatgaatagagaagagattctggcatttattaagtcttgccaacatgaatgtggtggaataagtgctagtatcggacatgatcctcatcttttatacactcttagtgctgtccaggtaaatactaatcaaaattgcaacgatcttgatagtatgttctcttacttcagagttggaaattgaaactgtatcaggatttggtcaaaaagttttgttacaagtgaagctgtcctacaagg

SEQ ID NO: 9828 - DNA, 507 bp, Homo sapiens
  MAP TO CHR1.3; EXPRESSED IN ADULT LIVER, SIGNAL = 1.4; EXPRESSED IN BRAIN, SIGNAL = 0.67; EXPRESSED IN BONE MARROW, SIGNAL = 0.91; EXPRESSED IN LUNG, SIGNAL = 0.76; EXPRESSED IN HEART, SIGNAL = 0.95; EXPRESSED IN PLACENTA, SIGNAL = 0.91; EST_HUMAN HIT: AA504962.1, EVALUE 7.10e-01; NT HIT: gi14720512, EVALUE 1.00e-81; SWISSPROT HIT: P47317, EVALUE 2.10e+00
gaggtcctcttgcctgtcacaataatgaaatttcattgtttgttaaccaaaaaatttcattgaataaaaccagtgtggaatacttttgtgaaatgtgcgagttgaagggaggaaggggtgtggggagaagcggggcagttggcatagctcctggggtgttggtctcctccaggaaactgctgtgattctcttccatgtgtctgactggtctgtttgcctttcaggaggactggcgttagcccaggtgctctttttctacgtgaagtacttggtgctctttggcgtgcctgctctgctcatgcgcctggatggactcactccacccgccctcccccgctgcgtgagcaccatgttcagtttcaccgggatgtggaggtcaggcgctgggattgctaaagttggtcaggcatgtccagtgggaggagcatggctgggccggcctcaaagggttcgggctactatcctctccctgtctctcactcaagctgcatttggcatccatttctt

SEQ ID NO: 9829 - DNA, 529 bp, Homo sapiens
  MAP TO CHR17.3; EXPRESSED IN BONE MARROW, SIGNAL = 2.6; EXPRESSED IN HEART, SIGNAL = 2.6; EXPRESSED IN PLACENTA, SIGNAL = 2.9; EXPRESSED IN LUNG, SIGNAL = 3.1; EXPRESSED IN ADULT LIVER, SIGNAL =   2; EXPRESSED IN BRAIN, SIGNAL = 2.4; SWISSPROT HIT: O88799, EVALUE 1.30e+00; EST_HUMAN HIT: BI908631.1, EVALUE 6.00e-91; NT HIT: gi14776447, EVALUE 4.00e-91
atatcctctcccatcccaccccagccagccaaggacccagtggaagatgctggcccttaggccagggctgtgtgtatttcaggccacagacaagcggaaggcgctggaggagaccatggccttcactacccaggcactggccagcgtggcctaccaggtgggcaacctggccgggcacactctgcgcatgttggacctgcagggggccgccctgcggcaggtggaagcccgtgtaagcacgctgggccaggtaaggggcgtggggcgtgggaaggcatcttgtgtcaggcctcaactcttcagcccgactcagacattttctacatcaaaagttccttcctgctttcctccatgtccaaatgcccaactctacagcagaaggttggcacttcccaagctttttggacctccttatctctgtggctacgctacaaattccccgaaggcagagctttttctttctcggaattatatcctggacatgagaaagtgttatctaccaatcacagcagcgccctatacaggaaag

SEQ ID NO: 9830 - DNA, 520 bp, Homo sapiens
  MAP TO CHR2.3; EXPRESSED IN BONE MARROW, SIGNAL = 1.8; EXPRESSED IN LUNG, SIGNAL = 1.3; EXPRESSED IN HEART, SIGNAL = 1.9; EXPRESSED IN FETAL LIVER, SIGNAL = 1.2; EXPRESSED IN ADULT LIVER, SIGNAL = 1.7; EXPRESSED IN BRAIN, SIGNAL =   2; SWISSPROT HIT: O28398, EVALUE 2.10e+00; EST_HUMAN HIT: BI826583.1, EVALUE 2.00e-59; NT HIT: AB052742.1, EVALUE 0.00e+00
taaacggttggcttgactccattttaggtaattcaagtttctttttctctatttttgggaataggtcatagcaaatgacagaagtcccttggtgggcaaaattcactgggagaaaatggttaaaaaggtgtcaagatttggaatacgtacaggcacatttaactgttccagtgatcccaggtaagttgattaggcaattcttagaatttgagtcctgaccaggatctttcttatttaaaaagggcaatgatactagaagcctgcttgaactgaaagcttattataatgtgtagcacactcttagttacataggtgcttgattaatggtttttgataaactggcagctaatgactttcactctaagatctctctctgtctcctctatctccctctctctccccgtccctttctctggctcttctgtgttttttctattgaagatatctcttaagattgtgtctttagtccttttcatttcacctttcttttccaaagagatctcagcacattcatggcttt

SEQ ID NO: 9831 - DNA, 574 bp, Homo sapiens
  MAP TO CHR15.3; EXPRESSED IN BONE MARROW, SIGNAL = 0.72; EXPRESSED IN HEART, SIGNAL = 0.59; EXPRESSED IN ADULT LIVER, SIGNAL = 0.73; EXPRESSED IN BRAIN, SIGNAL = 2.7; NT HIT: gi15301388, EVALUE 9.00e-77; SWISSPROT HIT: Q99963, EVALUE 2.00e-22; EST_HUMAN HIT: AV724917.1, EVALUE 1.00e-76
tctatggttcatcgtggctgcggaacagtgcacttagcacccaccttggtaaagaacctagaaaattacctgagaaaattaaatagttcacacacaattgtttcaggcctcaggtctctggcattttgtttaaggtgacctcagttttggcagctgcgtttattaaattctatgtacctgtcactccaccttgtaactttaaagaattacaaatgacaatgtttttaagcatacagagctaagctaggaatgctgaacactgtgtcgaagatccgagggcaggtgaagaccacaggatacccgcagacggaaggcttgctgggggactgtatgctgaaatacgggaaggagctcggggaagactccacctttggtgagttattcagagatcagctgggggagctgagaactcctccagtatggttttaggttatacacaaacccttcagtctaacaacctttgttatttttccatattaccaaagtaatacatgttaattgcaggaggtttagaaaacataggtaagtaaaataaagaaaaatgctaacatcacccataatcccatatccaccg

SEQ ID NO: 9832 - DNA, 537 bp, Homo sapiens
  MAP TO CHR9.3; EXPRESSED IN BONE MARROW, SIGNAL = 4.2; EXPRESSED IN HELA, SIGNAL =   4; EXPRESSED IN LUNG, SIGNAL = 4.5; EXPRESSED IN HEART, SIGNAL = 4.7; EXPRESSED IN PLACENTA, SIGNAL = 5.1; EXPRESSED IN ADULT LIVER, SIGNAL = 5.2; EXPRESSED IN FETAL LIVER, SIGNAL = 4.7; EXPRESSED IN BRAIN, SIGNAL =   4; NT HIT: gi16161631, EVALUE 1.00e-100; SWISSPROT HIT: P16278, EVALUE 1.70e+00; EST_HUMAN HIT: BE674797.1, EVALUE 1.00e-112
caagcccagctctcactacccaccccggatgcattgcctggcccactcaccttcccatctggcacactgctatatccactgaagtgcaggggtcccggcacagtgggcctggagcctgtggggaagtggtggtccaggcaggtggccaggcagaggggcaggccggcccagcagcacaggaggatgtagacggcagagaagaccacggagcacaggatgatgagcacgagccgaccctgagggagacagtggccatgggggggtgtatgtggggaggggctcccagaagccccttcagcgctgcacctggcctcctgggtctagagaagctcctgggtctagagcagctcctagaacagcagcagaatccagtctccatccactgggccttacctggggatgccaagctctgggcacataaggccccggagataacactgttatcatccccacattctagataaggaaagcagtttggagtgaagtgtgtagtacaaggccatacagcaaagaagcagcacagtggggccttaaata

SEQ ID NO: 9833 - DNA, 507 bp, Homo sapiens
  MAP TO CHR9.3; EXPRESSED IN BRAIN, SIGNAL = 1.1; EXPRESSED IN BONE MARROW, SIGNAL = 1.4; EXPRESSED IN PLACENTA, SIGNAL = 0.71; EXPRESSED IN LUNG, SIGNAL = 0.84; EXPRESSED IN HEART, SIGNAL = 1.3; EXPRESSED IN ADULT LIVER, SIGNAL = 1.1; NT HIT: V00532.1, EVALUE 0.00e+00; SWISSPROT HIT: P01571, EVALUE 7.00e-44; EST_HUMAN HIT: AI860608.1, EVALUE 1.80e-01
tctgctggatcatctcatggaggacagagatggcttgagtcttctggaactggttgccatcaaactcctcctggggaagtccaaagtcatgtctgtccttcaggcaggagaaaggagagattcttcccatttgtgccaggagtatcaaggccctcctattacccaggctgtgggtctgaggcagatcacagcctagagaacagatggatttgtagctgagcaccagcacggccatcagtaaagaaaaggacagggccattgggatgttgcaaatgttgctaggctacttgagatgggtaaccttgaactttggcctctaggttttctgaagactttgctctgtgcataggccttaaatagtgaacatactaatttccattttctaaatgccctagttttactttctatgtctgtttttgctttctttttgcactctctacatgtgtttaagaatgtttttcattgtttttcatcattgcctatttttcccctgcactcaaagtcttt

SEQ ID NO: 9834 - DNA, 568 bp, Homo sapiens
  MAP TO CHR19.3; EXPRESSED IN BONE MARROW, SIGNAL = 0.91; EXPRESSED IN HEART, SIGNAL = 1.1; EXPRESSED IN PLACENTA, SIGNAL = 1.8; EXPRESSED IN ADULT LIVER, SIGNAL = 0.79; EXPRESSED IN FETAL LIVER, SIGNAL = 0.72; EST_HUMAN HIT: AI125134.1, EVALUE 0.00e+00; NT HIT: gi16193738, EVALUE 4.00e-88; SWISSPROT HIT: Q07092, EVALUE 1.10e-02
agggacgtggggtatatgtgggcggcggccctgtctgggctttgctatgagcccccagcaaccccaagcaccaacccccacccttccctgcagccctgaagtcctcgccctccaagaaggggcgcggcggagccttgctagctgtgaaaccgctggggcccaccgctgccttctcggccagccagatccctagcgagcgggaggaggcccagtacgacctgcggggggcccgcagctaccccacgctggaggacgaaggtgaggggcagagggcagagtgcgcttgtgggcgctacagggggtgccagcagcagccccgtgggtggggtgccgcctcatcctgagtgcccatcgctcagccaccccctccggatctgcagggccgcctgcccagggagtgggggctgctgggaccgccccagggaagagcccagggggagctgagtatagaaggctccaccaggtggggtggtgacagctcccgccttctctcacggccactgtcatctgaggtgcaccaggatgccatcgaaggcatgcagcccccaggctagggaatgaaggaagg

SEQ ID NO: 9835 - DNA, 581 bp, Homo sapiens
  MAP TO CHR11.3; EXPRESSED IN BONE MARROW, SIGNAL = 0.8; EXPRESSED IN LUNG, SIGNAL = 0.81; EXPRESSED IN ADULT LIVER, SIGNAL = 9.3e+02; EXPRESSED IN BRAIN, SIGNAL = 0.68; SWISSPROT HIT: P02647, EVALUE 2.00e-94; EST_HUMAN HIT: BI833184.1, EVALUE 0.00e+00; NT HIT: X07496.1, EVALUE 0.00e+00
caggaagctgaccttgaagctctccagcacgggcagcaggccttggcggaggtcctcgagcgcgggcttggccttctcgctgagcgtgctcagatgctcggtggccttggcgtggtactcggccagtctggcgccgccgttctccttgagagcctcaaggcgcgcggccaagcgctggcgcagctcgtcgctgtagggggccaaatgcgtgcgcagcgcgtccacatgggcgcgcgcgcggtcgcgcatctcctcgcccagtgggctcagcttctcttgcagctcgtgcagcttctggcgcgcgccctcttggagctctgcgcgcagcggctccaccttctggcggtagagctccatctcctcctgccacttcttctggaagtcgtccaggtagggctgcaccttggccttcacctcctccagatccttgctcatctcctgcctcaggccctctgtctccttttccaggttatcccagaactcctgggtcacagggccgagctgttcgcgcagcttgctgaaggtggaggtcacgctgtcccagttgtcaaggagctttaggctggagggtgagacagaag

SEQ ID NO: 9836 - DNA, 589 bp, Homo sapiens
  MAP TO CHR15.3; EXPRESSED IN BONE MARROW, SIGNAL = 0.93; EXPRESSED IN ADULT LIVER, SIGNAL = 1.8; EXPRESSED IN BRAIN, SIGNAL = 1.3; EXPRESSED IN PLACENTA, SIGNAL = 0.66; SWISSPROT HIT: P08910, EVALUE 2.00e-28; EST_HUMAN HIT: BI769922.1, EVALUE 6.00e-91; NT HIT: gi15300919, EVALUE 4.00e-91
ggtcatgagctctgctacccgatctacctggctcccagccctgctgtgactcttactagctaggggaccttgggcaagactttcccctgtaagcttcagtttctgcctctgtgagggtggttatagtgcccatctcaaaggctggtgtgaggcatggcatcatcaatgcccagtacaagttggctgttgatataaccgtgtgacctaccatctcttgcagatgggcataggtttaaaacttaaaaaaagaaaaaacaaggcagaagcagaagtagtagcacacttgcagaaaaagggaggactccacttagccatgcttaccataggtgaacatgcgtggcgaggtcaattcaatgttgggcagggcacccaggtggttcagcacggcgcaccgatagccatttttctgggcgtagtcaacgaaagtgcggatgtattgcttctcgctgtgattggcaattccagggcagatgaccatggtgatatcatctatagcgtagagaaagagatcctgatgtatccaagaaatgtgacatgataaatggacataattacacttcactggtctagaaaacaaggggagggaatt

SEQ ID NO: 9837 - DNA, 588 bp, Homo sapiens
  MAP TO CHR2.3; EXPRESSED IN BRAIN, SIGNAL = 4.1; EXPRESSED IN LUNG, SIGNAL = 3.7; EXPRESSED IN HEART, SIGNAL = 4.1; EXPRESSED IN HELA, SIGNAL = 3.5; EXPRESSED IN PLACENTA, SIGNAL = 3.3; EXPRESSED IN BONE MARROW, SIGNAL =   4; SWISSPROT HIT: P10070, EVALUE 5.00e-27; EST_HUMAN HIT: BE298258.1, EVALUE 1.00e-30; NT HIT: D14827.1, EVALUE 1.00e-78
aataggtgtggtcagcagggtggatggtctgcacacaggtcggggagggctgggggggtgccggtgcaggtggtcagctgacagcagggggtggtctgcggtctggccctgcttaccctcttctgggcatgtccctccggcagcacatcaacaacgagcacatccacggggagaagaaggagtttgtgtgccgctggcaggcctgcacgcgggagcagaagcccttcaaggcgcagtacatgctggtggtgcacatgcggcgacacacgggcgagaagccccacaagtgcacggtgagtggccttctccccacccccgccgcagcatcaagactggcctgtcagccaggccggggggatcatgtttggaggtggctggccacaggcacacctgggtggggcagaccacagcaggggctctgggacaggagcctgttcccaccctgcctgtttgggtcctggaggcccctcgcctcgtgccgtcccagaccttgatggacttgctctctgggtgtgagcatctcggtaagcatggcaaaaatgtgtgggtgtgtctgtgattgtgagtccaaaggcatatctgcaccct

SEQ ID NO: 9838 - DNA, 562 bp, Homo sapiens
  MAP TO CHRX.3; EXPRESSED IN LUNG, SIGNAL = 0.56; EXPRESSED IN PLACENTA, SIGNAL = 0.64; EXPRESSED IN BONE MARROW, SIGNAL = 0.71; EXPRESSED IN ADULT LIVER, SIGNAL = 0.62; SWISSPROT HIT: Q09795, EVALUE 2.00e-03; EST_HUMAN HIT: AL554918.1, EVALUE 3.00e-74; NT HIT: AF195953.1, EVALUE 0.00e+00
gctgagtcaccctcgttagcatggacaaattcagggactgaaggaagagcataccaatggacaagaggaaggggtcaaaacccacacgccctccagcaggaatctcggtgaggagccaggtgacaataggagtggtgccaactgaaagaaagataggaagcaatgcagaggtcaccttcagggccagccccaggctctccagccaggggttctgtctgatggtcctaccatgtgtgtcttccttgagatcagccttgaaagtcagtgatggcctcaaatttcctaagctccccatagaggcccagcatggtcttacatgcacgctctcacctataccttcctgaacctagtccaggtcccaagacttggggaacaaatccatgcggcccttctaccttccttatggagctcccagttgcagtccatctgccgctcagcctgagtccagtagcgactgtcggtccagacagctgctttcttcatagtcaccactgcagttcctggggcagaacagagaaacttgcaggtgagggtgaaggggaggaacgtggcattagctgat

SEQ ID NO: 9839 - DNA, 538 bp, Homo sapiens
  MAP TO CHR17.3; EXPRESSED IN ADULT LIVER, SIGNAL = 0.35; EXPRESSED IN BONE MARROW, SIGNAL = 0.74; NT HIT: Y11341.1, EVALUE 0.00e+00; SWISSPROT HIT: Q92183, EVALUE 5.00e-22; EST_HUMAN HIT: BI224391.1, EVALUE 4.00e-64
accactggaacaagagtgggggtgctccattcagagccctgggagggacaggagtccgacccatcattcctcccaggtctggcaaaccccagggaagaggcagaccagaaagccagctgccctctgccctctgccccggcctactgcgcacccacaccttcccctgggttaaggactcacaggagtagttgagctccatgaagccaaagggtggtgcaaagtgttccaggcggtcccactcactctggttgaagtgtctggagtccaggaagagagtgaggttgggcagaaagagtttctggagccacagcgacttggaggctttgatcttcacagagtcagggcaagtctatatacaggaggacgaagtcaggaagggagagacccagaaaggccatcggccaggggctgcaccactgcagcaagggctggggctcgcagtttggaaggcgcggcctctgctacctcttccattctgttctcagggtctgcttaccctccccttcccattgtctgggctcattgtggtcctgagggt

SEQ ID NO: 9840 - DNA, 585 bp, Homo sapiens
  MAP TO CHR22.3; EXPRESSED IN BONE MARROW, SIGNAL = 1.4; EXPRESSED IN LUNG, SIGNAL = 0.95; EXPRESSED IN HEART, SIGNAL = 1.3; EXPRESSED IN FETAL LIVER, SIGNAL = 0.57; NT HIT: X63578.1, EVALUE 0.00e+00; SWISSPROT HIT: Q9X576, EVALUE 4.40e-02; EST_HUMAN HIT: AA781284.1, EVALUE 1.00e-119
acctgcattcaaatcccaacactagcaaatcctgtatttgtgggcttagacacatcacatcccctctctgagactcagtttttcagagaatgggagtttcatcacctaccttatggggtggttttagggagtaagtgggtaacctctgtagagttccatgcttagtacttagaacagaaaagagactgttcccttccattccctcctatcacaacttttctaactgttgaaatccagcccccaccccctgcccagatgcatctggaaagccaatgcctgaccaggcctgggtcttcctgagcaagcagagtctgactggtacaacctttattgcttctccagcattttccagaagaatggtgtcattagagggccacaggggatgggggagtaaaaaataacataaacgaactgaacagaaatgcaggagggtggcgagaggggccgagattgggtgttcagggcagagaggtggaagaccaggggcagtcagtgcttcttagctttcagccaccagagtggagaattctgcagaacaaaatgacaaggaaagtgagtcagaggcggggatgcaagagagactgt

SEQ ID NO: 9841 - DNA, 500 bp, Homo sapiens
  MAP TO CHR12.3; EXPRESSED IN BONE MARROW, SIGNAL = 1.1; EXPRESSED IN FETAL LIVER, SIGNAL = 1.5; EST_HUMAN HIT: BG546791.1, EVALUE 0.00e+00; NT HIT: gi7305022, EVALUE 2.00e-12
tttcaccagtgggcaatatgaaagcatatatcacgttttgttttactttcaattgtataagaattgccttagaacctcttttgaactgaaattcagtaaatgtccaagtaatgtttttataataaactaagccatatttagacaataaacattgataaaagaaaatgttctaaagtacattttcaaaagaatggaccttgaaaggctagcctccttagctgtttacagtatcttatcttttagatgcctcccagacaaaaatctgagatggaaaagctacatcaagttcatgctattccaggcccaagaatatctcctaggttagcatattcttatttcaaaaaattagccctggttttctcagttttccatagggaatcccgaccatctgatatatttactgtgtcagtataagtaagttggggttcccctggaactataattaacatttaaaaaatctaatgctttagaagaagctcacagagtggtgatgaacccaa

SEQ ID NO: 9842 - DNA, 590 bp, Homo sapiens
  MAP TO CHR11.3; EXPRESSED IN ADULT LIVER, SIGNAL = 2.3; EXPRESSED IN FETAL LIVER, SIGNAL = 1.2; EXPRESSED IN BRAIN, SIGNAL = 3.5; EXPRESSED IN HELA, SIGNAL = 4.3; EXPRESSED IN BONE MARROW, SIGNAL = 2.8; EXPRESSED IN PLACENTA, SIGNAL = 2.7; EST_HUMAN HIT: BF958361.1, EVALUE 2.00e-85; NT HIT: gi14770564, EVALUE 3.00e-86; SWISSPROT HIT: P35563, EVALUE 5.00e-05
ctcccactgaacctctgctctgtgaaatgctggaatgcaggtggatgctcagagcccgctgaagtccctgttcttgggtgataatgaatgagaacatgcaatagagcagaaattccttggcccaagagagaaggccaaaggctggggagaagcgggcaacggggacaggtagtaaagaacctacattaaactgaatctgtgcaaatcctccagcgctgctctgcaggatgctgtatgtggaggacacagatagaagttcccactcactgtcattcaaaaacgcctttttgtcatgctgaatgtcttctgggctcctcagaaaggccaggtctacgtcttccactgcaaacaacacaaacaattgactttcccagagagaaagagatgccaacatccacccacttttccagctcccaattcgaatccttcctcgttctcctgcccccataggcacagtctccttggccttatttgaattagggggtagggatgtggaataaaatctttctagtcataaaaaaacaacaactgtgaatttatggcttggaatacactctctgtagaatgatggagcttgcctgcgatttcta

SEQ ID NO: 9843 - DNA, 588 bp, Homo sapiens
  MAP TO CHR15.3; EXPRESSED IN LUNG, SIGNAL = 2.7; EXPRESSED IN HEART, SIGNAL = 2.2; EXPRESSED IN BONE MARROW, SIGNAL = 2.5; EXPRESSED IN BRAIN, SIGNAL = 2.6; SWISSPROT HIT: Q05860, EVALUE 5.00e-47; NT HIT: gi6806910, EVALUE 4.00e-45
tgccttctgctgatttgatgccatgccctccattggctggagtgctgcatggatgtctttgtggtcatttgggggtgagagctggcttaaagaggagatattcagctttttgggtactaattgattacttctggttgtcttgctttcactttcacagggcttgaggaaggtctctctgtctgtctggacgcacacatttctgaaggtctttggagggcagtcatcatcggtggaaatgcacacatctttcctctcttcacaaccccctcgccatctgtgttctagctcgtgtttcagattttcaatggtttcttctagtctcgctgttatcattgcatgctcgccccggatatgaaatgcccgaagttcaaactgtgcctataggaaaattcagagggaaagaaagtaatgagtttattaagaacaaacttaagaatttagaaactcaataataccatcatggtgccactgtagcatggcccacataaatgcagggaaatacagagacattcttttaagaatccataaaggtgtaaattgcactctgaattttccagggacctaaacaggcaggagtcaaagcacaat

SEQ ID NO: 9844 - DNA, 504 bp, Homo sapiens
  MAP TO CHR11.3; EXPRESSED IN LUNG, SIGNAL = 5.4; EXPRESSED IN HELA, SIGNAL =   3; EXPRESSED IN PLACENTA, SIGNAL = 3.1; EXPRESSED IN BONE MARROW, SIGNAL = 3.2; EXPRESSED IN FETAL LIVER, SIGNAL = 3.4; EXPRESSED IN HEART, SIGNAL = 5.8; SWISSPROT HIT: Q05516, EVALUE 2.00e-65; EST_HUMAN HIT: BG394249.1, EVALUE 0.00e+00; NT HIT: AF060568.1, EVALUE 0.00e+00
ggagctacactatgggcgagaggagagtgccgagcaggtgccacccccagctgaggctgccaggccccactggccgacctgagcacccagcacccccgcctgagaagcatctgggcatctactccgtgttgcccaaccacaaggctgacgctgtattgagcatgccgtcttccgtgacctctggcctccacgtgcagcctgccctggctgtctccatggacttcagcacctatggggggctgctgccccagggcttcatccagagggagctgttcagcaagctgggggagctggctgtgggcatgaagtcagagagccggaccatcggagagcagtgcagcgtgtgtggggtcgagcttcctgataacgaggctgtggagcagcacaggtaggccccgctccagccccgcacctgatgtaggacttgaggccctcacacccctccttcacaccctggctgctcccaagttaggggcctggctcccctgtcttggcaatttgtga

SEQ ID NO: 9845 - DNA, 507 bp, Homo sapiens
  MAP TO CHR12.3; EXPRESSED IN HEART, SIGNAL = 1.2; EXPRESSED IN BONE MARROW, SIGNAL = 1.4; EXPRESSED IN FETAL LIVER, SIGNAL = 1.6; EXPRESSED IN ADULT LIVER, SIGNAL = 1.1; EXPRESSED IN BRAIN, SIGNAL = 1.3; SWISSPROT HIT: Q03933, EVALUE 5.00e-67; EST_HUMAN HIT: AL534186.1, EVALUE 0.00e+00; NT HIT: M65217.1, EVALUE 0.00e+00
ccctcttcccaaactgactgaactacattgttcttggtagtttctaatccttttttctcagagtcaaccaggagacctgggtctatgctaaattgtcttcctgacagcatggcttggaagtcgtctaaactgcaatcagtactgtcaagataatccaacaactcaacctttcccaaaagattgatgttatcattcaaaatggaatccatcatggtcactggatcttctgaggtcagactggatgagccatttagctggacagcactagacatgagagggttgctgccatcactgcctgaacttagggattctctggctggttcactctgctctccactctgaatggcaggtgcatactcatcttcattgtcatcttcaaagacgacaatatcagggtactggctacaattggagggatcagacataacatcctggagagatatatatacacatatacatatatgatatatggatatgatataatatcccagtttcccagtttctgga

SEQ ID NO: 9846 - DNA, 510 bp, Homo sapiens
  MAP TO CHR2.3; EXPRESSED IN BONE MARROW, SIGNAL = 0.68; EXPRESSED IN LUNG, SIGNAL = 0.84; EXPRESSED IN HEART, SIGNAL = 0.78; EXPRESSED IN BRAIN, SIGNAL = 0.78; NT HIT: M19364.1, EVALUE 0.00e+00; SWISSPROT HIT: P07316, EVALUE 7.00e-48; EST_HUMAN HIT: BF726411.1, EVALUE 0.00e+00
tgcaaatccccttactcaccaaaatgggcccttttgtgtgatttcctgtggaggcagcagtcagggctgctatacatacagtgacgttcccgcagtcccacacagcaaccagaaaacatctgctcacttccttcaaaatgggaaaggtaagtcctgggtaccggatgctcagccttggccctaatgcagtggcctcagtgggggccaatcactccatgctcccacatcttccatttttcagatcaccttctacgaggacagggccttccagggccgcagctacgaatgcaccactgactgccccaacctacaaccctatttcagccgctgcaactccatcagggtggagagcggctgctggatgatctatgagcgccccaactaccagggccaccagtacttcctgcggcgtggggagtaccctgactaccagcaatggatgggcctcagcgactccatccgctcctgctgcctcatccccccggtgagtgtggctctgtctttgccttc

SEQ ID NO: 9847 - DNA, 586 bp, Homo sapiens
  MAP TO CHR12.3; EXPRESSED IN BONE MARROW, SIGNAL = 1.8; EXPRESSED IN ADULT LIVER, SIGNAL = 1.4; EXPRESSED IN PLACENTA, SIGNAL = 1.8; EXPRESSED IN LUNG, SIGNAL = 1.5; EXPRESSED IN HEART, SIGNAL = 1.6; NT HIT: gi6755617, EVALUE 1.00e-20; SWISSPROT HIT: P17433, EVALUE 2.00e-27; EST_HUMAN HIT: BI838200.1, EVALUE 0.00e+00
tgggagaaaaaccagtctcgatgcagcttttaattcagtagttgctcaacaaaccctttctgaggatgttctcggtttacagccacggtggagtttgaccttgtttcccttcattttaggcaggaagaagctccgactgtttgaataccttcacgaatccctgtataatccggagatggcatcttgtattcagtgggtagataaaaccaaaggcatctttcagtttgtatcaaaaaacaaagaaaaacttgccgagctttgggggaaaagaaaaggcaacaggaagaccatgacttaccagaaaatggccagggcactcagaaattacggaagaagtggggaaattaccaaaatccggaggaagctgacttaccagttcagtgaggccattctccaaagactctctccatcctatttcctggggaaagagatcttctattcacagtgtgttcaacctgatcaagaatatctcagtttaaataactggaatgcaaattataattatacatatgccaattaccatgagctaaatcaccatgattgctaaatatactttcatatttcatggtttactggcatcggaaat

SEQ ID NO: 9848 - DNA, 500 bp, Homo sapiens
  MAP TO CHR6.3; EXPRESSED IN PLACENTA, SIGNAL = 4.1; EXPRESSED IN BONE MARROW, SIGNAL =   5; EXPRESSED IN FETAL LIVER, SIGNAL = 4.1; EXPRESSED IN BRAIN, SIGNAL = 5.2; EXPRESSED IN LUNG, SIGNAL = 3.9; EXPRESSED IN HEART, SIGNAL = 4.4; EST_HUMAN HIT: BG912913.1, EVALUE 0.00e+00; NT HIT: gi14550417, EVALUE 0.00e+00; SWISSPROT HIT: P40055, EVALUE 4.00e-16
gttcattcacttcaagccccatcccctggcccactcaccagggaccagcatgctggtgatgcccccagtgtgccccacccccagcacatcttcaaaggggcagaactgaaggccatgcacagggcctgagagccggtgggtgaggtagggctgttcaagggagggtgggctggccttgccctgccctgcccagatgttgacaacgtcacccattcccgccaccagcagtcccctctgggagaaggccaggtgccctgctccatggggcagggtccgagtgctcagaggctggtacgtccctcgcaagtcaaagatcttcagctggtggtctaggccagaggtggccatgtacctggtgagagaagagggatcaattaatatgtcagtaaatgggtttaccaagcaagctgtggccaagtccaggcatcaagtctggctggggagaaaaagattaatagtaataaccactgccatcaccctgaacactccacaggcatcct

SEQ ID NO: 9849 - DNA, 511 bp, Homo sapiens
  MAP TO CHRY.3; EXPRESSED IN PLACENTA, SIGNAL = 2.1; EXPRESSED IN LUNG, SIGNAL = 1.5; EXPRESSED IN HEART, SIGNAL = 2.2; EXPRESSED IN BONE MARROW, SIGNAL = 2.4; EXPRESSED IN FETAL LIVER, SIGNAL = 1.9; EXPRESSED IN BRAIN, SIGNAL = 1.8; SWISSPROT HIT: O14607, EVALUE 5.00e-17; EST_HUMAN HIT: AA417679.1, EVALUE 1.00e-61; NT HIT: gi14719924, EVALUE 7.00e-62
ttccaacgcttctcagtgacattaaagtgtgcatgcgcacatgtgcatgcacgcacacacatatgaaattgtgtatgtgggaaaaatctcaaccacctacctttaaactagacttgtagtctgtgttcactttgaacatgagcccaagtcgtaaatgaatttccttggctcgacaaaagctggggtcaacataaaggacatcttgaaatgctttaattgccctgaaaaaaataaaaacataagaaactgtgatttttaatacttacatatatctcacttgatagtataggaaacattctggttatttaattttattgaaagtaccaactttataaaaaacagtatgaatgaacggaaaagattagaaagggataagaaagtgcataatccttttgttctcaattccgtcaactattcaaaaatatctaaaggttcaagaaaaaattcagtggaaattactacaaatctttctgaaacattcaaggaagaacagcaggaaaatgtgaaaagg

SEQ ID NO: 9850 - DNA, 584 bp, Homo sapiens
  MAP TO CHR12.3; EXPRESSED IN BONE MARROW, SIGNAL = 6.2; EXPRESSED IN BRAIN, SIGNAL = 6.8; EXPRESSED IN LUNG, SIGNAL = 7.1; EXPRESSED IN PLACENTA, SIGNAL = 4.5; EXPRESSED IN HEART, SIGNAL = 5.5; NT HIT: AF143735.1, EVALUE 1.40e-01; SWISSPROT HIT: P04921, EVALUE 5.70e-02; EST_HUMAN HIT: AL135574.1, EVALUE 0.00e+00
ttgagtgggtgaggaagagggggaggatcagataaaccacttcctgttaggataagccatttcctgttccctccttcccgtttctttaagaatcaggaactggtttgggaggcagttcagttttgtcagaaatcaaaagcatgtgtccttagcttaagcaccaggagactccagctattatgtgccatggaaattggggttggtgggggaacatgggtttggatggaagtggacactagttaatgaaaacaagaggatctttacgaaaacagtgactaaatcagatgactccaggaactactgagacatcctcaatcctgaaacatctctacattttccctctcctttccaagttgttatcaccgttgtcttcctcaccctgctctcggtcgtgatcttgatcttcttttacctgtacaagaacaaaggcagctacgtcacctatgaacctacagaaggtgagcccagtgccatcgtccagatggagagtgacttggccaagggcagcgagaaagaggaatatttcatctaatgactcccaggccccaaggagcttattcctggctccatcgctaacacgttga

SEQ ID NO: 9851 - DNA, 540 bp, Homo sapiens
  MAP TO CHR1.3; EXPRESSED IN LUNG, SIGNAL = 1.5; EXPRESSED IN HEART, SIGNAL = 4.3; EXPRESSED IN BRAIN, SIGNAL =   2; EXPRESSED IN ADULT LIVER, SIGNAL = 3.7; EXPRESSED IN BONE MARROW, SIGNAL = 1.7; EXPRESSED IN PLACENTA, SIGNAL = 1.9; NT HIT: gi15299054, EVALUE 3.00e-76; SWISSPROT HIT: Q02061, EVALUE 1.30e+00; EST_HUMAN HIT: AA248207.1, EVALUE 2.00e-97
tttcatagccctgtcatccctgttagtctgttcccacttaggctagtcatagggctatgagacttttggaggtgaatccaagtgttcctagcctgaaggaactaggactattttactaagaaccacccagggaaggggtacaacattcttacaccttgttaccaccaccaggccatctgtcctggacagctttgccttgctttctggacagctgaacactctgaacaaggtcttgaagcatgaaaaaacaccgctgttccgtaaccaggtcatcattcctctggtgttgtctccagaccgagatgaagatctcatggtaagaggagaaaaagaatacaacttgggaaattaaggggttttttaggcttctttagtatttagggaaattaagttattagctgagagcctagaaataattttggaggccttgctttttgttcttctgaaggcgggagagccactcccaaatagtgctgtaataacctgaggggtatgtcaccaaggctgatacctttcttctccaacatctgtctcaagcca

SEQ ID NO: 9852 - DNA, 593 bp, Homo sapiens
  MAP TO CHRX.3; EXPRESSED IN FETAL LIVER, SIGNAL = 1.3; EXPRESSED IN LUNG, SIGNAL = 1.4; EXPRESSED IN HEART, SIGNAL = 1.3; EXPRESSED IN BONE MARROW, SIGNAL = 1.2; EXPRESSED IN ADULT LIVER, SIGNAL = 1.6; EXPRESSED IN BRAIN, SIGNAL = 1.6; NT HIT: gi16162553, EVALUE 7.00e-59; SWISSPROT HIT: P52788, EVALUE 1.00e-15; EST_HUMAN HIT: BE003312.1, EVALUE 1.00e-58
atgggcaagctggataacacctcaagtttgtttctgcattggtaaaatgggatgataatagtgcctctaggattgttgttttattgaaatgagaaggcatataaagcatatatggtaagcacttaatttttgctgttaacagacatagatgaaagttttttggttcctgtagcagttgctgtggatagctgtggatataagcccatacttggcgcttttttcctccttcctttactattgttttttgtttaactacatccacatgttggctcactcatctattcctgttctttctggaaggttctaatagaagactgtatcccggtactgaagaggtacgccaaagaagggagagaatttgattatgtgattaatgatttgacagctgttccaatctccacgtctccagaagaaggtagatttttttaaccaagatatttatgatggaaatgtttctcttggcaccatgtgagggtgaaaggatcctagagattgtgtagttctctcacgtttttgaaaaagggagttaaattgaggtccatggtggaaagatgactggatttggcttcaattcctgttctgccactcaatga

SEQ ID NO: 9853 - DNA, 535 bp, Homo sapiens
  MAP TO CHR15.3; EXPRESSED IN ADULT LIVER, SIGNAL = 0.53; EXPRESSED IN BRAIN, SIGNAL = 0.85; EXPRESSED IN BONE MARROW, SIGNAL = 0.89; EXPRESSED IN PLACENTA, SIGNAL = 1.2; EST_HUMAN HIT: AA858002.1, EVALUE 1.00e-111; NT HIT: gi16162072, EVALUE 1.00e-123; SWISSPROT HIT: P53355, EVALUE 5.00e-30
cacaggttgtcatcaggtggggatgcagactggtggcatgatttgtcctgtcctggcagaatcactctgaatttgtgtgacctggtagctgacagtggggtcatttccccaatgaccacagtgatgacctaatcttgtgggtctgtgtccccacagtggccagtttgccatcgtgaagaagtgccgggagaagagcacggggcttgagtatgcagccaagttcatcaagaagcggcagagccgggcgagccggcgcggtgtgagccgggaggagatcgagcgggaggtgagcatcctgcggcaggtgctgcaccacaatgtcatcacgctgcacgacgtctatgagaaccgcaccgacgtggtgctcatccttgagctgtgagtggggtccccaggacccacagggttggggggcagcaggggcaggcagagcagtggaaactccagccacaggccccagggggcagcagcaaccaggcctaagctcagcccagaggaggtgaagtcagtggtgggcagatcccctctgtctcag

SEQ ID NO: 9854 - DNA, 572 bp, Homo sapiens
  MAP TO CHR17.3; EXPRESSED IN FETAL LIVER, SIGNAL = 1.2; EXPRESSED IN BONE MARROW, SIGNAL = 1.3; EXPRESSED IN HEART, SIGNAL = 1.1; EXPRESSED IN PLACENTA, SIGNAL = 1.1; SWISSPROT HIT: P35125, EVALUE 2.00e-38; EST_HUMAN HIT: AA457313.1, EVALUE 0.00e+00; NT HIT: gi14774573, EVALUE 1.00e-117
cttcaaaggcgaacagaaggaaaagaaaacaagtggtagaactgtttgtgtgctacaacatggtgctgatacaggtttctgcaaaaattctgcttaatagtttccagcagttactctttccttttcatttggtcaaaagtgtgagttagggaagtaaaactggaaattaaaatcttccaataaatctagaattatttatactatgatttctccctgccctgtgttaagagactacactgtctctcgtcctcaggatacttgagaaaagagcaaagatgaaaataccacaagcttatgatgctgtacttatctttgaatttgtagatttctcctcttcaccatctacaaatggaatgttcaccctaactaccaatggggacctacccaaaccaatattcatccccaatggaatgccaaacactgttgtgccatgtggaactgagaagaacttcacaaatggaatggttaatggtcacatgccatctcttcctgacagcccctttacaggttacatcattgcagtccaccgaaaaatggttagttaaatgttaggcaactcactgccagtcttg

SEQ ID NO: 9855 - DNA, 589 bp, Homo sapiens
  MAP TO CHR19.3; EXPRESSED IN ADULT LIVER, SIGNAL =   1; EXPRESSED IN BRAIN, SIGNAL =   1; EXPRESSED IN BONE MARROW, SIGNAL =   1; SWISSPROT HIT: P38991, EVALUE 6.00e-12; EST_HUMAN HIT: BG616089.1, EVALUE 3.00e-25; NT HIT: gi14766508, EVALUE 1.00e-103
attcgagtgtctgacccagggtaggaggtagtgtaaatggaatgaactgcagagaagtcttcaaggtacaagtgcagggtttacttggggttagtatttggggaaaatgctgggctcagacgtcaaagatgaaagaggaagcagagactgtccttactgtagatgagcctggatctcaatttcccggcgcagctggtgctccagtccttccttctctatctgcgacttgaagagaaccttcagggccacaatgaaatggctttccttgagccgagccaggtacacattcccaaatttccccttgcccaggggacgcccgatttcaaagtcatcgactgtgaggcgccgcctgacaggagaggaagaaaaaagcctcagcttgggaggtagggtaggcggagggaaagtcagggatgccaatgctccccttcctctttcattgtatccttcctctgccgctttcccttctcacacagacccagccctatcagtagttctcgttcccaggagccagcaccccacacacccagtctgttcttcatccccacgtcccaccttccttccttttccagataccaatcccaaggga

SEQ ID NO: 9856 - DNA, 513 bp, Homo sapiens
  MAP TO CHR6.3; EXPRESSED IN BONE MARROW, SIGNAL = 0.7; EXPRESSED IN HEART, SIGNAL = 0.51; EXPRESSED IN PLACENTA, SIGNAL = 0.54; EXPRESSED IN ADULT LIVER, SIGNAL = 0.57; EXPRESSED IN BRAIN, SIGNAL = 0.68; EXPRESSED IN FETAL LIVER, SIGNAL = 0.41; NT HIT: AF260330.1, EVALUE 2.00e-99; SWISSPROT HIT: Q01755, EVALUE 5.00e-19; EST_HUMAN HIT: BI830144.1, EVALUE 2.00e-99
ttccacaccctttttggaagaaaggtttttttttgttacaccctcatgaccacttatggaaagaaaccaacaatctttgtagatggttccacagggcctttctgtggtttgtggtagacagtaagcaatcgttcattacctgcctatgttctaaataccacatatcaccttctactctaaaaagtaactatgcagctcacctggagtgaaagtcttccaacaaggatttggttatgcgtttcagtttatctacaaattggggtgagccaaacaaaacactgccggagaaactactggccaccagcaagactgaggccatgacggttaactggtgcaactgggacttcagctcctgcagccgggttctgtccatcagcagggtctgggaaccagggaagaacaggctgtcaggggaagtcccgatggaagccctgaacacaaaacaaggcaatgcccccagacattcctacctcagggaactcttcattttcaaggtcccagagaaggaggttc

SEQ ID NO: 9857 - DNA, 538 bp, Homo sapiens
  MAP TO CHR2.3; EXPRESSED IN BONE MARROW, SIGNAL = 0.93; EXPRESSED IN HEART, SIGNAL = 0.77; EXPRESSED IN ADULT LIVER, SIGNAL = 0.69; NT HIT: M37243.1, EVALUE 0.00e+00; SWISSPROT HIT: P16410, EVALUE 1.00e-61; EST_HUMAN HIT: AI274905.1, EVALUE 1.90e-01
gagaggggaaggggtaagtgatagattcgttgaaggggggagaaaaggccgtggggatgaagctagaaggcagaagggcttgcctgggcttggccatgaaggagcatgagttcactgagttccctttggcttttccatgctagcaatgcacgtggcccagcctgctgtggtactggccagcagccgaggcatcgccagctttgtgtgtgagtatgcatctccaggcaaagccactgaggtccgggtgacagtgcttcggcaggctgacagccaggtgactgaagtctgtgcggcaacctacatgatggggaatgagttgaccttcctagatgattccatctgcacgggcacctccagtggaaatcaagtgaacctcactatccaaggactgagggccatggacacgggactctacatctgcaaggtggagctcatgtacccaccgccatactacctgggcataggcaacggaacccagatttatgtaattggtgagcaaagccatttcactgagttgacacctgttgcattgcagtct

SEQ ID NO: 9858 - DNA, 540 bp, Homo sapiens
  MAP TO CHR9.3; EXPRESSED IN HEART, SIGNAL = 2.4; EXPRESSED IN PLACENTA, SIGNAL = 1.7; EXPRESSED IN BONE MARROW, SIGNAL = 2.4; EXPRESSED IN BRAIN, SIGNAL = 2.7; NT HIT: AF090189.1, EVALUE 0.00e+00; SWISSPROT HIT: Q09690, EVALUE 5.80e-01; EST_HUMAN HIT: BE062002.1, EVALUE 3.00e+00
tactctccatccatcccagctgtccactaccacctgcaaactcttacctgctctccccccagaacacatacctggctgaagggcactgtcctgcaggtctcccaatgtacttcatggcttttgatgggcaagatgaccccctgagaagccggagtttttctgaacatgaagtggtgccagaatttcttggcttcttcccgaagaggagatttctccattttcattccatctatcggctggatgagggactgggtcccaggtgggaagggctcactatctgagtccctggatggatgcatttctctctcaggcttcttccagaacctgccaaatctggacagcatcttctctctctgcctctggccttcccctgcagggctggtggctacaaggtgtggcactgcgacaaacagatctggcttctcctcagcttcctcatggttgcctgtgggaagctctctttgattccttggcaggagtacgggggaaagagaactctgattctggcggccatcctggtgccgtgtggtctttcctaga

SEQ ID NO: 9859 - DNA, 503 bp, Homo sapiens
  MAP TO CHR6.3; EXPRESSED IN FETAL LIVER, SIGNAL = 0.97; EXPRESSED IN BRAIN, SIGNAL = 1.9; EXPRESSED IN HELA, SIGNAL = 3.7; EXPRESSED IN BONE MARROW, SIGNAL = 1.6; EXPRESSED IN LUNG, SIGNAL = 2.1; EXPRESSED IN HEART, SIGNAL = 1.2; EXPRESSED IN ADULT LIVER, SIGNAL = 1.2; NT HIT: gi4757969, EVALUE 0.00e+00; SWISSPROT HIT: Q9WUR2, EVALUE 4.70e-02; EST_HUMAN HIT: BF115614.1, EVALUE 0.00e+00
ttaagaatgcacccagtgccaagtgtgaaatgtgctttatacatatgttaggcccgacatattgtgagaaaatgtctggtaacctttttaacaggtgattgctggaatttgatgattgcctccgtaaatgtggaggcacaggggacccgtgtctgcccgcatgcaccctgctaactggctgcttgttttccggtgcaggtgcttgaggaatccaaagccctcgtgcgctgcaacatgaagatggagctggagcaggccaacgagagggagtgtgaggtgctgaagaaaatctggggctcggcccaggggatggactccatgttaaagtacttgcagaggaagatcgatgagttctgagtgtcgggctgcccactggtgacaccgggatcgggctgagcaggagaacatcaccggctccagttcccctgatccattctcacagcctgaaacaagctcacccgtagcttacgcttggaagcaggactgggaacatccacgctatt

SEQ ID NO: 9860 - DNA, 501 bp, Homo sapiens
  MAP TO CHR19.3; EXPRESSED IN BONE MARROW, SIGNAL = 2.2; EXPRESSED IN LUNG, SIGNAL = 1.5; EXPRESSED IN PLACENTA, SIGNAL = 3.4; EXPRESSED IN HEART, SIGNAL = 2.2; EXPRESSED IN FETAL LIVER, SIGNAL = 1.1; EXPRESSED IN ADULT LIVER, SIGNAL =   2; EXPRESSED IN BRAIN, SIGNAL = 4.1; SWISSPROT HIT: Q14943, EVALUE 1.00e-18; EST_HUMAN HIT: BF204121.1, EVALUE 0.00e+00; NT HIT: gi15305393, EVALUE 0.00e+00
cactaggacgtgagcacagcctccttcctcaaccactgggtgactcgacctctctgtgagcttgggtgggggagtgcgctctctgggagggatacagccaaaaagctccccagctcttaggcaggtgtggggacctccccagtctcagctgagatgctggctcctgccttcaacatcagactttctttttctcccaggagtttttgccaaaccctcgctctcagcccagcccggcccggcggtgtcgtcaggaggggacgtaaccctacagtgtcagactcggtatggctttgaccaatttgctctgtacaaggaaggggaccctgcgccctacaagaatcccgagagatggtacagggctagttttcccatcatcacggtgaccgccgcccacagcggaacctaccgatgctacagcttctccagcagggacccatacctgtggtcagcccccagcgaccccctggagcttgtggtcacaggtaggggtagtgcagacca

SEQ ID NO: 9861 - DNA, 535 bp, Homo sapiens
  MAP TO CHR14.3; EXPRESSED IN BONE MARROW, SIGNAL = 1.7; EXPRESSED IN LUNG, SIGNAL = 1.7; EXPRESSED IN HEART, SIGNAL = 1.4; EXPRESSED IN ADULT LIVER, SIGNAL = 2.3; EXPRESSED IN BRAIN, SIGNAL = 2.2; SWISSPROT HIT: P49770, EVALUE 8.00e-22; EST_HUMAN HIT: BI915166.1, EVALUE 0.00e+00; NT HIT: gi16190823, EVALUE 3.00e-79
aatttcccaggcctcacttcgcgttggctcctcttatcctctctcttttggactgtaggggagctgatggagctgatccgcagagagggcaggaggatgacggccgctcagccctccgagaccaccgtgggcaacatggtgcggagagtgctcaagattatccgggaggagtatggcaggtcaggctcacgtcctgggctcctggttggatccagtgacactttttgcacgggcccctctacctgctcggagactttattggagctgaacagcccttgttacctgcctgaccactcctccccacctctctctttgggtcttgttgcctctatagactccatggacgcagcgacgagagtgatcagcaggagtccctgcacaaactgttgacatccggaggcctaaacgaggatttcagcttccattatgcccaactccagtccaacatcattgaggcgattaatgagctgctagtggagctgggtaagaggcctgatcgctgggaaaatgggactggtcacaggcaaataaggga

SEQ ID NO: 9862 - DNA, 557 bp, Homo sapiens
  MAP TO CHR19.3; EXPRESSED IN BONE MARROW, SIGNAL =   2; EXPRESSED IN LUNG, SIGNAL = 1.4; EXPRESSED IN HEART, SIGNAL =   1; EXPRESSED IN ADULT LIVER, SIGNAL = 1.2; EXPRESSED IN BRAIN, SIGNAL = 1.3; NT HIT: gi14754876, EVALUE 0.00e+00; SWISSPROT HIT: P20916, EVALUE 7.00e-06; EST_HUMAN HIT: BI756629.1, EVALUE 2.00e-94
tctctctcccaccatccatcactctgggatccatgcccctcccctcaggcccctgccctctgcaatacgccccctgaccttgcagcagcaggacagagccgctctgggacccatagatgttccaggccttgcagctgactttgaggtcggagctgagccccccgtggaggatcagggagctgttggcccagggcccagctgagctggagttgaccttgaatgagccctggctgctgttcccctccagcggcttctcctcaagccgccagcacagggagggggccggccgggctcgaaaggagcatctgcagtgcagaccctcagcctcccaggagcaggaggggcccagcaactgtgggagggctgtggggagggaggacagaactcagcagggggcctcttccttctttaataccatgcagttcctgctccagctgcccccacactcacagtaaactgagagattcagaaaaatttgcaggaagcccagcgggtgctgagcgcggcaggtgaagcctccttcttctgcagaccttactcgacgaagctccaagatc

SEQ ID NO: 9863 - DNA, 547 bp, Homo sapiens
  MAP TO CHR6.3; EXPRESSED IN BONE MARROW, SIGNAL = 1.2; EXPRESSED IN HEART, SIGNAL = 1.2; EXPRESSED IN PLACENTA, SIGNAL = 1.1; EXPRESSED IN ADULT LIVER, SIGNAL = 1.2; EXPRESSED IN BRAIN, SIGNAL =   1; EST_HUMAN HIT: AA568419.1, EVALUE 2.00e-04; NT HIT: gi11526387, EVALUE 0.00e+00; SWISSPROT HIT: P58182, EVALUE 1.00e-105
ggctatctgcaagccacttcgctacactgtcatcatgaaccctcagctctgtacccagatggccatcacaatctgggtcattggttttttccatgccctgctgcactccgtaatgacttctcgcttgaacttctgtggttccaaccgtatccatcattttctctgtgatattaagccattgctaaagctggcctgtgggaacactgagcttaatcagtggctactcagtactgtcacggggacaattgccatgggccccttctttctgacacttctctcctatttctacattatcacttatctcttcttcaagacccgttcttgtagcatgctctgtaaagcactgtccacttgtgcctcccacttcatggtagttattcttttctatgcacctgttcttttcacctatatccatcctgcgttagagagcttcatggaccaggaccggattgttgccatcatgtacactgtggtcactcctgtactaaacccactgatctatactttgaggaacaaggaagtgaagggggccttgggtagagtgatc

SEQ ID NO: 9864 - DNA, 585 bp, Homo sapiens
  MAP TO CHR19.3; EXPRESSED IN BONE MARROW, SIGNAL = 3.5; EXPRESSED IN HEART, SIGNAL =   3; EXPRESSED IN PLACENTA, SIGNAL = 2.9; EXPRESSED IN ADULT LIVER, SIGNAL = 2.6; EXPRESSED IN BRAIN, SIGNAL = 3.2; NT HIT: gi14763864, EVALUE 1.00e-105; SWISSPROT HIT: Q9Y463, EVALUE 1.00e-37; EST_HUMAN HIT: AI803954.1, EVALUE 1.00e-104
gcgtaagctctctgtggacctcatcaagacctacaagcacatcaatgaggtgggcaggggctgggggatcctgggctgggtgccgagggtcttgtctgctggcatgagtcactcaccagtccccatctcctggctggctggctgggcaggtatactatgcgaagaagaagcggcgggcccagcaggcgccaccccaggattcgagcaacaagaaggagaagaaggtcctgaaccatggttatgatgacgacaaccatgactacatcgtgcgcagtggcgagcgctggctggagcgctacgaaattgactcgctcattggcaaaggctcctttggccaggtgtgggacaccccccaccaccctgatccaaggccccactaacattgatcacacacccagtggttcagtggcttcaagtcccatgctgggccactcaccctagcccacttagtttccctgtgcctcagtcgccttttctgtaaaacagtttaaataacaagactcaacataaggtcgttatgttatttcacatccagtgtttacaccagcgcctgactaatggtgcgcactcagctgcgaagtatgc

SEQ ID NO: 9865 - DNA, 575 bp, Homo sapiens
  MAP TO CHR22.3; EXPRESSED IN BRAIN, SIGNAL = 0.67; EXPRESSED IN BONE MARROW, SIGNAL = 0.86; EXPRESSED IN PLACENTA, SIGNAL = 0.58; EXPRESSED IN LUNG, SIGNAL = 0.62; NT HIT: gi14778194, EVALUE 1.00e-82; SWISSPROT HIT: P25299, EVALUE 4.90e-01; EST_HUMAN HIT: BI850906.1, EVALUE 0.00e+00
cagcttgagccctaccattctcccctggcctgctccgcccagccacaccctctccctcctgctccgagagccctggtgctggactcagggctgcctgcttctcttcacaccctccacccagaactgcatggctagctttcccctattttagctgttggctcaaacatcacctccttctagggccttcctcctgtccacagagccttcagtcagcgttgttggggaaagagctcacctaccagcctgctcctctgagggcccagtggctcaggcctccctctcttttgatcctcaaagagcccagacctagactgtcactgacccacaggagtctttgatgataagaaagatcagagagcagggctccaggagcctggcccccagccagcggcacccacctcggaacatgtcgtaccagaccttcttggccttgaggtgctgcagcccgttcaggtgcttcttgcggttgtggaggttgtcctggaaggagcggtcgcagtagtcacagaagtatcgcttccccatggccactcagagcaggtgctttgctgcctgggaagccacaaagagctcag

SEQ ID NO: 9866 - DNA, 563 bp, Homo sapiens
  MAP TO CHR6.3; EXPRESSED IN HEART, SIGNAL = 1.5; EXPRESSED IN BONE MARROW, SIGNAL = 1.4; NT HIT: gi13642626, EVALUE 5.00e-72; SWISSPROT HIT: Q15349, EVALUE 6.00e-21; EST_HUMAN HIT: F06080.1, EVALUE 1.00e-67
agaaaaggagtcccacccagaggatggggtgcctgagaggctactgctgcctgaatgtaagtcacttatgaaggggactttttttgcatgtgtggcctagaatagaggctttgaacttgagtggaacagccacaccagctgccaccacgtcagcagaggctgccacctactcaggtaggagccctgtgcaatactgcacgtgtctggtgaagtgcacgaaggtaggtgggccggcggtgcagtttggggctgctatgggctctttctctgcactctgtggtttcttcggagtgattgcaaggtatcaggctcttttctgggtttcccattcccaccactctgtcctcactgtcgcctgccggtaccttcaccaggtgcacgtcctgtcggctgagctggtttggggacaggtactctctgttgaccacccacgggtgtttgagcacttgcatcgccgtcaggcgctgatgagggtccacgtggagcatcttggacacgacgtcctgccagggaaggtcatgagagtcggggggatggttggatcatttgtgctgggtcagaga

SEQ ID NO: 9867 - DNA, 581 bp, Homo sapiens
  MAP TO CHR10.3; EXPRESSED IN FETAL LIVER, SIGNAL = 0.52; EXPRESSED IN BONE MARROW, SIGNAL = 0.76; EXPRESSED IN PLACENTA, SIGNAL = 0.53; EXPRESSED IN HEART, SIGNAL = 0.72; NT HIT: gi14735962, EVALUE 8.00e-99; SWISSPROT HIT: Q02218, EVALUE 6.00e-36; EST_HUMAN HIT: AU142192.1, EVALUE 8.00e-72
ggatccatcatgttcccatctccaccttcagggctccggggatgtcaagtaccacctgggcatgtaccatgagaggatcaaccgcgtcaccaaccggaacatcactctgtcgctggttgccaacccctcccacctggaggcagtggaccctgtggtgcaggggaagacaaaggcagagcagttctaccgtggagatgcccagggcaagaaggtgagctcacctgggggaacccagaggacctgggcccttcagggtgggcccagagggctgggctggaccctgggtctccacagtacaggtgccggctgggctacatgggctggggcacgcagcccctcctggctcacacctgccctgcaggtcatgtccatcctggttcatggggacgccgcctttgctggccagggcgtggtatatgagaccttccacctgagcgacctgccctcctacacgaccaatggtaccgtgcacgtcgtcgtcaacaaccaggtgagcatgtaggctccacgctgggcctcacagcgtcagcatccctggaaatccaggcagtagcttgcggggaaagtgagatgctcctggc

SEQ ID NO: 9868 - DNA, 589 bp, Homo sapiens
  MAP TO CHR9.3; EXPRESSED IN BRAIN, SIGNAL = 0.98; EXPRESSED IN BONE MARROW, SIGNAL =   1; EXPRESSED IN LUNG, SIGNAL = 8.5; EXPRESSED IN FETAL LIVER, SIGNAL = 5.7; EXPRESSED IN ADULT LIVER, SIGNAL = 1.3; EST_HUMAN HIT: BI193480.1, EVALUE 0.00e+00; NT HIT: AB010273.1, EVALUE 0.00e+00; SWISSPROT HIT: P50454, EVALUE 1.00e-74
gcagcaagcagcactacaactgcgagcactccaagatcaatttccatgacaagcgcagtgcgctgcagtccatccacgagtgggccgtgcagaccaccgacggcaagctgcccaaggtcaccaaggacatggagtgcatggatggcgccctgcttgtcaacaccatgttcttcaagccacactggaatgagaaattccaccacaagatggtggaaaaccgtggcttcatggtgactcggttctataccgtgggtgtcatggtgatgcaccagacaggcctctacaactactatgacaatgagaaggaaaagctgcaaatcgtggagatgcccctggcccacaagctctccagcctcatcatcctcatgccccaccacgtggagcccctcgaggccttaaaaagctggtaaccaaagagcagctgaagatctggatggggaagaagcagaagcctgtcgccatctccttgcccaagcgggtggtggaagttcccatgacctgcagaaactcctggctaggcttggcctgactgaggccattgacaagaacaaggcaaacttgtcacgcatgccacacaagaaggacctgt

SEQ ID NO: 9869 - DNA, 599 bp, Homo sapiens
  MAP TO CHR2.3; EXPRESSED IN ADULT LIVER, SIGNAL = 7.2; EXPRESSED IN BONE MARROW, SIGNAL = 5.1; EXPRESSED IN LUNG, SIGNAL = 6.6; EXPRESSED IN HEART, SIGNAL = 6.9; EXPRESSED IN HELA, SIGNAL = 4.9; EXPRESSED IN PLACENTA, SIGNAL =   6; SWISSPROT HIT: P02593, EVALUE 7.00e-20; EST_HUMAN HIT: BE006553.1, EVALUE 2.00e-72; NT HIT: U94728.1, EVALUE 0.00e+00
tcaaagtgaagaatgaggcgtgagactgaaacatttaccttcatagtttacttgaccatcaccatcaatatctgcttccctgatcatttcatcaacttcttcatctgttaacttctctccaaggtttgtcatcacatggcgaagttctgcagcactaatatagccattgccatcctagcaaaaaatttagtatagtttctgagtcaaattacagacttgagagttggaatggaaatttattaagtttactactaaatttcacattgggggaaaaacatactttagaaatgcatacaaatctacacagttgacctacaaatgtcattaagagccaagcaaaatgtcctacattgaaatcattatttcctagtcccaaagtcaagtgacacctcctttgacaagatgaacgcaatacatatattagaaagtctatactgaattcttaaaaagcttttgcttggtaattaaaatatgttggtaaatcatcaaaaaaaaaaaaaaaaaaaaaaccacccaaaaaaccccaagttttaaaaaggagcccgggttttttatttcatccctaaaaattaaacatatccagtccttggcctacctta

SEQ ID NO: 9870 - DNA, 553 bp, Homo sapiens
  MAP TO CHR3.3; EXPRESSED IN LUNG, SIGNAL = 1.1; EXPRESSED IN BONE MARROW, SIGNAL = 0.79; EXPRESSED IN HELA, SIGNAL = 2.4; EXPRESSED IN ADULT LIVER, SIGNAL = 1.2; NT HIT: gi13648977, EVALUE 0.00e+00; SWISSPROT HIT: Q9WVF8, EVALUE 1.00e-17; EST_HUMAN HIT: BE740507.1, EVALUE 0.00e+00
cccaaccaatactgtgggaccgacccgctcacagctgaaggttatgggccaacagagtttattcagggttgtggccccagcctgggctcctcaatggaagccacaccttgattgagcctgggagtttcttgccggggcagggggtgcttctgtctgccacctcccagggtcacacctcatagaggatcacagggaaatccacgtggatgcgggggtgatccagcttcacgatgccctgccatggaaacagaggctagtaagggtcagctcagggcctctacttcaggaagcttccttgttcctcccagatccccccgcaaaagcccccaccatgacaacagatcccatctgggtccacctccacacgcttagtgtaggctctgtgaccgctgcccagcccctcacctgaggaatcagattcttatgcactcgcctcagcttggcccgcttctgcccgttcttggtgacgattgtctcctcatagaactcgtgagccagatccccatcctcatcatagaacatagagctgtgtagagggagaaggaaacaggct

SEQ ID NO: 9871 - DNA, 531 bp, Homo sapiens
  MAP TO CHR1.3; EXPRESSED IN BONE MARROW, SIGNAL = 4.8; EXPRESSED IN LUNG, SIGNAL = 4.4; EXPRESSED IN HELA, SIGNAL = 4.4; EXPRESSED IN HEART, SIGNAL = 3.6; EXPRESSED IN PLACENTA, SIGNAL = 3.6; EXPRESSED IN BRAIN, SIGNAL = 5.5; NT HIT: gi4503150, EVALUE 1.00e-103; SWISSPROT HIT: O77641, EVALUE 3.00e-14; EST_HUMAN HIT: AW792823.1, EVALUE 1.00e-103
tagcacaccaactcccttccaaagtgcatcgttacactgcaccatcgtggaagaaatggaagagcaggatggatttggctggctggagtcacatcttggggaagctggccaggttggcaatgccacaggcgttgttcttatttcgagccatgaggatatatcctttgtttccccagttttctccccagctgtaagaccaatcaagaaaaatacttagtactctcagtttatttattcattaaaatatttactgagtattgtgcgaggtactgatggtacacaaaaatgaatatgatgttttttaactttaaagagtttaaagtcaagaaatagggagaaggcataatactgtaggtatcaaaggagggaaagattccttctgatcaagagaatcttagaggcttgatgtaagaggtggcatttgagctgagccaaaaggctaagtagaatttcgacctgtgggaaggggatgccagtggaagggtgtgaaatgaacaacagaggcaggaaagtgtggggcactgttaggat

SEQ ID NO: 9872 - DNA, 549 bp, Homo sapiens
  MAP TO CHRX.3; EXPRESSED IN BONE MARROW, SIGNAL = 1.3; EXPRESSED IN BRAIN, SIGNAL = 0.8; SWISSPROT HIT: P51864, EVALUE 1.00e-104; EST_HUMAN HIT: BI598827.1, EVALUE 0.00e+00; NT HIT: AF251550.1, EVALUE 0.00e+00
tgcagacggtggtagttctggagtcctggaagccacgaggtgctcatccatcacaaggccatcacagccgggtagaaatgcctgaggaaagcagcggagctgaccgtgccagcatttacacagggaacacttcttgggcagccaggtgtcatggggcacagacccacagttctctttgcgcacatcgtgctcacagttccgtccgtagaaggagggagggcaggcacaaaaggactccagcatgcaggttcccccattcaggcagcaggttctgtttagctccttactgtgctgtattcccatgggcagcacacgctgggaagaccgaggccgaattgcaggctcctcctggggccaaatgctgtcatctctgaaggccaggtctccccgagatggacgagcaaattcctgatggcccagcccggcaactaatcccagttcaaaggctttagaaatggccatgatccaaatcacactgtaagagaagcggaccatcttcctgcagtccatagcttttaacaattagggggaaaagaggcgttagcatcg

SEQ ID NO: 9873 - DNA, 523 bp, Homo sapiens
  MAP TO CHR2.3; EXPRESSED IN HEART, SIGNAL =  10; EXPRESSED IN BRAIN, SIGNAL =  16; EXPRESSED IN BONE MARROW, SIGNAL =  12; NT HIT: M17783.1, EVALUE 1.00e-108; SWISSPROT HIT: P07093, EVALUE 7.00e-33; EST_HUMAN HIT: BF986302.1, EVALUE 1.00e-108
aaaatcctgcctctcagcaccctgctctgttccccagttttttaaaagatgaaaagttagatttgctctggaattaagttaaagcactcaagggcctttctgccgccagcacatcctagaacaggcttcgctgagcatgaactcaccacaccggaacacggagagctgggccagcattggcacttgataggatttcccgtcggctgccacgaaagtgcgtttctttgtgttctcgggttggaaccgtgatttccacagacccttgaaatacactgcgttgacgaggaccagtctggtgagcacaccatcaataagatctggggacagcagattgtcaatcatatctgtgaagccaaagaacaaacaagggaaaaataacctcaggactggtggccggcttgagggcaaatggcagctgtcatcaggtagactgaaaaatcaaaggatttttaaggagtgttaaagagaatcttcttaaactacccttttgtactttctaggttcccctcccccactaaatatt

SEQ ID NO: 9874 - DNA, 537 bp, Homo sapiens
  MAP TO CHR1.3; EXPRESSED IN BONE MARROW, SIGNAL = 5.6; EXPRESSED IN HELA, SIGNAL = 4.3; EXPRESSED IN HEART, SIGNAL = 5.1; EXPRESSED IN PLACENTA, SIGNAL = 4.6; EXPRESSED IN BRAIN, SIGNAL = 6.7; NT HIT: gi4826985, EVALUE 4.00e-63; SWISSPROT HIT: P51449, EVALUE 4.00e-17; EST_HUMAN HIT: AW580393.1, EVALUE 7.00e-63
gagataggtgagcagctggggaggtggagagggtggtagagatgagggaggggtttccaccagtaccccgtatcaatcaaacatgcgcctgagggaattgaggggtccagacgaggggcggagggaggaggcggagcaggataggccaggctgagaagtgcccttgcatgggtaggcgtaggagctggctgagatcaagccatgccttccttctccggccccagagcacctggtgcagagcgtctgcaagtcctacagggagacatgccagctgcggctggaggacctgctgcggcagcgctccaacatcttctcccgggaggaagtgactggctaccagaggaaggtgaggccaggagacctgcaggaagggaacgtatcccaccccaccgggagagttcagagatggctacctgcgcacgactgggtcctggggcagggcgggacatcacagacacaggctggccaacaagcatgtgcacaccttttatgtacagttgcgaatgtgtgtatctgtctacaccccagcagatggat

SEQ ID NO: 9875 - DNA, 549 bp, Homo sapiens
  MAP TO CHR11.3; EXPRESSED IN BONE MARROW, SIGNAL = 3.1; EXPRESSED IN LUNG, SIGNAL = 2.6; EXPRESSED IN HEART, SIGNAL = 3.4; EXPRESSED IN ADULT LIVER, SIGNAL = 4.1; EXPRESSED IN FETAL LIVER, SIGNAL = 3.3; EXPRESSED IN BRAIN, SIGNAL = 4.8; NT HIT: gi14767320, EVALUE 5.00e-72; SWISSPROT HIT: O42587, EVALUE 2.00e-21; EST_HUMAN HIT: T96723.1, EVALUE 7.00e-72
aggagacctggtggtgagtggggcctgagcccaggcagtgcttttctggtgactagctgagcccctgtacccgccccaggtcactgttggctctgaatcttggcagaacagctccgagagtctgggattctgtctacttgctgtttgattcttgtattgcccagtcctgtgtctttccctctgcagacacctgtcacccagtcagttgggtagcccttgagctgggccaaatctgaaggccctgtgctgtgtccttagggtgtgaacaaagactcctatctgatcctggagacgctgcccacagagtatgactcgcgggtgaaggccatggaggtagacgagaggcccacggagcaatacagtgacattgggggtttggacaagcagatccaggaggtgagggaggcacggcagctgccagcagccttgtcagccttttagtttctccacgccattgatgcagctcatctccctaatgtgtctttcatcctcatagcaacctagggaggaagggaggggtgccatgtgacaggtgaggagactgaagcc

SEQ ID NO: 9876 - DNA, 502 bp, Homo sapiens
  MAP TO CHR17.3; EXPRESSED IN LUNG, SIGNAL = 1.4; EXPRESSED IN PLACENTA, SIGNAL = 1.2; EXPRESSED IN BONE MARROW, SIGNAL = 1.5; EXPRESSED IN BRAIN, SIGNAL = 0.88; EXPRESSED IN FETAL LIVER, SIGNAL = 1.2; EXPRESSED IN ADULT LIVER, SIGNAL = 0.88; NT HIT: L78833.1, EVALUE 0.00e+00; SWISSPROT HIT: P38398, EVALUE 2.00e-85; EST_HUMAN HIT: BE043993.1, EVALUE 0.00e+00
cagctctgggaaagtatcgctgtcatgtcttttacttgtctgttcatttggcttgttactcttcttggctccagttgcaggttctttaccttccatgagttgtaggtttctgctgtgcctgactggcatttggttgtacttttttttctttatctcttcactgctagaacaactatcaatttgcaattcagtacaattaggtgggcttagatttctactgactactagttcaagcgcatgaatatgcctggtagaagacttcctcctcagcctattctttttaggtgcttttgaattgtggatatttaattcgagttccatattgcttatactgctgcttataggttcagctttcgttttgaaagcagattctttttcgagtgattctattgggttaggatttttctcattctgaatagaatcaccttttgttttattctcatgaccactattagtaatattcatcacttgaccattctgctccgtttggttagttccctga

SEQ ID NO: 9877 - DNA, 591 bp, Homo sapiens
  MAP TO CHR8.3; EXPRESSED IN BRAIN, SIGNAL = 1.8; EXPRESSED IN ADULT LIVER, SIGNAL = 1.2; EXPRESSED IN HEART, SIGNAL = 2.1; EXPRESSED IN BONE MARROW, SIGNAL = 1.6; EXPRESSED IN LUNG, SIGNAL = 2.5; EXPRESSED IN PLACENTA, SIGNAL = 1.5; NT HIT: AF154570.2, EVALUE 6.00e-81; SWISSPROT HIT: P21804, EVALUE 2.00e-22; EST_HUMAN HIT: BF094753.1, EVALUE 1.00e-76
ccattcttccagctctcctgcctctgtgtctccccaagcctggaaatgcatgctccccccgtgcccgtggcgagggcaggacatcgagaggagaagttacagtgtgtaccttccagaacggtcaaccatgcagagtgatgggagagtccgatagagttacccgccaagcacgtatactcccctgcgtcctcaaaggagacatttcttaagtgaagcacctccatctctttgtcggtggtattaactccagcagtctagaagagacaacggaagcaaaatggacaagcacaggacatgagacctctaagagacgcagagcaagggaaggagacagaaagaagggggactagaggaagaaatgctccctgacatcttctttgcaacaaggaacaaacgaaaaccaccaggcagcaaaacctgttagaggaagagggtgagaccctgagggaagaactccggcagacctgagaagacgatggctggttacgacccttcaccagatgctggcagccactggcccatccgagcatgcgggcggtgagcggcatggagaaatggggccggcgggcaggggctgtttggtttcaggta

SEQ ID NO: 9878 - DNA, 513 bp, Homo sapiens
  MAP TO CHR3.3; EXPRESSED IN ADULT LIVER, SIGNAL = 0.63; EXPRESSED IN BRAIN, SIGNAL = 0.63; EXPRESSED IN LUNG, SIGNAL = 1.1; EXPRESSED IN HEART, SIGNAL = 0.72; EXPRESSED IN BONE MARROW, SIGNAL = 0.9; SWISSPROT HIT: Q12860, EVALUE 9.00e-10; EST_HUMAN HIT: AI272244.1, EVALUE 6.00e-63; NT HIT: U35371.1, EVALUE 1.00e-53
aactagatcgagagccaccgtagtacgtaggacttatgtagcatgtaacttacgtccttccgacatgggtgccaaactgctccagagactcagagaagccagacacctgaggtcttgtcgaagatgtgttctgaaaacgtcggtgttcccatctctcaggcaggctcacatatttttaacaggccatggtttgcatcactaatgctttcatcagccagtgtaaaataaatccattagtcaccgtgtccttcatgtgataatgatatttagagctcattaaaaagtaattgcagccactttcccctactttatcagcaggattcagctggtgatttgatgatccgaaacatccaactgaagcatgctgggaaatatgtctgcatggtccaaacaagtgtggacaggctatctgctgctgcagacctgattgtaagaggtactggattttgttgttattgttgttcttgaaatattttcatgatatctactgtagcgcagagttccagaaacctc

SEQ ID NO: 9879 - DNA, 560 bp, Homo sapiens
  MAP TO CHR20.3; EXPRESSED IN ADULT LIVER, SIGNAL =  16; EXPRESSED IN BRAIN, SIGNAL = 0.7; EXPRESSED IN BONE MARROW, SIGNAL =   1; EXPRESSED IN LUNG, SIGNAL = 0.65; NT HIT: L12760.1, EVALUE 0.00e+00; SWISSPROT HIT: P35558, EVALUE 9.00e-38; EST_HUMAN HIT: BG401803.1, EVALUE 0.00e+00
caggtgacctcacattcgtgccccttagcagcactctgcagaaatgcctcctcagctgcaaaacggcctgaacctctcggccaaagttgtccagggaagcctggacagcctaccccaggcagtgagggagtttctcgagaataacgctgagctgtgtcagcctgatcacatccacatctgtgacggctctgaggaggagaatgggcggcttctgggccagatggaggaagagggcatcctcaggcggctgaagaagtatgacaactggtaagctcggcccccgctgcctgtcccagcaccctgcaggcagggctcccctgcgtctcctgggagttggtggagaaaggtgaatgaaggccttcgggtagtttcagactcttgagaagatgaatgcaatggtcagaaccatacagacttgaattttgtgacattagtgggccagcccaagctttaaatgaggtgtgtgcacaaaagctctgccaactagattcctgattaaaaaaaaggcagcccctctcctacagaccaggtcctagtggagtaaatgtccacctggccat

SEQ ID NO: 9880 - DNA, 544 bp, Homo sapiens
  MAP TO CHRX.3; EXPRESSED IN HEART, SIGNAL = 0.56; EXPRESSED IN BONE MARROW, SIGNAL = 0.71; EXPRESSED IN BRAIN, SIGNAL = 0.79; NT HIT: gi14760383, EVALUE 0.00e+00; SWISSPROT HIT: Q12816, EVALUE 8.00e-92; EST_HUMAN HIT: AL535923.1, EVALUE 0.00e+00
caatgctggttatggtggtgctgtcagcaccaacactgactttggtggtacactaagcaccagcgtctgttttggtggctctcccagcaccagtgctggctttggtggtgcactcaacaccaatgccagctttggctgtgccgtcagcaccagtgccagcttcagtggtgctgtcagcaccagtgcttgcttcagtggtgcaccaatcaccaaccctggctttggcggtgcatttagcaccagtgctggcttcggtggggcacttagtaccgctgctgacttcggtggtactcccagcaacagcattggctttggtgctgctcccagcaccagtgtcagctttggtggtgctcatggcaccagcctctgttttggtggagctcccagcaccagcctctgctttggcagtgcatctaatactaacctatgctttggtggccctcctagcaccagtgcctgctttagtggtgctaccagccctagtttttgtgatggacccagcaccagtaccggtttcagctttggcaatgggttaagcaccaat

SEQ ID NO: 9881 - DNA, 529 bp, Homo sapiens
  MAP TO CHR2.3; EXPRESSED IN ADULT LIVER, SIGNAL =   1; EXPRESSED IN BRAIN, SIGNAL =   1; EXPRESSED IN LUNG, SIGNAL = 0.56; EXPRESSED IN BONE MARROW, SIGNAL = 0.91; EXPRESSED IN PLACENTA, SIGNAL =   1; EST_HUMAN HIT: AA459837.1, EVALUE 3.00e-86; NT HIT: gi14738411, EVALUE 2.00e-86; SWISSPROT HIT: O95754, EVALUE 1.00e-31
cttattcccagagccacagccagttgagaacatgaaattgtaccacgtgagttgtagattttggagagtctattggggagacatctgagtccagagccagtttgtgaccctgaggtctgggagatccagtgtattccccttccccactccgtttttatagagctggctcctggttggctcccgtactgaggtgacacaagtgaatacaaccaactgtggccgtctccagagctgctcagagtgcatcctggcccaggacccagtctgtgcctggagcttccggctggatgagtgtgtggcccatgccggggagcaccgagggtgagtgtagctgcctggatttcttgcttactgtgccagggctctgtcccatccatatgtctacgtttctcatctgttaatgctgccctgccggaggctgttttctttttctgtctgttagtgtctacatcactcgtgtgtccttctgtcagtccatactagctcatctgtttgtccatctagtgctacctcatcaatgtccttgcct

SEQ ID NO: 9882 - DNA, 578 bp, Homo sapiens
  MAP TO CHR22.3; EXPRESSED IN ADULT LIVER, SIGNAL = 2.7; EXPRESSED IN BRAIN, SIGNAL =   3; EXPRESSED IN FETAL LIVER, SIGNAL = 2.8; EXPRESSED IN PLACENTA, SIGNAL = 2.7; EXPRESSED IN LUNG, SIGNAL = 2.3; EXPRESSED IN BONE MARROW, SIGNAL = 2.9; NT HIT: M77381.1, EVALUE 1.00e-110; SWISSPROT HIT: P10323, EVALUE 8.00e-33; EST_HUMAN HIT: BI831427.1, EVALUE 0.00e+00
ctctagtgactgcttccccggtcccttttctagcacctactctcacagtggggatgagcggtgacagccaccggctgcccctgccatgtgcccctgtggacacgtgggtttgctcatctcactgcaaggaaagccctgacaattcacaccctcctcacatcccaaatgaagcccctgacaccccctcaaactttactacaaccacttgtgtttacagcagcaggagaccatgtcactgtggaaattgtcctcccagagccttccgacccctctgggcaggggaagagtggctcaggcagatagtgacctctgtgtccttctggacagggagacagcggcgggcctctcatgtgcaaagacagcaaggaaagcgcctatgtggtcgtgggaatcacaagctggggggtaggctgtgcccgtgccaagcgccccggaatctacacggccacctggccctatctgaactggatcgcctccaagattggttctaacgctttgcgtatgattcaatcggccacccctccacctcccaccactcgaccgcccccgattcgaccccccttctcccaccctatctc

SEQ ID NO: 9883 - DNA, 577 bp, Homo sapiens
  MAP TO CHR19.3; EXPRESSED IN BONE MARROW, SIGNAL = 1.2; EXPRESSED IN PLACENTA, SIGNAL = 1.1; EXPRESSED IN HEART, SIGNAL = 1.5; EXPRESSED IN FETAL LIVER, SIGNAL = 0.74; EXPRESSED IN ADULT LIVER, SIGNAL = 1.3; NT HIT: AF055481.1, EVALUE 0.00e+00; SWISSPROT HIT: O43240, EVALUE 1.00e-25; EST_HUMAN HIT: BG679444.1, EVALUE 0.00e+00
tctccaagcccattttcatcccctcaccttccatgaactacaatcccaaccccagtctcactgtgccttcattctcatcccccagcccaacctcccataacctgaagtccacctccattcctaccttccagctcatacctaattccaaccccatcccatcctcgtctttatcccaacccaactccttccttccccaccactgccccagatcccaaagtgacagctctcacgttggcacatttatttgatctctccttcctgccacccccagagtgactctggaggccccctggtctgtgacgagaccctccaaggcatcctctcgtggggtgtttacccctgtggctctgcccagcatccagctgtctacacccagatctgcaaatacatgtcctggatcaataaagtcatacgctccaactgatccagatgctacgctccagctgatccagatgttatgctcctgctgatccagatgcccagaggctccatcgtccatcctcttcctccccagtcggctgaactctccccttgtctgcactgttcaaacctctgccgccctccacacctctaaaca

SEQ ID NO: 9884 - DNA, 503 bp, Homo sapiens
  MAP TO CHR2.3; EXPRESSED IN BONE MARROW, SIGNAL = 1.2; EXPRESSED IN HEART, SIGNAL = 1.2; EXPRESSED IN BRAIN, SIGNAL = 1.2; EST_HUMAN HIT: H99362.1, EVALUE 1.00e-109; NT HIT: AF156158.2, EVALUE 0.00e+00; SWISSPROT HIT: P41595, EVALUE 7.00e-60
cttttgagtgtttggcatggttacaatgccttaaaaaaacagatgagcagcttagctactaaccatgctgaccactgttcggaacgggattgaatcacagaaaaacagcaaatggctctctcttacagagtgtctgaacttcaaagcacaattcctgagcacattttgcagagcacctttgttcacgttatctcttctaactggtctggattacagacagaatcaataccagaggaaatgaaacagattgttgaggaacagggaaataaactgcactgggcagctcttctgatactcatggtgataatacccacaattggtggaaatacccttgttattctggctgtttcactggagaagaagctgcagtatgctactaattactttctaatgtccttggcggtggctgatttgctggttggattgtttgtgatgccaattgccctcttgacaataatgtttggtaagtatttcactttgtttgtgccatcaaaccacagaac

SEQ ID NO: 9885 - DNA, 504 bp, Homo sapiens
  MAP TO CHR17.3; EXPRESSED IN FETAL LIVER, SIGNAL = 0.93; EXPRESSED IN ADULT LIVER, SIGNAL =   1; EXPRESSED IN BRAIN, SIGNAL = 1.6; EXPRESSED IN BONE MARROW, SIGNAL = 1.4; EXPRESSED IN PLACENTA, SIGNAL = 1.7; SWISSPROT HIT: O15491, EVALUE 3.00e-38; EST_HUMAN HIT: AL551589.1, EVALUE 1.00e-117; NT HIT: gi15310758, EVALUE 1.00e-117
ttatcacgggttggaggaagaagacttggaaagcaggaatgtgggaagaagccagccaatttctatagcagaatgatcttccatctttgggaagccactgatattagagctctcgggtttcagtactcacagacactgtttgggcttcatttatctgcttttgtgtcatgagcgaggtttagatgaactggacgtggcagatttccctcctataggaagaagaggtaatggatctgaatctgactggagcttcttgttcaccaacaggtctatgatattgcatttagccgggccgggggtggcagggacatgtttgcctctgtgggtgctgatggctcggtgcggatgtttgacctccgccatctagaacacagcaccatcatttacgaagacccacagcatcacccactgcttcgcctctgctggaacaagcaggaccctaactacctggccaccatggccatggatggaatggaggtgagcactcctctcaggctaccatgg

SEQ ID NO: 9886 - DNA, 510 bp, Homo sapiens
  MAP TO CHR6.3; EXPRESSED IN BRAIN, SIGNAL = 0.36; EXPRESSED IN BONE MARROW, SIGNAL = 0.68; NT HIT: M60747.1, EVALUE 0.00e+00; SWISSPROT HIT: P16402, EVALUE 5.00e-30; EST_HUMAN HIT: BG943891.1, EVALUE 0.00e+00
tcttggccactttcttggtcccagcagcggttgctggcttctttaccttcttaggagtctttttgatgcttttcttcggggtagcggcgccagccaccttcttgggcttcttggctgccccagcaggcttcctaggcttggctgcgccagcctttttggccttgggtttgccttccccggaagccgctttcttgttgagtttgaaggagccagaagcaccggtacctttggtctgcaccagagtacctttgctcaccaagctcttgaggccaagcttgatacggctgttgtttttttctacatcgtagccagcagccgcaagcgctttcttaagcgcggccagagaaacgccgctgcgctccttagaagctgccactgccttggtgataagctcagatactgggggtccggatgctttgcgtttcccagcagttgcgcctgccttcttcgcctttttcttcacaggtgttttttctgcgggtgcaggaatggtaggagcaagtggagcag

SEQ ID NO: 9887 - DNA, 584 bp, Homo sapiens
  MAP TO CHR11.3; EXPRESSED IN BONE MARROW, SIGNAL = 1.2; EXPRESSED IN BRAIN, SIGNAL = 1.5; SWISSPROT HIT: Q16816, EVALUE 1.00e-34; EST_HUMAN HIT: AA180758.1, EVALUE 6.00e-51; NT HIT: gi5453881, EVALUE 3.00e-55
tactgctggaagaaggggtgtgccaaggcctcttccgctgtgcagcagtctggggttgcaccatcaggaatcgggagacctgggaggggaggagaggggacccgagaacgttaaggcaggtcccctccagcatgtcaggagaggtggggcctccttgggcaagggagcctggcatcgcggccctgagcccaggagccagtcggcctcgcctctcaccaggtccttcacggtgtccaagtaatcgtcccactcgggcgatccaaactggtagttgctgcttatgatcatcctcagcaccagcatctgcttccggtggcagaaaggtggggagccagccagtagcgtgtacatgatgacgccagtgctccaactggacgtgagagggcccaaggccacttacccattgccaggggcacagaccccgccctgcctgcttcctccctcacccagcccaggcaggtgatcctcctcccccggcgcactcacatgtccacctccttcccgtagcccggatggtcctcattcatgcagctctcgatgatctcaggggccaggtaactgggggtcccgtagacttctgcagg

SEQ ID NO: 9888 - DNA, 551 bp, Homo sapiens
  MAP TO CHR16.3; EXPRESSED IN BRAIN, SIGNAL = 0.79; EXPRESSED IN BONE MARROW, SIGNAL = 0.76; EXPRESSED IN HEART, SIGNAL = 0.96; EXPRESSED IN PLACENTA, SIGNAL = 0.75; EXPRESSED IN ADULT LIVER, SIGNAL =   1; EST_HUMAN HIT: AA449387.1, EVALUE 1.00e-127; NT HIT: D29011.1, EVALUE 7.00e-99; SWISSPROT HIT: P34065, EVALUE 2.00e-26
ctctcctatcccagccacagatcatgttgcctatggacagccccatgcctttgtactgatacaatatgttgtcaggcagcttggaggcagctgttacagggatgcattccttatttcaaagctcatacatttgactttgccgagccaacagccattctcagaagctacagttccctgtgcccctagccatgatggcttcgggtaggggttgatctctgtcaccttctttaccatctggaggcaatgtaagcacccactgcagccctatagtctgctgcaactatgactccatgccagaacttgaagaccagggtggtgattccaggaagcattttgattccctgctcctctgagactccccagctgggcatggccagcctcagcccatcagtgggactccctggacccagatccagcagatctgcataaactgtgagtccagaaaacctgcactggttcatagcagcctctccaaatagctgaccagttccatgtctagtgtgggcaaaagaaggaataacattttaaattgcatgactgcaaaagggttt

SEQ ID NO: 9889 - DNA, 584 bp, Homo sapiens
  MAP TO CHR17.3; EXPRESSED IN BONE MARROW, SIGNAL = 0.83; EXPRESSED IN BRAIN, SIGNAL = 0.97; EXPRESSED IN ADULT LIVER, SIGNAL = 0.95; EXPRESSED IN LUNG, SIGNAL = 1.5; EXPRESSED IN HELA, SIGNAL = 2.1; EXPRESSED IN PLACENTA, SIGNAL = 1.4; SWISSPROT HIT: P17140, EVALUE 2.50e-02; EST_HUMAN HIT: BF668353.1, EVALUE 4.00e-61; NT HIT: gi16164369, EVALUE 3.00e-61
tctaatgcccataacccagcctcagacccatggagcccacgagagactgcccgctgttcgggggcgccttttccgccatcctccccatgggggccattgacgtaaggtgagaaggccggggcgcccaggggcggctgactgggtgggttgtgggaagagaccggggtcaaccagggtctgcctcgcctcactccagcgacctccgaccggtcccggacaatcaagaagttttctgccatcccgtgacggaccagagcctgatagtggaacttctcgagctgcaggcccacgtacggggcgaagcggctgcgcggtgagggaatggcccccggctggccaatggcaggggcggggtcggaccagtgggcgggcccgcggccgacggttaatccgggcggtgagaccacgcacgggccgggagccaggcctgcaacttaaagatgctcccggggaggcgaccagagatgtcccttcctgaccccgcttccctactccaggtaccactttgaggatgttggtggcgtgcagggggctagggctgtccatgtggagtctgttcagcctctcagtttggagaacctggc

SEQ ID NO: 9890 - DNA, 505 bp, Homo sapiens
  MAP TO CHRX.3; EXPRESSED IN BONE MARROW, SIGNAL = 1.8; EXPRESSED IN LUNG, SIGNAL =   1; EXPRESSED IN HEART, SIGNAL = 1.6; EXPRESSED IN FETAL LIVER, SIGNAL = 0.66; EXPRESSED IN ADULT LIVER, SIGNAL = 1.6; EXPRESSED IN BRAIN, SIGNAL = 1.4; SWISSPROT HIT: P10908, EVALUE 9.00e-05; EST_HUMAN HIT: AW628668.1, EVALUE 5.00e-79; NT HIT: AB048363.1, EVALUE 1.00e-81
tctgagtgtccctgcagatggctgcctctttgcagaggctgtcctcacctctaggaaccaggatccagcattgagtctcttcagttcagtccaggagaagtcactgctgtgggctgtgattcgggttgggaatacagaggctacattcgtggtcctgctgaggtgctcatcatgcatgaggaaggggaccccatcggagctgagggcacaaggggtgtcagagggccaagctctggggctggtcatcatgtccttcagccccccagatcccctaagccccagcttccctcacctgaccatcacatcagtctcaaacacagtagctccgcattcagctgtcttccgcaaggacatcagggtgttctcgggagccagctgggaaagggaataggtgatgaggtagcagggaagggtgggagactgggaacccacaggcctggtcgctatggtgcaaacgagcagaccctccccaccctcccagcattctgtccaacactcaccatgg

SEQ ID NO: 9891 - DNA, 552 bp, Homo sapiens
  MAP TO CHR12.3; EXPRESSED IN BONE MARROW, SIGNAL = 3.3; EXPRESSED IN PLACENTA, SIGNAL = 4.2; EXPRESSED IN BRAIN, SIGNAL =   4; SWISSPROT HIT: P17886, EVALUE 3.50e-01; NT HIT: gi14764483, EVALUE 2.00e-99; EST_HUMAN HIT: BI063548.1, EVALUE 0.00e+00
acccgttcagagacaaccacaggtactcacccgagcagcttccacaatcgcactttcaaactctcggtaagcctcccagagggcgagtcctttggtcatatgtaaaccaacagacgagagagccctttcaaacacggagcgaactttctcaaggccacctttctgaccaatcccaccaactgagtactggccatactctagccaaatgttaggacctaaaaataagaagtgttcaattagtttgggatataaaatacccaaatatcaaaactgatgcataacaaacgaaatgtgcctaccaaaaaagtactcagacagcagcactaaatgacagtgaaggcctaacagcagagatgaccataaaggactaaaaaacattacagtctggggaagaccatagatcctcagaaaaagataaatggtgctattaacaatgcctgtgagagagtaagaagggggtaacaggatcatcagaaatcatgggaacaccatgcactgctaaaattatcagtggctctaaaagaagactcatgggccacagagcagagatac

SEQ ID NO: 9892 - DNA, 512 bp, Homo sapiens
  MAP TO CHR9.3; EXPRESSED IN BONE MARROW, SIGNAL = 0.86; EXPRESSED IN HEART, SIGNAL = 0.63; EXPRESSED IN BRAIN, SIGNAL = 1.2; EST_HUMAN HIT: BG700995.1, EVALUE 3.00e-83; SWISSPROT HIT: P49813, EVALUE 2.00e-21; NT HIT: AF288148.1, EVALUE 0.00e+00
agttgggtttgggtgttttggccaggcagggatgaggacaaggaggcccagtcacatttggcccaacacagggcctggcagggcctggcatacagtcggcactcaatggtgcatggggagtggcatattataacagtaacattgttcagtacctcgtttttcccctgtgtaggggaccagatcttctcggtccttaaactcctttgcttgcttttccaagtgatccaagagctcctctcttttaaaggggcccgtgggcgccttggtggtctgatccttctgcctcaggcctgcaggcagcagtgcattctacattggaggttgtgggggggcaggagagagagaaagagagagagagaaagagagagtggtcagctgctgaagacttgcacttctccagaaactcatcatcgaacagaagggacctcagagctcatggaatccatggtgttcctcgttttacaagtaaggaatctgaaaccccaggacagggagggacttgtccaaggtca

SEQ ID NO: 9893 - DNA, 529 bp, Homo sapiens
  MAP TO CHR1.3; EXPRESSED IN HEART, SIGNAL = 0.97; EXPRESSED IN BONE MARROW, SIGNAL = 1.1; EXPRESSED IN ADULT LIVER, SIGNAL = 0.83; EXPRESSED IN BRAIN, SIGNAL = 1.5; SWISSPROT HIT: Q13105, EVALUE 6.00e-62; NT HIT: gi4507996, EVALUE 0.00e+00; EST_HUMAN HIT: AA984317.1, EVALUE 0.00e+00
acaagctgatgagctcctggaggccggggctgtgctccccgcccgccccaccacgtggcatgcatgcggctgcggccaccggcggctgccaggcgctggttccgggaggggtccgcacacctggttgaacttcttgtcgcagtgtgggcacttgtgctccttgtccgtgtcgtgggtctccaggtggcgcatcttggaagtggggtcggagaaggagcggccgcagtagtcgcactggtagggcttctcgccgctgtgcaccagctggtggcgcttgaggttgcccgaggtggtgaagagcttgccgcagtcctcgcagcggtagcgcgcctcgcccgagtgccgcttcttgtgcaggttcagcaggctgatgaggcggtagctcttcccgcactcctcgcagccgtagggcttcagagggctgcagggccagaaggcgacaggaggcagggctcgctggggcgtgaaaggccgggcctggcaggggccggggtaggaggccggcttggggcagtacctgtgcgtcttc

SEQ ID NO: 9894 - DNA, 557 bp, Homo sapiens
  MAP TO CHR1.3; EXPRESSED IN HELA, SIGNAL = 2.1; EXPRESSED IN PLACENTA, SIGNAL = 3.5; EXPRESSED IN BONE MARROW, SIGNAL = 1.4; EXPRESSED IN BRAIN, SIGNAL = 3.2; SWISSPROT HIT: Q15418, EVALUE 2.00e-20; NT HIT: gi4506732, EVALUE 2.00e-68; EST_HUMAN HIT: BE797713.1, EVALUE 3.00e-68
agtgtcagggtgacagggtccagggtcctttctggccatggagcaggccaggaggtctcggccacacacctttcatacatctgcagagctcaggcaccatccctccccaccagacggggacctgcccccaacccagcagccttggccgagacgtggtcaggaggcccaccttgacagcatactccatgttggtggccttgtggacacagcgcttgcactcagagtaggagcccacaccaattgtctcctttaccacgtagccgtcactaaaaaccaggttcttcccatggagttgctgtaggagaccaaaaattgtggctgacccctggctctagagtgctaggggtcatcccccaggacctaaggtcttggctcagtagagacagcaccagggaagggccaggagacttggggtagagtgttggccatgtgaccgcaggtgacagcctgcccctctctgggcctcagttttctactctatataatgggcatactcactgctcccagcctgcctggactgcagcctgtggtcagagggcagtgtagggagtgggaaa

SEQ ID NO: 9895 - DNA, 508 bp, Homo sapiens
  MAP TO CHR11.3; EXPRESSED IN LUNG, SIGNAL = 2.1; EXPRESSED IN HEART, SIGNAL = 2.8; EXPRESSED IN PLACENTA, SIGNAL = 1.6; EXPRESSED IN BONE MARROW, SIGNAL = 0.86; EXPRESSED IN FETAL LIVER, SIGNAL = 1.4; EST_HUMAN HIT: AA381899.1, EVALUE 6.00e-66; SWISSPROT HIT: P04234, EVALUE 2.00e-18; NT HIT: X03934.1, EVALUE 0.00e+00
tgtgtgtcggcagctagaagaaccagagagagacatcaatggcctagcagatgggactgtgagatccaccctcccacaccctcagaagtctgcatgagtgatatgaacacacaagttctttcaacagtcaaagttctaggagtctttaggagattgcaagagtaactcccagctgagactaaacctaccaccagccccattccttagctggtgcataagctcactggtacacacacacacacacacacacacacacacacaaacacactctcatgctctgctcttccactaacccccagacagccttccagtctcatgtccagcaaagcagaagactcccaaagcaaggagcagagtggcaatgacatcagtgacaatgatgccagccacggtggctggatccagctccacacagctctggcacactgtgggggaagggaggagagaggagaggttgagagcctttaagatcagggaaccatcctctgcctcctagggcaacccttag

SEQ ID NO: 9896 - DNA, 548 bp, Homo sapiens
  MAP TO CHR11.3; EXPRESSED IN ADULT LIVER, SIGNAL = 0.92; EXPRESSED IN BRAIN, SIGNAL = 0.87; EXPRESSED IN LUNG, SIGNAL = 0.48; EXPRESSED IN HEART, SIGNAL = 1.3; EXPRESSED IN BONE MARROW, SIGNAL = 0.92; SWISSPROT HIT: P07864, EVALUE 1.00e-25; NT HIT: M24511.1, EVALUE 1.00e-105; EST_HUMAN HIT: BG724108.1, EVALUE 6.00e-94
ttcatctccaaaatgccagacataaaggtacatggatactttaatataatactaagaacatacaatagagttttaaggagttaaggcacagtggttatggtaatgttgatccaaatatagtattttgtttcctttttagattacagtgtatctgcaaactccagaatagttattgtcacagcaggtgcaaggcagcaggagggagaaactcgccttgccctggtccaacgtaatgtggctataatgaaatcaatcattcctgccatagtccattatagtcctgattgtaaaattcttgttgtttcaaatccaggtgagtcttctctcttccattctattgcataaggatgatctttccataccattcctttaaaagaatcaacttcattgagttaacatttatatacaataaattgcactcgtttaaagtatataacgcgatgagttttgataaatgtaatcactcatgaaactaccgccatgatcaagataacaaaacatttcagctacctctgaaagttttcttgtgcctccttgcagttcatctc

SEQ ID NO: 9897 - DNA, 571 bp, Homo sapiens
  MAP TO CHR11.3; EXPRESSED IN BONE MARROW, SIGNAL = 1.1; EXPRESSED IN PLACENTA, SIGNAL = 0.73; EXPRESSED IN BRAIN, SIGNAL = 1.2; SWISSPROT HIT: Q15620, EVALUE 6.00e-18; NT HIT: gi7305340, EVALUE 2.00e-31; EST_HUMAN HIT: AV700542.1, EVALUE 5.10e-02
agggagaggacagggagaaggtcacagaagaagtgattgatgatgtttggaccacagtagagtaggcgaaaggtgaaagtcatatgggtcatggtgcttataaggcccacagcataaggcccaccaccagctgcacacagacctgttgggacataatgagtgtatacaacaaaggcttatagatagcctataccggtcatatgccatggcagccagaaggaaacattcagttactacaaaatggccaaaaaaccataactgggcaacacaaccaaagagattacttttttctccatgaagatatcagtcaacatcttgggaccgatggcagaagaggagcagacatccacaaaggacaagtggcagagagaaaagtacttgggggtctggagtcgagaatccatccaaataagagtgatcattcccaagtttcccggaacagtgacaagataaacaaagagaaataccagaaagagagcaatcttgtgctgaaagagatttgttaatcccacagaaaaaaattcagtaaccaaagtttgatttctatagtccatttctctgattcaacctg

SEQ ID NO: 9898 - DNA, 555 bp, Homo sapiens
  MAP TO CHR19.3; EXPRESSED IN BONE MARROW, SIGNAL = 0.99; EXPRESSED IN HEART, SIGNAL = 1.7; EXPRESSED IN LUNG, SIGNAL = 1.1; EXPRESSED IN BRAIN, SIGNAL = 1.3; SWISSPROT HIT: P72001, EVALUE 4.00e+00; NT HIT: gi14759458, EVALUE 0.00e+00; EST_HUMAN HIT: AW001108.1, EVALUE 0.00e+00
gaggacacagctccgagaacgggatgtccgcatccgacacctggaggtgggtgtcctcgtccctttacgctgcctccaacgtatctaggcccctgacacttgcctccttgacagatggactttgagaaaagccgaagtcagcgggagcaggaagaaaagctgctcatcagtgcctggtataatatggtaagtgtggggtctgggctctaagatctcatgggtagaatattggtgggggggtcctgtgagctcacctgaccccaaccacacctcctcctgaagggcatggccttgcagcagcgagctggggaggagcgggcgcctgcccatgcccagtcattcctggcacagcagcggctggcaaccaattctcgccgtggacccttgggacgcctggcatctctgaaccttcgccccactgacaagcactgacagacctcacaatcaagccagcctgggctccacccaccctggcttcctccagctcacatggcgcccagcactgggcttcagccaggtgctcgagagctttgaggccatgatctctgctcttcc

SEQ ID NO: 9899 - DNA, 557 bp, Homo sapiens
  MAP TO CHR2.3; EXPRESSED IN BONE MARROW, SIGNAL = 1.1; EXPRESSED IN BRAIN, SIGNAL = 0.59; SWISSPROT HIT: Q06710, EVALUE 1.00e-29; NT HIT: gi7524364, EVALUE 1.00e-94; EST_HUMAN HIT: BI004162.1, EVALUE 0.00e+00
tcaaaggttttgggtgaaggaagccaggagggttagaaagggaggaagatgccagggcatctggtaaaataaagcatgtgtcaggcttggagttgcataaggcaggtgccctgagcccattgatgcaacttccagctgctttgatggagcacaggctcatttggagaatagaccttctctggcccttgcccaccctgttcacctcccagggcccagcttctcacctgctcgcctttggtgtggctgggggaggcataggcctctgggtagtgctgccgctcaaatgggcactcgagcggctcgaggtggtgctggctgaaggcatccgtgcgaaggtgctttcggggtccgctgctgctgctctgtgagtcaatgcttagtcggcagctatcctgatcacctggtaccccccgggaaggaagaaagcttttaggggacctatctattcatgctctaggccaaagtagaggactgactccaagctgactcactgtggagggagaaaaagggccagccacgtgggcccaggagccttggccaactgagggacaggacat

SEQ ID NO: 9900 - DNA, 598 bp, Homo sapiens
  MAP TO CHR19.3; EXPRESSED IN BONE MARROW, SIGNAL = 2.9; EXPRESSED IN LUNG, SIGNAL = 5.2; EXPRESSED IN HELA, SIGNAL = 5.9; EXPRESSED IN HEART, SIGNAL =   4; EXPRESSED IN ADULT LIVER, SIGNAL = 5.7; EXPRESSED IN FETAL LIVER, SIGNAL = 4.6; SWISSPROT HIT: P34804, EVALUE 8.00e-04; NT HIT: AF112202.1, EVALUE 1.00e-116; EST_HUMAN HIT: BI825008.1, EVALUE 0.00e+00
tagtcacactgcatcctggccagggtgatggtggggtaggggacctggccctttggtgacaaggtagtctagcagagccaatccttgggggcggggcctgggcggtgagaagagggccctgggcggtgagaggagggaccgggcggtgaagggcggggcctgagcggcgagaggaggggtccagccggtcggggctagtgcgggtgcggggcccgggaggcactcacacacagtacaggatgaggcccaggaacacgaacacatagttgctctggtagtactccacgttgcgtacgaggcgctggcacagctctcccaggttgcggggccgtgagaagcgctgctggtccacgaaggtgctccagggccggatggtcgcgcggcgccgctccagccactcccggcctgcaccggagggaatcagcttcggcagcagggtcctgcggggggtggggccgggtcagtggtggaccgggatggagccccagacccccgcaaaagaaggggactaagggtgcctggactccctcccgggaccccagattcctgtacagcaggcagggaggggactaggggcccagactccagggtcccatta

SEQ ID NO: 9901 - DNA, 600 bp, Homo sapiens
  MAP TO CHR6.3; EXPRESSED IN ADULT LIVER, SIGNAL = 1.2; EXPRESSED IN FETAL LIVER, SIGNAL = 0.54; EXPRESSED IN LUNG, SIGNAL = 0.67; EXPRESSED IN HEART, SIGNAL = 1.6; EXPRESSED IN BONE MARROW, SIGNAL = 0.92; SWISSPROT HIT: O95816, EVALUE 3.00e-70; NT HIT: gi14783246, EVALUE 0.00e+00; EST_HUMAN HIT: BI758084.1, EVALUE 0.00e+00
tgcagattgtcaggaagtggtattctacaacctctttctgtaatctaatacatttcatcagttaatcttacatgctatagtttcagcttttatctctaaaaaaatttcatggcagaggtaaagaaaataataaatttagtcacaaacaaatgccttaatgtttttgacacagataagtttacatctcatattgatttttaggagaaagagaagaattaaatctgactgcaaaccgtttgatgggaagaactctcaccgttgaagtgtcagtagaaacaattagaaacccccagcagcaagaatccctaaagcatgccacaaggattattgatgaggtggtcaataagtttctggatgatttgggaaatgccaagagtcatttaatgtcgctctacagtgcatgttcatctgaggtgccacatgggccagttgatcagaagtttcaatccatagtaattggctgtgctcttgaagatcagaagaaaattaagagaagattagagactctgcttagaaatattgaaaactctgacaaggccatcaagctattagagcattctaaaggagctggttccaaaactctgcaacaaaatgctgaaa

SEQ ID NO: 9902 - DNA, 526 bp, Homo sapiens
  MAP TO CHRX.3; EXPRESSED IN LUNG, SIGNAL =   2; EXPRESSED IN HEART, SIGNAL = 1.7; EXPRESSED IN BONE MARROW, SIGNAL = 1.4; EXPRESSED IN ADULT LIVER, SIGNAL = 1.8; EXPRESSED IN BRAIN, SIGNAL = 1.8; NT HIT: AJ271718.1, EVALUE 0.00e+00; SWISSPROT HIT: Q9Y6K9, EVALUE 2.00e-31; EST_HUMAN HIT: BI908202.1, EVALUE 1.00e-112
aaggatgtgggtctcctgtgactcccctgctgcctttctctttcagcccttgccctgttggatgaataggcacctctggaagagccaactgtgtgagatggtgcagcccagtggtggcccggcagcagatcaggacgtactgggcgaagagtctcctctggggaagccagccatgctgcacctgccttcagaacagggcgctcctgagaccctccagcgctgcctggaggagaatcaagagctccgaggtgaggaaagagtcaggggatccagccctgctgaggggaaggcgtcttctccccacctgcacctctgcgtttcctgggcctggggtggggatgtgctgccctccctcttggtttcaggaagtagactctgagatgcagattagcggggaggaagtttagcatgctctcaggaccagtactgggaagggaaaggagggacaggggaagaagccagggagggcagagggagaagcacgctgccgggtaggctccaggacagccttgctggatcttacagg

SEQ ID NO: 9903 - DNA, 567 bp, Homo sapiens
  MAP TO CHR16.3; EXPRESSED IN BONE MARROW, SIGNAL = 1.6; EXPRESSED IN LUNG, SIGNAL = 1.5; EXPRESSED IN BRAIN, SIGNAL = 2.4; EXPRESSED IN FETAL LIVER, SIGNAL = 1.9; SWISSPROT HIT: Q9UQ90, EVALUE 2.00e-27; NT HIT: AF080524.1, EVALUE 0.00e+00; EST_HUMAN HIT: BI758176.1, EVALUE 1.00e-89
tgcagtgagctccagtatgcccccgggttctagatttccaaataaaagagcatttcggaaagttttaagactctcttaaggaacagtggtgaggtgccaacgtcctcactgtccagcttcacggtgggtcctcgggaggaaggggatggaggtggtgctgcctcagtgctctgaccgggacacctggggcccagcactgctctgcgcctgcagtgctgaggatgcctctgtctcgaccccgccctccaggggcacaggacgacctgaggaaggtcacccgcatcgcctactccatggtgaagcagtttgggatggcacctggcatcgggcccatctccttccctgaggcgcaggagggcctcatgggcatcgggcggcgccccttcagccaaggcctgcagcagatgatggaccatgtgagtcggctctggccacaccgctgccctctgtgctccccggggagggagtccctgggtctaccacacaagggtcgcccacggccgccccagcggagctcagctgcaggccccacctgggtttcttccttctgggctctgctgtagttcc

SEQ ID NO: 9904 - DNA, 559 bp, Homo sapiens
  MAP TO CHR12.3; EXPRESSED IN BONE MARROW, SIGNAL = 1.9; EXPRESSED IN HEART, SIGNAL =   2; EXPRESSED IN BRAIN, SIGNAL = 3.6; EST_HUMAN HIT: BE176589.1, EVALUE 2.00e-97; SWISSPROT HIT: Q14839, EVALUE 4.00e-34; NT HIT: gi4557452, EVALUE 1.00e-97
tcttctcatgggttccaaggggccacaatggccagacactcacgcagtgtgggcagctccacttgccctcgggagccttctccatgtcgggatccaggcagaccatgtggtaagcacggggacaggtatcacacaggatgatctcaccgccttgctggcacacctcgcaatagtcctggtggtctgtctcataaccatccacagcagtcacctcctcctcgcctgggcaaggaagagggaaagcccagttattggaaaaaaactacctccccccaccccccgacccctatctccttagggagattcttccccaatcactcccacctcatcccatcacaaatatacagaagagaaacacacctttctttttctttttagtggttcggagtttcttgcggctgcggctactacggctggtggaaccatcagaaacagaatagctattgatactggcatcatcgaagtcagattccacatctaagtcatcatcctcactctggcaggatgaaaaagaataaggttagacgttcaagccaaggggaaggacagagtggcagag

SEQ ID NO: 9905 - DNA, 535 bp, Homo sapiens
  MAP TO CHR2.3; EXPRESSED IN BRAIN, SIGNAL = 1.2; EXPRESSED IN BONE MARROW, SIGNAL = 1.1; EXPRESSED IN HEART, SIGNAL = 1.2; EST_HUMAN HIT: BI253097.1, EVALUE 0.00e+00; SWISSPROT HIT: P04070, EVALUE 1.00e-99; NT HIT: M11228.1, EVALUE 0.00e+00
aaacgccgtagttgtgaaggagcccacagccctcaccccagctcaccaggcccaccaggaaccaggtgccgtggaaggaggcgaccatgggccccccactgtcgccctcgcaggcatcctgccggtccccgaggatgcccgcacacagcatgttctcagacaccatgttgctcatgacctcgctgcactcattgtgcgggaccacgggaatcttgatgaagttgaggacgaaggtgcggtttctcttggcctccttctctcggctgctgtggtagccccagcccgtcacgagggtctcctggccggcctgattgagctcgcgctctgcaaggccgctgtccgggaggcagatgggcactatggtctgcgagagggtggcgggctgggccaggtgcagcagtgcgatgtcattgtcggtggtgctcttgctgtagttggggtggacgaagacctccttgatgtccaggtccagctcccacttctcccagcgccgcaggtcatactctcctgcagggcagagggcacagtcagagtg

SEQ ID NO: 9906 - DNA, 572 bp, Homo sapiens
  MAP TO CHRX.3; EXPRESSED IN LUNG, SIGNAL = 0.83; EXPRESSED IN PLACENTA, SIGNAL = 1.1; EXPRESSED IN HEART, SIGNAL = 1.4; EXPRESSED IN FETAL LIVER, SIGNAL = 1.4; EXPRESSED IN ADULT LIVER, SIGNAL = 1.3; EXPRESSED IN BRAIN, SIGNAL = 1.2; EXPRESSED IN BONE MARROW, SIGNAL = 1.3; SWISSPROT HIT: P51841, EVALUE 4.00e-55; NT HIT: gi13648689, EVALUE 0.00e+00; EST_HUMAN HIT: AW958817.1, EVALUE 1.30e-02
gagcatacctcagcctcagctcaggacaacatcttgcttatcttggaggcataagaaaccacttacaaattggttagaacacatttatttttcctctctgtagtttttggtactgtgctttactaacagtttgcttccataacctccttgctttgttggtttcagtaatcatcatgtgtatgcattcagctttgattgggggagagactcagatgcatctcttggaatgtgctcatgatctgaaaatgactgatggaacctacgtctttgttccttatgatgccctgctctacagtttaccttataagcacaccccctaccgggtcctaaggaacaacccaaagctccgggaagcctatgatgcagtgttgaccattacagtggagtcccaagaaaagaccttctatcaagccttcacagaggcagcagcaagaggtgaaattcctgagaagctggagttcgatcaagtaagtacacattcataggttgtcatgagctgagaacctaaaacatcagcatggtaaattattttcagaccaacagtctcaattccataggaggcccagtcaatg

SEQ ID NO: 9907 - DNA, 507 bp, Homo sapiens
  MAP TO CHR10.3; EXPRESSED IN FETAL LIVER, SIGNAL = 1.1; EXPRESSED IN BRAIN, SIGNAL = 1.1; EXPRESSED IN BONE MARROW, SIGNAL = 1.7; EXPRESSED IN LUNG, SIGNAL =   2; SWISSPROT HIT: P09917, EVALUE 3.00e-36; NT HIT: gi4502056, EVALUE 1.00e-112; EST_HUMAN HIT: BG759157.1, EVALUE 1.00e-112
tctcagatgccctcccatagcaggtggggcggtagctggctgtaccttgaaaatggggtgcacagcaggcagctggcggtacattgcaatgccaaaaacctcagacaccagatgtgttcgcagaaggtgggtgatggtctggtggacgtggaagtcactggaacgcacccagattttggccaaaagccagtcgtattttgcatccgaagggaggaaaatagggttctcatctcccgggatttggttgagctgatacattgggggaaaggaaacacactgctatatttcacttcagagtatagttgttggagaacttcgcctcttgggaagttccagaagtatctgaatttctttaacagtgactttggaatcagaagagcctggagggggtaaagggccctgcggtggtatttcctgtcccagccatattacttacaacctgcatgactctggatgacacactgggctttctaagctccggcttcagcatctgtcatgtggggacag

SEQ ID NO: 9908 - DNA, 573 bp, Homo sapiens
  MAP TO CHR13.3; EXPRESSED IN BONE MARROW, SIGNAL = 0.82; EXPRESSED IN HEART, SIGNAL = 0.98; EXPRESSED IN ADULT LIVER, SIGNAL = 0.7; EXPRESSED IN FETAL LIVER, SIGNAL = 1.9; EXPRESSED IN BRAIN, SIGNAL = 0.82; SWISSPROT HIT: P02462, EVALUE 5.00e-07; NT HIT: M26566.1, EVALUE 0.00e+00; EST_HUMAN HIT: AL570336.1, EVALUE 1.00e-101
gggccaaacacaatttcaagctgtaataaatgctgcagacttctaaataaaaaagcccaattgagaatttaactatttcttttacgctatttccttttgtgaattctgtcccagtcctcagccctggcccctggcgagatgcccttacctggcaggccaggctggccctgaggtccgcggtctcctttgggcccctccgtggcatggcctggggatcccggtaaccccggctgtccctggggccccggaggacccatgaatccttgctctcctttggatccaggaattcctgggctcccggctaatcctgggaaacccacctcaccctttgaacctgaacaagaaaaacagtttgaggtgatgggaaacgcagcagcagaacagtaatctccagcgtggacggcagagatgggatgaggcgtgcctcatcctgtaggtaccgctcagagggagcttccagggacaccacaggaaactgcagcaagggctccgatccctccttctctttaataacacactagaatccgaccatggcctggctggaaaaagagctcagaatgctaggaacccagc

SEQ ID NO: 9909 - DNA, 514 bp, Homo sapiens
  MAP TO CHR16.3; EXPRESSED IN HEART, SIGNAL = 1.9; EXPRESSED IN PLACENTA, SIGNAL = 1.4; EXPRESSED IN BONE MARROW, SIGNAL = 1.9; EXPRESSED IN BRAIN, SIGNAL = 2.2; NT HIT: AF077344.1, EVALUE 0.00e+00; SWISSPROT HIT: Q9H334, EVALUE 5.50e-01; EST_HUMAN HIT: BF327841.1, EVALUE 3.00e-34
atagggatgatggcatggtgccatcaccgaagatagtctcctggaggagtttgaaaattaacattgtccagcacctccccacactgtctaagcctagaattttgcttgattgagaagccccattacctctcactcgacgtttgctgtgcttcctggcttttaatctggatgtgtggctggtggtctggtccaggagtaaggtgatcaccaggatgcaaattacaagtccattctttgccatggctctggggcaagcctgctgagccatgttgccagcccccttagagcagctatggaaggagactacacagctacatcttgctctgggatgcctggggctggcttataaaagtgagcttcggaggttggctggaatcctgctgacggaatgtttgaatgcctctgctggccacagcataaggtggcctcttgttcttgtgcctcatgttaggctttctatttatttaatttctgctgcatttcctagtgatttgcctttttggagtgtgtcaaa

SEQ ID NO: 9910 - DNA, 560 bp, Homo sapiens
  MAP TO CHR6.3; EXPRESSED IN HEART, SIGNAL = 1.2; EXPRESSED IN PLACENTA, SIGNAL = 1.3; EXPRESSED IN BONE MARROW, SIGNAL = 1.2; EXPRESSED IN ADULT LIVER, SIGNAL = 1.5; EST_HUMAN HIT: BG698254.1, EVALUE 2.00e-63; NT HIT: AJ009870.1, EVALUE 0.00e+00; SWISSPROT HIT: P56589, EVALUE 1.00e-16
gctgccattgaaggctagagttcttccacactcagccttcttctcttacttgaaaatagctccattgacaactaagagttctgaagctacaattctttgtgcttcccagacttttccttgttttcctttctaagctaatagtatatacctctttcacctaatatatttcattggttattgtttcaattaagggatcatacctaatttttattaaacaattgtgaggagagactgaaatattttgaattgatatatttttatactagaaacagttgtaaatatgtttttaaaagtcatcttacaaaaaaataaccttaggatggttcatgattttacacatttgtattaatcacagtaccaaatgcttttcttttctctgtgaaggtttcacaagaagtactgtggctgtatacagtacctgtatgctggttgttcttttgcgggtccagttaaacataattggtggatatatttacctggataatgcagcagttggcaaaaatggcactgtaagtttaatagacttaaatagacattgttctttccctcaggaggttcaa

SEQ ID NO: 9911 - DNA, 586 bp, Homo sapiens
  MAP TO CHR14.3; EXPRESSED IN BONE MARROW, SIGNAL = 1.8; EXPRESSED IN PLACENTA, SIGNAL = 1.3; EXPRESSED IN HEART, SIGNAL = 1.8; EXPRESSED IN BRAIN, SIGNAL =   2; EST_HUMAN HIT: BI825858.1, EVALUE 5.30e-02; NT HIT: gi14751729, EVALUE 0.00e+00; SWISSPROT HIT: P55585, EVALUE 3.30e+00
caaaatagctgggaagcagctaccatagactttcctattttggattagaccaaccccaagcacatgaactaagactatccgtagctcttggattagtcatgccattgaagaggaggagaagacgccactgggctgtgcctggcagggagtctggagtttctggtttccaagctcaggaaggcgtgaaccaggggaggggcctccatgcagggggagggctagaagctggggcaggatctgtcagctctgcaatgctgcagaagcagaagcaacacagaaagaagataccaacagcctcctgaaactcacgagagtggacactccagtgttgaccacctaagataccactcctgctccaaagattacagctcccttgtcattctgactcctgggcttaccctacaccccagagatggagcaactactaggaataaaacttggctgcctgtttgccctgttggctctcactctgggctgtggccttactcccatctgcttcaaatggttccagattgatgcagccagaggtatagccctaccccatctttgttccatagcctgagtctcacctcaaccctgtcctgat

SEQ ID NO: 9912 - DNA, 551 bp, Homo sapiens
  MAP TO CHR19.3; EXPRESSED IN LUNG, SIGNAL = 1.7; EXPRESSED IN HEART, SIGNAL =   2; EXPRESSED IN BONE MARROW, SIGNAL = 1.4; EXPRESSED IN FETAL LIVER, SIGNAL = 1.9; EXPRESSED IN ADULT LIVER, SIGNAL = 2.1; SWISSPROT HIT: Q9WVR6, EVALUE 3.00e-26; EST_HUMAN HIT: BI754386.1, EVALUE 7.00e-63; NT HIT: gi14763065, EVALUE 0.00e+00
atccccagcagacacaagagatggagactatgagctgctctcgtggctgggtctcgggggtcctgcaccctcaggagctgacgctgacgcactccactgcctgtcaccaggaacctacctcgcgccatcttcatctccatcccactggtgaccttcgtgtacacgttcaccaacattgcctacttcacggccatgtccccccaggagctgctctcctccaatgcggtggctgtggtgagtgggcccctgctcggtccctggctcctgcccaggcccctgccccggccttacacatggcctctctactgtgcccacccagaccttcggggagaagctgctgggctacttttcttgggtcatgcctgtctccgtggctctgtcaaccttcggagggatcaatggttacctgttcacctactccaggtgactgcactggggagacgtgggcatggggagggaaggctggggtgcaggtgtgcaccagtcatgccgtgggccagaggaagggacacctgccgggggaggggtctgcctgaagctgggatgatgat

SEQ ID NO: 9913 - DNA, 534 bp, Homo sapiens
  MAP TO CHR12.3; EXPRESSED IN LUNG, SIGNAL = 0.88; EXPRESSED IN BONE MARROW, SIGNAL = 0.97; EXPRESSED IN ADULT LIVER, SIGNAL = 0.72; EXPRESSED IN BRAIN, SIGNAL = 1.2; NT HIT: gi13648555, EVALUE 0.00e+00; SWISSPROT HIT: Q27905, EVALUE 8.60e+00; EST_HUMAN HIT: BE700671.1, EVALUE 4.00e-70
gtgcgtttcctagcttcaggctacttggtaactggaagaagctggaggacagaagcagtactcaacttgctgttattccagtgccctgtaacaatcactggtcctcctgcagatgacccttggtagagtctttatttgcatagcctcaaaataggttattcgtttctaaacttggatggaattagagaatacaatcaaactttaccacttggaggacacggggttagtccaggaccaaagaggccaatggatttttcaaagtgtgccccagcacaagaggcactggtgttcggtctacatttagttctccccactctgatcccctgactctccagcttccaggaaggttccttctcagagccaaatactctttgtgcaagtgccttcctgagcagaagaactggagaaagggaaccacagagccaggaggaatgtctgagcagagtcaagcaactggcttgaccacagtctgaagcaaggtgccacttaaacagatactgttttctcaaaggggcagaggaatcgtgttgcaga

SEQ ID NO: 9914 - DNA, 522 bp, Homo sapiens
  MAP TO CHR1.3; EXPRESSED IN BONE MARROW, SIGNAL = 0.98; EXPRESSED IN BRAIN, SIGNAL = 0.72; EXPRESSED IN ADULT LIVER, SIGNAL = 0.57; EXPRESSED IN LUNG, SIGNAL = 0.95; EXPRESSED IN HEART, SIGNAL = 0.79; EXPRESSED IN PLACENTA, SIGNAL = 0.81; NT HIT: gi16159131, EVALUE 2.00e-92; SWISSPROT HIT: O15457, EVALUE 2.00e-27; EST_HUMAN HIT: BG165628.1, EVALUE 2.90e+00
tttgtacccacaggcacatcagtatatgtaatttgtgagctctattagcagatgtagaattgtttttggggtcctgatgctgttttagactagtcctgactgatgaaacagtttaaatatgaaatagtcacagctctaacttaagtaaatttaaatatttgttgcttaattagttatttcaaaataactttcaacaaaaatttgctatcatcaattgtgattcaaattataaattaaaataactctttgacttattgcctataatgtttttcttttggccttaatattaggtttggaatcatacttgaaaagattaaaacagtaattaatgatgatgcaagatacatgaaaggatgcctaaacatgaggactcagaagtgctatgcagtgaggtctaacataaatgaatttcttgacatagcaagaagaacatacacagagattgtagatgacatagcaggtaatttctttatttgataatgttttttgtagggataaaacagccttttcaggacatgctgt

SEQ ID NO: 9915 - DNA, 511 bp, Homo sapiens
  MAP TO CHR15.3; EXPRESSED IN BONE MARROW, SIGNAL = 1.2; EXPRESSED IN LUNG, SIGNAL = 1.4; EXPRESSED IN HEART, SIGNAL = 1.1; EXPRESSED IN BRAIN, SIGNAL = 1.6; NT HIT: gi14749293, EVALUE 0.00e+00; SWISSPROT HIT: P15442, EVALUE 7.00e-03; EST_HUMAN HIT: BG035829.1, EVALUE 0.00e+00
agcattatccattgcatcccattagcagtgtgcctgggttttattgtagaaatcagtcatctcctggctgttgaaccacgatccagcaaaacggcccacagccacagaactgctcaagagtgagctgctgcccccaccccagatggaggagtcagagctgcatgaagtgctgcaccacacgctgaccaacgtggatgggaaggcctaccgcaccatgatggcccagatcttctcgcagcgcatctcccctgccatcgattacacctatgacagcgacatactgaaggtgggcttaagccacgctgcacaaagggagcttcaccttgtccacaaaaggatcaagccagtttctcacagattcttttaatgcctctaacataagttcttatgtgaggtattggaagcccctaaaagtacatgcaaaatgtgtgtatatgcattcagggaagaggacccatactttcagtcacctacttgaaggagtccttgacctttcctcctccctacccac

SEQ ID NO: 9916 - DNA, 530 bp, Homo sapiens
  MAP TO CHR6.3; EXPRESSED IN LUNG, SIGNAL =   2; EXPRESSED IN HEART, SIGNAL = 2.8; EXPRESSED IN PLACENTA, SIGNAL = 2.9; EXPRESSED IN BONE MARROW, SIGNAL = 3.4; EXPRESSED IN BRAIN, SIGNAL =   3; EXPRESSED IN FETAL LIVER, SIGNAL = 3.9; EST_HUMAN HIT: N46862.1, EVALUE 0.00e+00; NT HIT: gi14766908, EVALUE 1.00e-69; SWISSPROT HIT: O15540, EVALUE 3.00e-13
gaagaatggaaggaggagggaagaagaaggaaggaggtgagaggtgtgcggagaggagaaaaaaacaaggaagaatggagaattgtcattacttaccataaccattttgccatccttaatttctcttacaaaatttgtttctttgccatcccatttctgtatgtgaacaagtttgtctccatccaggctaacaacagactgagaccaacaacaaaatgcagaacatagcaataaatacaattcagatttctgatacggaagacgatgtgatttttgaaagagttgtataattgaataaatcatgatcagttaattatcctattgttatttctattacttatagattttctattatgtaaatttgaattcataatttgattaaaaagtatacatctaaatacaaaaatttaatatattaaaaacaaaaatcctaaaccagtgctttgcagctagtcgtccctctaaagaaagccttagaatgaggcaaactgtctatttagtcaatctgaggcaacctggggaattaaaca

SEQ ID NO: 9917 - DNA, 591 bp, Homo sapiens
  MAP TO CHR8.3; EXPRESSED IN FETAL LIVER, SIGNAL =   4; EXPRESSED IN BRAIN, SIGNAL = 2.5; EXPRESSED IN HEART, SIGNAL =   3; EXPRESSED IN PLACENTA, SIGNAL = 2.6; EXPRESSED IN BONE MARROW, SIGNAL = 3.5; NT HIT: AJ249601.1, EVALUE 0.00e+00; SWISSPROT HIT: P33485, EVALUE 6.60e-01; EST_HUMAN HIT: BE407508.1, EVALUE 7.00e-63
gctccttcctaggaccatccaccctcggcagctgggaggccgggctcccatttcgtctgggcagccggggaagcttgactggggcccgttggacgcagacagcggcagcccccgaccctgtccttcctcctgctccaggaggccaagacctggctgaacattgcactgtcccgcgaggaggccggcgatgcctacgagctgctggccccgtgcttccagaaagcgctcagctgtgcccagcaggcccagcgtccccagctgcaggtgcgagagcccatcccacccatactggctccccagtgagcccagcttcgttgcagcctgcctgccccttgtgccccatccccatctttctctgcgcccacagcccccagtcctgagctgagcatccctctgctcctcagaggcaggtcttgcagcatctccataccgtgcagctgaggctgcagccccaggaggcccctgagaccgaaaccagactgcgggagctcagtgtagctgaagatgaagatgaggaggaggaggcggaggaggcggcagccacagcggagagcgaagccctggaggccggcgagatggagctctcagagg

SEQ ID NO: 9918 - DNA, 541 bp, Homo sapiens
  MAP TO CHR12.3; EXPRESSED IN ADULT LIVER, SIGNAL =   1; EXPRESSED IN BRAIN, SIGNAL =   1; EXPRESSED IN BONE MARROW, SIGNAL = 0.77; NT HIT: U77710.1, EVALUE 0.00e+00; SWISSPROT HIT: P37023, EVALUE 6.00e-50; EST_HUMAN HIT: C17679.1, EVALUE 0.00e+00
agcagtgacccagtccattccctctcccccaaccccaccctgaccctgacgactccagcctcccttagccccagccccttggctgagtcacccaacctttctgcacacaggcttcatcgcctcagacatgacctcccgcaactcgagcacgcagctgtggctcatcacgcactaccacgagcacggctccctctacgactttctgcagagacagacgctggagccccatctggctctgaggctagctgtgtccgcggcatgcggcctggcgcacctgcacgtggagatcttcggtacacagggcaaaccagccattgcccaccgcgacttcaagagccgcaatgtgctggtcaagagcaacctgcagtgttgcatcgccgacctgggtgagccgggcggggcaggggcgcgcccttcacaggtgggcggagcttgtgcgctctcctctcctttgcctgtgggcggtgaccatgattagcacttgaaaatttagaggtgcatgttgtttcagttctcctccgcaagaccccacgagttgtct

SEQ ID NO: 9919 - DNA, 534 bp, Homo sapiens
  MAP TO CHR1.3; EXPRESSED IN LUNG, SIGNAL = 3.2; EXPRESSED IN HELA, SIGNAL = 1.9; EXPRESSED IN BONE MARROW, SIGNAL = 2.8; EST_HUMAN HIT: BG336702.1, EVALUE 0.00e+00; NT HIT: U57623.1, EVALUE 0.00e+00; SWISSPROT HIT: P05413, EVALUE 1.00e-26
taaaattcccatgcaaaggctttgaaagatacagtcctccacttccccatacccaggcctgagagttattcattgagtttcttgtacactgcttctctaccccagctcatatactcataaccttccccctaccctcaggtgtgggttttgctaccaggcaggtggccagcatgaccaagcctaccacaatcatcgaaaagaatggggacattctcaccctaaaaacacacagcaccttcaagaacacagagatcagctttaagttgggggtggagttcgatgagacaacagcagatgacaggaaggtcaaggtaagtcagggaaacaggggtggggaatggagagtgctgagactctaaaagagaataggctggtagtcttggctccctggtattgcaccctgaggggcagactatcatggggaatttaaatgaaacaagattcataaagcctgtgtagtgctggaatgccactgatgctaaatacatgtcagttctgtcctcttgttttcttccctcccttcttgggattcat

SEQ ID NO: 9920 - DNA, 506 bp, Homo sapiens
  MAP TO CHR6.3; EXPRESSED IN LUNG, SIGNAL = 0.61; EXPRESSED IN PLACENTA, SIGNAL = 0.89; EXPRESSED IN ADULT LIVER, SIGNAL =   1; EXPRESSED IN BONE MARROW, SIGNAL = 0.87; SWISSPROT HIT: P94545, EVALUE 6.10e+00; EST_HUMAN HIT: AA782779.1, EVALUE 1.00e-24; NT HIT: AF091149.1, EVALUE 1.00e-66
aacgatcagcgtatcttgggatgaaaatgagctgagaccactgtgcactatcagctccctgttacctcggattctcgaattctctttttctggggttggtagaaagaggccatttgtctcttgatggcgcttcttctagcttctgtctctgatttgctctctggtcttggatgatcatgaactcccttggcctgcgataacgagaaaatgaatcatacatttgtgcctctaaaggaagctgacaatgttgcccaaaaattgatcatgcctttcccaacatctcaagagtttagttttgtttctttcaaaatgacagaaaaaaaaattcttgaacaaataaaacaggctcaagaattgacatctgaaaagatcacctgcaatcccttcactctattaaaagaactataacttggtttaccatctgtgtaccttaaagagcacaaagtagtgagtgaatttctaggctcccgctaggtccctggggagctccagcacctatttctggc

SEQ ID NO: 9921 - DNA, 504 bp, Homo sapiens
  MAP TO CHR1.3; EXPRESSED IN LUNG, SIGNAL = 2.2; EXPRESSED IN HEART, SIGNAL = 1.5; EXPRESSED IN BONE MARROW, SIGNAL = 2.3; EXPRESSED IN BRAIN, SIGNAL = 1.4; EXPRESSED IN FETAL LIVER, SIGNAL = 2.2; NT HIT: gi14728292, EVALUE 0.00e+00; SWISSPROT HIT: Q01965, EVALUE 1.00e-27; EST_HUMAN HIT: BI911241.1, EVALUE 0.00e+00
acagtgtttggggaatggaggaattaatgactgtgctaggcaattgacctagaagaaggaggacaagaatctcatttcatttctcagcatctgacatttatgcccaatgtatattcacagagtgaaagaaagaaggctagctcaaggagtctagctgctcctccaagtccctcttctatctctgcaggactaagagcctctggaaaggactcagccccaacagtggtgtcagggatcctagggggttccgtgactctccccctaaacatctcagtagacacagagattgagaacgtcatctggattggtcccaaaaatgctcttgctttcgcacgtcccaaagaaaatgtaaccattatggtcaaaagctacctgggccgactagacatcaccaagtggagttactccctgtgcatcagcaatctgactctgaatgatgcaggatcctacaaagcccagataaaccaaaggaattttgaagtcaccactgaggaggaattcacc

SEQ ID NO: 9922 - DNA, 576 bp, Homo sapiens
  MAP TO CHR4.3; EXPRESSED IN BONE MARROW, SIGNAL = 4.2; EXPRESSED IN LUNG, SIGNAL = 2.4; EXPRESSED IN HEART, SIGNAL = 2.1; EXPRESSED IN PLACENTA, SIGNAL = 2.2; EXPRESSED IN ADULT LIVER, SIGNAL = 3.2; EXPRESSED IN BRAIN, SIGNAL = 3.4; NT HIT: gi14733412, EVALUE 3.00e-86; SWISSPROT HIT: P27674, EVALUE 1.00e-09; EST_HUMAN HIT: BI517809.1, EVALUE 9.00e-84
gcacccccagatagagacagcctcctactgacctcccaagaacctttccaatcatcttcacaattaacgtccccacaagtccaccgatggcgaatatggacacagtcacagaccagagcaaagtcagagtgtctgggtctattggacgtccatgccttctttcccatgactcattgtaaaaggccttgatgtactgaaaataaacaacaaaccatgttatttccttctgttctctcctgctgcttgaagcaagccagtgtacaaaacaaaacagcttgtacagagcattttcatgcatagcactttgctaatttgtttgagctttatctcattggcctcttctaacaaattttgggaagagcagaagatgttaatctttattatattcaaatgagcattttttttcttttatggctagtttttttgtgtttcttgcatctttgcctatcccaaggtactttttttgtaacaaaatgtttcctctttttacctcattttggagatagggaaactgaggctcagggagacaaagtgacttgctaggtaagtgctaaacctgggagctggactcagatc

SEQ ID NO: 9923 - DNA, 513 bp, Homo sapiens
  MAP TO CHR2.3; EXPRESSED IN FETAL LIVER, SIGNAL = 3.7; EXPRESSED IN ADULT LIVER, SIGNAL = 6.6; EXPRESSED IN BRAIN, SIGNAL = 1.3; EXPRESSED IN LUNG, SIGNAL = 1.2; EXPRESSED IN HEART, SIGNAL = 1.7; EXPRESSED IN BONE MARROW, SIGNAL = 1.3; EST_HUMAN HIT: BG566490.1, EVALUE 0.00e+00; NT HIT: gi14724921, EVALUE 0.00e+00; SWISSPROT HIT: P31327, EVALUE 1.00e-17
tggttttctacaaccccagcattattttagcaggagaaggtagtatttgatgtgttgcaatttgtgttacatgcccatggaacatctctggacattacctcaggaggaggggttaagagaaggaggagctgtggctgaagacatttaatggcagaatgaatggaaattcaaagatcgctgtgcagtcagccttaaacactgactgcacccctcccagatttcttttacattaactaaaaagtcttatcacacaatctcataaaatttatgtaatttcatttaattttagccacaaatcatcaaaatgacgaggattttgacagctttcaaagtggtgaggacactgaagactggttttggctttaccaatgtgactgcacaccaaaaatggaaattttcaagacctggcatcaggctcctttctgtcaaggtaatacccatattgattgtttctgataaaatactatggggtatagtttagcagtgaagcaaaggtgtcccttacaaggcaaa

SEQ ID NO: 9924 - DNA, 600 bp, Homo sapiens
  MAP TO CHR1.3; EXPRESSED IN FETAL LIVER, SIGNAL = 0.84; EXPRESSED IN BONE MARROW, SIGNAL = 0.79; EXPRESSED IN HEART, SIGNAL = 0.82; EXPRESSED IN PLACENTA, SIGNAL = 1.5; SWISSPROT HIT: P30542, EVALUE 1.00e-49; EST_HUMAN HIT: BI753972.1, EVALUE 0.00e+00; NT HIT: gi14735958, EVALUE 0.00e+00
caagtgggacacatcacagggtacctggagttccagggcagcctgagctccctgcccctcccagacgggtctccccatcccaggcttccctgaccacacaggtgcttgcctcgtgccccttggtgcccgtctgctgatgtgcccagcctgtgcccgccatgccgccctccatctcagctttccaggccgcctacatcggcatcgaggtgctcatcgccctggtctctgtgcccgggaacgtgctggtgatctgggcggtgaaggtgaaccaggcgctgcgggatgccaccttctgcttcatcgtgtcgctggcggtggctgatgtggccgtgggtgccctggtcatccccctcgccatcctcatcaacattgggccacagacctacttccacacctgcctcatggttgcctgtccggtcctcatcctcacccagagctccatcctggccctgctggcaattgctgtggaccgctacctccgggtcaagatccctctccggtgagtccacagcgccgaaggtactcgcagcaccacatgatggctggcttgagggccatctagaaaggaaaaaaggtagagcataagaccccaagtaagcc

SEQ ID NO: 9925 - DNA, 512 bp, Homo sapiens
  MAP TO CHR4.3; EXPRESSED IN BRAIN, SIGNAL =   2; EXPRESSED IN BONE MARROW, SIGNAL = 1.4; EXPRESSED IN LUNG, SIGNAL = 0.87; EXPRESSED IN HEART, SIGNAL = 0.85; SWISSPROT HIT: Q16585, EVALUE 3.00e-31; EST_HUMAN HIT: AL522583.1, EVALUE 1.00e-101; NT HIT: Y09781.1, EVALUE 0.00e+00
taatgcccctctcctgtttgcatttctttcagttaatgtggcaacttacaggctggttgttgccagtgatgaccaaattttcatttcgccttcctcctactgtgcttttataaagagggtggatcactcccatgtcagatacttgcttaaatcgaagcaggccactttcatgaaactccatactatcacagccatttggtccaatgcgaatcacggcccaaataacaagtgttatctgaaaaagaacacaagtccgctgttggtaggccgcatacatttaatgtaattggaaaacaaatagaaaatattatcaccaaaatgttaaagacctcctaaaatgttttatcagtgaggtaaatatatcaattaattttccacttataaacaaaacgaattttatttttattaaggtattacatgcaaatagctaaaagtcaaaatgtgctaaaggtctataatttaaaatgaatagtttcttattttttctaccctctccacatctcattcccagg

SEQ ID NO: 9926 - DNA, 512 bp, Homo sapiens
  MAP TO CHR6.3; EXPRESSED IN BONE MARROW, SIGNAL =   1; SWISSPROT HIT: P26640, EVALUE 4.00e-28; NT HIT: M98326.1, EVALUE 1.00e-84; EST_HUMAN HIT: AI150123.1, EVALUE 0.00e+00
tgtgtctgcttctggctcaccctgcccctccccccaccaaggacccagtaaacccaccactccagcagggtgtcccagcagctagctctggccctctgctcacctccccagggggcaccgctgggtcactgacagtgacaaagtaggctgggatgcgatggccccaccacagctgcctggaaatgcaccactccctgcaaatgtcggggaggagaaatcagggagggcctgatggagcctggcccgagtgagccctgctcagccctcggcaagcccctcccacactgaggaccctacacaccggatgttgtccatccaggcatgccatgtgcgctgatgggcctcaggcaggatgcggaggtcaccccgagtcacagcggcgctggcagcctgggccatctccccgcagcgaacgtaccactgcggccgcagcagaggctctaccacgtccttcgaccggctgggggtacacgtaggtgagaaggccaggcggtaaaaccctgaggagccct

SEQ ID NO: 9927 - DNA, 527 bp, Homo sapiens
  MAP TO CHR12.3; EXPRESSED IN BONE MARROW, SIGNAL = 5.1; EXPRESSED IN ADULT LIVER, SIGNAL = 2.8; EXPRESSED IN BRAIN, SIGNAL =  35; EST_HUMAN HIT: BG120811.1, EVALUE 1.00e-79; SWISSPROT HIT: P08537, EVALUE 7.00e-23; NT HIT: AF082027.1, EVALUE 5.00e-35
gctgtggaaaaccaagaagccctgaagaccggtgcactggtcagcctgtaggggaataaaaaaatgtaatattttaatgccaggacacattatcttagaatttctatttcaactttttagattacgaaccatatctcactgatgtaagcacaaggaattggcaaaacagacatatccacaaactgtccataacctagggactatctgatttagaagtccaattaatatagcaagcagcctattccacattttggtaggtgccaaagaatgaatgatgtcagtcactccacccaacttgcactggaactatcacaccacattaaatgcatatttatatgtggtgcttaccagcttgcgaattcggtccaacacaaggtcaatgatctccttgccaatggtgtagtgccctcgggcatagttattggcagcatcttccttgcctgtgatgagctgctcagggtggaagagctggcggtaggtgccagtgcgaacttcatctggaggagggagagaaggacggagggagt

SEQ ID NO: 9928 - DNA, 508 bp, Homo sapiens
  MAP TO CHR17.3; EXPRESSED IN LUNG, SIGNAL = 0.8; EXPRESSED IN BRAIN, SIGNAL = 1.3; EXPRESSED IN BONE MARROW, SIGNAL =   1; SWISSPROT HIT: P75499, EVALUE 1.40e-01; NT HIT: gi16164704, EVALUE 0.00e+00; EST_HUMAN HIT: AW410408.1, EVALUE 0.00e+00
gccgaagtcctgagacaaagatcataatgagacaggaaggtggcaaaggaaggagcccatttgcatgacaataattgagccaagaatagaaagccacagggatgcaagggtgaggctggcggctgagctgggctaaacctcacaaatcagactacccagctctgctccgcaggggaagggagactgagccctgggccaggcttggcagagagggaagcgggaggacacgaccccagggcattgtgggaacactggccaggctggactttgccttcctcctcgtcctttagccgggagcctgtctttgcttgcctttgcctttgaggctctgtggctgtggggctgagtggcatcatggcggctcagaaagatctctgggacgccattgtgattggggcggggatccagggctgcttcactgcataccacctggccaaacacaggaagaggatcctcctgctggagcaggtactgtgtcccttctgcacccccagctgtaaggactgtc

SEQ ID NO: 9929 - DNA, 530 bp, Homo sapiens
  MAP TO CHR2.3; EXPRESSED IN PLACENTA, SIGNAL = 0.51; EXPRESSED IN BONE MARROW, SIGNAL = 0.67; EXPRESSED IN LUNG, SIGNAL = 1.3; EXPRESSED IN ADULT LIVER, SIGNAL = 0.39; EXPRESSED IN BRAIN, SIGNAL = 1.2; EST_HUMAN HIT: BG025168.1, EVALUE 4.00e-55; NT HIT: gi16160614, EVALUE 3.00e-55
tccaaccatttagaaccaaagctctgtttctttcaaaatctatcttaaactgttgctaacttggagagtgacataaggaatcaagttataaaacggcttctgattatctttcatggcatattgcatatatttataggtatagcagactccaacatacctttcattgtcacattaacaccagatgctaaaaataagcctccaaaccggttgttaaaaatctgattgccttctagtgttgcagttgcgtgatttgtaatttcaatacctgaagtaaaatttacaaacaagtagatacatcactttatactgcttcttaaaaacctgaaattagcaagcaaatgtaaactgcttcttttatagaagtacattaaccctcttaatgtctactgaataaaatgtagatacctatttcaaccaccaacagtaacattcacttatcaatgactatggtcaaaactgcaattaactttcgcaccaacctaactgtcttaaagtttaaatacatgatacttggatttcatttgcatcca

SEQ ID NO: 9930 - DNA, 534 bp, Homo sapiens
  MAP TO CHR1.3; EXPRESSED IN BONE MARROW, SIGNAL = 0.78; EXPRESSED IN LUNG, SIGNAL = 0.67; EXPRESSED IN PLACENTA, SIGNAL =   1; EXPRESSED IN HEART, SIGNAL = 1.4; EXPRESSED IN FETAL LIVER, SIGNAL = 0.34; EXPRESSED IN ADULT LIVER, SIGNAL = 1.4; EXPRESSED IN BRAIN, SIGNAL = 1.3; SWISSPROT HIT: P20023, EVALUE 1.00e-31; NT HIT: M24011.1, EVALUE 0.00e+00; EST_HUMAN HIT: BE840758.1, EVALUE 1.00e-91
aggagttgcagaacccagtggaaagtgaacaacatctgcagcagcctctgtgcagaaaacaacaacaacaacaacaacaaaagattgggaaactgtgatctaaaattacccaaagctggtctgcaacatatgttctgtatcatacagctgacgccagagtggaattatagcatgaatatcaatttctttggctcagtttctttctgtggttgtttacttaagcagttatgttttgtttttgtcctttcatttagaatgccaggcccctcctaacatcctcaatgggcaaaaggaagatagacacatggtccgctttgaccctggaacatctataaaatatagctgtaaccctggctatgtgctggtgggagaagaatccatacagtgtacctctgagggggtgtggacaccccctgtaccccaatgcaaaggtgccaggcctcaaatgtagacattttgttaactttaagattgccttgaattaaattctcatcctagtctcttttcttagtggcagcgtgtgaagctacagga

SEQ ID NO: 9931 - DNA, 551 bp, Homo sapiens
  MAP TO CHR16.3; EXPRESSED IN LUNG, SIGNAL = 2.4; EXPRESSED IN HELA, SIGNAL = 3.1; EXPRESSED IN BONE MARROW, SIGNAL = 2.8; EXPRESSED IN BRAIN, SIGNAL =   4; EXPRESSED IN ADULT LIVER, SIGNAL = 3.1; SWISSPROT HIT: Q99732, EVALUE 4.60e-01; NT HIT: gi15319785, EVALUE 0.00e+00; EST_HUMAN HIT: BF525861.1, EVALUE 1.00e-109
taggaggtctgaggcgtagccttgcacgctgggcgctgtggaccgtggggctttgcgccaatctctttgtctggtgcaggtggcaggccagtgacctctcgcctccatcttctgtgccattccaggtttctaccctcctccaggcccccacccacccatgggctactaccccccagggccctacacgccagggccctaccctggccctgggggccacacagccacagtcctggtcccttcaggagctgccaccacggtgacagtgctgcagggagagatctttgagggagcgcctgtgcagacggtgtgtccccactgccagcaggccatcaccaccaagatctcctacgagattggcttgatgaatttcgtgctgggtttcttctgttgcttcatggggtaggtggtgtgggcactggtagggtgggggctgcaccagggtcaactggctgcctctgcctcctccgcagcaggcctcagcctgttcttccctgtctctgattcagatgtgatctgggctgctgcctgatcccctgcctcatcaatgactt

SEQ ID NO: 9932 - DNA, 575 bp, Homo sapiens
  MAP TO CHR17.3; EXPRESSED IN HEART, SIGNAL = 2.6; EXPRESSED IN PLACENTA, SIGNAL =   5; EXPRESSED IN BONE MARROW, SIGNAL = 2.9; EXPRESSED IN FETAL LIVER, SIGNAL = 2.1; EXPRESSED IN ADULT LIVER, SIGNAL = 2.1; EXPRESSED IN BRAIN, SIGNAL = 2.5; EST_HUMAN HIT: BF332630.1, EVALUE 6.00e-88; SWISSPROT HIT: P49447, EVALUE 7.00e-15; NT HIT: U29461.1, EVALUE 0.00e+00
gtacatttcagcccagctcccctcctcctcccacctccctggtaggtggccccaggcccggggtgttggaaggactcacctgcacaaagtacaggacaaagacaaggatcccgcaccagctgtgtaggctgtacaggtcagcgtagcccttcttcctgtggtagtcgaacaccgccaccaagcctgggccagagacaggtcatatgaggacagggttggatgtggaaaaggaaggtgtaagatgacccaggggaaccagctagcgggacttctgggctttagtcccagctcgagggctgccagcacctagtggccctgcaggggatgtttggggtgggggcgggcccatcacagctctggggagggaacagagcaggtgaagcggctgtttgccatacctgaagaggcaggcaggtggcggggaaggccgcgcccgggaactcaccaaccagggcgatgacgagcgcaaagatgtgcagcagcccgtgcaggaccttggtggtgcgtttagcttcgttcctgaagacacggtaaaccagcagggctgtgggaggtgagagagggaacgtgagtgc

SEQ ID NO: 9933 - DNA, 584 bp, Homo sapiens
  MAP TO CHR17.3; EXPRESSED IN BONE MARROW, SIGNAL = 1.6; EXPRESSED IN HEART, SIGNAL = 0.86; EXPRESSED IN FETAL LIVER, SIGNAL = 0.83; EXPRESSED IN ADULT LIVER, SIGNAL = 0.81; EXPRESSED IN BRAIN, SIGNAL = 1.3; NT HIT: AJ277557.1, EVALUE 0.00e+00; EST_HUMAN HIT: BI255109.1, EVALUE 5.00e-70; SWISSPROT HIT: O62541, EVALUE 3.80e-01
cctgcctgttagctgaggtctaggctgacccctgccctcggctcttggttggctcccaggtctgatgtcactttcttctcaccacctgcccttgcctgtttgcgtccagtatgcctgggtggagaagtactttggccctgactttctggagcagattgtgctgaccagagacaagaccgtggtctctgctgaccttctcatagacgaccggccggacatcacaggcaagtggcctgcgacaggtgaggagcacgtggggagggccccagccttggcccccttctcctgggcagtgagcactcagttgcttcctgccccacttagtcaccagctgtttgccaggcactgagcccctccccttcgggaagacaaggccccctctgtatgggctgtggcctggtgctcctgggagctgggaggagtgggtgccagctctagggttagcttgaggggtggccttggggaagtcccttcagcttcaaagccttgtcttcctcatgtaacatggggactcaactctggtttccaaatgtttgtttttagcaacaaaacccattttttcccccaaaagcaatgtggactga

SEQ ID NO: 9934 - DNA, 524 bp, Homo sapiens
  MAP TO CHR6.3; EXPRESSED IN BRAIN, SIGNAL = 2.6; EXPRESSED IN ADULT LIVER, SIGNAL = 4.8; EXPRESSED IN BONE MARROW, SIGNAL =   2; SWISSPROT HIT: Q92504, EVALUE 3.00e-19; NT HIT: AF117221.1, EVALUE 0.00e+00; EST_HUMAN HIT: BE877736.1, EVALUE 0.00e+00
tataccccaccagccacttctaaaccactgataatctttagctattggtgagtgcctttttctcttttctgcccatcaggcgatgcgtctgcaactactgacagcagtaggggcactggcaggcacagcctgtgcccttctcactgaaggaggagcagtgggcagtgaaattgcaggtggtgcaggtcctggctgggtcctgccatttactgcaggtggctttatctacgtagcaacagtgtctgtgttgcccgagctgctgagggaggcatcaccattgcaatcacttctggaggtgctggggctgctggggggagttatcatgatggtgctgattgcccaccttgagtgaggggtggataaactacccctgccccaaacctctacccctaactccaggtcaggggtgcgtagaggttgggggccctggccagggacatctgccaaaggaaggaactgtagcctgggagaatggttactttggcattagggccttcaagggctggcagtcttacagaggctgg

SEQ ID NO: 9935 - DNA, 525 bp, Homo sapiens
  MAP TO CHR14.3; EXPRESSED IN BONE MARROW, SIGNAL = 1.4; SWISSPROT HIT: P25500, EVALUE 8.00e-36; NT HIT: gi14249159, EVALUE 1.00e-100; EST_HUMAN HIT: AA255963.1, EVALUE 0.00e+00
attaggttgcagggtaaccgatgaaattttacatctagtaccaaacattgacaacttcaggttaactctgagagctatcaaactatgggccaaacgtgagttcagaatttgttggctagcttattaaaaatgttcaaacttttgttcaacactaacttatctttttgcttttcccttatcaacaggccacaacatctattccaatatattaggtttcctcggtggtgtttcctgggctatgctagtagcaagaacttgccagctttatccaaatgcaatagcatcaactcttgtacataaatttttcttggtattttctaaatggtatgtgtttagattatattaaaataaaattgattgtagacactgaagtttagtcttatttctatgacatttctcagcttggtttcagattcaaattttagttcatgatgtagtcatgtaggcagccttggagatcacattgtgtataaaatggcaaactgaaactattttttttccctagtttggccaggatagtaaggc

SEQ ID NO: 9936 - DNA, 580 bp, Homo sapiens
  MAP TO CHR6.3; EXPRESSED IN BONE MARROW, SIGNAL = 1.9; EXPRESSED IN HEART, SIGNAL = 0.91; EXPRESSED IN HELA, SIGNAL = 3.9; EXPRESSED IN PLACENTA, SIGNAL = 1.7; EXPRESSED IN ADULT LIVER, SIGNAL = 0.93; EXPRESSED IN BRAIN, SIGNAL = 1.5; EST_HUMAN HIT: BF094056.1, EVALUE 1.00e-112; SWISSPROT HIT: P16106, EVALUE 4.00e-72; NT HIT: U91328.1, EVALUE 0.00e+00
gcgtatttgcgctagtgttgggtgttccgctgtgctgtttttccgtcatggctcgcactaagcaaactgctcggaagtctactggtggcaaggcgccacgcaaacagttggccactaaggcagcccgcaaaagcgctccggccaccggcggcgtgaaaaagccccaccgctaccggccgggcaccgtggctctgcgcgagatccgccgttatcagaagtccactgaactgcttattcgtaaactacctttccagcgcctggtgcgcgagattgcgcaggactttaaaacagacctgcgtttccagagctccgctgtgatggctctgcaggaggcgtgcgaggcctacttggtagggctatttgaggacactaacctgtgcgccatccacgccaagcgcgtcactatcatgcccaaggacatccagctcgcccgccgcatccgcggagagagggcgtgattactgtggtctctctgacggtccaagcaaaggctcttttcagagccaccaccttttcaagtaaagtagctgtaagaaaccaatttaagacaaaagggaatgcattgggagcacttttcgtt

SEQ ID NO: 9937 - DNA, 519 bp, Homo sapiens
  MAP TO CHR12.3; EXPRESSED IN PLACENTA, SIGNAL = 0.57; EXPRESSED IN LUNG, SIGNAL = 0.54; EXPRESSED IN HEART, SIGNAL = 0.64; EXPRESSED IN ADULT LIVER, SIGNAL = 0.68; EXPRESSED IN BRAIN, SIGNAL = 0.68; EXPRESSED IN BONE MARROW, SIGNAL = 1.2; SWISSPROT HIT: Q00872, EVALUE 3.00e-26; NT HIT: gi16187985, EVALUE 6.00e-87; EST_HUMAN HIT: AU121097.1, EVALUE 2.00e-84
agctggatgcaattttctgcattcacctagtttttctaaggaatgaaattgtacagaatcaaatgtgaaattatcctctaatatattaattgcattggtacagcttctcactttcaaaacaaatattgtagtagagctcactataccattgtgaaatgccaccatcttggcctgttgggagtttgggcttggcatttgtgatggtctatcatttctacagtgaaacctctgaagattttgactcctctgactgatcagactgtaaatcttggaaaagaaatctgcctgaagtgtgaaatctctgaaaacataccaggaaaatggactaaaaatggcctacctgttcaggagagtgaccgtctaaaggtggttcacaagggaaggtaagcgagccaggtgacccgcaagtgaggtttggtcccatttctactttctccattttctaaattacatatttggtgaggatatttgaagggtagccatagggagatcatctattcctgattcttcgcttccaac

SEQ ID NO: 9938 - DNA, 564 bp, Homo sapiens
  MAP TO CHR11.3; EXPRESSED IN LUNG, SIGNAL = 1.1; EXPRESSED IN HEART, SIGNAL = 1.5; EXPRESSED IN BRAIN, SIGNAL = 1.3; EXPRESSED IN PLACENTA, SIGNAL = 1.8; EXPRESSED IN BONE MARROW, SIGNAL = 1.9; SWISSPROT HIT: P02735, EVALUE 2.00e-21; NT HIT: X56652.1, EVALUE 0.00e+00; EST_HUMAN HIT: BF836858.1, EVALUE 0.00e+00
atcgctgtaatcaaggcaggcaagaaggagattaataatcaggccagtgagcaatagcccaccctcccattctccctgttccaagggagggctcagagaggagcccagaaaggccaaggaaggagggatgaaaacactgggcaccaccccattcagccaggctgggcacccctaggctggatgaacagcacccagagagggaggatgaggaatcactcactcctaccatccactcagacctcacactgagcacagaggcagagagagggcaagaggaggaggggccgcagcctctaacttctccacaaggagctcgtctccctcctgactgtccaaggcaggcaagctctgctcacccagccctaacgtcccaggagctccagttacgtgatcacttctgcagcccaggcacccccaggtccccttttggcagcatcatagttcccccgagcatggaagtatttgtctgagccgatgtaattggcttctctcatgtcagagtaggctctccacatgtcccgagcccctggaaaggaaaggaaaggcagaagggacatcaggaga

SEQ ID NO: 9939 - DNA, 549 bp, Homo sapiens
  MAP TO CHR9.3; EXPRESSED IN BONE MARROW, SIGNAL = 1.3; EXPRESSED IN LUNG, SIGNAL = 2.4; EXPRESSED IN PLACENTA, SIGNAL = 1.6; EXPRESSED IN ADULT LIVER, SIGNAL = 2.2; EST_HUMAN HIT: BI467034.1, EVALUE 8.00e-75; SWISSPROT HIT: P40306, EVALUE 4.00e-06; NT HIT: gi14744287, EVALUE 5.00e-75
ttgagccctctggtaattggatttcagctaagtttctaattggatttttcagttgttgtggtgctgggacagctgcagacacagacatgacaacccagctcatttcttccaacctggagctccactccctctccactggccgtcttcccagagttgtgacagccaatcggatgctgaagcagatgcttttcaggtaagtttccagaatggggattcctactagtatcttcttctcatatcttagatttttttcagccaagagaagcctggaaagtagcaaaaacacattcagaaatacacattttgttccggaaatcagttgttatattaaagagccattttaaatggtttttgatggtgcatttgaatttctggggcctgatttttttcatgagtaaatcacatgtcaccagttgagtcatttcctggagcatagggatattactggataagagaaacttttttgttcacggtaagaaagttatagctggaggaactatcaagttgtcttgtgaaactactctctcctccccataaacacaaacccaa

SEQ ID NO: 9940 - DNA, 583 bp, Homo sapiens
  MAP TO CHR15.3; EXPRESSED IN HEART, SIGNAL =   5; EXPRESSED IN FETAL LIVER, SIGNAL = 6.2; EXPRESSED IN ADULT LIVER, SIGNAL =   6; EXPRESSED IN BRAIN, SIGNAL = 8.1; EXPRESSED IN HELA, SIGNAL = 6.3; EXPRESSED IN BONE MARROW, SIGNAL = 5.7; NT HIT: AJ278974.1, EVALUE 0.00e+00; EST_HUMAN HIT: AI698291.1, EVALUE 2.00e-94; SWISSPROT HIT: O00161, EVALUE 1.00e-20
ggtgatgctgggaattaagctttgagaaacactgtttcagagtttctttcttttcttacatggctttaagatactgtgctctctttgatgagtctcccagtttttattatagaatgtttcccaggaatggtaacctatattcttttggatcttatacttgctgagagtcattttggttacttacttttgtgaaaagtaaatccagacttttatttaaattcaacaaaacctatggaattaactgtcttcttgtgatagcataactaatgatgccagagaagatgaaatggaagagaacctgactcaagtgggcagtatcctgggaaatctaaaagacatggccctgaacataggcaatgagattgatgctcaaaatccacaaataaaacgaatcacagacaaggtaaaagctttttattgccacaagaaaatgagacacccagttcagtgtttcagtaatagacatctgtgctagatactgtgggggacacggtagaataagctcctgtcctcataggtcttaattctgatgaggtggtggttctaacacataaaacaagagccaagtcctccctgtcatggt

SEQ ID NO: 9941 - DNA, 544 bp, Homo sapiens
  MAP TO CHR1.3; EXPRESSED IN HELA, SIGNAL = 3.1; EXPRESSED IN BONE MARROW, SIGNAL = 3.3; EXPRESSED IN LUNG, SIGNAL = 3.5; EXPRESSED IN HEART, SIGNAL = 2.5; EXPRESSED IN FETAL LIVER, SIGNAL = 8.6; SWISSPROT HIT: O23264, EVALUE 9.00e-20; NT HIT: gi14780959, EVALUE 0.00e+00; EST_HUMAN HIT: BG982191.1, EVALUE 1.00e-122
gtctgcttttcctgcacctccctcaacatcctgcagctgcttcagatcatccaccccatccccagcttctcttctctttccttccttcccttctgctcctcctgccagggtctccacctgtcctgtgaggcggggtctctgtgggtcagagatgtcatactgcctcaggtccccatgcagccagttgctgaagtagaggaagcggtcgtccagggagagcaggatgtcggtgatcaggcctgtgggcagggggcgagtagagcctttaaggactcttgtttcccaggccaagaatcaactttcctatgccctaggcactcacctggcatttcgggcagcagccagcccttcactttcttggggggcacctggatcaccttctccactgaccatgtacctccctacattgaggggtggagggtgaggttagctggcagagaggtcagcctatcagaattggggactaggggttagatctgggttgcccagacctgggagggagagaatagatgcccggccttcttgccagcaggatctaactcca

SEQ ID NO: 9942 - DNA, 563 bp, Homo sapiens
  MAP TO CHR19.3; EXPRESSED IN HELA, SIGNAL = 2.6; EXPRESSED IN BONE MARROW, SIGNAL = 2.2; EXPRESSED IN HEART, SIGNAL = 1.9; EXPRESSED IN FETAL LIVER, SIGNAL = 3.2; EST_HUMAN HIT: AL535714.1, EVALUE 0.00e+00; NT HIT: AF012339.1, EVALUE 0.00e+00; SWISSPROT HIT: Q92947, EVALUE 1.00e-21
tgaaaaactgcaaagggaccagtgcccaaattcaggcccaggcctaggccacaggaagccccagccccaaggacagaggggccttgaggtggggtggctatggctccaggcggaggagcagtctcagggcacccaccagcccgcccaccttcgttgcgattggccaacaggatgcgaggcatgagtctctcctggcagtaggtgcggaaggtgtccctgatgaggatctcatctgtggtcagctgctcctccagcaccagcgggtcctgccagtcaaactcgggacgcgaggctgggaaggggaattcgcctcggtccagtccgcaagatcactgtgccctcccttctcggaccctcatcagccctaccccccaacacccatgtcgccccccggctagtgcgagctgcaagcgagactgatcaggtgacttttctccggccccgcaggcacagcgcactcactgccttagtgcctctgaccctggccacgaccctgccaccccgctcgggcagctctcggattctgggacagagtccacctgcggcagacagacagctgaaca

SEQ ID NO: 9943 - DNA, 561 bp, Homo sapiens
  MAP TO CHR16.3; EXPRESSED IN ADULT LIVER, SIGNAL = 1.2; EXPRESSED IN BRAIN, SIGNAL = 1.2; EXPRESSED IN BONE MARROW, SIGNAL = 1.3; EXPRESSED IN PLACENTA, SIGNAL = 0.98; EXPRESSED IN HEART, SIGNAL = 1.2; EST_HUMAN HIT: BI832541.1, EVALUE 4.00e-98; NT HIT: X71874.1, EVALUE 0.00e+00; SWISSPROT HIT: P40313, EVALUE 4.00e-53
acgaggaattcaggacatgccctggcctaccctgctcagcacccatcagaacatggactgtttctgaccccacaggccattacacaccctagctggaactctaccaccatgaacaatgacgtgacgctgctgaagctcgcctcgccagcccagtacacaacacgcatctcgccagtttgcctggcatcctcaaacgaggctctgactgaaggcctcacgtgtgtcaccaccggctggggtcgcctcagtggcgtgggtagggactcaggccaaagctcagggtgggaggactggggtggggaccagtgttctgggccccatgtgaccacccctcctggcccacaggcaatgtgacaccagcacatctgcagcaggtggctttgcccctggtcactgtgaatcagtgccggcagtactggggctcaagtatcactgactccatgatctgtgcaggtggcgcaggtgcctcctcgtgccaggtaagccccagcacccgctcctctgcgctgtcctgtggtatacctccccaaccccccctactcaattctccctccctcttcc

SEQ ID NO: 9944 - DNA, 536 bp, Homo sapiens
  MAP TO CHR19.3; EXPRESSED IN HEART, SIGNAL =  19; EXPRESSED IN HELA, SIGNAL =  32; EXPRESSED IN BONE MARROW, SIGNAL = 8.3; EXPRESSED IN BRAIN, SIGNAL =  10; EST_HUMAN HIT: BF245330.1, EVALUE 1.00e-100; SWISSPROT HIT: Q29308, EVALUE 3.00e-27; NT HIT: AF092907.1, EVALUE 0.00e+00
ctactccatcaatgcagccccccctaccctgcttacccatcttggtccttttccaccattttcagcccctccagggcttggaggacccggcgggccacactcttggagcctcggctgaagtggctgggcatgacgccgtttctctgacgtcccccatagatcttggtcatggagccaaccccagcgccaccccggaggtacaggtgccgcgctgtggaagctgggggtagtgtgagagggagatttaagggtcttgatcaaggtctcaggtaaacaattccttgtgtgtaaacagctaattctcactgttttataagaagggaaactgaaaacacacactaacacccagaaactgacagccccctctcctcacccacccccccggctagctcttccttgacaaacagccctgcaccctgggtgggcactcccaccatctccagggccaacttctttagtggttactatcccagcagcactgctgttgaattgaacctgaggttatgtaggggtggagcctagctgtgaccatctcc

SEQ ID NO: 9945 - DNA, 508 bp, Homo sapiens
  MAP TO CHR2.3; EXPRESSED IN BONE MARROW, SIGNAL = 1.3; EXPRESSED IN BRAIN, SIGNAL = 2.4; SWISSPROT HIT: Q04984, EVALUE 7.00e-22; NT HIT: AJ250915.1, EVALUE 0.00e+00; EST_HUMAN HIT: BG534601.1, EVALUE 0.00e+00
ttagaacccgatccaacagcgactactgttgcttgcaatacttttccttgagatttttctggaagcataatgcctcctttggttacagtttcagcagcactcctttcaaccaatactcggtcaaagagtggaagaaactttctaaacgcttgtcctgcctgtaggaagagaaatgttttgaaacaaaaactaaatgtaatcacattatcaacaggcaacgccaccgtgctatacatctcaacacgttttggctttgaaagttaacaccaaacctcagcttattcgttaaggaagcgcatttgaatgtactaaccaatattccaagtttaattcccgattccttacgtctgttaggggtcgttgtcgctcctccggtgagcaaccagaccagctttaaggtcaaccttagtttattccaaggtcaaatgttttccttcttcaggtttttccagaaattttcaggaaacgctgggtcaagctccctgcctggcaccatgatttttaccca

SEQ ID NO: 9946 - DNA, 598 bp, Homo sapiens
  MAP TO CHR2.3; EXPRESSED IN FETAL LIVER, SIGNAL = 0.93; EXPRESSED IN BRAIN, SIGNAL = 0.5; EXPRESSED IN LUNG, SIGNAL = 1.5; EXPRESSED IN HEART, SIGNAL = 0.58; EXPRESSED IN BONE MARROW, SIGNAL = 0.9; SWISSPROT HIT: P27487, EVALUE 1.00e-19; NT HIT: U13725.1, EVALUE 0.00e+00; EST_HUMAN HIT: AU122649.1, EVALUE 7.00e-63
cagtgagcatgttgggtgacacgcaccagccacatacattttctcattgaaagggacgagtgcataaaataatcatttaaaaccccacaatatgtatgtatttaacgctgaagtgcttctgttatacacaagggtgtgtgtttgtgcatgtgtgagtgtgttcggtctaaggcaagctatgcaagtctctcagtgataaggggaagaaaagattgtttatgctcactacttaaatgtgagtggagagaaggggacttaggtgatttcaagagctcctcagattcaaaaggaatagagggagctgcttcgaagtgagtaacagcggcgactgccctccctcccagggagctcagacttaccggaacatctcagctgataatacttcgcctctttactgaatgacacagaatagtactgacacctttccggattcagctcacaactgaggcatgtcacttttgtatagtcactaagttggattctgtaaaaccaacggtggaaattaagtgcttgaagaaaagataagtgagaggaaggaactgaataaagccatattctagtttcaaagacagcagcatgccaacgcaatctttaggac

SEQ ID NO: 9947 - DNA, 561 bp, Homo sapiens
  MAP TO CHR14.3; EXPRESSED IN BRAIN, SIGNAL = 1.8; EXPRESSED IN FETAL LIVER, SIGNAL = 2.1; EXPRESSED IN BONE MARROW, SIGNAL = 1.9; EXPRESSED IN HEART, SIGNAL = 1.6; EST_HUMAN HIT: BE791320.1, EVALUE 2.00e-78; NT HIT: AF013181.1, EVALUE 0.00e+00; SWISSPROT HIT: P11277, EVALUE 7.00e-25
taactgctgtcctggcactggacactgaagctctaactagatgtcctcagtgtcctgggctgtccccagattcaggtgacccagaagaggcactgattctgaccaggtgtactaagactgactacatcaggagctctgaaggtttagctactatttagaaaagttgttcgctgccacgttctgtactgtcagcaagctttaggacagggtccacaccctgggtgaagcccatccaggcaagcctatctgagcagagcacccacccgccgcccaatcactttacttaccgcatcgatgttctctagccacccttcatgggaagccagctctgccacaaacgcctggtgctttagccatttattgtgaaggtttcgtgcttcatcataggagacatcctgagatgtcagcagcttgtcgttgatccagagagtgagctgtgtgcataaagagtgggctgactatccctgagtatatttctttggcagagcagaacctgctgcccatccctggctgcagaaggagaaggccatggggaggaagtgcaagcacagaagagaaccc

SEQ ID NO: 9948 - DNA, 554 bp, Homo sapiens
  MAP TO CHR10.3; EXPRESSED IN BRAIN, SIGNAL = 1.5; EXPRESSED IN LUNG, SIGNAL = 3.1; EXPRESSED IN PLACENTA, SIGNAL = 1.1; EXPRESSED IN HEART, SIGNAL = 1.6; EXPRESSED IN BONE MARROW, SIGNAL = 1.7; SWISSPROT HIT: Q9NR30, EVALUE 7.00e-25; NT HIT: AF261911.1, EVALUE 0.00e+00; EST_HUMAN HIT: BG758718.1, EVALUE 1.00e-88
ttttcaacaggcatgtcaccaaaatatgaatgtcttttacaggcctaactgatgaagagaaaaagtacttgtattgttggaactggtgttcttacatccgtttatttattggcaggatgctcagtccttgcatggagacattccacagaagcaaagggaaatcaccctgaaaggttttagaaatggtagttttggagttttggtggcaaccaatgttgctgcacgtgggttagacatccctgaggttgatttggttatacaaagctctccaccaaaggtatgtgctttatgcttagattttattttgttttgttttttttgggtattaaaacaaattggaaattgtattatttactttcatgtcattagtatatagctatcttttgagtgctgggatgctaagggtgattttgagaatgaacctgttatcagacacccccctcagaactgacacttgagtagaagtgcagtcagcagacagaggttcaaaaggtgacttggggatatagtgtgatttttgagccaaaccttgaagatgggtggaaggactgaga

SEQ ID NO: 9949 - DNA, 510 bp, Homo sapiens
  MAP TO CHR19.3; EXPRESSED IN BONE MARROW, SIGNAL = 0.85; EST_HUMAN HIT: BE896068.1, EVALUE 0.00e+00; SWISSPROT HIT: Q02386, EVALUE 1.00e-106; NT HIT: gi4508028, EVALUE 0.00e+00
catggactcgctgatgaatgataagacttgagctccaactgaagcccttcccacactcctcacatttgtatggtttttctccggtgtgaactctttgatgggcttgaaggtatgagctccagctgaagactttcccacattcctcacatttgtatggtctctctcctgtgtggaccctctggtgggcttgaaggtaggatctctgtctgaagcgcttaccacacacatcacatcggtatggtttttctcctgtgtggactccacgatgtgccagaaaattggaggcccgacagaagcccttcccacactcctcacattgatagggtttctctccagtgtggcacctctgatgggcttgaagctgtgaacctacactgaagcccttcccacactctgcacactgatatggtttctctccagtgtgaactctctgatgcacctgaaggctggagaactgactgaaggccttaccacacctctcgcatttatagggtttctctcctgtgtgga

SEQ ID NO: 9950 - DNA, 505 bp, Homo sapiens
  MAP TO CHR16.3; EXPRESSED IN BONE MARROW, SIGNAL = 1.5; EXPRESSED IN BRAIN, SIGNAL = 1.3; EXPRESSED IN ADULT LIVER, SIGNAL = 3.6; EST_HUMAN HIT: BG341625.1, EVALUE 9.00e-90; NT HIT: gi14776423, EVALUE 9.00e-89; SWISSPROT HIT: P16901, EVALUE 8.10e-02
gagcccagagtaggcatctgaccctgccaggcgtgctcccagacaaggtgacaatggtgctgaggtgcccgagaggaatgagcctcagatactggactgtcagacatggacatgggggtaagcacagggtccctaccttgcaaggcacgagcccctgacagcctcttctctttccaggtcagccatgtcatctgagcctcccccaccaccacagccccccacccatcaagcttcagtcgggctgctggacacccctcggagccgtgagcgctcaccatcccctctgcggggcaacgtggtcccaagcccactgcccactcgccggacgaggaccttctcggcgtgagtctggagcaggctggggacgcgttctcagatggatctcttgcctgaggccagagattcactgtgtctctggccatttttgggcctatgtcccggactgccaaataggcagacctggggctgggccgtgggctgagggtgagaaactaggaaggcgcct

SEQ ID NO: 9951 - DNA, 570 bp, Homo sapiens
  MAP TO CHR11.3; EXPRESSED IN ADULT LIVER, SIGNAL = 1.6; EXPRESSED IN FETAL LIVER, SIGNAL = 0.9; EXPRESSED IN LUNG, SIGNAL = 1.4; EXPRESSED IN BONE MARROW, SIGNAL = 1.6; EXPRESSED IN HEART, SIGNAL =   2; NT HIT: gi16181828, EVALUE 0.00e+00; SWISSPROT HIT: P21519, EVALUE 4.20e+00; EST_HUMAN HIT: BF792065.1, EVALUE 0.00e+00
actaaaggctggctgctgagctcctgaacagggttgactggtggggatccttcagggccgagaccaggtggcgaacccgccgctgctgttgcagccaatagagcatctccactttgtcactcttcatcttgtccaggtagggccgccccttgaagatcactggctcgccaaagattaactctatctcctccaggagggaaaccaaagaagactccattaagttgagcttcctgtggagatggcttcggacctgattctcctccaggaagtgactggagctcaagttggtctttttgaagaagcggttgggattggaagcttgtccctcaaaccactctagtctcgccagcaatgcctcccgcagctgaatgggcttcaggggccccgctcccaggcattcaccaatgaaggcagctgcctcaggcgggctttggagctatatttaatggtcatgtccacctggtccttgtcagggacctcaagcacagaccacagttgttccagatgcttctgcaggctcagaattttgtggggttctcccaggtggggtgtcttcccagctcctagcct

SEQ ID NO: 9952 - DNA, 594 bp, Homo sapiens
  MAP TO CHR12.3; EXPRESSED IN LUNG, SIGNAL = 1.7; EXPRESSED IN BONE MARROW, SIGNAL =   1; EXPRESSED IN ADULT LIVER, SIGNAL = 1.1; EXPRESSED IN BRAIN, SIGNAL = 1.2; SWISSPROT HIT: Q9P0K8, EVALUE 3.00e-53; NT HIT: gi14765906, EVALUE 0.00e+00; EST_HUMAN HIT: BF735959.1, EVALUE 3.00e-59
cccccagtattttcgtctcctctttgtcttctctgcagaacccagaagtaccatggcttctgacctagagagtagcctcacctccatagactggctcccccagctgaccctccgagctaccattgagaagcttggaagtgcctcccaggctgggcctcccgggagcagccgcaagtgttcaccagggtcacccacagatcctaatgccaccctgagcaaagacgaggcagcagtgcaccaggacggcaagccacgatacagctatgccactctcatcacctatgccatcaactcctctccagccaagaagatgaccctcagcgagatttaccgctggatctgtgataacttcccctattacaagaatgctggcattggttggaaggtgggaatgcttctataatcttggcttaggtttaggcttcaacagcctttttagagaaaaaggttttgtttcttcttgtaacctgttcagtttactctggtttgtctcagagatgtgaaaacttaaaatctcatatgttctgccctctacttttttttcagagttgaacaacttttataaggtatattagggaaactccaagccattaa

SEQ ID NO: 9953 - DNA, 553 bp, Homo sapiens
  MAP TO CHR2.3; EXPRESSED IN BRAIN, SIGNAL = 0.68; EXPRESSED IN LUNG, SIGNAL = 1.1; EXPRESSED IN BONE MARROW, SIGNAL =   1; SWISSPROT HIT: P24823, EVALUE 3.00e-47; EST_HUMAN HIT: AL540746.1, EVALUE 4.00e-95; NT HIT: M19159.1, EVALUE 0.00e+00
ataaggcttttggttgcctgggtctgagctagtgccccctccctgctactctctgcccagccccagcccttggcctgggggtcgcacgtcaatgtccatgttggagatgagctgcgtagcgatgtcctggcacccctcctggcgggcggaggcaggcacgtcggcgtccgagtaccagttgcggttcaccgtgtgggcgtaggtgccggctggcgaggcgtgctgcactcgtgtggtggttaccactcccactgacttccctaagggtgtcagaggtcagtatatgtgaccaacgtctgtgacctggccgtgacccagcagcgggccccagctcacctgctttcttggcccgattcatcacggagatgacctcgttgccgcgtgtcgtgttgcactggttaaagcgggcggctgcactcaagccaatggtctggaagttgcccttgaccccgcacaggtaggccgtggctgtggctccactgtctggcacatgtttgtctacattgtatgtctggggacagagacactctgagctcttctctggggcagacac

SEQ ID NO: 9954 - DNA, 531 bp, Homo sapiens
  MAP TO CHR5.3; EXPRESSED IN BONE MARROW, SIGNAL = 1.1; EXPRESSED IN ADULT LIVER, SIGNAL =   1; NT HIT: gi14861873, EVALUE 0.00e+00; SWISSPROT HIT: Q9Y5E5, EVALUE 6.00e-60; EST_HUMAN HIT: BI831368.1, EVALUE 0.00e+00
cttgtcaaggacaatggcgagcctccgcgctcggccaccgccacgctgcacgtgctcctggtggatggcttctcccagccctacctgcctctccctgaggcggccccggcccaggcccaggccgactctctcaccgtctacctggtggtggcgttggcctcggtgtcgtcgctcttcctcttctcggtgctcctgttcgtggcggtgcggctgtgcaggaggagcagggcggcctcggtgggtcgctgctcggtgcccgagggcccctttccagggcatctggtggacgtaagcggcaccgggaccctgtcccagagctaccagtacgaggtgtgtctgacaggagactctgggactggtgagttcaagttcctgaagccaatatttcctaatctcttggttcaggacaccgggagggaagttaaggaaaaccccaagttcagaaatagcttggtattcagttaagtattgtatttagttcagtgaaccgcccgttagttttgtcaaacttcccactgcaatgcctttatt

SEQ ID NO: 9955 - DNA, 568 bp, Homo sapiens
  MAP TO CHR19.3; EXPRESSED IN BONE MARROW, SIGNAL = 0.7; EXPRESSED IN ADULT LIVER, SIGNAL = 0.59; EXPRESSED IN PLACENTA, SIGNAL =   1; SWISSPROT HIT: P06734, EVALUE 2.00e-27; NT HIT: gi16175358, EVALUE 6.00e-81; EST_HUMAN HIT: BG755883.1, EVALUE 9.00e-81
ttcaggtccaagttccgaaggccaatccaggagccggtgtggctggcatgcttggtcaggaagtcctgggggacaggacagggctggaggactggagacatgtgcccggggccttccagcccacttcgagaggttgggtagagtggggtgggggtccccccaccctcgccatgctgcccaccacctctgcagagccccagcccacctgctcctccgggctgtggatgctgaccagctgcccttccatgtcgtcacaggcataccgggcgtggacccactgcttggtgcccttgccgaagtagtagcacttccgttggaaattgatccacttttcagggcacgtgttgcacacaaagcctggggtggaggagaggctcgggggtggggccaatggaagtgccttgggcacccctgggcagactaggtggcagcacccctcctagggccactcctggggtcccggctaaaagcagacccaccccagggcctaacagacagcctcacgggctgtgttctctgctggagctatgatgctgaccagatccatagtagaagcacctcagccacc

SEQ ID NO: 9956 - DNA, 531 bp, Homo sapiens
  MAP TO CHR22.3; EXPRESSED IN PLACENTA, SIGNAL = 2.6; EXPRESSED IN LUNG, SIGNAL = 3.2; EXPRESSED IN HEART, SIGNAL = 3.2; EXPRESSED IN BONE MARROW, SIGNAL = 3.1; EXPRESSED IN FETAL LIVER, SIGNAL = 2.7; NT HIT: gi14778723, EVALUE 0.00e+00; SWISSPROT HIT: Q05193, EVALUE 2.20e+00; EST_HUMAN HIT: BG820332.1, EVALUE 0.00e+00
ccctgtaggcctcaagtgactcttccccctcctgctccggccccgcccctgctgagccaaacccagtaggaggctgggcctgggtttgtgccgctggggtctccatcaccgggacctggagagggaggggctgtgtagccttggaagaacttgggtcatggggaggaagcacagctgttggggaagggccaggacctcaggcccagccccaaccccagctggggtggggtcttccccacctgtctcttatgccttatgggaaggcccagccataactcgggggccatgctggagctggggaccagcttaggcctcctccataggaacccagtgactggggggtgacgcctacacccccagctatttgcactctggtgtgtggtttgactctgcttttcttccggattggccctgtggtcacagcctcagggggccaggctgggggaacctcacctggcccgtactcctgggggtttccctttgccattgggccccctgagggactgtgggggctcaagggtaatgccagag

SEQ ID NO: 9957 - DNA, 593 bp, Homo sapiens
  MAP TO CHR17.3; EXPRESSED IN ADULT LIVER, SIGNAL = 1.1; EXPRESSED IN BONE MARROW, SIGNAL = 1.1; EXPRESSED IN LUNG, SIGNAL = 1.7; EXPRESSED IN PLACENTA, SIGNAL = 3.3; EXPRESSED IN HEART, SIGNAL = 1.3; NT HIT: gi7106336, EVALUE 3.00e-58; SWISSPROT HIT: P13645, EVALUE 6.00e-23; EST_HUMAN HIT: AA339768.1, EVALUE 1.00e-95
ggcaaagccctgttattgtgatagcttatacatttgtgcatctgtgagtggctaaacactctcaggagtgctaacactcacgccatggcgtttcttacctggttcttaagttcgtcaataattgggaaatatctgctgtaatcatgatcaaggccacggcaagaaccaggtccaaatttctcataccaccccttgatcttctgctccaagtcagcgttggcctcctctagggctcgaacattctccaggtaggaggccaagcggtcgttgaggttctgcatggtcaccttctcattgccagagaggaggccgtgctcattccctgtgaaggcagcacaggaagcacttcccccgcccagacctccgccatagcctcctgcagatgaggtgcccccaaaagcacaagagaagccacttccaatgcctggcacaccgcatgtgtttccagccccaaagcctgctcccccactagagagcctcacagagccagtgcccccgcaagagccaagtctcctggaggtagaagaaaagcgcacagacatggtgtccggaggctggagcctttgtttctgcggtgatgctctgatggtgaa

SEQ ID NO: 9958 - DNA, 524 bp, Homo sapiens
  MAP TO CHR16.3; EXPRESSED IN BONE MARROW, SIGNAL = 2.5; EXPRESSED IN PLACENTA, SIGNAL = 2.5; EXPRESSED IN LUNG, SIGNAL = 1.7; EXPRESSED IN HEART, SIGNAL =   3; EXPRESSED IN BRAIN, SIGNAL =   3; NT HIT: AF145475.1, EVALUE 0.00e+00; EST_HUMAN HIT: BE763312.1, EVALUE 4.00e-27; SWISSPROT HIT: P49711, EVALUE 3.00e-08
aggtggattgaaacctgcaccccaccctaccccacccttagctagctgtagcctgttctgggtcttctcttgggggctctgttagatcttgacagaactaagagctggtctgatcctcccccgtctctgtctgcaggctgctgagcctccccttagagaacccagccttatccatttcccctgagcagagacagcgtgttcaggacacacttagcagatactagaatttttaggcttaatatggattttattaaagtaaataacttccaatctgatcttagcttttttagtggtgtgaaagaggattttgttctttttgttagaataccatggcaagacatgctgataattgtgctggcccagatggcgtagagggggaaaatggaggagaaacgaagaagagtaaacgtggaagaaaaagaaagatgcgctctaagaaagaagattcctctgacagtggtaagtgacttgttccttgatttgcttactatggcaggctttggagcccagtttccagtgtgttt

SEQ ID NO: 9959 - DNA, 579 bp, Homo sapiens
  MAP TO CHR12.3; EXPRESSED IN LUNG, SIGNAL = 4.8; EXPRESSED IN BONE MARROW, SIGNAL = 2.2; SWISSPROT HIT: Q9P0K8, EVALUE 5.00e-14; NT HIT: gi14765906, EVALUE 0.00e+00; EST_HUMAN HIT: BI907343.1, EVALUE 0.00e+00
ctgaggcttcccatctcaacccagggaaaatcccattttgtgaaaaatgcattgcttaagtcacttgcctgcttcctccccacctgcaggcttttcttctctcctgggggacatcccaccctcgaacaactactacatgtatcagcagcagcagccaccgccacctcaacagcagcagcagcagcagcagccgccacagccacctccccagcagtcccagccacagcagcagcaggcacctgcccagggcccctcagctgtagggggtgctcctccactgcacaccccaagcacagatggttgtaccccaccagggggaaagcaagctggggcggaaggctatgggcctccccctgtaatggccatgcatccacccccgctgcagcatggaggctaccaccctcatcagcaccatccccactcccaccctgcccagcagccaccacctccacagccacaggcacaaggccaggctcccatcaacaacactggctttggtgagtaaggagggtgcacagtgatctagaggagggtggggtgatgtccttgtcctaacaccggcatggaggtgcagttagt

SEQ ID NO: 9960 - DNA, 585 bp, Homo sapiens
  MAP TO CHR4.3; EXPRESSED IN FETAL LIVER, SIGNAL = 0.43; EXPRESSED IN ADULT LIVER, SIGNAL = 1.1; EXPRESSED IN BONE MARROW, SIGNAL = 1.1; EXPRESSED IN HEART, SIGNAL =   1; EXPRESSED IN PLACENTA, SIGNAL = 0.75; SWISSPROT HIT: P47869, EVALUE 4.00e-39; NT HIT: gi16159265, EVALUE 1.00e-122; EST_HUMAN HIT: BG699503.1, EVALUE 1.00e-115
gacagctagattggctggttgtttaatacatgaaaatttctcagtatataaatacatcacatcaaacctaaaaacatacctcatggtatacagcagagtcccatcatcctgaattcgaagcaacttatttggcattgtcatattatgagctactgattttttcccattgtgaaaaaaggtatctggagtccagattttgctagccattaaattgtttagtcgaaggatattcataggacctttaaattttaaacgttcatctttccatttttgtcgaaagaaaacatcaattgtatattcctgaaataaaaaatagaatttttttgaaaatagtaaatgttgtagacacaagacacggtaaaattccaaaataatattctaattaatttaaacagagagagctatattgaaaggaaaacatttttaatcagaaagattactcctttggcttatcaatacatgttgccacatacaatgggataaagtacgtctgtgtatactattagctatatattcttctgaaaagaagaagtaaattcactttggcctcttttagttgaacaaggtctcagtcaaactgctcca

SEQ ID NO: 9961 - DNA, 598 bp, Homo sapiens
  MAP TO CHR17.3; EXPRESSED IN ADULT LIVER, SIGNAL = 0.94; EXPRESSED IN LUNG, SIGNAL = 4.8; EXPRESSED IN PLACENTA, SIGNAL = 1.7; EXPRESSED IN BONE MARROW, SIGNAL = 2.5; EXPRESSED IN FETAL LIVER, SIGNAL = 1.3; EXPRESSED IN BRAIN, SIGNAL = 1.5; EST_HUMAN HIT: BE812458.1, EVALUE 1.00e-107; SWISSPROT HIT: P26006, EVALUE 7.00e-33; NT HIT: gi14773206, EVALUE 1.00e-107
attggaggctgacctcacactcccatttccctcctctcctgtgtaggtggcaggacctcctggtgggcgccccctactacttcgagaggaaagaggaagtagggggtgccatctatgtcttcatgaaccaggcgggaacctccttccctgctcacccctcactccttcttcatggccccagtggctctgcctttggtttatctgtggccagcattggtgacatcaaccaggatggatttcagggtatgagccagcactcctcccccagcacccctcctccagcacccctcctcccagcacccctactgactgagcaccagctgcacatcaggcttgacagggcccacagatgagacaggatggggccggacctggggagctcgcagcagtactagagagaggatgtgcagatgtgcagaggaagcacagaggcaagctcagtgggcctcctggaggagcttgcatgccactgtgcagccaaggctgggctgagagtgcacagtagagaactgatggggcacaacatgggtgtggaaactggcctggtgtgcccaaatctagcgggtgtagagtgttcacatcagagaggaggctggag

SEQ ID NO: 9962 - DNA, 594 bp, Homo sapiens
  MAP TO CHR11.3; EXPRESSED IN BONE MARROW, SIGNAL = 2.1; EXPRESSED IN LUNG, SIGNAL = 1.5; EXPRESSED IN HEART, SIGNAL = 1.8; EXPRESSED IN PLACENTA, SIGNAL = 1.4; EXPRESSED IN ADULT LIVER, SIGNAL = 1.7; EXPRESSED IN BRAIN, SIGNAL = 1.3; EXPRESSED IN FETAL LIVER, SIGNAL = 1.2; NT HIT: gi15314944, EVALUE 0.00e+00; EST_HUMAN HIT: AU141948.1, EVALUE 2.00e-75; SWISSPROT HIT: P51787, EVALUE 1.00e-22
acaggtttgtggacagaggcctgtgagcgtgcaggtgagaagcccctgccaaggcccgaagtctcaagacaccagtgcccagatgtcctgcccactcctcagcctgagctgcccctgtccccatgcctggaagtttccgacttaccaccccccaccacagcgcatctgcgtagctgccgaactccacgcggcctgactcgttcaccgcgtccttctcagccaggtacacaaagtacgaggagaagatgaggcccaggaagccgatgtacagggtggttatcagctcctaggccagaaaacacacagtgtcgggctccaggaaccgcaggctgggagcctcctgtgcagacgcctaaggcagcgagtcccagcgatcactgggcgtcctacgccgctccagcgcggttcacatgcacagggccggcttcaatatagcccactcctcacaactccggtaagtggcgggtgggggttacccccagaatgaggctcagccctggggtcgccctaggcccactgtctgggccggcgcgggctccactgattgcccagctctctttcctgccacgtgacagaaccaagaatggaccagga

SEQ ID NO: 9963 - DNA, 512 bp, Homo sapiens
  MAP TO CHR15.3; EXPRESSED IN HELA, SIGNAL =  35; EXPRESSED IN BONE MARROW, SIGNAL =   4; EXPRESSED IN ADULT LIVER, SIGNAL =  52; SWISSPROT HIT: P32969, EVALUE 8.00e-83; NT HIT: gi16171180, EVALUE 0.00e+00; EST_HUMAN HIT: BG612232.1, EVALUE 0.00e+00
tgtggcttgctgaatcaaagccgctgaatttgaaacaagctcaatgtcatttccttcaaggattaattcatctttctgggcttgagatactgaacaagcaacacctggtctcatccgaaccctgcggatgtatttttcacccaagaaatttcggatttcaacaagagacccattctcctggataacaacgttgatggggaagtgagcatacacagacctcatcttgtaacggaagcccagtgtaacacccttgatcatgttctgtacatgactacaaatagtccgaacggtagccagttcctttctgttaccccaccatttgtcaacccggagcctcttttttttctttccaagaaggctgagttctacattgatgtgattgaagtccctccgcagggttcctctggggcccttcacgataactgtgcgtcccttcagagtaatgtcgacattttctggaatgtcgacagtctgattgctgagaatagtcttcattctcgcagtagacgcag

SEQ ID NO: 9964 - DNA, 599 bp, Homo sapiens
  MAP TO CHR19.3; EXPRESSED IN ADULT LIVER, SIGNAL = 1.7; EXPRESSED IN BRAIN, SIGNAL = 7.8; EXPRESSED IN FETAL LIVER, SIGNAL = 1.3; EXPRESSED IN BONE MARROW, SIGNAL = 2.1; EXPRESSED IN LUNG, SIGNAL = 0.97; SWISSPROT HIT: Q14576, EVALUE 2.00e-38; NT HIT: gi15304194, EVALUE 1.00e-126; EST_HUMAN HIT: BI117426.1, EVALUE 1.00e-126
gcagctcttctcccagtacggccgcatcatcacgtcccgcatcctggtggaccaggtcacaggtcaggcagtcagggagggtgcacctggcgggggcgctgggcaaaggcagtcaggtgggaccaacgtggggaaaccgaccaagatgccagggcatgaagcagggaagggagaagtggggttacacaggaggggacagggtcgtcgtgatggacatccctgccccctggcaggtgtctctcggggtgtgggattcatccgctttgacaagaggattgaggccgaagaggctatcaaaggactgaatgggcagaagccgctgggcgcagctgagcccatcacagtcaagttcgcgaacaacccaagtcagaagacggggcaggcgctgctcacccacctctaccagtcatccgcccggcgctacgcaggccccctacaccatcagacccagcgtttccggtgagccccctgccagccagatggccccaggccgggtgcccccaagcttgcaaccctccctgaaccccattcctgccgaagggagggatgccgggagggtgcgcacacatgggagccaaggagcctatctgtcaggtgcc

SEQ ID NO: 9965 - DNA, 599 bp, Homo sapiens
  MAP TO CHR9.3; EXPRESSED IN LUNG, SIGNAL = 0.89; EXPRESSED IN HEART, SIGNAL = 0.91; EXPRESSED IN PLACENTA, SIGNAL = 0.9; EXPRESSED IN BONE MARROW, SIGNAL = 1.1; EXPRESSED IN ADULT LIVER, SIGNAL = 0.91; EXPRESSED IN BRAIN, SIGNAL = 1.6; EST_HUMAN HIT: BG820937.1, EVALUE 1.00e-33; SWISSPROT HIT: Q05152, EVALUE 2.00e-23; NT HIT: gi16179646, EVALUE 1.00e-111
tccactgcaagactccacagagcgtccacctacctcgttcttctccaggctgcattcagacatcaccttgtccccctgctcctggaaggtgatgatgatcaaagccacaaagatgttgacgaagaagaagggaaagaccacaaagtagaccacgtagaagatggacagctccatgcggtacccagggcttggaccctgctcctcataggtggcatccacggagtgtttcagcaccctgggcaaagaggagagcaagtgtcaggggaacccccaaaggagacagccctaagaactcaagacctgcaccacaagggtgggtctgcttccatgcctgagcccagggatagagggaggaagggaggccgagctcaggggctgcctgccccagctacggagagcaggatgagcactcacatgggccagccttctcccgtggacactgtgaacagcgtcagcagagcccagagcacattgtcgtagtgaaagtcgtatttcttccactgcctgggctgagcttccacttcctccttctcataatccaaatactgacccctaggaatgagaacatgggaggttagagggcaaagacaaaagatcca

SEQ ID NO: 9966 - DNA, 506 bp, Homo sapiens
  MAP TO CHR14.3; EXPRESSED IN FETAL LIVER, SIGNAL = 0.81; EXPRESSED IN BRAIN, SIGNAL = 0.87; EXPRESSED IN PLACENTA, SIGNAL = 1.2; EXPRESSED IN LUNG, SIGNAL = 1.2; EXPRESSED IN HEART, SIGNAL = 0.8; EXPRESSED IN BONE MARROW, SIGNAL = 1.2; NT HIT: AF158644.1, EVALUE 0.00e+00; EST_HUMAN HIT: AA758110.1, EVALUE 0.00e+00; SWISSPROT HIT: Q9UKJ8, EVALUE 2.00e-83
atcaatggtgtcacctgctggggtattgactatcatttaaggatgaacatatctgacattggtgaagtgaaagatggtactgtgtgtggcccaggaaagatctgcatccataagaagtgtgtcagtctgtctgtcttgtcacatgtctgccttcctgagacctgcaatatgaaggggatctgcaataacaaacatcactgccactgtggctatgggtggtccccaccctactgccagcacagaggctatgggggcagtattgacagtggcccagcatctgcaaagagaggagtttttttgccgctgattgtgattccttctttgtctgttttgactttcctgtttactgtcgggcttcttatgtatctacgacaatgttctggtcccaaagaaactaaggctcattcatcaggttaagaaaatgtctctaacttaatattccatgcattagtacactttagtctcttggcagtagaaacattagtacatccctgaaactgagcaca

SEQ ID NO: 9967 - DNA, 535 bp, Homo sapiens
  MAP TO CHR11.3; EXPRESSED IN BONE MARROW, SIGNAL = 0.9; SWISSPROT HIT: Q13315, EVALUE 5.00e-44; NT HIT: U82828.1, EVALUE 0.00e+00; EST_HUMAN HIT: BF330213.1, EVALUE 1.00e-101
ctttaatgctgatggtattaaaacagtttttaagaactattttataaaattttacttggaaaagttatatataacctgtattttaaatttttctatttttagatcttgttataaggttttgattccacatctggtgattagaagtcattttgatgaggtgaagtccattgctaatcagattcaagaggactggaaaagtcttctaacagactgctttccaaagattcttgtaaatattcttccttattttgcctatgagggtaccagagacagtgggatggcacagcaaagagagactgctaccaaggtctatgatatgcttaaaagtgaaaacttattgggaaaacaggtatggcttcaatttttatgtacttttcattccctgaatgatatgagatataacctttaagttttaaggctatttattcgatttattcgtatttatatattgaaacttagcttgtggtaatcattatctagcatagccaacccatgaatttttttggttatgtcgtgttgtctccctctgattggc

SEQ ID NO: 9968 - DNA, 583 bp, Homo sapiens
  MAP TO CHR6.3; EXPRESSED IN PLACENTA, SIGNAL = 0.51; EXPRESSED IN BONE MARROW, SIGNAL = 0.71; EXPRESSED IN BRAIN, SIGNAL = 0.65; SWISSPROT HIT: P04201, EVALUE 5.00e-50; NT HIT: gi6006022, EVALUE 0.00e+00; EST_HUMAN HIT: AU131123.1, EVALUE 2.10e-01
atcttggtcgtgaagatccggaagaacacgtgggcttcccattcctccaagctttacatagtcatcatggtcaccatcattatattcctcatcttcgctatgcccatgagactcctttacctgctgtactatgagtattggtcgacctttgggaacctacaccacatttccctgctcttctccacaatcaacagtagcgccaaccctttcatttacttctttgtgggaagcagtaagaagaagagattcaaggagtccttaaaagttgttctgaccagggctttcaaagatgaaatgcaacctcggcgccagaaagacaattgtaatacggtcacagttgagactgtcgtctaagaactgtgagggaagttgtggataaaaatggtggaacacaggtcatttttagtttgtgcttggaatatgacttaagtatctcctaaatgtgatacagaagaacatctcatcccatatgcatgagatactaattaatgatgaaattgaactcttgtactgtatcttctggaaatgacctgtcatttctgtacttgacaaagactctatttctttcagctcttttggcagc

SEQ ID NO: 9969 - DNA, 506 bp, Homo sapiens
  MAP TO CHR2.3; EXPRESSED IN BONE MARROW, SIGNAL = 0.71; EXPRESSED IN BRAIN, SIGNAL = 0.65; EST_HUMAN HIT: BG739787.1, EVALUE 0.00e+00; SWISSPROT HIT: P23760, EVALUE 3.00e-10; NT HIT: AJ007392.1, EVALUE 0.00e+00
aaatcgagtaggtcctcgcccccgactggtgcttcttggggtgtggggtgcccagggaatgggcttcctggaagcaccaaaggagcctgcggagcctggggatggggtgaggcagccggtcccaggccctgggatccaggcggcgcgctgaggccctcccttaccttccagcgggaacccgctacgcgggtagttctgccccgggcccggccgcatcatcctgggcacagcgccggccagcgtggtcatcctgggggcagcttcgctcggaaattatatccaggtgaaggcgaaacggaaaggcgagtgcggcgcggatgaccctcgggaactatccggagcgtggagagcccctccccaaaacggctggagagagagggagggacgcggggaggggggctgtcggttcctagtccagaggccggagctggaacccgggaaaggggaggacggggaggccccggagtccaggatcccgagcccagggcggaaaagtttggtacgag

SEQ ID NO: 9970 - DNA, 573 bp, Homo sapiens
  MAP TO CHRX.3; EXPRESSED IN ADULT LIVER, SIGNAL = 0.79; EXPRESSED IN BONE MARROW, SIGNAL = 0.79; SWISSPROT HIT: P22304, EVALUE 6.00e-31; NT HIT: L13328.1, EVALUE 0.00e+00; EST_HUMAN HIT: AI921748.1, EVALUE 1.00e-98
gaaccgccacagagtcctacgttaggtatatgttgctagtagtttgttaagatatttgagtttgggaatttaattattttttcttttttaaaggtttcctcatgaggacaaatacctgattttgaataaagcagcattcagttgaaataaccctttctgtggtaattccaagtgaatatttttcttctaggtgatgagtttctacttcctctggtttttacaacaggaaatgaaatggtatctaaaataaacaagctgtggtatgatgattattcattttctgtcattctgtgctttttatgaactagggtgggctctaggtgaacatggagaatgggccaaatacagcaattttgatgttgctacccatgttcccctgatattctatgttcctggaaggacggcttcacttccggaggcaggcgagaagcttttcccttacctcgacccttttgattccgcctcacagttgatggagccaggtataaaatatgctgaaatgatattgcttgacagtaagatcacctttagtttatatgtgaaccactttattgaatcataggctttgggggt

SEQ ID NO: 9971 - DNA, 586 bp, Homo sapiens
  MAP TO CHR14.3; EXPRESSED IN LUNG, SIGNAL = 1.8; EXPRESSED IN HEART, SIGNAL = 1.5; EXPRESSED IN PLACENTA, SIGNAL = 1.3; EXPRESSED IN BONE MARROW, SIGNAL = 1.4; EXPRESSED IN ADULT LIVER, SIGNAL = 0.87; EXPRESSED IN BRAIN, SIGNAL = 1.7; SWISSPROT HIT: Q9UL15, EVALUE 2.00e-09; NT HIT: gi13630639, EVALUE 0.00e+00; EST_HUMAN HIT: BG167123.1, EVALUE 0.00e+00
agctgggtaggaccaatcaggccttataagtgaaaaaaaagccttctatcgagcataatgaaacagaacatgtactgcttgtgtttgaaccttactcttatttaaccaaaaatttcccctttctcataattttcctagtattatgtaaggttatgcctagttctagattctgaaagacctgcattttaatgcttgcacaacccatttaaaatctacaaaagctgcctctattttgttttctgattaaaaacgcaaaaaaaaggacaaaccaaacaaaccacaccacatcatacagataatgatccgaatggaaaagttaacgtgctgtaatgatatttgtcttgcaacatcaaaagcagcagatactgaatagaatttgcttcaatcataaatactgagactgaaatatgcacgtataaatcaatgaactgaaagctctctatacatagaagcacatatgaagtgcaaaacagtatcaaaagtgagatctctggtatttcagtactcccattcatcagatttcaggtcgagatagctgagaatattctgcgcaagcctcacagcttgtttcctggcagccttacac

SEQ ID NO: 9972 - DNA, 555 bp, Homo sapiens
  MAP TO CHR17.3; EXPRESSED IN ADULT LIVER, SIGNAL = 0.66; EXPRESSED IN FETAL LIVER, SIGNAL = 1.2; EXPRESSED IN LUNG, SIGNAL = 0.52; EXPRESSED IN BONE MARROW, SIGNAL = 1.2; EST_HUMAN HIT: AA994786.1, EVALUE 1.00e-122; SWISSPROT HIT: O15392, EVALUE 4.00e-19; NT HIT: U75285.1, EVALUE 0.00e+00
  unsure 320
gaagcaatgagggtggaaagcaaccctcccatactaagtgtctttgcaactcaaatcttttgacaactcagttcaaaacaaagcccatcgaggctggccagagaagacttacatggggtcgtcatctggctcccagccttccagctccttgaagcagaagaaacactgggccaagtctggctcgttctcagtggggcagtggatgaagccagcctcggccatctgcaagggacagcacagctcgtgagtggacgtggcagcccggaaccccgaggcccagccacaaaggcctcgatggggacaaagcagggaggggaggnccggcctggacccaaggggcccagccacagtggcctcgctggggacaggacggggaggggagggcggcttgtacccccgaggcccagtcacagtggcctcgctagggacagggcaaggcgggcgtgggggaccccaggaggccgggcagtctcacccgctccggggtgcaggcgcagccctccaagaagggccagttcttgaatgtagagatgcggtggtccttgagaaagggct

SEQ ID NO: 9973 - DNA, 572 bp, Homo sapiens
  MAP TO CHR3.3; EXPRESSED IN FETAL LIVER, SIGNAL = 0.81; EXPRESSED IN BONE MARROW, SIGNAL = 1.3; EXPRESSED IN LUNG, SIGNAL = 1.1; EXPRESSED IN HEART, SIGNAL = 1.2; EXPRESSED IN PLACENTA, SIGNAL = 0.73; SWISSPROT HIT: P41180, EVALUE 4.00e-32; NT HIT: gi14721383, EVALUE 0.00e+00; EST_HUMAN HIT: AA846198.1, EVALUE 0.00e+00
agccaccttagttgcagtggtcatcacaagatgggattgaggtttagctgaatccattttgtctttcttttcttttagaaggcatcacaggaggcctctgcatgatgtggcttccaaagactcaaggaccacccacattacaagtctggattgaggaaggcagaaatggagattcaaacaccacgtcttctattattttattaatcaatctgtagacatgtgtccccactgcagggagtgaactgctccaagggagaaacttctgggagcctccaaactcctagctgtctcatcccttgccctggagagacggcagaaccatggcattttatagctgctgctgggtcctcttggcactcacctggcacacctctgcctacgggccagaccagcgagcccaaaagaagggggacattatccttggggggctctttcctattcattttggagtagcagctaaagatcaagatctcaaatcaaggccggagtctgtggaatgtatcaggtaagaagaggggcctaatctgccaatctcttctcttctgagtggttggagaaaagctgcaccaaac

SEQ ID NO: 9974 - DNA, 510 bp, Homo sapiens
  MAP TO CHR12.3; EXPRESSED IN BONE MARROW, SIGNAL = 0.92; EXPRESSED IN PLACENTA, SIGNAL = 0.71; EXPRESSED IN ADULT LIVER, SIGNAL = 0.91; SWISSPROT HIT: O35167, EVALUE 5.50e-01; NT HIT: gi7662267, EVALUE 1.00e-124; EST_HUMAN HIT: H51781.1, EVALUE 0.00e+00
cacccacaggttgggattacctgaccttctgtcctcgacattttccttggtgacatcctaccaggaaaggatatgtcccccttcaactgctgtgggggttgggatgcagaggcatgaccccctttcttcccctgccccttcctgacatgagatgctctatgatagaggtagctggggcggggagtgaaacagaatgtgggttttcggggaggaagtgttggggtcacatgctgcttctcctgctttcttacataggtgcttcagcgaagagtcctgcgtctccatccctgaagtggagggctacgtggtcgtccttcagcctgacgccccccagatcctgctgagtggcactgctcattttgcccgcccagctgtggactttgagggaaccaacggcgtccctttgttccctgatcttcaaatcacctgctccatttctcaccaggtggaggccaaaaaggatgagagttggcagggcacaggtaaggacgacttcggggagtaacacca

SEQ ID NO: 9975 - DNA, 504 bp, Homo sapiens
  MAP TO CHR11.3; EXPRESSED IN PLACENTA, SIGNAL = 0.92; EXPRESSED IN ADULT LIVER, SIGNAL = 1.5; EXPRESSED IN BONE MARROW, SIGNAL = 1.3; EXPRESSED IN HEART, SIGNAL = 1.3; SWISSPROT HIT: P46821, EVALUE 6.20e-02; NT HIT: gi15312056, EVALUE 1.00e-123; EST_HUMAN HIT: N90813.1, EVALUE 1.00e-123
cgaatgccctaatgtccttgggaacaccttatgcactgtgctccacctgagccaacctctgtcattaccgtcattccttaattaaccatatcttttctctctaaattccttcccacgccccacctttttgtgtttctgtatttgcggtctgtctctccgtacaggtggaaaaacctagtgttcagagttccaaaccaaaaaagacctcagcgagccataagcccacgaggaaggccaaagacaagcaggcggtgtcaggccaggctgccaagaaaaagagcgcggagggcccgagtaccaccaagccagacgacaaggagcaaagcaaagagatgaacaataaactggctgaggcgaaagagtaaatttccctgcactttccttttactcttctctctctctccctccccccaactttttttttttaaaccaacaaaccaaaaaaggccacaaaattaattagaggcttctcatctgccttggtcctgagtgttccaggagctc

SEQ ID NO: 9976 - DNA, 510 bp, Homo sapiens
  MAP TO CHRX.3; EXPRESSED IN BONE MARROW, SIGNAL = 1.1; EXPRESSED IN ADULT LIVER, SIGNAL = 1.6; SWISSPROT HIT: O00571, EVALUE 3.00e-17; NT HIT: gi14764082, EVALUE 4.00e-60; EST_HUMAN HIT: AL045294.1, EVALUE 6.00e-60
aagaggcccttcaccagttccgctcaggaaaaagcccaattttagtggctacagcagtatgtataaacatctttcttttattcaaattgagcatgttcaagtatttgttttcttttaagtgggccatatctcataaaagttattttccaggtagcagcaagaggactggacatttcaaatgtgaaacatgttatcaattttgacttgccaagtgatattgaagaatatgtacatcgtattggtcgtacgggacgtgtaggaaaccttggtaagtatttgattacttgatggtttcattgttttttgctgtgatgtgtgcaggaaagaacttgctaggatctaaaatacatttttaacaatgaaagtgacaaagattttgctcaaagcacttgtttaaatattacgtggtaatattttaaatatttctacgtaggaaagtaagaatagtagcaagttactttatggaagacctttgtttatatacttttttgggaactcttttaggcctgg

SEQ ID NO: 9977 - DNA, 539 bp, Homo sapiens
  MAP TO CHR21.3; EXPRESSED IN BONE MARROW, SIGNAL = 1.1; EXPRESSED IN PLACENTA, SIGNAL = 0.73; EXPRESSED IN LUNG, SIGNAL = 1.4; EXPRESSED IN HEART, SIGNAL = 1.4; EST_HUMAN HIT: AW471454.1, EVALUE 0.00e+00; SWISSPROT HIT: O95500, EVALUE 3.00e-07; NT HIT: gi14780359, EVALUE 0.00e+00
caaccccactgaccaaactcccaagtcactttatattaaacttgttatcaaatcacccacataaatatatataataaatacaaaaacagacaggattttttttttcagtctttggtatagagagctttctcctcctcttatttccccctctgtccctgtgctctaaagacatttcctcgcattcacattatttccttggatacaaaaattgcccagaagtaaactttgtgctggaacccctgcctccattgacagtcccgccggggacccagcccacagcagcccaggggagaagcaggctgtggggactcacacgtagtcgttcagcctgtacccgctgtgcgtggccgaggtcactgagggggcccgattgtctttgtaggcagctggtggctggtaggcaggtgcggtgtttgcagtggtcgtggtggccctgggcggggcctggtagggcctgtagggtgcctcgtcctggcaggacaggcaaagcagggtgccaccaatgagcgagagggacgaggagatgaagcccaggtaca

SEQ ID NO: 9978 - DNA, 585 bp, Homo sapiens
  MAP TO CHR20.3; EXPRESSED IN LUNG, SIGNAL = 2.3; EXPRESSED IN HEART, SIGNAL = 1.8; EXPRESSED IN BONE MARROW, SIGNAL = 1.2; EXPRESSED IN FETAL LIVER, SIGNAL = 1.7; EXPRESSED IN ADULT LIVER, SIGNAL =   2; EXPRESSED IN BRAIN, SIGNAL = 1.8; SWISSPROT HIT: Q05885, EVALUE 2.00e-06; NT HIT: gi7705822, EVALUE 1.00e-78; EST_HUMAN HIT: AV655145.1, EVALUE 6.00e-79
cagccactcttgaagctgactcttacaatgttagtcgactgagagaagcaaaagacaaaagaatatatgattccatgtatataaacttcataaacaggagaaactgtaataggtggtgaatttgtagaacaaatgccttgagtttatcttttaagaaaacgtgttgcttttgaaatactagcatgcaaacataaagtcatgttcttacactgcaaagtaattgtcataaatcctaagtaatacaaatttctattaccatgtaatcagctacaaggtcctattactaccattctgagtagtagtcaaagcaaggtaaaaacacgttttaaaaaaaatatgtatctattactttctagggtttctcacattctaacattttccttttttgtttttcttttaaagaaagggtggattttttgtggatctctttgtaagagtatctaaccaagttgcagttaacatgtacaagcagttgggctacagtgtatataggacggtcatagagtactattcggccagcaacggggagcctgatgaggacgcttatggtaagctcccttccatggcagtatccccaagaagtcg

SEQ ID NO: 9979 - DNA, 586 bp, Homo sapiens
  MAP TO CHR18.3; EXPRESSED IN HEART, SIGNAL = 1.1; EXPRESSED IN BONE MARROW, SIGNAL = 1.4; EXPRESSED IN ADULT LIVER, SIGNAL = 1.4; SWISSPROT HIT: P02686, EVALUE 9.00e-30; NT HIT: gi14763914, EVALUE 0.00e+00; EST_HUMAN HIT: BI711680.1, EVALUE 0.00e+00
tcagtcatcaagtccgcaagcacacaccaccagagaccctgagaatgtggctctctttctgcaacgcccatgtccaggcacccttagagatccagaattcagcatgtccttacattcctgagccacaccccggccaccatcccttgtgaggaaaagagggggtgagttaaacgaaaacgtcctaagcagccactcaggcccacactcttgggctcatatgcattctccagcacggaacgagaccttagacagcaagaggctacgtgccagttcttcctctaatggctgagttcacctactgatttctcctttgctttttccatttaaactaaaactcctctactcctcagagctcaccttgccagagccccgcttgggcgcacccctgtcaccgccaaagaagcgcccgatggagtcaaggatgcccgtgtctctgtgccttgggaggaagccatgcctggcatggtccatggtacttgctgtggccaggtacttggatccgtgcctctgggagggtctcttctgtgacgccatcacatccaggctctcggaggtggctgcactgtcttcttggatggtctggagc

SEQ ID NO: 9980 - DNA, 559 bp, Homo sapiens
  MAP TO CHR3.3; EXPRESSED IN LUNG, SIGNAL = 1.4; EXPRESSED IN HEART, SIGNAL = 0.94; EXPRESSED IN PLACENTA, SIGNAL = 1.4; EXPRESSED IN ADULT LIVER, SIGNAL =   1; EXPRESSED IN BONE MARROW, SIGNAL = 1.7; SWISSPROT HIT: P49117, EVALUE 8.00e-22; NT HIT: gi14731329, EVALUE 2.00e-77; EST_HUMAN HIT: BF981401.1, EVALUE 8.00e-75
taaatcaggcatcctcaggcctgtccagaggtgtgactgagcagctccagaaggggcagaattaggcaacacaacgctggaggctatggcagatgggtgggaagccacaacagtgcctgctgtgggacacgtctgtgcctcctccatcagctgcaaaggctgattgcagtgagaacaagggactgaccttgctccatctttgtctgccacaaacgtgggagtagctatcaggggacttctcaggtctttccggatatagattttctcagttgaagcagcacaattgcttggtttctcccgttgcacatcgaagggcttccgttcactctgcacagcttaaatcacaacataaatatttgtgtttagagaaacaattccaatcaataaaaaccacaagggaaaaccccaaatccattactgcagggaggatgactctggtgctaggttcatctagctcagctttcacagtggacttttcggccagagagaaggaataaagccaaaccatgccatgtcaaatctagaggcataaaaaagacctcacgatgggtggtattcc

SEQ ID NO: 9981 - DNA, 551 bp, Homo sapiens
  MAP TO CHR18.3; EXPRESSED IN BONE MARROW, SIGNAL = 1.2; EXPRESSED IN LUNG, SIGNAL = 0.91; EXPRESSED IN ADULT LIVER, SIGNAL = 1.1; EXPRESSED IN BRAIN, SIGNAL = 1.3; SWISSPROT HIT: Q60722, EVALUE 4.60e-01; NT HIT: gi16178137, EVALUE 0.00e+00; EST_HUMAN HIT: BE744339.1, EVALUE 0.00e+00
cttgagcctgaaaaactggcagcgtgtgcaccatttctaaagtggatgagagagaaaacggtgcgatgtctgtcttgtaagtgcttggtctctgaggaagagcttatacaccacttgctgatgcatggcttggggtgcttgttctgtccatgcaccttccatgatatcaaaggtctttcagagcacagcaggaataggcacctggggaagaagaagttgcctatggattatagcaacagaggttttcaattagatgtcgatgccaatggcaacctgctctttccccaccttgatttcatcaccatattgccaaaggagaagcttggggagcgggaagtctacttggcaatcctggctgggatacactccaagtcactggtgcctgtgtatgtgaaggtgaggcctcaggctgagggcacccccgggagcaccggcaagcgagtgtccacctgccccttttgctttggcccctttgtgacaactgaggcctatgagctgcatttgaaggagaggcaccacatcatgcccacagtccacacggtcctgaagtc

SEQ ID NO: 9982 - DNA, 590 bp, Homo sapiens
  MAP TO CHR6.3; EXPRESSED IN BRAIN, SIGNAL =   3; EXPRESSED IN FETAL LIVER, SIGNAL = 1.5; EXPRESSED IN BONE MARROW, SIGNAL = 1.6; EXPRESSED IN HELA, SIGNAL = 3.1; NT HIT: M88006.1, EVALUE 0.00e+00; EST_HUMAN HIT: BG337177.1, EVALUE 6.00e-82; SWISSPROT HIT: P50243, EVALUE 2.00e-39
tatggttcctcccaccagaggcctgtcaatagcaagacaggaggaacccatcagtttggctagacagaaaacaaggactgacacaggtctaatgaaacaaagcttctcagctaccagtaacctcaaacaatattacttctggatatctgagtggctggtatatgtgctatctcagaatacatcttaggcctcactgtctcatttcctttaagattttaaaaatcaaataacctgattaataataaaatataaaattacctgattaacaaacaaggtggtcacaaattttcctggcttgaagacttctacaactttcctgatcaggtcatcataggaggtctgacttaagtttgtttcaaagctaacataagaaaattctggttctggagtgatgtgaatagtccaataagttccctgagagaaaaagttcacagtgttaagaatggaaagactattcacatttaaataattattgaagcaatatataactactcacatccgatttcattccattcatcgaatacccacaaggattgaacattgtggcatcaatgacagaacctggtatcaggtcacgaattccactctcc

SEQ ID NO: 9983 - DNA, 554 bp, Homo sapiens
  MAP TO CHR11.3; EXPRESSED IN ADULT LIVER, SIGNAL = 0.58; EXPRESSED IN PLACENTA, SIGNAL = 0.48; EXPRESSED IN LUNG, SIGNAL = 0.94; EXPRESSED IN BONE MARROW, SIGNAL = 0.7; EXPRESSED IN FETAL LIVER, SIGNAL = 0.98; SWISSPROT HIT: P32780, EVALUE 4.00e-25; NT HIT: gi4885364, EVALUE 4.00e-91; EST_HUMAN HIT: AI692318.1, EVALUE 0.00e+00
caaacccatgtcctcaaagggtttaatctttcctttacacctacctccatttatcaccacttcatttgttcctccaaaaatgtggggtattttgctcttaattactgaaaagtgaactgaaggacctctgctgctcaaacatcacaaaataaaagttgtgtgtttcaatgttttgtgttgccaaaatctttttaaaatgtacctacatggtgttttattctagaagttcagttatattcagtatattctgctttacagaatgctgcaagaagatcctgttttgtttcagctttataaagaccttgttgtgagtcaagtgatcagtgctgaggaattctgggccaatcgtttaaatgtgaatgcaacagatagttcttccacatccaatcataagcaggatgttggcatttctgctgcatttctggtatgtgagccttctagatttctgaagaaaataaaaattcaaaccccaatatgtgtcttaagaccattattccttttgtaaaacttagcatttccttaaaggaaagtaatggaaaattgagtatccatgg

SEQ ID NO: 9984 - DNA, 523 bp, Homo sapiens
  MAP TO CHR2.3; EXPRESSED IN BRAIN, SIGNAL = 0.7; EXPRESSED IN BONE MARROW, SIGNAL = 0.83; SWISSPROT HIT: Q02790, EVALUE 3.70e+00; NT HIT: gi14732049, EVALUE 1.00e-69; EST_HUMAN HIT: BF210667.1, EVALUE 4.00e-70
aaaagcagtgatcagagcccatgctagctagacctaaaaagtaatagttgtaacacagatgtatttaaactgtgataaaaaaattagactatacacatgaaattggtttgaattacctcggctttagagagctgcctgtcattgtccatgtctatttgtttaaatgtctcaatgctccgtggtcctttggtcacagcataaagttcaatctcaaaaatcaatgtagcatccggtggaatcttgccttctgctaagggtataaattttaacagtttaacttatgtaaagatatagttcaaatatctattcatgaactgccataaccatattatattatttcatgttgataagaattgctatctgaatactcacaatttttaattttttctcatcttttataacttttttcggcttttcaatagttttcttttttgtttttttttctcttttttttataaatacttttttaggaatattttttccatatgtttccaaaccaagtcaattcaaaggacctatggga

SEQ ID NO: 9985 - DNA, 504 bp, Homo sapiens
  MAP TO CHR1.3; EXPRESSED IN BRAIN, SIGNAL = 2.9; EXPRESSED IN FETAL LIVER, SIGNAL = 1.6; EXPRESSED IN HEART, SIGNAL = 1.6; EXPRESSED IN BONE MARROW, SIGNAL = 1.9; EXPRESSED IN HELA, SIGNAL = 3.1; SWISSPROT HIT: O43865, EVALUE 2.00e-17; NT HIT: gi14745876, EVALUE 4.00e-60; EST_HUMAN HIT: AA349689.1, EVALUE 6.00e-60
agtgtggagggatgacaaggaaataatcatgttttctaatatccttgggcaataaatgagactgggaagggcagcatggaacttgaagagaattaggcagattttgccacaaattatgttgtgccagctaacttggtttttgtttgtttttgtgacctcttctctctttaggctgtatcagctctccaaagctgggaagctctgtgttccggccatgaacgtcaatgattctgttaccaaacagaagtttgataacttgtactgctgccgagaatccattttggatgggtaggttgaatgtatatatattcaaacttctaggggctctggtcttcctttggctttaaaagtttattagagggaccatttcatactgagctcaaccagcttccaattgatattctcatgggcattggcccacacttttaactttgtgaagagggactgagtttgagctattaacgtttgagttgagcccttgtctgtttccacagcctgaagagg

SEQ ID NO: 9986 - DNA, 587 bp, Homo sapiens
  MAP TO CHR19.3; EXPRESSED IN ADULT LIVER, SIGNAL = 2.2; EXPRESSED IN BRAIN, SIGNAL = 2.5; EXPRESSED IN BONE MARROW, SIGNAL = 1.9; EXPRESSED IN HELA, SIGNAL = 8.3; EXPRESSED IN HEART, SIGNAL = 2.2; EST_HUMAN HIT: BI759265.1, EVALUE 0.00e+00; NT HIT: gi14760348, EVALUE 0.00e+00; SWISSPROT HIT: P33946, EVALUE 2.00e-45
ttgctggctacatggtcttgggcgagtatcttaccttctctggtgtcagtttcctcatctgtagaataagtgtgctaatcataggatctcctcgccgggccatggtgatgattaaatcagaggtaccagtaactcgggcagaactgtgtctggcacttggcagcacctggatcaccttccttctctccaccttcgcggcacctgtaactgcaatgttgtcctctgccttttctcccgccctgtcccctcccacctcatcatgtccccggcctctctgcagatcctctggaccttctccatctacctggagtcagtggccatcttgccgcagctgttcatggtgagcaagaccggcgaggcggagaccatcaccagccactacttgtttgcgctaggcgtttaccgcacgctctatctcttcaactggatctggcgctaccatttcgagggcttcttcgacctcatcgccattgtggcaggcctggtccagacagtcctctactgcgatttcttctacctctatatcaccaaaggtagctggaatgtgggacggctggaagggaacctcctatttctgcagctcctgc

SEQ ID NO: 9987 - DNA, 514 bp, Homo sapiens
  MAP TO CHR17.3; EXPRESSED IN BONE MARROW, SIGNAL = 0.98; EXPRESSED IN LUNG, SIGNAL = 2.4; EXPRESSED IN HEART, SIGNAL = 0.63; EXPRESSED IN ADULT LIVER, SIGNAL = 0.57; EXPRESSED IN BRAIN, SIGNAL = 0.84; NT HIT: M69201.1, EVALUE 0.00e+00; SWISSPROT HIT: P13236, EVALUE 8.00e-07; EST_HUMAN HIT: AV706059.1, EVALUE 0.00e+00
caactctctccccagtctcggtcactgcctttggctgtaccacttcccttttcttctcgcctgcacctccctcatctttcctctatgatgacatcgccctggggaagagaagctgagaggaactcctcactcagctagcttcaggagcatgacgtcatctctaccatggaaattccactcactctcctgtgcccccacatttgtcctaggcctcagagtccctataaagagagattcccaactcagtatcagcacaggacacagctgggttctgaagcttctgagttctgcagcctcacctctgagaaaacctcttttccaccaataccatgaagctctgcgtgactgtcctgtctctcctcatgctagtagctgccttctgctctccagcgctctcagcaccaagtaagtctacttttgcagctgctatttcaagtcaaggtgtaggcagagtccttttttctagtcatggctggcaaacagtgggatctggggatgggacaaaaggcagcta

SEQ ID NO: 9988 - DNA, 600 bp, Homo sapiens
  MAP TO CHR6.3; EXPRESSED IN BRAIN, SIGNAL = 1.2; EXPRESSED IN BONE MARROW, SIGNAL =   1; EXPRESSED IN LUNG, SIGNAL = 1.2; NT HIT: gi14759490, EVALUE 1.00e-116; SWISSPROT HIT: P48147, EVALUE 3.00e-38; EST_HUMAN HIT: BG333596.1, EVALUE 1.00e-116
taacctgcagctgaccacagatacatgttagaactcagccaaggccagaagaactacctggccaacccataggctcatagcaaaaacaaatgtttattattctaagctactacattttggtggggtctattacacagcaaagccaactgatacaacatctttgaggaaacatggttctggcccacacaacctctatgtagggttcagcatctcttttcagtcacttgaagtcacacttcattttgtgaaaaatgtgcttcatctgaagtcttcactcaccatcactttttccatcctgttgagggtatgagttgtagaacattcccttcccatcatgggtccaggccatacagctgaacttgactctttcaagcacatctggaagctctttggcaccatcaactttcatgaacttgattgtcacccagtctgagccactggcactcagaccataggcaaaatattcaccatcttcgctgaacgcataacctatgggacacaggagaaatcatccagtgacaaacacggaacacaactccacggtcctttatgccatctaacaaagctctctttcataacacggaggtagaatgtggcaat

SEQ ID NO: 9989 - DNA, 528 bp, Homo sapiens
  MAP TO CHRX.3; EXPRESSED IN ADULT LIVER, SIGNAL = 4.8; EXPRESSED IN BRAIN, SIGNAL = 7.9; EXPRESSED IN HELA, SIGNAL = 4.8; EXPRESSED IN BONE MARROW, SIGNAL = 3.8; EXPRESSED IN LUNG, SIGNAL = 7.9; EXPRESSED IN PLACENTA, SIGNAL = 4.1; NT HIT: gi13629957, EVALUE 0.00e+00; SWISSPROT HIT: Q13495, EVALUE 3.00e-69; EST_HUMAN HIT: AW371805.1, EVALUE 3.00e-99
tcaaaacccctcaaggacacctgatgtctgctctgcctgccagcaaccctgggccgtccccaccctatcgcccagagaagctctctagcccaggcttgccacagcagtccttcaccccacagtgttccctgatccgaagcctcactcccaccagtaatcttctaagccagcaacagcagcagcagcagcagcagcagcaagcaaatgtgatctttaagcccataagcagcaactcatccaaaaccctgagcatgatcatgcagcaggggatggcaagctccagcccaggagccacggagccatttacttttggcaacaccaagcccttgtcccattttgtttctgagccgggtccccagaagatgccctccatgcctaccacctctaggcagccttccctgctccactacctgcagcagccgacaccaacgcaggcctcctcagccactgcctcctccacggccactgccaccttgcagctgcagcagcagcagcagcaacagcagcagcagcctgaccattcttcat

SEQ ID NO: 9990 - DNA, 591 bp, Homo sapiens
  MAP TO CHR2.3; EXPRESSED IN HEART, SIGNAL =   6; EXPRESSED IN ADULT LIVER, SIGNAL =  17; EXPRESSED IN BRAIN, SIGNAL =   8; EXPRESSED IN HELA, SIGNAL = 5.7; EXPRESSED IN PLACENTA, SIGNAL =   5; EXPRESSED IN BONE MARROW, SIGNAL = 5.5; NT HIT: D21092.1, EVALUE 5.00e-69; SWISSPROT HIT: Q9Z136, EVALUE 4.40e+00; EST_HUMAN HIT: BE872817.1, EVALUE 8.00e-69
ctgtcaggaagaggggtgtggctgaagggagtccaggtcctcacctgctcaaattcagacttcaattcctgttcttgtaccctaaggacatctcgcaagtgatcagtgtgggcagctgcctgtcggcgaagctgggttctcatttcattttccatggcatctctgacttcttctatctgtgaaaccaaacatagtagttattagttttcaattctccacatatacttttaggaaaacagaaagaccactatcaaccatgacaacagcagcttccatatcctgaacgcctctaatgtgccaggcatgtgtacacttctacttctcatgtgaaacggaaaactaaaccctggaaggtgattcaaacaagatcacacagctgtggcaaaaaccagatttcaaacaaaggtctctctcacccccaaacttgtggtttttccacatcaccaggctgcctctcatataaaacactgccatttcctgaatcacatgctcctctgagaaataactaaatccaggatatgaaaaaaagtaactatatacttggaatcaagcgtagctttactacaaccatctgtgtgaccttggggaaat

SEQ ID NO: 9991 - DNA, 570 bp, Homo sapiens
  MAP TO CHR21.3; EXPRESSED IN FETAL LIVER, SIGNAL = 1.4; EXPRESSED IN ADULT LIVER, SIGNAL = 1.9; EXPRESSED IN BRAIN, SIGNAL = 2.9; EXPRESSED IN HELA, SIGNAL =   3; EXPRESSED IN BONE MARROW, SIGNAL = 2.4; NT HIT: AJ010089.1, EVALUE 0.00e+00; SWISSPROT HIT: O60318, EVALUE 4.00e-24; EST_HUMAN HIT: AJ003436.1, EVALUE 0.00e+00
gtgattcctgaccccaacactactggaccatcctcagacccagggcctccacccatttattaaacaatgctgcttcataaacgagacttccttcacaaaccatcttctacttccttctcaacggcgtcccctcctgggctaggcacaagaaccaccagaggaagcgcaggctggaagggcttagcctgcaggagctgcttgagctgcagcaaggccgacagccagtacacgtcctcctctgccatgtcctcactcttcattttggggggaagcagcagcatgagcccactggctcccaggaggtccttctgtgtctccacagcatcaatggcaccatcactgagggcgccatgggccacctgcaacagcatcaagatcatcaggagagatgcaccatgggacgcatcagcagtgactgatctgccccagagcaagtgcagccaaagctctccgtgcactaaatactgactgtactccagacaggcctccaagggcacagctgggcataccctgtagttatcttacttcctgtagttattttaattcctggcccctctttccctaaatcca

SEQ ID NO: 9992 - DNA, 589 bp, Homo sapiens
  MAP TO CHR19.3; EXPRESSED IN ADULT LIVER, SIGNAL = 2.6; EXPRESSED IN FETAL LIVER, SIGNAL = 2.3; EXPRESSED IN BRAIN, SIGNAL =   3; EXPRESSED IN HELA, SIGNAL = 2.8; EXPRESSED IN PLACENTA, SIGNAL = 3.6; EXPRESSED IN BONE MARROW, SIGNAL = 2.8; EXPRESSED IN LUNG, SIGNAL = 2.4; NT HIT: AB033068.1, EVALUE 1.00e-102; SWISSPROT HIT: P53197, EVALUE 3.00e-12; EST_HUMAN HIT: BI194423.1, EVALUE 1.00e-101
acattgaggtctgctgggagctggggaggcccccatgcacatgcacaccccacgcagcacccacctggctggtacaggcactccacaggtacacgcaggtgcctagccccacgctgagcacattgagggacgaccagtccaccagattgaggtagaagtcgtcctgcagctcgggcgcgtccagcaccttgaaggggatcttggagatcttgcgggtgggtttccggggggaccggagcagcttctggctgcagaggcggccacgtggcatccgtgagccacggcacttgggtcacctcttgcaaacgcttgggaagtgtctccttccctgccagccccaggagcccagtccggcccctccaatcaccaccgccaccatgtgatcctaaacccagggacagccccacaggccttcaccctcgggtgtctggctgccctggcctcccttccacagctgtgctggctctgctccccacacctcctccaggcagcccttcctgactaccctgccccttgtctgaggccaacactgccaggccatggtgtgccctcagcaaggggatctctgggctgctctaggcctggacta

SEQ ID NO: 9993 - DNA, 515 bp, Homo sapiens
  MAP TO CHR20.3; EXPRESSED IN LUNG, SIGNAL = 0.74; EXPRESSED IN ADULT LIVER, SIGNAL = 0.96; EXPRESSED IN FETAL LIVER, SIGNAL =   1; EXPRESSED IN BRAIN, SIGNAL = 1.3; EXPRESSED IN BONE MARROW, SIGNAL = 1.3; NT HIT: gi14786437, EVALUE 1.00e-105; SWISSPROT HIT: P34819, EVALUE 2.00e-33; EST_HUMAN HIT: AL560147.1, EVALUE 1.00e-105
tatgtcccttagcacccagccagatctagactgcctataaaaacccacaaggcaccacgcatccctgggctccctggccttctactattcctgaatttgttgtcggtcatggttttaaggaagtgacatacaccatacaccttctttagaagggataatctggtacagggcctggcacgtggttgtgccaatctgacccatcctctggccctcaccaccttcttcctctgcccccagaggaaactcagcacctctcccagatacccgtatagcacccacctgcccaagtgctcctggagcacctgataaacgctgatccggaacgtctcattgtcgaagcgttcccggatgtagtccttgtagatccggaattcggctgccgtgacagcttccccttctgggatcttggaaagatcaaaccggaactctcgatggtggtagcgtgggtggaagaattccttgtcatgttccactggaagaggaagagaacacacaccaacaccgacagctcatta

SEQ ID NO: 9994 - DNA, 578 bp, Homo sapiens
  MAP TO CHR3.3; EXPRESSED IN BRAIN, SIGNAL = 1.5; EXPRESSED IN BONE MARROW, SIGNAL = 1.3; EXPRESSED IN LUNG, SIGNAL = 1.2; EXPRESSED IN PLACENTA, SIGNAL = 1.5; EXPRESSED IN HEART, SIGNAL = 1.7; NT HIT: gi14731329, EVALUE 7.00e-53; SWISSPROT HIT: P49116, EVALUE 1.00e-14; EST_HUMAN HIT: BF329526.1, EVALUE 1.00e-119
aatacagagggaactgggggggggtacttttctgttttcagatcatccaggtttgaccagcacaagccagattgaaaaattccaagaaaaggcacagatggagttgcaggactatgttcagaaaacctactcagaagacacctaccggtgaggcattcaggcatatgcgctcttgcttggggctgcaaggagtgtggctgagtctgcagtttctaatataaattatgttaacctttccatttttagcagcctgatagagcctccattggatcacactctaattcttgagttttctttgttttttccaagctcccaagagctagagataattcttgaatgctagaggtggtgtagagtgtagacagtgccagcaggagggccaggactgtggctgattccagttttgctgtgtgactgtgagcgaggcctcagattgctactctttaattggaggagttggaacagatgctgtgtggcctgttctggggctaacactgtacatgaggcttgagttctcatggagattcctttgtccagaatagtttgaaaggtctgctcctctggtcagcatccattga

SEQ ID NO: 9995 - DNA, 566 bp, Homo sapiens
  MAP TO CHR17.3; EXPRESSED IN ADULT LIVER, SIGNAL = 7.4; EXPRESSED IN BRAIN, SIGNAL = 1.8; EXPRESSED IN LUNG, SIGNAL = 0.96; EXPRESSED IN BONE MARROW, SIGNAL = 2.1; EST_HUMAN HIT: AV656553.1, EVALUE 1.00e-55; NT HIT: gi4557598, EVALUE 7.00e-56; SWISSPROT HIT: P35575, EVALUE 5.00e-18
gtaggcacagagagggcaagggattggacggtcagctcaggagggcacatccagtgggccaggccattgggaaggacccccagaagctcaggcttctgccccctcctttctcaggacacagcgctgcagggcggtgactctcacgagccctttgcccatggatgcccgtgcctctctggactccatccaggttctgtaataggcagatttccaatactactgtgctattcaggaaagtattgcagaagtgaattaatttgtgccaattgaagagcatgacaaaagtacaaaggaatggctctcctcatgtcccctcaaggtcagtttcatccataacaggtaaacgaggtccactcagcttctgtctgcaggggctgggacgcttacctggtccagtctcacaggttacagggaactgctttatcaggggcacggaagtgttgctgtagtagtcagtatccaaaacccaccagtatggacgctgtccaaagagaatcctatggaaaaacagaacaagtttctggggttactgaatgaatgcttttgcccaaagcctacaccttcaa

SEQ ID NO: 9996 - DNA, 542 bp, Homo sapiens
  MAP TO CHR3.3; EXPRESSED IN ADULT LIVER, SIGNAL = 0.74; EXPRESSED IN BONE MARROW, SIGNAL = 0.99; EXPRESSED IN LUNG, SIGNAL = 0.31; EXPRESSED IN PLACENTA, SIGNAL = 0.76; SWISSPROT HIT: P41180, EVALUE 7.00e-55; EST_HUMAN HIT: AI434785.1, EVALUE 0.00e+00; NT HIT: gi14721391, EVALUE 0.00e+00
tacagagcatgccatgaagccagagagtagtaacagttcgatgattcaaacccagctttgccaggtctttactctaaagtcgttgactagaaagcttcccattttcttccacttcttctttcttccaggtataatttccgtgggtttcgctggttacaggctatgatatttgccatagaggagataaacagcagcccagcccttcttcccaacttgacgctgggatacaggatatttgacacttgcaacaccgtttctaaggccttggaagccaccctgagttttgttgctcaaaacaaaattgattctttgaaccttgatgagttctgcaactgctcagagcacattccctctacgattgctgtggtgggagcaactggctcaggcgtctccacggcagtggcaaatctgctggggctcttctacattccccaggtactcaagccttctcaggcggggcactgggagcaggatcagaagaagcaggcttgggggtgccatgcccaatagccatacggtttaccatattcccatctctggca

SEQ ID NO: 9997 - DNA, 557 bp, Homo sapiens
  MAP TO CHR2.3; EXPRESSED IN FETAL LIVER, SIGNAL = 2.7; EXPRESSED IN ADULT LIVER, SIGNAL = 5.7; EXPRESSED IN BRAIN, SIGNAL =   4; EXPRESSED IN BONE MARROW, SIGNAL = 3.1; EXPRESSED IN PLACENTA, SIGNAL = 2.4; NT HIT: AF414120.1, EVALUE 0.00e+00; EST_HUMAN HIT: AI791416.1, EVALUE 0.00e+00
tgggattaatatggggatgcagcattatgatgtgggtcaaggaattaagttagggaatggcacagcccaaagaaggaaaaggcagggagcgagggagaagactatattgtacacaccttatatttacgtatgagacgtttatagccgaaatgatcttttcaagttaaattttatgccttttatttcttaaacaaatgtatgattacatcaaggcttcaaaaatactcacatggctatgttttagccagtgatgctaaaggttgtattgcatatatacatatatatatatatatatatatatatatatattttaatttgatagtattgtgcatagagccacgtatgtttttgtgtatttgttaatggtttgaatataaacactatatggcagtgtctttccaccttgggtcccagggaagttttgtggaggagctcaggacactaatacaccaggtagaacacaaggtcatttgctaactagcttggaaactggatgaggtcatagcagtgcttgattgcgtggaattgtgctgagttggtgttgacatgtgctttgg

SEQ ID NO: 9998 - DNA, 533 bp, Homo sapiens
  MAP TO CHR22.3; EXPRESSED IN BONE MARROW, SIGNAL = 0.99; EXPRESSED IN LUNG, SIGNAL = 1.7; EXPRESSED IN HEART, SIGNAL = 0.77; EXPRESSED IN ADULT LIVER, SIGNAL = 0.66; EXPRESSED IN BRAIN, SIGNAL = 1.5; NT HIT: AF161466.1, EVALUE 6.00e-84; SWISSPROT HIT: P90838, EVALUE 4.00e-18; EST_HUMAN HIT: BI560382.1, EVALUE 0.00e+00
aaatgggctgtacctcatgcttaaaaaaacagttcttactacttcctgaaaagtaactgaacaatcctcatctctcaagtgtactgcactggaaaggaagctgaaggtcatgtggttattatccctcccataccatgtactggaaacgtgtgctcttacttggcattcattgggatgacaccttttgaccccaccccaacaggaatgtggtcaaacatagcttgggcaagttgctccttcacaggctggacatcactttcatctaaattggttcttagcaagcggacaccacagttgatgtcaaacccgacaccacctacaaaatagagaaaagttagcaaaaccagctggtaaggcactgttacctgcagtttctcgccattaatatggaactataaagatacccattcttttaaagataactatgttttaaagtagacaacaaagtggttctttgctgagtaaagcttgatgacaccaagataatctaaagtaacatacacactaaaggcactttatggacaagggaggca

SEQ ID NO: 9999 - DNA, 589 bp, Homo sapiens
  MAP TO CHR6.3; EXPRESSED IN HEART, SIGNAL = 0.94; EXPRESSED IN BONE MARROW, SIGNAL = 1.1; EXPRESSED IN FETAL LIVER, SIGNAL = 0.99; EXPRESSED IN ADULT LIVER, SIGNAL =  13; EXPRESSED IN BRAIN, SIGNAL = 0.82; EXPRESSED IN PLACENTA, SIGNAL = 0.98; SWISSPROT HIT: P09210, EVALUE 7.00e-11; NT HIT: S76232.1, EVALUE 1.00e-117; EST_HUMAN HIT: AV692119.1, EVALUE 1.00e-92
gtgggtctgcctctctgaagactgtgaaatgggtcaccttcagcagagggaagctggaaataaggctagagtcaagctcttccacgtagtagagaagttccaccaggtgaatgtcagcccggctcagcttgttgccaacaaggtagtcttgtccgtggctctttaagacctggagaatgggaggaatcagatcaggaacacatgcccacccaggctgggacccctgcttctttcagagcctctccaccctgactttccccacctctgttgccttactgcatggatgcagaaatcccgagctttctccacattatctgaatgaatgagatagtaagaagtgtaactgtactcactcctcagttggagctcagcctcccattttctcttctcatccacatcactgtggcgtctacactacccacccagcttgcttcttccacatgggccaagggcttagcacctgccgccgcatgttctgtctgccccaggccctgcagtgtggagccctcacattcaggatgtggctctacattctgctgtctcccgctccaatctcccttgggcagtgactccaccatcgtgacaacac

SEQ ID NO: 10000 - DNA, 598 bp, Homo sapiens
  MAP TO CHR19.3; EXPRESSED IN PLACENTA, SIGNAL = 7.8; EXPRESSED IN HEART, SIGNAL =   9; EXPRESSED IN ADULT LIVER, SIGNAL = 8.5; EXPRESSED IN FETAL LIVER, SIGNAL = 5.4; EXPRESSED IN BRAIN, SIGNAL =  12; EXPRESSED IN HELA, SIGNAL = 4.6; EXPRESSED IN BONE MARROW, SIGNAL = 8.5; SWISSPROT HIT: Q13526, EVALUE 7.00e-15; NT HIT: gi14756535, EVALUE 5.00e-57; EST_HUMAN HIT: BI758860.1, EVALUE 0.00e+00
atgtgtgaggagaggggttgtggggagcatgtgcgcctgtgaggggaggctttccaactgaagtgctgcctcccccgctggccagctctggagtcctccatcctgtctggtcaggccccccccaacccctgacctggcactcccattccgttccatgtccacaggctacatccagaagatcaagtcgggagaggaggactttgagtctctggcctcacagttcagcgactgcagctcagccaaggccaggggagacctgggtgccttcagcagaggtgcgcaaggaatgggcctcaccaggttgggggacccttaccaccctgaggggtagaggccaggagggtctgggcattgggctcccaggtgccacaccggccttcggggtccagcaggtggcagcacagccccttcctcaggcttcagaggctgctctgctgggcagggccagggccacacagggaggggggctgcagcactttcttcctggcatcatctctaccctggggggcatggtctcttgtgtgtctgtgcacagatgtcctcatcccaggcccaccaaggtgggtacatcctgtcctctgcctcttcctttttgtgg

SEQ ID NO: 10001 - DNA, 526 bp, Homo sapiens
  MAP TO CHR11.3; EXPRESSED IN LUNG, SIGNAL = 0.97; EXPRESSED IN BONE MARROW, SIGNAL = 0.9; EXPRESSED IN BRAIN, SIGNAL = 0.79; EST_HUMAN HIT: W56884.1, EVALUE 1.00e-126; SWISSPROT HIT: P49847, EVALUE 3.00e-05; NT HIT: gi14773497, EVALUE 1.00e-122
gtctgggcccttccttttaggttgcactccaggacttgcagacgaactccaagattggggcactcctgccttactttgtttatgtggtcagtggggtaagtgaccaggctgggacagggagaatgttttataaggaagagatgacccagcaggtgtagggctcatggcaagtgctgtcagaatggtgggctcctgcctgtcccctcatgtccctgtaagctaccctcttctcccaacaggtgaaatctgtaagccatgacctggagcaactgcaccggctgctgcaggtggcacggagcctatttcgtaatccgcacctgtgcttggggccctatgtccgctgtctggtgggcagtgtcctctactgtgtcctggagccactggctgcctccatcaaccccctgaatgaccactggactctgcgggatggggctgccctcctgctcagccacatcttctggtagccactgggcctaaacctgcgggtgggattgctgcagagccaagtgggttggggtaaggaaat

SEQ ID NO: 10002 - DNA, 530 bp, Homo sapiens
  MAP TO CHR13.3; EXPRESSED IN ADULT LIVER, SIGNAL = 5.1; EXPRESSED IN BRAIN, SIGNAL = 6.4; EXPRESSED IN FETAL LIVER, SIGNAL = 3.3; EXPRESSED IN LUNG, SIGNAL = 3.3; EXPRESSED IN HEART, SIGNAL = 5.2; EXPRESSED IN BONE MARROW, SIGNAL = 5.4; EXPRESSED IN PLACENTA, SIGNAL = 4.5; EST_HUMAN HIT: BF381140.1, EVALUE 0.00e+00; SWISSPROT HIT: Q09857, EVALUE 9.80e-01; NT HIT: AF044221.1, EVALUE 1.00e-54
tgcattctgggctcctttaccatttgggaatgagactgctgaagagcaagataaggaagggtacaatgatcctctaaatctgagccttatactctcaattttcggttgttcttttaaatgttatataacagtttcaaaatgtttgtgagacaaggtagggcataaagaatcaacattattcatactcaagagaaaaatatcactcacccattggccaattgtcatatacatgctttgcaatgtcagaagcagaatcgttaggagaaaacaggaactcttttgtttttccgcttaccaaaatgaggcgcaaatttatctgaaagaagacaatgattcttttaacataaatctaaaaattttttaagtaaaaaagaagactcaaaggcttttcatttcaatcacatcctaaattattaccaatgccatattgtggtttttatttaaattctataaaacttttttaaaaagaatgggaatttgatatttgattttatttcctattatttaaagggtgtgtgtgtgtgtcagac

SEQ ID NO: 10003 - DNA, 578 bp, Homo sapiens
  MAP TO CHR6.3; EXPRESSED IN FETAL LIVER, SIGNAL = 3.3; EXPRESSED IN ADULT LIVER, SIGNAL = 3.7; EXPRESSED IN BRAIN, SIGNAL = 5.8; EXPRESSED IN BONE MARROW, SIGNAL = 5.3; EXPRESSED IN LUNG, SIGNAL = 2.8; EXPRESSED IN PLACENTA, SIGNAL = 4.1; SWISSPROT HIT: Q09442, EVALUE 6.40e-01; NT HIT: gi14782829, EVALUE 2.00e-96; EST_HUMAN HIT: BG421743.1, EVALUE 3.00e-96
agaggagctaggggcttctgccccaggtgaggccgcattggggagtgggtgggagggccctggctgagcagctgcttcatcttcgtcatcatcatccagcacgatgatgctgttagcggtggccataggggatcaaatcccccggagggaggaagtggtggggatttcagaattcctgctggaaggggatggggcctcagaatgagcccctccagcatagccccatcccttcacctcacacattttctgaactccttgggtttcagtaacatccagccctgaccaacactgtcttcaccacctgatttcaataaccattagttctatatgctttttggggcccttcaagtggtgtggggggggggcaaaccacccccacaccttaagttgccaccttctgctccacccctcacgtcgatttccggtctttctgttgcatttcccccctatttcttagagttggcaagttgattcttcctcccacactgcaccccaaatcgtcctgacacccccttgcacagacaacacactcctgtgggcgccacctcatgtgtttgccccctctgctctcaaacaag

SEQ ID NO: 10004 - DNA, 577 bp, Homo sapiens
  MAP TO CHR5.3; EXPRESSED IN LUNG, SIGNAL = 2.8; EXPRESSED IN BONE MARROW, SIGNAL = 1.6; EXPRESSED IN ADULT LIVER, SIGNAL = 1.6; SWISSPROT HIT: Q9Y5E5, EVALUE 2.00e-20; NT HIT: gi14861871, EVALUE 0.00e+00; EST_HUMAN HIT: AL119917.1, EVALUE 2.00e-90
gtcctaccgtctgctcaaggccagcgagccgggactcttctcggtgggtctgcacacgggcgaggtgcgcacggcgcgagccctgctggacagagacgcgctcaagcagagcctcgtagtggccgtccaggaccacggccagccccctctctccgccactgtcacgctcaccgtggccgtggccgacagcatcccccaagtcctggcggacctcggcagcctcgagtctccagctaactctgaaacctcagacctcactctgtacctggtggtagcggtggccgcggtctcctgcgtcttcctggccttcgtcatcttgctgctggcgctcaggctgcggcgctggcacaagtcacgcctgctgcaggcttcaggaggcggcttgacaggagcgccggcgtcgcactttgtgggcgtggacggggtgcaggctttcctgcagacctattcccacgaggtttccctcaccacggactcgcggaagagtcacctgatcttcccccagcccaactatgcagacatgctcgtcagccaggagagctttgaaaaaagcgagccccttttgctgtcaggtgat

SEQ ID NO: 10005 - DNA, 519 bp, Homo sapiens
  MAP TO CHR10.3; EXPRESSED IN HEART, SIGNAL = 1.7; EXPRESSED IN BONE MARROW, SIGNAL = 2.1; EXPRESSED IN BRAIN, SIGNAL = 1.2; EST_HUMAN HIT: AU121657.1, EVALUE 1.00e-115; SWISSPROT HIT: P49961, EVALUE 8.00e-21; NT HIT: AJ133133.1, EVALUE 5.00e-72
agacagggttctggatgtggtggagaggagcctcagcaactacccctttgacttccagggtgccaggatcattactggccaagaggaaggtgcctatggctggattactatcaactatctgctgggcaaattcagtcaggtgaatatctcacagcatccatggaggtggctctctggaggccaatgccattgctatctcaggcagtacttgggtcgctagccagaatgaatgaatgaatgatagatggatggatggatggatgactgcatgaatgaatttactctcacatttgtaagggtcaccagaggtataattctcttacaagaccttctactattgggagaataaggacatgtctttaccttaggttggcataaaggaaatttaaaatttatcattaaaaattagaatagctaacatttgccttgtgctatgtgtctcccgctgtgctcagcacttttcatgttttctctgattttatccttagaacgacgctatgaggtcctacatcatcccca

SEQ ID NO: 10006 - DNA, 591 bp, Homo sapiens
  MAP TO CHR11.3; EXPRESSED IN ADULT LIVER, SIGNAL = 1.2; EXPRESSED IN PLACENTA, SIGNAL = 1.1; EXPRESSED IN HEART, SIGNAL = 1.3; EXPRESSED IN BONE MARROW, SIGNAL = 1.6; EXPRESSED IN FETAL LIVER, SIGNAL = 1.9; EXPRESSED IN BRAIN, SIGNAL = 1.2; SWISSPROT HIT: P52747, EVALUE 3.00e-21; NT HIT: AJ277546.2, EVALUE 0.00e+00; EST_HUMAN HIT: AV747469.1, EVALUE 6.00e-88
tgctggtctttttgagtccacctcaaatacaccgatttccttaaagtaggctaggtgatagagattattctacaccttgcctcctgtaaaggttatacacgaagcacagtgtacaaagttgaaagctatgagcagcactgctgtcgactgaggacagtatgccttggtactcacctgaactgcaatctgggtgccattggatgttgctactaaggtcagaggtctggtttctgtggttactaagtgatggctatgctgctggtgccccatttctgatgaggcagtatggaatgctgccaagtcttgagctacaattgcaaccttaagcaaaacaaaacaaaccatacacataaagaattaaacctgcgatttaaataggttaaagtccacttaatacaatggatttcttcaaattgaaaaggaaaaactcctctgaccatagacttgtcaaagcctatattgaaaggaggtttatttgaggaagttgaggctcattatctaaggttatgaagtgagccaacggcaaaatagggtagagaacactggagaaatggatctgctatgccaggccccattagccagggagatgtg

SEQ ID NO: 10007 - DNA, 543 bp, Homo sapiens
  MAP TO CHR3.3; EXPRESSED IN FETAL LIVER, SIGNAL = 1.4; EXPRESSED IN ADULT LIVER, SIGNAL = 1.8; EXPRESSED IN BRAIN, SIGNAL = 1.1; EXPRESSED IN LUNG, SIGNAL =   1; EXPRESSED IN HEART, SIGNAL = 1.4; EXPRESSED IN PLACENTA, SIGNAL = 1.2; EXPRESSED IN BONE MARROW, SIGNAL = 1.5; NT HIT: AF120999.1, EVALUE 0.00e+00; SWISSPROT HIT: P22438, EVALUE 7.70e-01; EST_HUMAN HIT: BI856314.1, EVALUE 0.00e+00
gtcagtgaagcagaaagcccagttcttgacctcaaggacatgacttctgtcttgttagcacagcacaaaagagtggttaggaattggcaaatgatatgggtgctgcaggaattcagaaggaagagtaatcacaactggggttgctgggaaagagcctttcctgtccctttctgctgttctctccatcctgccccatcaccacacattttgggagggtgtctttagaagctgacctgataatgtgggatgttgtattcttcagatgaatacctgacaaagcagtggaagtatccaattgagcttcatgggattggtaaatatggcaacgactcttaccgaattttttgtgtcaatgagtggaagcaggtgaggctcactcccatccataattcagcacatttggtctctgaggcaaaataagtccaccattatggttaagaatatttattggatacaaatgctattacagtcacaaacaattgtgttcctggctgcggggaagcgggtggcatgtgggttttggggtttttgatcagtaggcgc

SEQ ID NO: 10008 - DNA, 599 bp, Homo sapiens
  MAP TO CHR2.3; EXPRESSED IN LUNG, SIGNAL = 1.1; EXPRESSED IN BONE MARROW, SIGNAL =   2; EXPRESSED IN FETAL LIVER, SIGNAL = 9.4; EXPRESSED IN ADULT LIVER, SIGNAL =  12; EXPRESSED IN BRAIN, SIGNAL = 2.5; NT HIT: U13223.1, EVALUE 0.00e+00; SWISSPROT HIT: Q60688, EVALUE 2.00e-63; EST_HUMAN HIT: AW236501.1, EVALUE 5.00e-76
cggtaaaatcgatgtcctgggagaggaggaagatgaagacgaggtggaagacgaggaggaggaggcgagccagaagttcctagagcagtcgctccagccggggctgcaggtggcccggtggggcggggttgcgcttccccgagagcacatcgagggcggcggcccgagcgacccctcagagtttggcaccgagttcagggcaccgccaaggtctgcggcggcctctgaagatgcccggcagccggcaaagcccccctactcgtacatcgcgctcatcaccatggccatcctgcaaagcccgcacaagcgcctcacgctcagcggcatctgcgccttcattagtggccgcttcccctactaccgccgcaagttccccgcctggcagaacagcatccgccacaacctctcgctgaacgactgcttcgtcaagatcccccgcgagccgggccacccaggcaagggcacctactggagcctggaccccgcctcccaggacatgttcgacaatggcagctttctccggcgtaggaagcgtttcaagcgccaccaactgaccccgggagcccacctgccccaccccttccctctacctgctgcac

SEQ ID NO: 10009 - DNA, 526 bp, Homo sapiens
  MAP TO CHR2.3; EXPRESSED IN BONE MARROW, SIGNAL = 1.5; EXPRESSED IN HEART, SIGNAL = 1.6; EXPRESSED IN FETAL LIVER, SIGNAL = 0.96; SWISSPROT HIT: Q62452, EVALUE 3.00e-67; NT HIT: gi14737542, EVALUE 0.00e+00; EST_HUMAN HIT: BG328092.1, EVALUE 0.00e+00
ataggaaagaggagcagggcactgtgcaccttcttcaagatagtggcaagctattcccctggcgaagaccacagaggggagggagaaatatttggcaacaattaagccacaggcatcaaaaggatcaagaaacaccgcatcaaaagaactctcctttaagtattctactaattttcggtcattaaacaaactcctgcaatgcgaaaaaaataagttaaaaaaaccattggatgaactcagaaatagagaaaacaaacttcgtacttgtgctttccattgagcatcggcgaaatccatgaattcccggtccagatcctccagagtgtatgaggttgagtaagtcttcactgtgcaattcagtgattttcccagttgccaactcacctctggcatgactacaaccacctcatgccccctgaggataagtttctccaccaccgactgcatggtgaaccagtgactcccatccatgggcactaccagcagcttccctgcctcagcaaagccacaggtcagcagcagagaa

SEQ ID NO: 10010 - DNA, 502 bp, Homo sapiens
  MAP TO CHR16.3; EXPRESSED IN BRAIN, SIGNAL = 0.71; EXPRESSED IN ADULT LIVER, SIGNAL = 0.35; EXPRESSED IN BONE MARROW, SIGNAL = 0.83; SWISSPROT HIT: Q9WYG0, EVALUE 3.50e+00; NT HIT: AF325426.1, EVALUE 1.00e-128; EST_HUMAN HIT: AW418951.1, EVALUE 2.00e-96
aatgcctgtgttcattgctgtgggttcactgctttctcttttgggcagccatataaataaaagaaccacctacttggacccaagactggcgtttactgtggatgataatccgaccaagccaaccacccggcaaagatacgacggcagcaccactgccatggaaattctccagggccgggatttcactggcaaagtggttgtggtcactggagctaattcaggaataggtaggctcttcacttagttatttatctttgggactgctataatgagatccacttagatctagctataatggaattttgtttagtggttctctgatttaaacatgacttttatccttttcagatatcgtttcattaacatcactacctctttttaaatcctaatgttgtcatggaagcctgtgtaggggctgaccttgaagtctctgaaagctgaacactcagcaaaagactgtggctattttggtattcagggatgagagacaacaggctccgtc

SEQ ID NO: 10011 - DNA, 555 bp, Homo sapiens
  MAP TO CHR12.3; EXPRESSED IN FETAL LIVER, SIGNAL = 1.7; EXPRESSED IN LUNG, SIGNAL = 1.9; EXPRESSED IN BONE MARROW, SIGNAL =   2; EXPRESSED IN HEART, SIGNAL = 1.6; EXPRESSED IN PLACENTA, SIGNAL = 3.8; NT HIT: gi7706500, EVALUE 0.00e+00; EST_HUMAN HIT: BF037874.1, EVALUE 0.00e+00
tttacctggaggtggaccaggaggaaggcctgtaggtggcccaggaggccgtaatggtggagcaggtggtggtccaagaggtggtggtcctggcatgggaggtgcttgtatctgagaaggaggaacagactgcggcggagcctgctgctgtgaagaagcagtggatgtgccatcagaatgggattcctctttatgctgcttttgtgattgcttttctgcttcagagtcatcagaatcatcttcatcatcgtcctctgaaaattcctctacttcccgtccctcctcagggatttcttgacctgaaagaaattttaaacccagtaaatggagttgattcattttcttacagtttggagaacagcaatgactgaatacacatggttaataaatgtgttctcaaaattaaaaaccaaatagtcttcttcaataaaatacttagatgtgaaagaaataacattctacttatctatgttaatgcagcatagtggaatgaactcaggctttaaaaccagacagaccaatatttaaatgccagccccaccatttacttgctgt

SEQ ID NO: 10012 - DNA, 596 bp, Homo sapiens
  MAP TO CHR3.3; EXPRESSED IN LUNG, SIGNAL = 5.9; EXPRESSED IN HEART, SIGNAL = 3.2; EXPRESSED IN HELA, SIGNAL = 4.9; EXPRESSED IN BONE MARROW, SIGNAL = 4.1; EXPRESSED IN BRAIN, SIGNAL = 4.7; EXPRESSED IN ADULT LIVER, SIGNAL = 3.8; SWISSPROT HIT: O15440, EVALUE 1.00e-32; NT HIT: AF146074.1, EVALUE 1.00e-112; EST_HUMAN HIT: AA649161.1, EVALUE 1.00e-102
ttaagcaagggtgggagatggtcagctttgtgttctggaaagatcttcctgccatgtggagaatggattggagggggagcatccgggtggactggcaagaccagatgtaggattgatcggtacccagatggcagtggtagaggaagaggcatctgggccaactcccccacttcgttgaaggatcagcatggcagttcatctgcggggaatcagcatggcagttcatctgcggggaattgacagaaggagctggtctgggtgggcaagaagagaagtgactgggtgacccctccacgctgttctggacttgcgctggaggcttcaccacacttctgggctcttgtagattggagagcgaggagccaacctgagcggtgggcagcgccagaggatcagccttgcccgggccttgtatagtgacaggagcatctacatcctggacgaccccctcagtgccttagatgcccatgtgggcaaccacatcttcaatagtgctatccggaaacatctcaagtccaagacagttctgtttgttacccaccagttacaggtatggttctttcttccctcggctgcctgcctgagtttgggaaatc

SEQ ID NO: 10013 - DNA, 539 bp, Homo sapiens
  MAP TO CHR2.3; EXPRESSED IN BRAIN, SIGNAL = 1.4; EXPRESSED IN BONE MARROW, SIGNAL = 1.2; EXPRESSED IN HELA, SIGNAL =   2; SWISSPROT HIT: P29558, EVALUE 2.00e-13; NT HIT: D82362.1, EVALUE 0.00e+00; EST_HUMAN HIT: AA984517.1, EVALUE 0.00e+00
ttatggaaggtcatgtggggggaagagaggggattagacataatctgttatcatagaggctgtcatttgatagggaagatacaggctgcattaatttaccctcctctgtttacagagacacatgataattatttgccacctactgttccggtgctgcctagtgacagatgactcatctgctgggccagagggctgatcattgatgcgggctgtagtgacatggtgtgctccattgagggagttaacacggcaccctggggagttggagacaggagcaaaattagacaaactgaggcaagagttaagatcctgtaattactttttacaaaggaaataccttagtttgtttaagaatgtgaagcaaaaacaaccttcctcaatcttgcaaatggcatcataaacagtttcctaaaaatcttctaaattgctcttcctgagagttttttaagagcgttaggggaaatgatatcttggcattcacttcacaacaatccctgtattaaagccagtgtccctcttctccttccctttcccttcac

SEQ ID NO: 10014 - DNA, 580 bp, Homo sapiens
  MAP TO CHR21.3; EXPRESSED IN PLACENTA, SIGNAL = 1.7; EXPRESSED IN BONE MARROW, SIGNAL = 1.8; EXPRESSED IN HEART, SIGNAL = 1.2; EXPRESSED IN ADULT LIVER, SIGNAL =   2; EXPRESSED IN BRAIN, SIGNAL = 1.8; SWISSPROT HIT: P22102, EVALUE 3.00e-48; NT HIT: gi14780247, EVALUE 0.00e+00; EST_HUMAN HIT: AA933633.1, EVALUE 0.00e+00
aaaaccaccatgcaaacagcaaataattctttctaaactggccccatttctgaattaaaaggcttcattcctctttaacccaacagatcttgccattttctccaagctgtacagttccactggccaccagctgaagggctgcaggaaatattttatgttctgctaattttactctttcagaaagagttgcgacagtatcacccctcttcacgggaacagcttcttgcaaaataatctgtccagcatccacatcttcctggaaaagtaagcaaaagttttgaacattaccttctagccagtgtcatttacatctgactactaatattatgttggtagaaaaagacatactcacagctacaaagtgtacagtgcacccagtaactgtgactccggtttccagggcttgctcatgggcatttgaacccttaaaagaagggagcaaggatgggtggatattgagcatttttcctaaaaattaaaaaaagcatagtggtcagaatttaaaaatcctgggtattctgttaaaggaatacgttttcctatctagatccgaagtcaaacaggagttggatttctggga

SEQ ID NO: 10015 - DNA, 588 bp, Homo sapiens
  MAP TO CHR19.3; EXPRESSED IN HELA, SIGNAL = 3.5; EXPRESSED IN BRAIN, SIGNAL = 3.7; EXPRESSED IN FETAL LIVER, SIGNAL = 2.3; EXPRESSED IN BONE MARROW, SIGNAL = 2.3; NT HIT: X99753.1, EVALUE 6.00e-78; EST_HUMAN HIT: BF725832.1, EVALUE 2.00e-78; SWISSPROT HIT: Q99418, EVALUE 3.00e-29
gacaaaacagtcaggagggctggaacacttggtcagtgttcagtgttcagaaaacaaatggacagccagtatctgaatccagggattaggaccaagtctgtccacctagaatagacccggcaccatcacgcttctggaacccggaggtgccagaagcccctgcctggatgtttgcccagctgatcccagtcctgtggccccaagcaccttcttggggtccatgttgaacttcttcctgcccattgccatcttccggttccgttgcaaggtcttactgcaggagcagagagcagggttgggggtggagggtcaatgcctgggcatccctggcctcagccaaccccacgccccctaggtcatccgccccagccctcacctgccctcattggcctccagcccctccacctcgctcatggcttcactgagctcctcccgcaggcgctgaatctccaccagcagctcctgcttccgccgccggatgttctccagctccatccgctcctccggagtcaggtctgggggttctagggatcggggtcaaggtttaaaagtcagtgctaggggccgtgagcctgaattcctgcaatc

SEQ ID NO: 10016 - DNA, 533 bp, Homo sapiens
  MAP TO CHR12.3; EXPRESSED IN BONE MARROW, SIGNAL = 2.3; EXPRESSED IN PLACENTA, SIGNAL =   2; EXPRESSED IN LUNG, SIGNAL = 1.1; EXPRESSED IN ADULT LIVER, SIGNAL = 1.8; EXPRESSED IN FETAL LIVER, SIGNAL = 1.6; EXPRESSED IN BRAIN, SIGNAL = 1.8; SWISSPROT HIT: O09012, EVALUE 8.00e-13; NT HIT: U35407.1, EVALUE 0.00e+00; EST_HUMAN HIT: AL045669.2, EVALUE 0.00e+00
tcattccctcatctccttgcctactaactcttttttctgatgcctttgcaagtctttagagccagaaatccctttctttttgctctctacctcttttagggtctttagcatatcttgtctgcagctagagatggtcaggggaggggtgagtacagggtcctcttgggcatggttgagagtgcacacctggaagtcctttcccaagtggcctgtgtgtgtctctgtgccccagttcctgaaattcgtgcggcagattggcgaagggcaggtgtccctggagtccggtgcagggtcgggccgagctcaggcagaacagtgggcagcagagtttatacagcagcaggtaggacattgtcactttccagtcccacttcagagccagctgatgccccaggccatgggttcagtggtcagtggtcccagatggggaaggataagaccagcttgtcttgatagcatccaggtcccaagtgggtgggaaagagattctgagaatgattttctcagaagtacccaggttggtggtggttagt

SEQ ID NO: 10017 - DNA, 582 bp, Homo sapiens
  MAP TO CHR20.3; EXPRESSED IN PLACENTA, SIGNAL = 1.2; EXPRESSED IN BONE MARROW, SIGNAL = 1.4; EXPRESSED IN LUNG, SIGNAL = 1.1; EXPRESSED IN HEART, SIGNAL = 1.7; EXPRESSED IN FETAL LIVER, SIGNAL = 0.72; EXPRESSED IN ADULT LIVER, SIGNAL = 1.3; SWISSPROT HIT: O46501, EVALUE 6.50e-01; NT HIT: AF187843.1, EVALUE 0.00e+00; EST_HUMAN HIT: BI461403.1, EVALUE 0.00e+00
aatagcaaaggagctcggtgtttgagttaaccctgcacaacccaaacatggggaaacaattatgcttttgagaccacataaatagcacaaggatgcgattccttccttaaaatctcctgcacttgggagggggcaggggagcccaggcaggcctggtggggagctgacccaccgccgtttctctggcaggttctgacgcgatgaggaagcacctgagctggtggtggctggccactgtctgcatgctgctcttcagccacctctctgcggtccagacgaggggcatcaagcacagaatcaagtggaaccggaaggccctgcccagcactgcccagatcactgaggcccaggtggctgagaaccgcccgggagccttcatcaagcaaggccgcaagctcgacattgacttcggagccgagggcaacaggtactacgaggccaactactggcagttccccgatggcatccactacaacggctgctctgaggctaatgtgaccaaggaggcatttgtcaccggctgcatcaatgccacccaggcggcgaaccagggggagttccagaagccagacaacaagctcc

SEQ ID NO: 10018 - DNA, 517 bp, Homo sapiens
  MAP TO CHR1.3; EXPRESSED IN BONE MARROW, SIGNAL = 2.3; EXPRESSED IN FETAL LIVER, SIGNAL = 6.5; NT HIT: S71381.1, EVALUE 1.00e-113; EST_HUMAN HIT: AL532752.1, EVALUE 0.00e+00; SWISSPROT HIT: Q29384, EVALUE 2.00e-33
gggagagaattaagtcggggtctccacccatccccaaaagaagttaccacaccttcccccattttacacctaatgccaaaaactttattgcaaacacagatcgcccacctccaacaactctcccagtcccccgctgcaacaagtccccccatcccatcgaagggaataaaaaacaggggactcccctctctacttgggaaccactctcctgttctctggatgacttacaccatctggccgagaacttgcttcaaatactggaaatcagcgtagtcgccagaggcacccagcatggtactgttgttgactcgcataatgcgagagatgttgcggaaacgagccaaggagccgtaggatcccagcatgtctgcggcaatcaccactccgccctcgaacttaacgccgaggactgaggtcccggtcaccatggggttcctaaagagtgagaacggtgggagctgagaggggggatggactgcgccctctttccgcgcactgagctgcgcttctgattttc

SEQ ID NO: 10019 - DNA, 500 bp, Homo sapiens
  MAP TO CHR10.3; EXPRESSED IN ADULT LIVER, SIGNAL = 1.3; EXPRESSED IN BRAIN, SIGNAL = 1.4; EXPRESSED IN BONE MARROW, SIGNAL = 1.8; EXPRESSED IN HEART, SIGNAL = 1.5; SWISSPROT HIT: Q05910, EVALUE 2.00e-37; NT HIT: gi15297428, EVALUE 1.00e-105; EST_HUMAN HIT: BI911701.1, EVALUE 0.00e+00
gagaagcaggactcctcggcagcctgcccacctgtgggaccaggagcgggttagccctggcaaggcctgcagccaccctgccaggccagctctgtgcccacttcacctggcccccagaaggcctggcactgctgggccagtgtgggacaggccccgttgtagcagtagcccccggagcagggcgtgccgttctcctggaaggcgtcttccgggcactcagggtgccggccgtcacagaactcctcgaggtcacacatgtccttcttgggacggcacagctcaccagccggcttcacctggcccagcagagaacagctcaccacggggacaggtccacgcaagctgcctggtccctggtgccccagggtcccttcccacctgccagccatgggctctgggggtcactggtgggaggctgcactcaccttgcactcctggcagcaggtaccgtgcgcacactgggccccctcagccagctggcaggtggtagagttgcagca

SEQ ID NO: 10020 - DNA, 507 bp, Homo sapiens
  MAP TO CHR1.3; EXPRESSED IN ADULT LIVER, SIGNAL = 1.7; EXPRESSED IN BONE MARROW, SIGNAL = 0.96; SWISSPROT HIT: Q01459, EVALUE 3.00e-29; NT HIT: AF085702.1, EVALUE 1.00e-109; EST_HUMAN HIT: BG764545.1, EVALUE 1.00e-100
ttgtttctgtcctgcattggtaaaagctggttaggcgccccccttgatttttgttctcccattgcctaacacttctaactgtgctacaaggcaagtagtgggggtaatcccagtgttgtattttgctgtgaatagagaatagatttagggctttaaaattccttaaataagaacaccaaaggctccagaaaaattttttaggaaataagtgctgaaactctttcccattgcattactataaaacaaagattatattagttataccctcatgagtatattctgatatggaaaatatgaggtttccaaaaaataaatgagtttttacctgtgatccctcaatttcacgatggaaagagtctgtagtttctttgactaaagcagttaatgcatcatattcaggtgataaacaattaacttcttgctctatatctatattaattccatccatatattgtgttttggccaaattaagtttttgagctatccaggatgctctgaaagcaggat

SEQ ID NO: 10021 - DNA, 559 bp, Homo sapiens
  MAP TO CHR17.3; EXPRESSED IN BONE MARROW, SIGNAL = 1.8; EXPRESSED IN LUNG, SIGNAL = 0.94; EXPRESSED IN PLACENTA, SIGNAL = 0.98; EXPRESSED IN FETAL LIVER, SIGNAL = 1.5; EXPRESSED IN BRAIN, SIGNAL = 1.6; SWISSPROT HIT: Q10085, EVALUE 1.00e-03; NT HIT: gi16164323, EVALUE 7.00e-59; EST_HUMAN HIT: BF957968.1, EVALUE 1.00e-58
gcctggtgaagaaagacagctgtcgccttgcacccagacagggcccccaggttcccaccagtccccgtcatccatcctcatacagaccactgaggaagctcccgacctcataggcccaccactccatgcacagcatgagcatgctggggatggccaggcggaggaaggaggcccagtcctgcaggcactcgagggaccagcctgtgggggggacacacacatttccaggagatctggccatcgggctggaactcaacctgagacaaaacccacatcccagttggaagacaaaagggcagtcattacctccccatgtagcttgatgcagttttttcccgaggatgtagagaaagaggagtagagccagggtgtactgggaaatcaagtttgccagtgcagagcctctggaaagaacagtcccaatgagagggaggtaccttcctgcgcctctccctgcccaactcagtgaggaggggagactcatcccttcccgtgctgtcctcagcaggccaaggtcttcttcccagagcaggctcaccctccatccctgacagtgctt

SEQ ID NO: 10022 - DNA, 575 bp, Homo sapiens
  MAP TO CHR17.3; EXPRESSED IN PLACENTA, SIGNAL = 0.65; EXPRESSED IN HEART, SIGNAL = 0.62; EXPRESSED IN BONE MARROW, SIGNAL =   1; SWISSPROT HIT: P34910, EVALUE 5.00e-60; NT HIT: L05367.1, EVALUE 0.00e+00; EST_HUMAN HIT: BG390771.1, EVALUE 0.00e+00
ttggtgttggttgtttggtgttgtaggcaagtggttgtccagcagaagtatgtgcttctggtttttcagaagaggtatagacagctggtgttggttgtccagcagtgactttggcaggtgatattgattgtccagaaaaagtgtcgctgaattgtgttggttgacccaaaggattccctgttgtgttttgagaattagccaatacctgtgacattgatgatgtgaataaggtaggctgtgactgcttctctgttgtaattgtctctgtctttgaaaaaaatgtattgttcaggtgtccacaaaacaaaattaagatgaaatatttgggatccatttcagaatatttcctcgttatctatagcgggtttataatgaaagagaaagacagttaggcgtcattggtgtctagttaaaaatttgacttttcattatgattcctggcataaagtaggtagacattattcctaattagtagtagttgattagtagttattattcctaatttagacttgatacactgtaggtttggtgtaacaactcttggatatactctaacccatcatacagcatttgga

SEQ ID NO: 10023 - DNA, 573 bp, Homo sapiens
  MAP TO CHR14.3; EXPRESSED IN BONE MARROW, SIGNAL = 2.6; EXPRESSED IN LUNG, SIGNAL = 2.1; EXPRESSED IN FETAL LIVER, SIGNAL = 2.4; EXPRESSED IN ADULT LIVER, SIGNAL = 2.2; EXPRESSED IN BRAIN, SIGNAL = 2.2; SWISSPROT HIT: P10600, EVALUE 8.00e-31; NT HIT: X14889.1, EVALUE 0.00e+00; EST_HUMAN HIT: AL532438.1, EVALUE 1.00e-92
tacttcagccagctccttccagagttagcctatggaaaaacagtgggactcccaggaaaacagaaagagatttcacagagaaaatctctgtgagagattttcagtcttcttcctggagatgtttgtgaatagcatcagggaccctctgttgagtgtggcttggctctggggcctgacctagccattgggcagtaggcaggcagtagatgttggttcccatgtgggcccagtctcaccggaagcagtaattggtgtccaaagcccgcttcttcctctgacccccctggcccgggttgtcgagccggtgtgggggaatcatcatgaggattagatgagggttgtggtgatccttctgcttcttgaggcgccccagatctccacggccatggtcatcctcattgtccacgcctgaagaagggaaggaaagtgacaatctcctgtctgaagagagcagagcccttggaggctgcctcctccacacgccccatcactgcccaggaggaggggcagtgcagtctgcgagggaggtgtgggggacaagtgcagcttaattctgatgtccaggtgcagaaa

SEQ ID NO: 10024 - DNA, 585 bp, Homo sapiens
  MAP TO CHR12.3; EXPRESSED IN BONE MARROW, SIGNAL = 1.2; EXPRESSED IN LUNG, SIGNAL = 2.6; EXPRESSED IN HEART, SIGNAL = 0.87; SWISSPROT HIT: Q62168, EVALUE 7.40e+00; NT HIT: gi14768694, EVALUE 0.00e+00; EST_HUMAN HIT: BG029180.1, EVALUE 0.00e+00
ccaagtacatgcacggacacatgtgctccagccaaaggagtgctgttttcaccagccacaaattttctaacagcaacaacaaaaacccacagatgtaagtaacatggaagtggatcagtcctaagccaaataaggattcccacctggggcaaaagctgacttcctaggacatgaactgaacacatcacagtaaaagcccagtagaggctgctgccagttccagctattagtaattatgagggggacaggatgacacctcacacggaccacccctagcaagagggtttgtttcagttctagctgtgagaggaatgtctgcagttcccacatgtgtgccatgctgtgaagcccatggcccctgctcctctctctgcctcccacacacttaacagtacacacagactttgctggcaagtgctgtttgttcctgcactgctatactatacgactgcaggacaatgccatccgctccatggttcattcagcgccttgtcccaaggtagttggtggagagcaggaccacgttgtgcagcaagagagacagctcagcttctgaaaacacagtgttagtggtttggcttggga

SEQ ID NO: 10025 - DNA, 580 bp, Homo sapiens
  MAP TO CHR8.3; EXPRESSED IN FETAL LIVER, SIGNAL = 1.5; EXPRESSED IN ADULT LIVER, SIGNAL = 1.8; EXPRESSED IN BONE MARROW, SIGNAL = 1.8; EXPRESSED IN LUNG, SIGNAL = 1.9; EXPRESSED IN HEART, SIGNAL =   2; EXPRESSED IN PLACENTA, SIGNAL = 1.6; SWISSPROT HIT: O19113, EVALUE 2.00e-13; NT HIT: gi14748722, EVALUE 0.00e+00; EST_HUMAN HIT: AA405905.1, EVALUE 3.20e+00
ttgaacagcatgaggacaggaatgcaatggcagggccctttgggcgttgaaacccctgtctcagcagcccccctttccctctgccctccccccgcaggccctctctccagcccctacgaccatggactttaccccagctccactggaggacacctcctcacgcccccaattctgcaagtggccatgtgagtgcccgccatccccaccccgctgcccgctgggggtcagcctcatcacagatggctgtgagtgctgtaagatgtgcgctcagcagcttggggacaactgcacggaggctgccatctgtgacccccaccggggcctctactgtgactacagcggggaccgcccgaggtacgcaataggagtgtgtgcacgtaagtgagtcctccataccttctgaccagcccctgagcacccccagctctggccccaaacccctctcccttggcacccccacagcctttcacctggccaggcttccgttcagcaggagatacaccccatgatcagaggccagaggctgggtccttcctgggaaggggaggcaaggatgcctgcactcttctcgcctccagaa

SEQ ID NO: 10026 - DNA, 586 bp, Homo sapiens
  MAP TO CHR4.3; EXPRESSED IN BRAIN, SIGNAL = 0.49; EXPRESSED IN BONE MARROW, SIGNAL = 0.73; EXPRESSED IN LUNG, SIGNAL = 0.8; SWISSPROT HIT: O14967, EVALUE 7.00e-41; NT HIT: gi4758003, EVALUE 1.00e-119; EST_HUMAN HIT: AV722140.1, EVALUE 1.00e-119
cccttttccttttcttgcagaatttaaagttagtatcactcgtagggaacattgtgtacacagcaaaagaaacaagattttatatccagtatattactaatgaattaatatcagttaaaattctcttttttccagttagcattgcgaatttcattcaacagcagctacttattaagcagcatttataatgaagttattttatttgaaaatgtcttcaattacttttcttccagggaatctggagtcctcgaaaaattcctaatccagattatttcgaagatgatcatccatttcttctgacttctttcagtgctcttggtttagagctttggtctatgacctctgatatctactttgataattttattatctgttcggaaaaggaagtagcagatcactgggctgcagatggttggagatggaaaataatgatagcaaatgctaataaggtatggtgttgaccaatagcagtagtgatataactatgaataataatacttggtcttggttgtaggttattcagatggctcttttaaatgcaaataaatgtgcagtaactactaaatgccaaggaaatgtgtttgaa

SEQ ID NO: 10027 - DNA, 562 bp, Homo sapiens
  MAP TO CHR1.3; EXPRESSED IN LUNG, SIGNAL = 1.5; EXPRESSED IN FETAL LIVER, SIGNAL = 1.4; EXPRESSED IN BRAIN, SIGNAL = 1.8; EXPRESSED IN ADULT LIVER, SIGNAL = 2.2; EXPRESSED IN PLACENTA, SIGNAL = 2.1; EXPRESSED IN BONE MARROW, SIGNAL = 1.5; SWISSPROT HIT: Q9UBY9, EVALUE 9.00e-15; NT HIT: gi15299244, EVALUE 9.00e-46; EST_HUMAN HIT: BI000248.1, EVALUE 0.00e+00
tcctcattcctacagcccaccttttctggggtgggggtggggcctcacccagcacagtgtgtgtgtatatgaggctaggtctgtaacaaccccaccccaggcctggagcctgggggctgccccccaccgctcacccatccagccctccagggctccagctgggattggctgtggttacagagcatgggtggccatggaaccatgtccaacccccagggccacaactgttccttagaggcccacctgttttcatggccacatctgtccctgtggccacatctgtcttggtggccacacatggctgcaggctgtgcagcacctgttccaggccgaccggcagccacagcgccttcggtggcgccctggagcagacgtcccctccctgtgcacctcccctcccctcagggcccggatcacttgcctgggaaggccaggggctccgagtggggccgcatgaagctgccaaagtcatcggaaaacatgctcagggccttctccatgggcgggtcctgggccgggagagcacgggaggccgaggaggaggtggaagaggaggaggaag

SEQ ID NO: 10028 - DNA, 569 bp, Homo sapiens
  MAP TO CHR1.3; EXPRESSED IN HEART, SIGNAL = 1.7; EXPRESSED IN BONE MARROW, SIGNAL = 1.5; EXPRESSED IN LUNG, SIGNAL = 2.4; EXPRESSED IN PLACENTA, SIGNAL = 2.5; EXPRESSED IN BRAIN, SIGNAL = 2.2; EXPRESSED IN FETAL LIVER, SIGNAL = 2.2; EST_HUMAN HIT: BE910251.1, EVALUE 1.00e-110; SWISSPROT HIT: Q13105, EVALUE 5.00e-31; NT HIT: U20647.1, EVALUE 1.00e-115
gcagtcagagtgggaaggaccccgggctctgcccacattcacacccgggtggcccccctcaccttcttcctgcacttgcttcacagctttgctgatctcggccttcaggacttccgtctcatcggctgtcactgcagctcccaccggcaccactgcgggcagagtcgcagggcctaaggtgaaggcacgggcactgccccatcatcgccaccctggcagcaagctgcctgtgacttccctctgctgcccacagcccgcacctgtgagctgagtgacggctgtcgctgccagtgcctcggtagccagcgtgaccatgtcatccacagtgaccacgctgacctcactgccctcctcgggctccaggatcttgatgcctgccttgccctggtgcacggtcttcacgtgggagcgcaggttgtctacccggttgaagccacgcccacacttatcacacaggtaaggcttctctcctgggggagcaaggttctctcttgcctttgtgggaaggggccgcagggatggggtgggaggccctcaatgactcgtttgcccagcaaccctgtctttta

SEQ ID NO: 10029 - DNA, 502 bp, Homo sapiens
  MAP TO CHR12.3; EXPRESSED IN HEART, SIGNAL = 1.5; EXPRESSED IN BONE MARROW, SIGNAL = 1.6; EXPRESSED IN FETAL LIVER, SIGNAL = 0.87; EXPRESSED IN BRAIN, SIGNAL = 1.7; EST_HUMAN HIT: BI459573.1, EVALUE 1.00e-60; SWISSPROT HIT: P33215, EVALUE 2.00e-12; NT HIT: gi6679031, EVALUE 1.00e-38
aaagtcagctctgggctctgttaaattaaggtaacttttttttttttttttaaatagcaaaagcagacatgtgtcaatttaaattctacatctatgtatttggtaagcggaggcctaaataacactgttaatatttgggatttaaaatcaaaaagagttcatcgatctcttaaggtaagcaatttaaaaaaaatcttcatgaaaaaatggatatcttaatgcatttagagtacttaccaagcttttatttttgagcttttatgataaaaataagaggcttcagaattgaactaagatttgttagggaaaataaaggtgctatttagccaaaaacttatttttatgtcttttttcttacatgtgtagcattaatgcatatgatcaacatttacaacttttttcttgttttttatttagttctactcttatttgaatgaaccacttcactcattttttcctaaactatggtgtgtggtcatcagggatctttccttagggccag

SEQ ID NO: 10030 - DNA, 565 bp, Homo sapiens
  MAP TO CHR1.3; EXPRESSED IN ADULT LIVER, SIGNAL = 1.5; EXPRESSED IN BRAIN, SIGNAL = 2.2; EXPRESSED IN BONE MARROW, SIGNAL = 1.9; EXPRESSED IN LUNG, SIGNAL = 1.1; EXPRESSED IN PLACENTA, SIGNAL = 2.2; SWISSPROT HIT: P54677, EVALUE 4.00e-16; NT HIT: gi14780975, EVALUE 0.00e+00; EST_HUMAN HIT: BF886722.1, EVALUE 0.00e+00
ttcacatctttgccatggagggcagtaataagtaattgagaactacacacgaagggacagagagaaccctggagaaatgttaggatgagcagcagaagtcacctacctgtccttgacttgcagcaggtagcagaccaagcagtacccagcacaactttgcacaaaattgcgctgtgcactgaggaatgcctcagtggtgtaactgccgtgctcctgtaggaagtaatcgagcaaggagagctgtgactgtttcttcacctgatggatggacacagcattgaccactggttcaatcatgccactatcagccgaaatcacaagaatcttgtatggcttgatccaaaggggcactcgctcctgttcccaaatggactgtgaggagacatggaggatacaggactcttatctttctccaaactagagaagaaggctaaaactcttccctttctccagcctctctccttggtagcattgaattctaagccatcaaatgagtaagactcacttaacccagtgaggaccagggagtttggaaaggaagtctagggcctgacaaagtcagaaa

SEQ ID NO: 10031 - DNA, 546 bp, Homo sapiens
  MAP TO CHR3.3; EXPRESSED IN HEART, SIGNAL = 1.3; EXPRESSED IN PLACENTA, SIGNAL = 0.93; EXPRESSED IN BONE MARROW, SIGNAL = 1.4; EXPRESSED IN BRAIN, SIGNAL = 1.2; EXPRESSED IN ADULT LIVER, SIGNAL = 1.5; SWISSPROT HIT: P19836, EVALUE 1.00e-17; NT HIT: gi13644166, EVALUE 1.00e-103; EST_HUMAN HIT: BE046368.1, EVALUE 0.00e+00
acttctcagtgtcgatgccccttcctgctcaatgattctgtcattctttccacaacatggaactccctacattgtccagtgggaaagaacataccagtgctccttccggaccaaacatttccagaaaacttccaatgaattctcgggacttctcctcccacttctgaatgaggtcaatgcttttttcctccaccttctgaacaaattcttttgacttttcctccacatctttcactttcttctttactttgtcaaccctctcctgcaagtggtatttcttctcctagataaagaaataactcttctgagaaataatgctcatcctaaacttctctaccataagagaacgaaaaaacatggctcaagcactcaattgacactgttttcagtctagaattttgctttgctttaatctaccccactctcagcataataacagataagatatgctgtggatgcacacacaagaagtggtaattctaatattgtgggcatttgggaataaactaaaaatataggctatacccagtaacaggcacgtagcca

SEQ ID NO: 10032 - DNA, 540 bp, Homo sapiens
  MAP TO CHR17.3; EXPRESSED IN BONE MARROW, SIGNAL = 0.98; EXPRESSED IN LUNG, SIGNAL = 1.7; EXPRESSED IN PLACENTA, SIGNAL = 0.65; EXPRESSED IN BRAIN, SIGNAL =   1; SWISSPROT HIT: O00182, EVALUE 3.00e-36; NT HIT: AJ288085.1, EVALUE 0.00e+00; EST_HUMAN HIT: BI838262.1, EVALUE 1.00e-111
aaaggccattcacattcacctgatagggctgggagtcccgtgggcgagaggtggggaggggattcctgcttaccttgaaatctgagctctgcaccaggaagcagaggtcaaagggcatccccttctggaagggcatgtgcatcttcctctcctcgggcccccatgttcctttctgcctcgtgttgcacaccacataccctccgtcttcaaaccgagggttgaagtggaaggcaatgtcgtttccactgaagcccgtctgaaagtccacagcaaacctaggcccaggaaaagcaaatagtcttctgtggcatggattattgccagtgacaggcacaggagggcctcggtgcctctgccctgtgtttgtctgggatcttgcatacaacctgcgtggcagagactgcttggttggcatcctttttgtttctctaatttggatccaatgtgtttttgtgcgattattgcattttgcctttacagcacgattttctaaacataagtagaaaatggctaagggaaagtgctggcattagcaaacaa

SEQ ID NO: 10033 - DNA, 531 bp, Homo sapiens
  MAP TO CHR12.3; EXPRESSED IN BONE MARROW, SIGNAL = 1.7; EXPRESSED IN LUNG, SIGNAL = 1.4; EXPRESSED IN HEART, SIGNAL = 1.2; EXPRESSED IN BRAIN, SIGNAL = 1.3; EXPRESSED IN ADULT LIVER, SIGNAL = 1.2; SWISSPROT HIT: P13647, EVALUE 1.00e-17; NT HIT: AF274874.1, EVALUE 0.00e+00; EST_HUMAN HIT: BF739077.1, EVALUE 1.00e-120
ttagaactcaggccccttccttgccctctttcaatctcaccctacctgcttcttgacattgtcaatctcggctctcagcctctggatcatccggttcatctcagagatctcatgcttggtgttgcggaggtcatcgccatgccggccagctgtctgctgcagctcctcatactgatgcagccaggaaagaggaaagattctgtttatatgagaatgggaagaactttcccaaagttcacaggcagtgagtactaagtggtggcaaatagtgtggggctggttcaggcttttccaaggctgagctagtctagtgcctttgctctcctggagacactggtgtgagattcagagtgagattatttctcaggtccttgggtttagatggaaattgtctacacagccattcctataaagcatcccaatgggcttcagcaggttccaggagccccattcttagtgtcgtcatggcctagaatcctagacatgggtgtgtcccctcactcaggagacagtcatcagagcacccacctt

SEQ ID NO: 10034 - DNA, 524 bp, Homo sapiens
  MAP TO CHR17.3; EXPRESSED IN FETAL LIVER, SIGNAL = 1.2; EXPRESSED IN BRAIN, SIGNAL = 2.3; EXPRESSED IN BONE MARROW, SIGNAL = 1.7; EXPRESSED IN HEART, SIGNAL = 1.5; SWISSPROT HIT: Q9WVS8, EVALUE 3.00e-36; NT HIT: gi14775569, EVALUE 0.00e+00; EST_HUMAN HIT: BG774456.1, EVALUE 0.00e+00
acccgagtctccacacagacaccatggccgagcctctgaaggaggaagacggcgaggacggctctgcggagccccccgggcccgtgaaggccgaacccgcccacaccgctgcctctgtagcggccaagaacctggccctgcttaaagcccgctccttcgatgtgacctttgacgtgggcgacgagtacgagatcatcgagaccataggcaacggggcctatggagtggtgtcctccgcccgccgccgcctcaccggtgagcttcctgagccgtcgcctcccagatgtggcagcgtcgcagggagtgggaaaccggcctgtcccagacagccgggaaggaaagcggggtgcgagttctggctccagtcaacacacactgaccagggccttctgcctgccaggctccggggaggctcggttctctgaaactccggcctggtggttttgccatcctgcctgcctacttcctccttaggaaaatgatagtcccagttagaccagaatggagagccagtccttcgtgtc

SEQ ID NO: 10035 - DNA, 593 bp, Homo sapiens
  MAP TO CHR11.3; EXPRESSED IN BONE MARROW, SIGNAL = 1.8; EXPRESSED IN HEART, SIGNAL = 0.84; EXPRESSED IN FETAL LIVER, SIGNAL = 0.62; EXPRESSED IN BRAIN, SIGNAL = 1.9; EST_HUMAN HIT: AV730768.1, EVALUE 8.30e-01; SWISSPROT HIT: Q13315, EVALUE 5.00e-57; NT HIT: U82828.1, EVALUE 0.00e+00
acgttgacaattttcctgccaatttaggaagtaggacatagtaactattaacagccagtttatttttagagtactatggaaatgatggtgattctctaattaggatattgtaagagtaccatgtctatatatttccttttagtttgttaatgtgatggaatagttttcaaattatccttttttttttttttttaggctacagattgcaacccaattaatatcaaagtatcctgcaagtttacctaactgtgagctgtctccattactgatgatactatctcagcttctaccccaacagcgacatggggaacgtacaccatatgtgttacgatgccttacggaagttgcattgtgtcaagacaagaggtcaaacctagaaagctcacaaaagtcagatttattaaaactctggaataaaatttggtgtattacctttcgtggtataagttctgagcaaatacaagctgaaaactttggcttacttggagccataattcagggtagtttagttgaggttgacagagaattctggaagttatttactgggtcagcctgcagaccttcatggtaagttcagcatgcattatgtctga

SEQ ID NO: 10036 - DNA, 592 bp, Homo sapiens
  MAP TO CHR6.3; EXPRESSED IN PLACENTA, SIGNAL = 1.3; EXPRESSED IN BONE MARROW, SIGNAL = 1.9; EXPRESSED IN FETAL LIVER, SIGNAL = 1.9; EXPRESSED IN ADULT LIVER, SIGNAL = 1.3; EXPRESSED IN BRAIN, SIGNAL = 1.2; NT HIT: gi11419034, EVALUE 6.00e-84; EST_HUMAN HIT: BF737309.1, EVALUE 1.00e-106; SWISSPROT HIT: Q9ULC3, EVALUE 5.00e-23
cctccttccccaaaagtagccatcttacttctttatacaagaatcatccagaagatcaatcttgttttgcacaagtacagttggtatatctcccacttcggctactactttctctctccaactggaaactgcttcaaaagattccctatctgtggtagagaacacgagcacacaagcctgggctcctgtaagttcacaatcaatcaatcaatcaatcaaggtatttacattaacatattacatttacattaagaaaacaatctcatgaagaatgggggcaacttttatccattcaaaacaacttttatgtaaataaatgttgaactcatctttgtactactcttctttacttttcaacatataaactctatttatgttgaattcatctttgcactactcttctttacttttcaacatataaattctattttcatttttaccaaaaacagtggttctcaaatgtgttcaactgtcaaagtacctcaaaagcatacacattctttttggaataccataaaatactgatttaattccattataaaagctagagagaatggtaaactaaaattacaggctgttgccaaattcttct

SEQ ID NO: 10037 - DNA, 510 bp, Homo sapiens
  MAP TO CHR1.3; EXPRESSED IN BONE MARROW, SIGNAL = 1.5; EXPRESSED IN BRAIN, SIGNAL = 1.1; EXPRESSED IN ADULT LIVER, SIGNAL = 3.1; EXPRESSED IN HEART, SIGNAL = 1.4; EXPRESSED IN PLACENTA, SIGNAL = 0.96; SWISSPROT HIT: P51449, EVALUE 4.00e-36; NT HIT: gi4826985, EVALUE 3.00e-70; EST_HUMAN HIT: T79024.1, EVALUE 9.00e-53
tgcagtttattaggtggggctccagggctcaggaggatcacagggccacacagagcgctacagcgggaccctcctccctccctgcagtccatgtgggagatgtgggaacggtgtgcccaccacctcaccgaggccattcagtacgtggtggagttcgccaagaggctctcaggctttatggagctctgccagaatgaccagattgtgcttctcaaagcaggtgcccagggatgggtgggcaggcctggggacaaggggacagagccaagtggagggaggtggcttaaggaaatcagggggacagagtcagatcctggctttgcttgacactgtccctgcatcttctctccccactgcccaggagcaatggaagtggtgctggttaggatgtgccgggcctacaatgctgacaaccgcacggtcttttttgaaggcaaatacggtggcatggagctgttccgagccttgggtgaggggcagggagaaatgagagggaagattctgatgcca

SEQ ID NO: 10038 - DNA, 506 bp, Homo sapiens
  MAP TO CHR14.3; EXPRESSED IN HEART, SIGNAL = 1.3; EXPRESSED IN BRAIN, SIGNAL =   2; EXPRESSED IN BONE MARROW, SIGNAL = 1.1; SWISSPROT HIT: O95741, EVALUE 1.00e-29; NT HIT: gi14750991, EVALUE 3.00e-85; EST_HUMAN HIT: BI669795.1, EVALUE 5.00e-85
tatcctcggttcccagacagccctcgcctcccttcaaccactaccacaggtagagcgcacagaggtgcttcgctcctgttccagccctgtcttctcccgggtgctggcccttgagtatttttttgaggagaagcagcccctgcagttccacgtgttcgatgccgaggacggagccaccagcccccgaaatgataccttcctcggctctacggagtgcaccttgggccaggtctgcattcccggcctccccggctaccctaccctacctccatcagctttgcctctggaagccaaaaagagagaaaacatgagctctagagctagttcaacccagccttggctcccatctctgccattcactagctgtgcagcctcaggaaagatacttaacctctctgagtcttagttttcctatctaaaaaatggaggagtggtcagagtgcttccctcttcagactattgtaaaaattgagcccaaccctagcccaactcaaagtgccaaccct

SEQ ID NO: 10039 - DNA, 508 bp, Homo sapiens
  MAP TO CHR19.3; EXPRESSED IN HEART, SIGNAL = 5.2; EXPRESSED IN BRAIN, SIGNAL = 4.5; EXPRESSED IN ADULT LIVER, SIGNAL = 4.3; EXPRESSED IN HELA, SIGNAL = 2.9; EXPRESSED IN BONE MARROW, SIGNAL = 3.5; SWISSPROT HIT: P50895, EVALUE 8.00e-38; NT HIT: gi15319746, EVALUE 1.00e-78; EST_HUMAN HIT: BI759375.1, EVALUE 2.00e-75
cagggacaggatggagagaggcgtgggtcaggcagtgggctctgtctgccccacaaccggctcctctgccaccacctcagtcactcaccggtgccgaagtggaagacatggcgcttgttcccgtgggggttggaggcttcacaggagatgccatcgcggctcagggcgctggtcactttcagggtcagagagctgctcacccaaccctgccgtccggggattggctctgcgggctatggaggctccgatcaggccccggctggtggggtcaaggggtggggtcaagggcagaggtgaacgacgtccagtctcccaggaagtggaaaggagggtgtgatacttggatgagtgagagggggctcagggtggagaggaaggtcccttacgctgccccccaattggctccagctgagtttggggtctggatggccgcgggcagagcagatgagtgtgacttcgtctccttccctccagctgccatctgccttgggctctatttccgctgtct

SEQ ID NO: 10040 - DNA, 526 bp, Homo sapiens
  MAP TO CHR8.3; EXPRESSED IN BONE MARROW, SIGNAL = 1.1; EXPRESSED IN LUNG, SIGNAL =  11; EXPRESSED IN BRAIN, SIGNAL = 5.7; SWISSPROT HIT: Q9S1G2, EVALUE 3.70e+00; NT HIT: gi13628239, EVALUE 0.00e+00; EST_HUMAN HIT: BF966750.1, EVALUE 0.00e+00
gacctaggggtttctgttggataattagcagtttagaatggaggaagaacaacaaagacatgctttccatttttttctttacttatctctcaaaacaatattactttgtcttttcaatcttctacttttaactaataaaataagtggattttgtattttaagatccagaaatacttaacacgtgaatattttgctaaaaaagcatatataactattttaaatatccatttatcttttgtatatctaagactcatcctgatttttactatcacacatgaataaagcctttgtatctttctttctctaatgttgtatcatactcttctaaaacttgagtggctgtcttaaaagatataaggggaaagataatattgtctgtctctatattgcttagtatttccatagtcaatgatggtttaataggtaaaccaaaccctataaacctgacctcctttatggttaatactattaagcaagaatgcagtacagaattggatacagtacggatttgtccaaataaattcaa

SEQ ID NO: 10041 - DNA, 599 bp, Homo sapiens
  MAP TO CHR19.3; EXPRESSED IN FETAL LIVER, SIGNAL = 1.9; EXPRESSED IN BRAIN, SIGNAL = 0.88; EXPRESSED IN PLACENTA, SIGNAL = 1.1; EXPRESSED IN HEART, SIGNAL = 1.1; EXPRESSED IN BONE MARROW, SIGNAL = 0.92; SWISSPROT HIT: O75792, EVALUE 3.00e-14; NT HIT: gi14759427, EVALUE 1.00e-94; EST_HUMAN HIT: BI545307.1, EVALUE 1.00e-122
aaagttgccattcatccctgttctatcatcactgcttctttaggtgccatcaccacgaccacatcccctcccttggtgcagtgcaatcccgactcccgtttcccgcatcctccgtaccacgcccctcccctccctggccctaggggcgcacccagcacggggcccctgcccgcctcatcgacgcccaggacgcaaggctccttgcggcacaccgcgggcacaggcgaactcaggcgacagcggcctgtattgtctctctccagctcgctgagatccatgccgcctcagccgccaccaccagctgcaagaactaatactgcaggagcgggtctcggcgcgcgttttccgcgggcctcgaagcggcgcctgcttccggccaatccgcgggcagaacacgcccctggcgctcccgccgccgtggacgcttacgcagccgacgccgacgtcgctgccgtgcgccctcctgggaattgtagtcccgaagggctatggccgaacactcagcttggggaattcggtggacggggtcactttgcaagctctgcttcacggtctctggggccccgcctgcgtggcccggtgggaagagggggaaataa

SEQ ID NO: 10042 - DNA, 512 bp, Homo sapiens
  MAP TO CHR22.3; EXPRESSED IN LUNG, SIGNAL =   7; EXPRESSED IN ADULT LIVER, SIGNAL = 0.98; EXPRESSED IN BONE MARROW, SIGNAL = 0.83; SWISSPROT HIT: P79121, EVALUE 3.00e-20; NT HIT: U33113.1, EVALUE 0.00e+00; EST_HUMAN HIT: BG620939.1, EVALUE 0.00e+00
tctggaaaatggggctacagtccattttaaaaggtgttgggtagggtgaaataaaatcatgggtctgaaaagtacccagccacagtgcctgggctaagtgggaacatagtaggtgtgaattctctctgggctaggctctggacaaaacaacctctccttgttttcttctttcctcctgtaggtcgcgtctatgatggcaagatgtacacggggctgtgcaacttcgtggagaggtgggaccagctcaccctctcccagcgcaaggggctgaactatcggtatcacctgggttgtaactgcaaggtaagctctggggtcactgggggaaggaggggaggtgctgacttgcagccctagaaacatcagctcccaatgcactgggtgccaggccctcggctgggaagggtatgcatgtgttaggccagggcagaggggcaggtctgagcagatatagtaaggattgttgccccaggtggggcagtgaggaaggcagggaaggaagaatgcctttc

SEQ ID NO: 10043 - DNA, 508 bp, Homo sapiens
  MAP TO CHR22.3; EXPRESSED IN LUNG, SIGNAL = 1.6; EXPRESSED IN PLACENTA, SIGNAL = 1.7; EXPRESSED IN BONE MARROW, SIGNAL = 1.5; EXPRESSED IN BRAIN, SIGNAL = 1.4; EXPRESSED IN FETAL LIVER, SIGNAL = 2.7; EST_HUMAN HIT: AV657559.1, EVALUE 0.00e+00; SWISSPROT HIT: Q29488, EVALUE 3.00e-21; NT HIT: X58467.1, EVALUE 0.00e+00
tgatacccctgcaagactccacggaaggggacagggagccgggctccccacaggcacctgctgagaaaggcaggaaggcctccagcttcacaaagtggccctgggcatccaggaagtgttcggggtggaagcggaagggcttctcccagacggcctcatccttcagcaccgatgacaggttggtgaagagcatcatcccctgggcaggagatgcagggtgagagtggggactggactctaggatgctgggacccccaagcacacaggggacacacactgcctggcacacagctggactctgtcaactagtcctgtgcccgagaagctccagagcaccctctccgaccccatggcagggcgcagtcacacctcctgggagcgcccacgctaccccctctccctacaggtattggggtcctccaacattctggcaggtcctggtctgccttccccactagactggggctctggatggacaggccagccctgcctatactctgcaccccac

SEQ ID NO: 10044 - DNA, 534 bp, Homo sapiens
  MAP TO CHR5.3; EXPRESSED IN ADULT LIVER, SIGNAL = 0.68; EXPRESSED IN PLACENTA, SIGNAL = 0.52; EXPRESSED IN BONE MARROW, SIGNAL = 0.83; NT HIT: gi14731760, EVALUE 2.00e-56; EST_HUMAN HIT: W77781.1, EVALUE 2.00e-56; SWISSPROT HIT: P53215, EVALUE 9.00e-04
cccactccctttcagtcttgacttgtgaagccagtgtttggtataggagagaattttatctaagtaagatcataattgcccttaagatgaaaatttactaataactataagatgtttgataaaatccttccacttcttgattgtggaaatttaggttgtgggtcgaatggatagtagcactaggggagaaagaagacatgcagagcttttaatatctatttttattttctcagggaactcttgcagcagacaagaatgagattttgttttctgaattcaacatcaactataataatgagctgccgatgtataggaaagggactgtgttgatatggcagaaggtaatgctgttatgttcaaagaaaaatggaagtcaggaaaaaagatagcctgtgcccattccaagctgtgccctccctgctgcctgtatgctgatgttactccagttgctaatgcaaacctttccaagaggagaggccatagattcttatttttaatgtgcattttgtcagtagtggtccgaaatctcccata

SEQ ID NO: 10045 - DNA, 561 bp, Homo sapiens
  MAP TO CHR10.3; EXPRESSED IN LUNG, SIGNAL =   1; EXPRESSED IN FETAL LIVER, SIGNAL = 0.6; EXPRESSED IN BRAIN, SIGNAL = 1.2; EXPRESSED IN BONE MARROW, SIGNAL =   1; EXPRESSED IN PLACENTA, SIGNAL = 0.75; SWISSPROT HIT: Q02962, EVALUE 2.00e-24; NT HIT: U45251.1, EVALUE 0.00e+00; EST_HUMAN HIT: AA834107.1, EVALUE 4.00e-86
tgaccgctccatctcttaccaggtcctcaggtccttctcttccttgggcttcctcagccagatctctgaggcagggccaccctctggtgtcagccccactggccaggggctgagagtaaggggtccataggggtgcagagctcctgggcccggaaccagatgcccacctctttgccctgcactgttcctgtgcctctgctggcgctgcgtaacgccccgagtgtccatgtgtctccaagatgtgtctgagggctcagtcccaatggagattcccagagtggtgtggacagtttgcggaagcacttgcgagctgacaccttcacccagcagcagctggaagctttggatcgggtctttgagcgtccttcctaccctgacgtcttccaggcatcagagcacatcaaatcagaacaggtgaggagggagctttctgcttgcagaagtagaaaggagccggcagagcaaggcctctcaaaaacttgttcactaaacaccacatgcatagccagcattgtatgtgttacacacgtgtgttctgtgtgtgtgcagtgtgaacaggct

SEQ ID NO: 10046 - DNA, 533 bp, Homo sapiens
  MAP TO CHR4.3; EXPRESSED IN LUNG, SIGNAL = 1.5; EXPRESSED IN HEART, SIGNAL = 1.2; EXPRESSED IN BONE MARROW, SIGNAL = 1.8; EXPRESSED IN PLACENTA, SIGNAL = 1.6; EXPRESSED IN ADULT LIVER, SIGNAL = 1.1; EXPRESSED IN BRAIN, SIGNAL = 1.5; EST_HUMAN HIT: H21487.1, EVALUE 0.00e+00; SWISSPROT HIT: Q16585, EVALUE 2.00e-34; NT HIT: Y09781.1, EVALUE 0.00e+00
taccgattgagctaggtgggagcctcataattctatccttgctaaaaattaagtccattaaagggataaacccatgcacatttttttgtaaatgaaattaatatatgaaaatattagcacactagtttttttaataaagtattcattaaaattcagtaagagacaagacatgtatagaaaaggagaaaataaagtctatgatttcactataaagcagataaaaaattccccatggcaattaaaatgagtattcttacaaatactcactattaaattgatgacagccaggataaacaagaggataatcacacagatggctaaattgccctttcttcctctcaaccctgttttgtggagacgatcttcatcaatcggaatgtatccagctttaaagttactgttgtgctctttattgacactccttctctcaacagccttctcacgcatggacttctttacaggaccattggaactttgctaaaaatgaaatacaacataatggaacagctataccctctcgttttggtgcattt

SEQ ID NO: 10047 - DNA, 582 bp, Homo sapiens
  MAP TO CHR17.3; EXPRESSED IN BONE MARROW, SIGNAL = 0.99; EXPRESSED IN ADULT LIVER, SIGNAL = 0.96; EXPRESSED IN BRAIN, SIGNAL =   1; SWISSPROT HIT: O76011, EVALUE 1.00e-35; NT HIT: gi15208635, EVALUE 0.00e+00; EST_HUMAN HIT: BG118909.1, EVALUE 1.00e-112
ttcccagacattatttgccccatactcacttgcagtcctcactctccaggaggctccggtacgtgttgatctcacactccagccgggcacgcacgtccagcagcacctggtactcctggttctgccgctccaggtcacagcggatctctgccagctgagactccacgttggtgatcaggctctgcacctgggacagctgggagctgtagtgggcctcgctctccgtcagcgtgttttccagagagtctcgctgtggtggggaagatcaggaatgtcagagagctgctccttcaaagggtttcttcacaggattacaaggaagtcacaagctccaagagctaaggagagtgtgtggccccaagcacatccccgggactctgcctcccaagttcccatcgctcaccagcaggtctgaacaatacacaccaggttgtgctgggcctgcagctcgatctccagggcgttgactgtgcgtctcagctcgatgatctccgcctggcaggactgcagctgctctgagctggataccacctgcttgttcagctcctcggtctgaaacacccaagtggggaaaggatcaga

SEQ ID NO: 10048 - DNA, 561 bp, Homo sapiens
  MAP TO CHR6.3; EXPRESSED IN BONE MARROW, SIGNAL = 2.2; EXPRESSED IN HEART, SIGNAL =   3; EXPRESSED IN ADULT LIVER, SIGNAL = 2.3; EXPRESSED IN BRAIN, SIGNAL = 2.1; EST_HUMAN HIT: BG119247.1, EVALUE 0.00e+00; SWISSPROT HIT: Q64355, EVALUE 1.40e+00; NT HIT: AJ012008.1, EVALUE 0.00e+00
tctcaaaaccacccctcaaccaaagagtgcacgtgggattgggggtgggagtcaaggagggaagggattggggagttaaggctggaccgggggaaaggtgagagttggcttccaggaatttgggtggctgaggagagaagtgttcttaccttcacgaacaattcgacctgcggttgttcttcagccatggttgcgtcggggaccaggaagtggccgtccctgggggaactgggaggggctgggaccggggaaggcgggtctcacactcagggactctctcccctagacccagggctgtcccttcagcacaacacaagctcaatcagacctacttgcacccaaactaggcctccccaccagcccaacgcaccccacacccagctcctccagctcggtcctctcccgggctggatcagagagccgctgactcaccgaccggccccgccctgaacctggggaggggactggaggggggcgggactcgacgatgtagggagtgagtccggaaggggaatcctcggatctcccacaggatggggatgggggtgttaaggaggagtc

SEQ ID NO: 10049 - DNA, 569 bp, Homo sapiens
  MAP TO CHRX.3; EXPRESSED IN BONE MARROW, SIGNAL = 1.5; EXPRESSED IN HEART, SIGNAL = 0.84; EXPRESSED IN ADULT LIVER, SIGNAL = 0.85; SWISSPROT HIT: P11532, EVALUE 1.00e-21; NT HIT: gi15310838, EVALUE 9.00e-77; EST_HUMAN HIT: BE767245.1, EVALUE 7.00e-69
tgctcaatgggcaaactaccatacttgtcagaatgacttaaattctaatattatttaaaggttatatcaatgtgaatgcttgataagcgtgctttattgttttgacattcaaatattcacagacctgcaattccccgagtctctgctccatgatttcatagtcggtgacactaagttgaggtatggagagtttggtttctgactgctggacccatgtcctgatggcactcatggtctcctgatagcgcattggtggcaaagtgtcaaaaactttatcaaaagggaaaaaagaatgagaatcacttaattgtttcacactttgccatgttttcctaaattgtcagcaaactcaattatattactagtttcaaatattaacaaaattagaaaatctgaaaaatatatttaatatgattatgaagatacattcctgctacatgtgtaatatgccagggaccttacacatattacattaaattcacaaatcagcctgtaaaatctatattgttcaattcgttttataaggtcaggaaacagaaaaacagataagggcaggaaacagaaaaaca

SEQ ID NO: 10050 - DNA, 540 bp, Homo sapiens
  MAP TO CHR19.3; EXPRESSED IN ADULT LIVER, SIGNAL = 1.4; EXPRESSED IN BONE MARROW, SIGNAL = 1.1; SWISSPROT HIT: Q14145, EVALUE 1.00e-34; NT HIT: AF361890.1, EVALUE 0.00e+00; EST_HUMAN HIT: BG822754.1, EVALUE 1.00e-113
tggcccttaagtattccacgaaggtcagctataatggccattgtccccatttttcttacgcccttgcaggtatgagccagagcgggatgagtggcacttggtggccccaatgctgacacgaaggatcggggtgggcgtggctgtcctcaatcgtctcctttatgccgtggggggctttgacgggacaaaccgccttaattcagctgagtgttactacccagagaggaacgagtggcgaatgatcacagcaatgaacaccatccgaagcggggcaggtgggtggggacggtagggaggggagcacccaggaacaccccctaccatcctggggtgaaactgagccaggcctgggagagaccccctgttgcaaccctcatgctggggtaaccacagaagccctggattctgatagagtccaagcttctctctctccccgcttcatttctgagggtgagaagggagaggagagaggaaaggtctccctcaaggaggtgatggctggggttcccaaagccagacccccagagtcaccttctctgc

SEQ ID NO: 10051 - DNA, 584 bp, Homo sapiens
  MAP TO CHR21.3; EXPRESSED IN LUNG, SIGNAL =  10; EXPRESSED IN HEART, SIGNAL = 7.7; EXPRESSED IN ADULT LIVER, SIGNAL =  11; EXPRESSED IN BRAIN, SIGNAL =  10; EXPRESSED IN FETAL LIVER, SIGNAL = 4.7; EXPRESSED IN PLACENTA, SIGNAL =   6; EXPRESSED IN BONE MARROW, SIGNAL = 8.8; NT HIT: AL163303.2, EVALUE 0.00e+00; EST_HUMAN HIT: BE258224.1, EVALUE 2.00e-66; SWISSPROT HIT: P57722, EVALUE 1.00e-11
ctgaagtgctgccaacacacgtgtctctcccctaggatatcatcaactccatgagcaacagccctgccaccagcaagcccccagtgacgctgaggctggtggtgcctgccagccagtgtgggtccctgatcggcaaaggaggctccaagatcaaggagatcagggaggtaacaggaccttcccagcctgggccgctgcggagcctctaggcgggctgcgggtggtggccacaggccaggcagccttcctgagccttgtccctgctgtctgcaagcccaatgctggccacgcagaccccacagctcaaagtgcgagacaggaacacaggacccatgagcaagcacaactgcactgcagggacccagcccacccactgcccagatacggacccggccacccactgcccagatacagacctggcccacccactgcccagatacggaccccccccacccactgcccagatacggaccccccccccacccactgcccagatacggacccggcccacccactgcccagatacggacctggccacccactgcccagatacggacccggccacccactgcccagatacagac

SEQ ID NO: 10052 - DNA, 503 bp, Homo sapiens
  MAP TO CHR6.3; EXPRESSED IN BONE MARROW, SIGNAL = 0.78; NT HIT: gi12732489, EVALUE 0.00e+00; EST_HUMAN HIT: AW963932.1, EVALUE 0.00e+00; SWISSPROT HIT: P02304, EVALUE 2.00e-40
tgatctgtgaagggtagggccagcaggcagcaccaaagttcccgtatgcgcgttttcagtcttcatttaggtccgaattcccggcatataagaatactaccgtcgcttgtttttcagatttttgcggctattttcgttggtgtgttggtcatgtctggtcgcggcaaaggcggaaagggactgggtaaaggaggcgctaagcgtcaccgtaaggtcctgcgagataacatccagggcattaccaagcctgccatccggcgccttgctcgtcgcgggggtgtcaagcgcatttctggtctcatctacgaggagactcgcggggttctgaaggtgtttctggaaaacgtgattcgtgatgctgtgacttacacggagcacgccaaacgcaagacagtgacagcgatggatgtggtctacgcgctgaagagacagggacgcactctttacggcttcggcggctaatgctaccgcttaaacgactcagcatctcgacttcccaaatc

SEQ ID NO: 10053 - DNA, 599 bp, Homo sapiens
  MAP TO CHRX.3; EXPRESSED IN LUNG, SIGNAL = 0.81; EXPRESSED IN PLACENTA, SIGNAL = 0.7; EXPRESSED IN BONE MARROW, SIGNAL = 0.91; EXPRESSED IN ADULT LIVER, SIGNAL = 0.6; EXPRESSED IN BRAIN, SIGNAL = 0.6; SWISSPROT HIT: P32247, EVALUE 3.00e-76; NT HIT: X76498.1, EVALUE 0.00e+00; EST_HUMAN HIT: BG707051.1, EVALUE 0.00e+00
catgttcaaagggaaatcagctgtaattaactgtaaatttctatgtaaatttataggataactttttaaaatctctcacagctaaatgttttgttttttttgttgttgttgttttttgtgttttttttttttttttttttttttttgctatgtttcttccccctatagattgaatcccgaaagagaattgccagaacggtattggtgttggtggctctgtttgccctctgctggttgccaaatcacctcctgtacctctaccattcattcacttctcaaacctatgtagacccctctgccatgcatttcattttcaccattttctctcgggttttggctttcagcaattcttgcgtaaacccctttgctctctactggctgagcaaaagcttccagaagcattttaaagctcagttgttctgttgcaaggcggagcggcctgagcctcctgttgctgacacctctcttaccaccctggctgtgatgggaacggtcccgggcactgggagcatacagatgtctgaaattagtgtgacctcgttcactgggtgtagtgtgaagcaggcagaggacagattctagcttttcaaggaaaaatg

SEQ ID NO: 10054 - DNA, 569 bp, Homo sapiens
  MAP TO CHR16.3; EXPRESSED IN BONE MARROW, SIGNAL = 0.96; EXPRESSED IN PLACENTA, SIGNAL = 0.98; EXPRESSED IN ADULT LIVER, SIGNAL = 2.3; EXPRESSED IN BRAIN, SIGNAL = 1.2; SWISSPROT HIT: O14561, EVALUE 4.00e-11; NT HIT: gi13648792, EVALUE 2.00e-49; EST_HUMAN HIT: BI908600.1, EVALUE 0.00e+00
atggtgatggttgcacaatgttgtgaatatactaaaaactaccaaattatatggtatatacaaggaggaattttctattatgtgaattctgtctcaacaaacaaacaaacaaacaaacaaacaaacatacctccaaagcatcgtacccaacctgtatgcatactgtctagaagctaactggcccacaacctatatgggattcaaggttgctgaaagttttgatatacttgtagctgttgtagaagggtcaggtgtgttcagttctaaaggattttttttttttaactctctcacattgttgtatatttttcttttagggtttgaaattcctgatatagatgctgaaaagttaatgtgtccacaagaaattgtagattacattgcagataagaaggatgtatatgaataaagtatcaggtaaatagacttaaaaaatgatgttcacccatagatttgtctgtggttcttcaataaaggaaacttaagaagaaacagaaaatggaaatgcttgaccaagatttttcactacttataaaatgcaagccctttcctgttgtctgccactcaaa

SEQ ID NO: 10055 - DNA, 594 bp, Homo sapiens
  MAP TO CHR11.3; EXPRESSED IN BONE MARROW, SIGNAL = 0.72; EXPRESSED IN BRAIN, SIGNAL = 0.65; SWISSPROT HIT: P40953, EVALUE 2.00e+00; NT HIT: AJ400877.1, EVALUE 0.00e+00; EST_HUMAN HIT: BF330948.1, EVALUE 1.00e-111
cacggcttgctccttatttctttgcctttcactttttattattcttgggggaaaagtaatgcaaacactgaagtatctcctgttttttttcaccccgaaactaaactgaattggtttggaacctgatggttttctctgcttcataaaaacccaaagctaccattctgatccacaaatttctgtttgaatcaaatgctgcccagcctgctaggtgccccctccaggtttctccccattcggtccacagggagctcggggtgttggtagggcctgcagttgatctggccattgtcacacgctgcagcctgatctcctcccgcactgctgtccctcttgtttctgtagcttcttgtgacctgagctgcatcgtaaagcgaaccgagaagcggctccgtaaagccatccgcacgctcagaaaggccgtccacagggagcagtttcacctccagctctcaggcatgaacctcgacgtggctaaaaagcctcccagaacatctgaacgccaggcagagtcctgtggagtgggccagggtcatgcagaaaaccaatgtggtgagtggcctgggacattcttgctaacagaacagccttggg

SEQ ID NO: 10056 - DNA, 556 bp, Homo sapiens
  MAP TO CHR22.3; EXPRESSED IN BONE MARROW, SIGNAL = 1.5; EXPRESSED IN ADULT LIVER, SIGNAL = 3.9; EXPRESSED IN LUNG, SIGNAL = 3.7; NT HIT: S81003.1, EVALUE 1.00e-100; EST_HUMAN HIT: BF791537.1, EVALUE 1.00e-101; SWISSPROT HIT: P51966, EVALUE 3.00e-21
catcaatctcaagccccttctcagtttagcagatagcttgctctagaaatacttttgggtggctgggttgtcctgaaggtggcagggcttcagttgatacttgaatcccttgaaataaattgatttttcagataaacaattaaaacattcctgtcttggccataggtttatgaaccatggtgtgttcattttgatctctctttccttccaggacaaccctccatatgataagggagccttcagaatcgaaatcaactttccagcagagtacccattcaaaccaccgaagatcacatttaaaacaaagatctatcacccaaacatcgacgaaaaggggcaggtctgtctgccagtaattagtgccgaaaactggaagccagcaaccaaaaccgaccaaggtaagacatgtgcctgtgtcttcctcggagggggtctttgggggtgctgctctggggtgggggcttctggtaccagatcagacagaatccagagaatctttcaggtacacgaaaaatgtagctgaggtcctgtcagaccttgtgggaatggctcatct

SEQ ID NO: 10057 - DNA, 597 bp, Homo sapiens
  MAP TO CHR17.3; EXPRESSED IN FETAL LIVER, SIGNAL = 1.6; EXPRESSED IN BONE MARROW, SIGNAL = 1.3; EXPRESSED IN HEART, SIGNAL = 1.3; SWISSPROT HIT: P39429, EVALUE 8.00e-06; NT HIT: gi15313693, EVALUE 7.00e-87; EST_HUMAN HIT: AW630111.1, EVALUE 1.00e-129
acatttccagagccatgagggtatgtgcccccaggagagtgtctactgtgagaataagtgtggtgcccgcatgatgcggcggctgctggcccagcatgccacctctgagtgccccaagcgcactcagccctgcacctactgcactaaggagttcgtctttgacaccatccaggtgaggccttccctgaactgtgggttgcagggtaggtgacaggtagtcaggatattgactcctgcctctctacttctgtggccccagagccaccagtaccagtgcccaaggctgcctgttgcctgccccaaccaatgtggtgtgggcactgtggctcgggaggacctgccaggccatctgaaggacagctgtaacaccgccctggtgctctgcccattcaaagactccggctgcaagcacagggtgagatgccccttttcctgtcagcccccttttgcccttgaagccctagacagaggctcagcttctgatgtacttaggccttggtggtccctgctgtgctgctctgaaaccctcagtccttccctctgctgccagctccagcctcttcctaacaccctctgtcttcctcacgtagagctggg

SEQ ID NO: 10058 - DNA, 520 bp, Homo sapiens
  MAP TO CHR6.3; EXPRESSED IN LUNG, SIGNAL = 3.6; EXPRESSED IN HEART, SIGNAL = 2.6; EXPRESSED IN BONE MARROW, SIGNAL = 1.9; EXPRESSED IN FETAL LIVER, SIGNAL = 2.9; SWISSPROT HIT: P20618, EVALUE 3.00e-20; NT HIT: gi14760144, EVALUE 2.00e-68; EST_HUMAN HIT: AA425237.1, EVALUE 0.00e+00
gagcttcaatgtgcctttggaggtcatacattagcttcagtttcttcatcactttcattatcagaaatgaaatgagaattgtgtcagatggtatttatggttcttttcaactctagatggatacacacatctagggaataataactcctcccccccaccattttccagaaagaaggaattctaccttcttcatcaagtccaccgatgatgttgtaaacatagtatggaaagaagcgccttgaatacaggattgtagacagcattgcagcaattgcccccgtagtcatggccttattattggaatgcttatacatctgcaattattgataaaagtcacaggcatgtagaggcagaggccattatagactagaacaatcaacagtataaagtgaataaataaatgcataccacagtggaaggggaaagcatgcctatttccttcatgatcaaccaacacagtattactaacataaaattttaagggaaggaatgccaagtttgccctcagctctctggttta

SEQ ID NO: 10059 - DNA, 506 bp, Homo sapiens
  MAP TO CHR13.3; EXPRESSED IN ADULT LIVER, SIGNAL = 0.72; EXPRESSED IN LUNG, SIGNAL =   1; EXPRESSED IN PLACENTA, SIGNAL = 0.82; EXPRESSED IN BONE MARROW, SIGNAL = 0.73; SWISSPROT HIT: Q02401, EVALUE 2.00e-17; NT HIT: AB009667.1, EVALUE 0.00e+00; EST_HUMAN HIT: AW572920.1, EVALUE 0.00e+00
tggcttaccaaacgagaagcattacactttatttatttaagtaggaaacgctcagctgctcttgaaccatgatgcaagtgcccagcgaagggtcatgttgctcttgtcccctcttccctttgcagccatcaagctggatggggtggatgtcatcgggtataccgcatggtccctcatggatggtttcgagtggcacagaggttacagcatcaggcgtggactcttctatgttgactttctaagccaggacaagatgttgttgccaaagtcttcagccttgttctaccaaaagctgatagagaaaaatggcttccctcctttacctgaaaatcagcccctagaagggacatttccctgtgactttgcttggggagttgttgacaactacattcaagtaagtcagctgacaaaaccaatcagcagtctcaccaagccctatcactagtaagtagtgcttccttcctaggctgattgtcatggcacattgtccgttctttgagccaaaa

SEQ ID NO: 10060 - DNA, 510 bp, Homo sapiens
  MAP TO CHR1.3; EXPRESSED IN BONE MARROW, SIGNAL = 1.1; EXPRESSED IN LUNG, SIGNAL = 4.9; EXPRESSED IN HEART, SIGNAL = 3.7; EXPRESSED IN FETAL LIVER, SIGNAL = 2.8; SWISSPROT HIT: Q62159, EVALUE 2.00e-24; NT HIT: gi16161876, EVALUE 1.00e-87; EST_HUMAN HIT: AA148275.1, EVALUE 0.00e+00
gagccagtctgtgggagaaccagaaagtatatccaggttttttaagactgcagatttacttcctaacttttactggttccagcagggagaatgaagcaaagacaggggtaggaatggggaaggacatactaggtcattcagtgactggggggcggggactcagggtggggtgggaagggcatttctgccttcacctgcttgccgtccacctcaatgtccgcaatatagttctcaaagacagtagggacgtagacctccggaaactgatccttgctgaagacgatgaggaggcaggtcttcccacaggcaccatccccaacgatcaccagcttctttcggattgcagccatggtggggctgccaggaaagacgtattggggatttgaggaaaagccattaagtccaaaaacacttctctagggcccccaaacctccctggaaaccgaggcatctagcaaagggacagggggcttgctcaggcatgttctggcaaaacaccaattgtgcgac

SEQ ID NO: 10061 - DNA, 524 bp, Homo sapiens
  MAP TO CHR9.3; EXPRESSED IN BONE MARROW, SIGNAL = 6.5; EXPRESSED IN FETAL LIVER, SIGNAL =  20; EST_HUMAN HIT: AV734545.1, EVALUE 0.00e+00; SWISSPROT HIT: P10660, EVALUE 4.00e-19; NT HIT: M77232.1, EVALUE 0.00e+00
atttcctgcttgtgtggaggcaacatgaaaggctttttgcagtggaattaactttgtagatggctctacaattacctgtatagatagtttcgtaaactatttccccccttttaatccttagctgaacatctccttcccagccactggctgccagaaactcattgaagtggacgatgaacgcaaacttcgtactttctatgagaagcgtatggccacagaagttgctgctgacgctctgggtgaagaatggaaggtaaaagttgacaaattgttgcaggtatttaagtcagagacggtaaacgccattggtaactggtatttggaatggggttcagactccgggttctggcttctgacctttggtaagttgcttccgaatgccactttataaagttagaggtattaccttggagggggggacgtagagtaagccataaaatatacgtaaagtttacatcaacataattcttgccctgcatcatgcatttggcaatatgtcacatagctgtcctcataatccccaa

SEQ ID NO: 10062 - DNA, 583 bp, Homo sapiens
  MAP TO CHR17.3; EXPRESSED IN ADULT LIVER, SIGNAL = 3.6; EXPRESSED IN BRAIN, SIGNAL = 4.6; EXPRESSED IN HELA, SIGNAL = 7.8; EXPRESSED IN BONE MARROW, SIGNAL = 3.3; NT HIT: gi14785905, EVALUE 0.00e+00; EST_HUMAN HIT: AL556780.1, EVALUE 0.00e+00; SWISSPROT HIT: P94604, EVALUE 7.40e+00
tctgcaagtgtgaggtccagatgctgctgctcatgttgggctttccttttgggaactatttctctttatttatagtgtcgggcttccggggaaagcaatcattggtgtgtatgtgtatgtgcatgcacacacgtgcatatacacatttgtgtatgtggaaatgtgctgggcaagtcaaaactatagaagagttgcctcctgtctctcgaatcttccagagatatcacttaattgttaacagcttttgtgttaatccccttcagcccctagctcttttattctaccacggctggagagttgatacctgcagtcagcctgccagtgactcttagtgtctgtttctgacttatttttcctgtctctgtcttccaacccccaataatatttccaccggggatgcatcatttttactcccaatattctgtagagagggagtcaggatgctgtcttcccacgaatagtactcagtaacaaaccaattgcattttagttgggcagtgctcccacccaccctccagatcccttccagctaaaacccttcccccttccctccatgtgtttctcagtttcccgtttcgtttgt

SEQ ID NO: 10063 - DNA, 541 bp, Homo sapiens
  MAP TO CHR2.3; EXPRESSED IN ADULT LIVER, SIGNAL = 0.95; EXPRESSED IN BRAIN, SIGNAL =   1; EXPRESSED IN BONE MARROW, SIGNAL = 1.4; EXPRESSED IN FETAL LIVER, SIGNAL = 0.96; SWISSPROT HIT: Q06141, EVALUE 3.00e-14; NT HIT: L15533.1, EVALUE 0.00e+00; EST_HUMAN HIT: AW002913.1, EVALUE 1.00e-61
actggtgggaaagtgtggagggtcagcaatgagatgtggggagggacaatgattggaggacccaatatagagatagcccacagtgaagagagtgttgaatggttgaataaggggaaagggtaataacagactagatggtggcccatttagtagggctattttgagataaagaacttctgaaaacacaagggaagatgaagagctgtcaggaatgtggtcttcctccccaagggcagacctagatattccccaaggtcatctcccacccaccccctactcttcattttactctctcccttttcttccaccccaggtgaagaaacccagaaggaactgccctctccacggatcagctgtcccaaaggctccaaggcctatggctccccctgctatgccttgtttttgtcaccaaaatcctggatggatgcagatgtgagtggttagatgtggggttggaggtgataggggaaagtccatgcaggtctcagggggaggagggtctccttcaggagagttccttgggaatgaggatgaacacgct

SEQ ID NO: 10064 - DNA, 567 bp, Homo sapiens
  MAP TO CHR6.3; EXPRESSED IN HEART, SIGNAL = 1.3; EXPRESSED IN PLACENTA, SIGNAL = 0.95; EXPRESSED IN BONE MARROW, SIGNAL = 1.6; EXPRESSED IN BRAIN, SIGNAL = 1.8; SWISSPROT HIT: P18467, EVALUE 1.00e-49; NT HIT: X87344.1, EVALUE 0.00e+00; EST_HUMAN HIT: BG176768.1, EVALUE 0.00e+00
ctgcttctctttgagggcacaatagccctcgaagtccctgagaaccttgggggtctgagaccaagatcacagtggctgacttgtgaggataatatatcacagctggggccagaacatctacacagacaaccatttatcctaaagcagaaaattgcttgtaagaaagaagagccatggccaggttcacatgggggacattcctgagccccgccagacctcagcttccagctcaccttttctccccacagtgaagggtgcgcccagcctgtagttgtgtctacagaccccatccacggcctgtctgctcctctccaagagatccagccggctgttccactgctcagcatctggctgccccagcttggtcaatgccacaaacatccccacatcactgtcgaaacgtacatactcctccaagttaaagatgaatctgaccacaaactgcaccttttctgtcccgttggtgaagtaacagtcagcctttgcctgaatcacaaaatcttctggaaaaccaaaaccaaaaccatgaaccagccccctcctctgggaaaacccatgcctggtaaa

SEQ ID NO: 10065 - DNA, 573 bp, Homo sapiens
  MAP TO CHR6.3; EXPRESSED IN HELA, SIGNAL = 2.4; EXPRESSED IN BONE MARROW, SIGNAL = 1.2; EXPRESSED IN LUNG, SIGNAL = 2.5; EXPRESSED IN HEART, SIGNAL = 1.1; EXPRESSED IN BRAIN, SIGNAL = 1.2; SWISSPROT HIT: Q03519, EVALUE 8.00e-33; NT HIT: X87344.1, EVALUE 0.00e+00; EST_HUMAN HIT: AW390813.1, EVALUE 4.00e-89
ttttaatcttcgcagtgggggcgggggatgtacagactcctttgagaagctaatgaaaagttatcatcgcctatcatctccccttcctattccctcccccataccttcacatacactttacatttttgtttacagttctggagaatcatgaatcttctgaagtcaaatatccattgttggatggctggacaaacaaaatgtagtatatactacaatataccttctcccctaatggctgagaagagaacatctctctctaggggatcctctagccacaaatgtggaagcctcctcacctgtcagttttattctccctttggggttcccttacatgcacgctcacctgatggcgggtgttgtacaccttctccgctgctattgtgaagggcatgtgcagcagagaaaggagggtgagtcgaggcgatatgctgagcatgaagccatacagccccaccactttcaccaggcttcgcaagagcacattggcatttaaaggaagccagttactcatcagggtggtatccgagctcagccgtgagttcagctcccctaagaaggacagagcaggtgagg

SEQ ID NO: 10066 - DNA, 513 bp, Homo sapiens
  MAP TO CHR8.3; EXPRESSED IN BRAIN, SIGNAL = 1.5; EXPRESSED IN PLACENTA, SIGNAL = 0.58; EXPRESSED IN BONE MARROW, SIGNAL = 0.9; NT HIT: gi14743948, EVALUE 1.00e-130; EST_HUMAN HIT: AA281267.1, EVALUE 1.00e-103; SWISSPROT HIT: P40472, EVALUE 2.80e+00
ccaccttaggggacagattgacatagattgttgttctattctttcctctgtcaacaatgtttcttcatgtcagtcctatagatctaatttggcaagcaattaatttcaagaataatatcagtgtttcagagaagtattgcttattggtctgaaggaagattggtatgtatcttaaacttactattttgttgtctaggatagtgaatgagagccgacaggtactccaggaacctgattttgctcagtctctcctgagggatccaaatactcctatcataagaaagtcaaggggaacttccactcaaggaacatccacccatgcttcttcaactcagctggctatggtggatgatcaaagaagcaaagcaggaagcatccacagcaaagtgagcagctaccacggcagcctccacagatcacgtgatggcaggtgagttttgttagtagtgtagtttatttcataagctgaattatgaccatacagcttaagaaagaggagcagccaattctgaa

SEQ ID NO: 10067 - DNA, 556 bp, Homo sapiens
  MAP TO CHR12.3; EXPRESSED IN BONE MARROW, SIGNAL = 0.75; EXPRESSED IN FETAL LIVER, SIGNAL = 0.8; SWISSPROT HIT: P50170, EVALUE 1.00e-26; NT HIT: AF086735.1, EVALUE 0.00e+00; EST_HUMAN HIT: AV647688.1, EVALUE 0.00e+00
cattggtggctgatcacaagctggcattagagacagcttgtttttatgtgctgagacttctactgtgggtggagaccatcatttatgcagtccagatattcccaaagagagacagacatgacttagtgtgagacacttgctactttcacatggatgggctccagctcagggaatttggataaaagagatttgaggcattgcttgactgggggttgtggggtggcatgagttcttagaccctttccactctaagttgaatccaaagcaggagcggttagaggtggaaatatacatggattgtttctgattcttaacagataagaaatcagctgaacaaatggagcagaagtgcacacaggatctgtcgttggtgaccaactgcatggagcatgcgctgattgcctgccacccccgtactcgctactcagctggctgggatgccaagcttctctacctccccatgagctacatgcccaccttcctggtggatgccattatgtactgggtctctccaagcccggccaaggctctatgaagctaaggttggatgcatggt

SEQ ID NO: 10068 - DNA, 581 bp, Homo sapiens
  MAP TO CHR5.3; EXPRESSED IN LUNG, SIGNAL = 2.7; EXPRESSED IN HEART, SIGNAL = 2.9; EXPRESSED IN PLACENTA, SIGNAL = 2.4; EXPRESSED IN FETAL LIVER, SIGNAL = 2.1; EXPRESSED IN ADULT LIVER, SIGNAL = 2.7; EXPRESSED IN BRAIN, SIGNAL =   3; EXPRESSED IN HELA, SIGNAL = 2.7; EXPRESSED IN BONE MARROW, SIGNAL = 2.9; SWISSPROT HIT: P43250, EVALUE 2.00e-15; NT HIT: AF040753.1, EVALUE 0.00e+00; EST_HUMAN HIT: BG695985.1, EVALUE 2.00e-54
gaagtaagggggctgggtagatcccacggtctgccagggcaaggcctctgcccagccctctcccctggggctggcagagacagggcacggggagacaagcgaagcaaagctggcagctcgaaggggccagggtgcaggggatcaaagcagtgggcagggggagtggggcgggcaccagacttctttctcccacatcttgcctttgccatggaagggctgcccgtggctccccgaggccaggcagcaaggccaacccacggggagcccacactgctcacctctggaaagagaaaagaggccatgagcccagccaggggtgggggacaggcgggaatgaggccagagaccctgggcaccacaacaggactggaggacgcccactcccagcgcatgcgggcaccggctctgcctcccacccaccgtcccctggagccaggttaggggcccaggtaggccgctgctggggcttacttggcgactgaagagtctctgcagcagtccctttttaggaggtgcaggtggctggcccttccagtccaggtctgggggaactgagccatccagcccaaagacattcagct

SEQ ID NO: 10069 - DNA, 515 bp, Homo sapiens
  MAP TO CHR18.3; EXPRESSED IN BONE MARROW, SIGNAL = 0.72; EXPRESSED IN FETAL LIVER, SIGNAL = 1.9; NT HIT: gi14764579, EVALUE 0.00e+00; EST_HUMAN HIT: AL534291.1, EVALUE 0.00e+00
aaacagggaaaggtgtgtgtgtaaatgttgtttgtggtgtctaggtaacattggtgcaggagagaattgaacttggtttgtttttcttttccttcagttgcaggaagaggcagaggaagaggaagaggaagaggacgtggccgtggcagaggaagagggggtcctaggcgataatgtctctcaagatttcaaagtcatatgagatttgggatattttttgtacaggttgtgtttgtttatgtcagtttttaataaacataaatgtgggacagagctgtctatttagtatatcaaagttttagtagtttcctccacattcacgaaattaccacagtgagagctaagcatttctactgggcagtttcatttttagttgatcaggttttaagtttttgaactaaaatttttctttttctttttatgatgaataaggttaaaataaaagccttagacaaattaaatttggcagagtttaattgagcaaaggacaattcacaaatcaggtagcccctgaa

SEQ ID NO: 10070 - DNA, 555 bp, Homo sapiens
  MAP TO CHR11.3; EXPRESSED IN HEART, SIGNAL = 9.4; EXPRESSED IN PLACENTA, SIGNAL = 8.5; EXPRESSED IN FETAL LIVER, SIGNAL = 6.1; EXPRESSED IN BRAIN, SIGNAL =  13; EXPRESSED IN LUNG, SIGNAL = 5.7; EXPRESSED IN BONE MARROW, SIGNAL =  10; SWISSPROT HIT: P09304, EVALUE 9.00e+00; NT HIT: J02986.1, EVALUE 0.00e+00; EST_HUMAN HIT: BF842915.1, EVALUE 0.00e+00
tcagaagcatctgccatcacaaattatttttcatcactagggttttgtttgtgattgcaaatacactatcttgtccatttctagccttccagtgggatattgattcctctccatggaatttatgaaagagcttcgtcttttccccaatagtcacagcgatgggggctgtcgctgatccaaaaaaggcaaacaggagtttataaagttgtccaagggtctctcccatctggtagatcgaggaagattgactacaggaaagttcaaaggtcagtcttggcagatctaaaaacagagtggcagcgaggacttcaacaccgcactttctgtacccgaagtaaaccgatatgtcccgattaatagcaacagggcacaaagggagtgggcctctgaggatgctagccgagagccaagcctgggagctccctgaactggctgcccaagcctcaggcgggcctttccagacagagatgctccacgccatactacaggggatgacatcggaatccaatgtcacctttttttaaaacacagaatagcagcacactcgtgacaact

SEQ ID NO: 10071 - DNA, 540 bp, Homo sapiens
  MAP TO CHR6.3; EXPRESSED IN HELA, SIGNAL = 3.8; EXPRESSED IN BONE MARROW, SIGNAL = 3.8; EXPRESSED IN ADULT LIVER, SIGNAL = 3.8; EXPRESSED IN BRAIN, SIGNAL =   4; EST_HUMAN HIT: AW007185.1, EVALUE 1.00e-128; SWISSPROT HIT: O15212, EVALUE 6.00e-16; NT HIT: gi11417509, EVALUE 7.00e-65
tgaaagaggtgagggactgggatttgtggggcgaggagggacctgtactagccatggttctgatcacatatgtcccatccctccatcaggaactggccctgctggatgggtccaacgtggtctttaaacttctgggtccggtgctagtcaaacaggagctgggggaggctcgggccacagtagggaagaggctggactatatcacagctgaaatgtgagtttttattccaccaccgtgtgctgcaccctgtgatgcaagtgaaccattggagtagaggtgttgaaccattgcagaacagctctccatagtggcccctagtcctccagttcctccaaccctttccttcccttttaaccccccttcttctccctcccctggatctcaagttttccacctatctctttcttgcgtttagcactctccatagtgagtcctactaatttctccctttctgcttgtctcccttgtctctccttagtaagcgatacgaatcccagcttcgggatcttgagcggcagtcagagcaacagagggagacc

SEQ ID NO: 10072 - DNA, 547 bp, Homo sapiens
  MAP TO CHR1.3; EXPRESSED IN HELA, SIGNAL =   3; EXPRESSED IN BONE MARROW, SIGNAL = 1.3; EXPRESSED IN HEART, SIGNAL = 1.4; EXPRESSED IN PLACENTA, SIGNAL = 1.5; EXPRESSED IN BRAIN, SIGNAL = 1.4; NT HIT: gi4557842, EVALUE 1.00e-109; EST_HUMAN HIT: BI753071.1, EVALUE 1.00e-109; SWISSPROT HIT: P48382, EVALUE 3.00e-32
gaggaataggggagtgaggcaattctgattgactgactggtagagacaggaaatggggtgctaaagcatgtcttagaagggtctccaggaagagggggcaaatccaaggtgtctctattctagtgtgtgggagggccactgaagctgaaagtggctcagggttgctgagacataagagagggtcaacacaccagcaagccccatggccttaagcacatgggcatgtgcagatcgggcagagatgagatgctgctgtagcaggaagcgggcgacctcaacgatggaactgaaggaccgtttcaggatccgctctgcccagtcacaggtcagggcacacgctgcctccaccagttcatctcgaggtgctggggttacttctgggcccatttctggctgaagtggggaaggacatgcccaatcacactccaaattaaagaacccttgcctcctctcttgtcagagatcaaagactattgaccaaagctgagaccagactggggatgggagtagcctctacctatcccattgcagaagcccacaagttctc

SEQ ID NO: 10073 - DNA, 522 bp, Homo sapiens
  MAP TO CHRX.3; EXPRESSED IN BONE MARROW, SIGNAL = 0.97; EXPRESSED IN ADULT LIVER, SIGNAL = 1.1; EXPRESSED IN BRAIN, SIGNAL = 0.86; EXPRESSED IN LUNG, SIGNAL = 1.1; EXPRESSED IN PLACENTA, SIGNAL = 1.3; NT HIT: U97097.1, EVALUE 0.00e+00; EST_HUMAN HIT: BG654578.1, EVALUE 6.00e-97; SWISSPROT HIT: Q61687, EVALUE 3.00e-28
caataggattcttcctgggcatatgtattatcatcctgactccttagataatatattattttcttcagtaagtaagaaatgaattctctgaactcttgatagttaaaaaaaaactaagtatcaaaaagtcatattgtaattaaaatatttgtaaagtactaattactgaagcatttattctatattttcattttcagaggacgattatttatcatttctactaaagcaggatctctaggaattaatctggtagctgctaatcgagtaattatattcgacgcttcttggaatccatcttatgacatccagagtatattcagagtttatcgctttggacaaactaagcctgtttatgtatataggttcttagctcaggtaggtttataattctctttttcatattgaaagtttatgtgaaactgataatattttagagatatggaacatatgtgtattacagagagggaaacaaagttggaaataccatttctgtacataaagcagcagaagtcagttttggct

SEQ ID NO: 10074 - DNA, 522 bp, Homo sapiens
  MAP TO CHR18.3; EXPRESSED IN BONE MARROW, SIGNAL =   1; EXPRESSED IN ADULT LIVER, SIGNAL = 1.9; EXPRESSED IN BRAIN, SIGNAL = 2.3; SWISSPROT HIT: P06727, EVALUE 3.70e-02; NT HIT: gi14764209, EVALUE 0.00e+00; EST_HUMAN HIT: AV710732.1, EVALUE 0.00e+00
ctctcaccacctccagcttcgatgatgtgggtgtcctgcagaagaagctggtgcccttcctcacagagttaaatatgcatctggcccaggaattagagaagctgaaaggatgatcctggggaaggtggagcagctgcaggcctggctgcaggcctgactactgcccacaccaacgaggtgatctagcagatacatggcaacgtgtgaactgcaacaacgcctggtgccccagcaccaaccttccaagtgtaaaaacaatgtgctgctgcttcacttccgccctccggttatcaagcaaaatgtctcttgtggcccatcttactggaagagagttccgggaaacatagcctcaccaaggtgacacattacaaagccaccctaccatgaatccgctcccaagggtctcactgctcacctgaggataactcaatataactatgtggctgaaaatgcaaagctgaagaccatggatttcatggtgattccagcaagtacagagattctatgaagcccacccagaaa

SEQ ID NO: 10075 - DNA, 567 bp, Homo sapiens
  MAP TO CHR2.3; EXPRESSED IN BONE MARROW, SIGNAL = 0.93; EXPRESSED IN FETAL LIVER, SIGNAL = 1.9; EST_HUMAN HIT: AU135757.1, EVALUE 0.00e+00; SWISSPROT HIT: Q16236, EVALUE 1.00e-107; NT HIT: gi5453775, EVALUE 0.00e+00
aagcggcttgaatgtttgtcttttgtgaatggggttttccgatgaccaggacttacaggcaattctttctctggtgtgttctcacattgggcatcatgcacgtgagtgctctgcccctgagatggtgacaagggttgtaccatatccccagaagaatgtactggtgttttaggaccattctgtttgacacttccaggggcactatctagctcttccacttcagaatcactgaggccaagtagtgtgtctccatagctggaagattccactgagtgttctggtgatgccacactgggacttgtgtttagtgaaatgccggagtcagaatcattgaattctgctgtgctttcagggtggttttggttgaaagctttgcaaagtgatagatcagaaacatcaatgggcccatttagaagttcagagagtgaatggcttaaagtagcaggtgagggcatgctgttgctgatactgggctcagctatgaaagcagaataaaattcatcaccaaaatctgtgttgactgtggcatctgaatttaatgagttcactgtcaactggttggggtct

SEQ ID NO: 10076 - DNA, 504 bp, Homo sapiens
  MAP TO CHR3.3; EXPRESSED IN HELA, SIGNAL = 2.7; EXPRESSED IN BRAIN, SIGNAL = 4.8; EXPRESSED IN FETAL LIVER, SIGNAL = 2.6; EXPRESSED IN BONE MARROW, SIGNAL = 2.6; NT HIT: gi15297768, EVALUE 1.00e-110; EST_HUMAN HIT: BE889730.1, EVALUE 1.00e-110; SWISSPROT HIT: Q05655, EVALUE 8.00e-34
tcccttaacagatgcggaagcagaagctcagagaggctgggaatctggtgaattgcagagccaggattcacacccaggacatgttggccacagggctggactggtggccagcacagggcccggtgctcttcagctgtgctcactgaccaagcccgcgtgtgtgcacgcacacacatgcacgcatgcacacacacacagacacacacacacacacacacggcacggctcgtgcgccccttacccagaactcagccttgccattgttcttcttgcagcgctcggccagcaccgacacacccacggtcacctcagacactggctcctctgctgcccgcattagcacaatctggatgacgcgcccctcatagatgtgggcatcgaacgtcgacttccactcaggatacatggtcggcttcttctgcaccagtgttttcccacgctctgcaacaaggccaggcagagaaggttgggccatggcccctctgtccctccctcgtagacctc

SEQ ID NO: 10077 - DNA, 531 bp, Homo sapiens
  MAP TO CHR3.3; EXPRESSED IN ADULT LIVER, SIGNAL = 1.4; EXPRESSED IN PLACENTA, SIGNAL = 0.67; EXPRESSED IN LUNG, SIGNAL = 0.67; EXPRESSED IN HEART, SIGNAL = 0.63; EXPRESSED IN BONE MARROW, SIGNAL = 0.69; NT HIT: X63575.1, EVALUE 1.00e-97; EST_HUMAN HIT: BG739902.1, EVALUE 1.00e-33; SWISSPROT HIT: Q01814, EVALUE 6.00e-30
atcatgcagcaccctacctcccagctcccatctgagcgcgttcccctgaggatgctttacgttgggacacgcacctcccccttctcgttgcggatcctcctgttgaactccttgccctcgaggcacagaaagtcctccccaggatggatgatgccacacttgatggcgatggcccgagccgtgttgatattgtcgccagtgaccatgcggaccgtgatgcctgcccgctggcacttgcggatggcttctgggacctgggcaggagggcaggggccatgggggagggcaccacctcaggcagactccccctgccttcatggattccagaggagcccttctcacaggcagctctactgaaaggggactagatgactatgagatgctgatgacgcacatggcatatgggccacagcctcccttcctgtgccaacggcaggcattgttaatcaatcacacatcctttgattaaaccctgatgtggttctcatcacagagtcccaggtcgctaccacctattgaccatgacggtcc

SEQ ID NO: 10078 - DNA, 554 bp, Homo sapiens
  MAP TO CHR19.3; EXPRESSED IN BONE MARROW, SIGNAL = 1.7; EXPRESSED IN ADULT LIVER, SIGNAL = 4.3; EXPRESSED IN BRAIN, SIGNAL = 5.9; NT HIT: AJ133534.1, EVALUE 0.00e+00; EST_HUMAN HIT: AA121400.1, EVALUE 0.00e+00; SWISSPROT HIT: O00268, EVALUE 5.00e-03
agacccacagaagatgctgggggaatatttcctgaatgacacccataacagctttattttcaaaggcgggatccctccccgggcttgtgatgggacggcgctgtgggcccgagcagcagagccgtgcaggacaggcatgggcaggggtggggcagctggcccgggaggccggcaggtcccagaagacacctcacacgggttccatctgcagctcctccccgtccacagcctcaatctggtggaaggcagcgtgggagccgatgaccaccagggtggctcctgcaggaaagccggcagctcagggccacactcctgcacctggctcccaccatccaccccagctgctcagaccctgtactcacccagcacccagaagacggccgagcccgcaccagccagccagaagaaggggaaggagatgcctccagccagagcatactgatgcgctgggctcacctctcggcctgggggcagatggcattggggtgctgttccgactctccatgccctctcccagagtaacccctgctgccccccaacaatccgtacaagct

SEQ ID NO: 10079 - DNA, 524 bp, Homo sapiens
  MAP TO CHR15.3; EXPRESSED IN HELA, SIGNAL = 2.6; EXPRESSED IN PLACENTA, SIGNAL = 1.9; EXPRESSED IN BONE MARROW, SIGNAL = 1.1; EXPRESSED IN ADULT LIVER, SIGNAL = 1.2; SWISSPROT HIT: P23768, EVALUE 7.40e-01; NT HIT: gi13653063, EVALUE 0.00e+00; EST_HUMAN HIT: BF203958.1, EVALUE 0.00e+00
ctgtcaagacgctcacttggaagaaaaacaagaagaaaaaaaggttttggaaaagcaaggcgcaggaagtaagcaagaagccaggaagcggccctggtgctgtggtgcgacctccaaaggcaccagaagacttttctcaaaactggaaggtgctgcaagagtggctgctgaaacaaaaatctcaggccccagaaaagccttttgtcatctctcagatgggttccaaaaagaagcccaaaattatccagcaaaacaaaaaagagatctcgcctcaagtgaagggagaggaaatgctggcgggaaaagaccaagaggccagcaggggctctgttccttcaggctccaagatggacaggaaggcgccagtacctcgcaccaaggccggcggagcagagcacaataagaaaggaaccaaggaaaggacaaatggtgatattgttccagaatgaggggacatcaagcataagaagcagaaagctaaggaggcagaccctgccccacccaccgaggaagacatgtggttt

SEQ ID NO: 10080 - DNA, 524 bp, Homo sapiens
  MAP TO CHRX.3; EXPRESSED IN ADULT LIVER, SIGNAL = 1.6; EXPRESSED IN BRAIN, SIGNAL = 1.3; EXPRESSED IN BONE MARROW, SIGNAL = 1.3; EXPRESSED IN PLACENTA, SIGNAL = 1.3; NT HIT: gi14759883, EVALUE 1.00e-128; SWISSPROT HIT: Q9BZS1, EVALUE 2.00e-24
acacgtgtgactcctttcccctattgtctacgcagcctgcccttggacaaggacccgatgcccaaccccaggcctggcaagccctcggccccttccttggcccttggcccatccccaggagcctcgcccagctggagggctgcacccaaagcctcagacctgctgggggcccggggcccagggggaaccttccagggccgagatcttcgaggcggggcccatgcctcctcttcttccttgaaccccatgccaccatcgcagctgcaggtgaggccctgggcccaggatggggcaggcagggtggggtacctggacctacaggtgccgacctttactgtggcactgggcgggaggggggctggctggggcacaggaagtggtttctgggtcccaggcaagtctgtgacttatgcagatgttgcagggccaagaaaatccccacctgccaggcctcagagattggaggctctccccgacctcccaatccctgtctcaggagaggaggaggccgtattgtagtccca

SEQ ID NO: 10081 - DNA, 597 bp, Homo sapiens
  MAP TO CHR14.3; EXPRESSED IN PLACENTA, SIGNAL = 1.2; EXPRESSED IN BONE MARROW, SIGNAL = 1.5; EXPRESSED IN HEART, SIGNAL = 1.6; EXPRESSED IN FETAL LIVER, SIGNAL = 1.1; EXPRESSED IN BRAIN, SIGNAL = 1.3; NT HIT: U31332.1, EVALUE 0.00e+00; EST_HUMAN HIT: AI460323.1, EVALUE 1.00e-108; SWISSPROT HIT: Q13258, EVALUE 1.00e-92
ctacgctcagaaccggagtctgcgggtgcttgcgcccgcattggacaactcgttgtgccaagccttcgccttcttcatgtccttctttgggctctcctcgacactgcaactcctggccatggcactggagtgctggctctccctagggcaccctttcttctaccgacggcacatcaccctgcgcctgggcgcactggtggccccggtggtgagcgccttctccctggctttctgcgcgctacctttcatgggcttcgggaagttcgtgcagtactgccccggcacctggtgctttatccagatggtccacgaggagggctcgctgtcggtgctggggtactctgtgctctactccagcctcatggcgctgctggtcctcgccaccgtgctgtgcaacctcggcgccatgcgcaacctctatgcgatgcaccggcggctgcagcggcacccgcgctcctgcaccagggactgtgccgagccgcgcgcggacgggagggaagcgtcccctcagcccctggaggagctggatcacctcctgctgctggcgctgatgaccgtgctcttcactatgtgttctctgcccgtaattgtgagtcc

SEQ ID NO: 10082 - DNA, 574 bp, Homo sapiens
  MAP TO CHR15.3; EXPRESSED IN FETAL LIVER, SIGNAL = 6.4; EXPRESSED IN BRAIN, SIGNAL = 2.1; EXPRESSED IN LUNG, SIGNAL =  18; EXPRESSED IN HEART, SIGNAL = 2.8; EXPRESSED IN BONE MARROW, SIGNAL = 2.4; NT HIT: gi14749307, EVALUE 0.00e+00; EST_HUMAN HIT: AW068451.1, EVALUE 0.00e+00; SWISSPROT HIT: Q28178, EVALUE 1.00e-25
ccccactggctgtatcaaacaatggagaattttccctgtggtgggggcataagttatctttaacatgaatggtttatactgcaatttaccctccatttacatctctctttcagctggactctgactcagaccgcattggagatacctgtgacaacaatcaggatattgatgaagatggccaccagaacaatctggacaactgtccctatgtgcccaatgccaaccaggctgaccatgacaaagatggcaagggagatgcctgtgaccacgatgatgacaacgatggcattcctgatgacaaggacaactgcagactcgtgcccaatcccgaccagaaggactctgacggtgagtcatgggagccactttctaagacagggactgctggcacagctgtgtagattgaagaaatgaaaccaaggctcaaagcatttgacaggatgaagggaccaaatgccaacttagacaagatagtgacatttctgacaccagtaataataatagcactttagaattttgctgaactcttgcttttttgacctcaggcgatggtcgaggtgatgcctgcaaagat

SEQ ID NO: 10083 - DNA, 562 bp, Homo sapiens
  MAP TO CHR10.3; EXPRESSED IN FETAL LIVER, SIGNAL = 0.62; EXPRESSED IN ADULT LIVER, SIGNAL = 1.2; EXPRESSED IN BRAIN, SIGNAL = 1.5; EXPRESSED IN BONE MARROW, SIGNAL = 1.7; EXPRESSED IN PLACENTA, SIGNAL = 0.78; NT HIT: gi14736356, EVALUE 3.00e-58; EST_HUMAN HIT: BI761095.1, EVALUE 4.00e-58; SWISSPROT HIT: P51268, EVALUE 8.10e-01
aggtgtcaactggggagatggacatggtcatctctgagagccaatacagttcaagtactgtcccaaatctgtaaccgattattagaaactgggaagagtgacatggtcatctctgagagccagtccagttcaaacactgtcccaaatctgtaactgattattacgaactgggaagtgacatggtcatctctgagagccagtccagttcaaacactgttccaaatctgtaactgattgttacggactcctgttgaggaagaagaaggtaaaaaaccctgcatccaagatgagcccccacttccacgaagctcccttccagtcagtttcatcattggctctactgctctgatggatttttcagaacgttctgttttccccctgtctttttctaggctgttcttgctggagatttaattctttctgcagcatctatagctctggcacgaattggaaatacaactgttatatctattttaacccaagttattgaagatttggtgcgtggtacgttgattctgatttttcttctttgttattcaaccctggtgtttagccaggcaat

SEQ ID NO: 10084 - DNA, 560 bp, Homo sapiens
  MAP TO CHRX.3; EXPRESSED IN ADULT LIVER, SIGNAL = 2.2; EXPRESSED IN FETAL LIVER, SIGNAL = 2.5; EXPRESSED IN BRAIN, SIGNAL =   2; EXPRESSED IN HELA, SIGNAL = 3.1; EXPRESSED IN BONE MARROW, SIGNAL = 2.1; NT HIT: gi13649113, EVALUE 0.00e+00; EST_HUMAN HIT: BE909566.1, EVALUE 0.00e+00; SWISSPROT HIT: P09131, EVALUE 1.00e-86
atgcagaagtctctccgctcctcaatcagtgtgggcggggcctcatgggcgtccacgagctggatgtggagtggggccagcccagccaggcctgagtggatgctcaccacaaagccacccccgcctccccaggttatagcactcacgttcttgatggtcagcacctctgtgtccagggaggtgaccctgagcatggggccaggcgccgtcctgttggcctggcctgggtactggctggagatcacgatgatgccctcactgtcctcaggaaactcaaactccatcacagagccatctccaatgctcaagtagcggcccccagtcggtggcacggtgtgacccccagcagtgctgaggctggtgctggctgtcccttgggccccccatggcaggctgatgagcagcagggcagctctgagcatgcttaagggacctgtgccaccaccctcgccccccagaccaggccactgctgagagctgcccttgtcctgcattaacaccatggctcttcctggaggacggatggcgtgcccaggccctctgcggcttaggagaacatc

SEQ ID NO: 10085 - DNA, 567 bp, Homo sapiens
  MAP TO CHR17.3; EXPRESSED IN HELA, SIGNAL = 9.5; EXPRESSED IN BONE MARROW, SIGNAL = 1.4; EXPRESSED IN FETAL LIVER, SIGNAL =  14; SWISSPROT HIT: Q05716, EVALUE 7.00e-23; NT HIT: Y12508.1, EVALUE 0.00e+00; EST_HUMAN HIT: BF313465.1, EVALUE 0.00e+00
ccagtgagctcagaagacccatgctcaaaaaagagtcaccaccctcagaggccatcttgaagcagcgaccgtctgacttgggggctgggctgggctgggattggggtgggtcacttggggtctcttttcctgcgtcggaactgacccctcatgtccttctcttggcagtgtcacccagctctggatgggcagcgtggcaagtgctggtgtgtggaccggaagacgggggtgaagcttccggggggcctggagccaaagggggagctggactgccaccagctggctgacagctttcgagagtgaggcctgccagcaggccagggactcagcgtcccctgctactcctgtgctctggaggctgcagagctgacccagagtggagtctgagtctgagtcctgtctctgcctgcggcccagaagtttccctcaaatgcgcgtgtgcacgtgtgcgtgtgcgtgcgtgtgtgtgtgtttgtgagcatgggtgtgcccttggggtaagccagagcctggggtgttctctttggtgttacacagcccaagaggactgagactggcacttagccc

SEQ ID NO: 10086 - DNA, 578 bp, Homo sapiens
  MAP TO CHR4.3; EXPRESSED IN FETAL LIVER, SIGNAL = 1.9; EXPRESSED IN ADULT LIVER, SIGNAL = 1.8; EXPRESSED IN HELA, SIGNAL = 7.1; EXPRESSED IN BONE MARROW, SIGNAL = 1.6; NT HIT: gi14723624, EVALUE 0.00e+00; EST_HUMAN HIT: AL573723.1, EVALUE 0.00e+00; SWISSPROT HIT: P25611, EVALUE 1.70e-01
actgcatgctgattcgtgaggcccagagctacgtctgggctgccacggctgtttcaagacaacgtctgacatgagccgagtgttctgttcacactgtgggaacaagaccctgaagaaagtgtccgtgaccatcagtgacgacggcaccctgcacatgcacttctcccgcaaccccaaggtgctgaacgcccgcggcctccggtactcgcttcccactcccaaagggggcacatacgccatcaacccccatctcaccgaggatcagcgcttccctcaaccgcgactctcccgaaaggccaggcagaaaaccaacgtgttcgcccctgactacatcgccgggatgtcgccctttgtcgagaatgacatctccagccgctcagctaccctacaggtccgggacagcaccttgggagctgggcggagacgcttaaatcccaacgcttccagaaagaagtttgtgaagaaaaggtgaagagcgagttcccgcaggcaaattggatgggcgtctggccgccgtggagttccggtgacccattaccccagccatgtcgtctccaggaccacccgatggaaattaa

SEQ ID NO: 10087 - DNA, 519 bp, Homo sapiens
  MAP TO CHR19.3; EXPRESSED IN BONE MARROW, SIGNAL = 0.94; EXPRESSED IN LUNG, SIGNAL = 0.69; NT HIT: gi15302535, EVALUE 2.00e-62; EST_HUMAN HIT: BI549846.1, EVALUE 2.00e-62; SWISSPROT HIT: P34644, EVALUE 4.00e-05
acaccttcctcaatcgcaagccccacctttctctaagacccacccccaaatccaggcttctcccatttaccagagccagcccgcaaattcaagaccacgccctctaactccacccacacaactgtagttaccgcccactttgagaccccaccactgtacctgttggctgcaaatttttgacagataaatcctcctggaatctgagtgacaatgtagccccagaaaaaggagccgtgtatgaggccgacagtctctggatcccagctgaactgggctttctgcgggccaaaatgtacattaaatcagccgccctgtccaggctctgccgctccaccaatcagcacccacagacttagcgtctcgacctatcagcaacgaggaacccctcccacctccaaaagcctgccaatcaaagctcacactatctttctgtcaattaaagtctacaaactccgctcttccacgttgctagggcctatgctgccttaacaacagagtccatcaccacctagacgcctt

SEQ ID NO: 10088 - DNA, 593 bp, Homo sapiens
  MAP TO CHR14.3; EXPRESSED IN HELA, SIGNAL = 2.8; EXPRESSED IN LUNG, SIGNAL = 1.6; EXPRESSED IN BONE MARROW, SIGNAL = 3.9; EXPRESSED IN PLACENTA, SIGNAL = 3.9; EXPRESSED IN FETAL LIVER, SIGNAL = 2.6; EXPRESSED IN ADULT LIVER, SIGNAL = 3.2; EXPRESSED IN BRAIN, SIGNAL =   3; NT HIT: gi15300266, EVALUE 3.00e-92; EST_HUMAN HIT: AU123875.1, EVALUE 4.00e-92; SWISSPROT HIT: P11274, EVALUE 3.00e-01
gattctcttcctggatccccagcatgcaaaggcttccccacaggtggctataaaccctactatgcagagcaccttgccgtcttcagaggcagggctgtgctgctcagctgggtgcactgtgcatggtgaccagttgatggaccctaggctgagggcttccctgacttcctgactctacctgagaaccagtgcattaggccacttgccctataaatctatttttgctccctgtaaaatacaaacaaagggcccctgggccaaccacttttccttttcctttctccagatagatctgaaggagcagggacagctcttgcatcgagaccccttcactgtcatctgtggccgaaagaagtgccttcgccatgtctttctcttcgagcatctcctcctgttcagcaagctcaagggccctgaaggggggtcagagatgtttgtttacaagcaggcctttaaggtacgattcctggagtgagtggtggaggtgacaggaagtcattctcttcttgagaactcaggatgttctggaaattcagccccaacagaggttcagaatctgcatcatctagaataggctttggcttgtaatcgac

SEQ ID NO: 10089 - DNA, 532 bp, Homo sapiens
  MAP TO CHR1.3; EXPRESSED IN ADULT LIVER, SIGNAL =   1; EXPRESSED IN BRAIN, SIGNAL = 1.9; EXPRESSED IN BONE MARROW, SIGNAL =   1; SWISSPROT HIT: P48681, EVALUE 7.00e-88; NT HIT: X65964.1, EVALUE 0.00e+00; EST_HUMAN HIT: AW028075.1, EVALUE 0.00e+00
ggagtcctggatttccttcctgtttagatcctcttcttcccatatttcctgctgcaagctgcttaccactttgccctctatggctgtttctttctctaccaacccccagatttgcccttcaccttcccctcggcatatgctgaacactctagacccaccggattctccatccttagcctctaaactggagtggtcagggctgaggggtggtgccaaggaggcatggtcctctggggactggcctgtactggcctcttgccgctggcccccaggctcctctggtccaggcaggacgctggcaggaatggccaccctggcttcagcccgcaggggctctggagcctgtttcctcccaccctgtgtctggagcagagagagaggagcatcctgggctctgatctctgcatctacagcaggagagggtgcctgaggtgtgggggggatgggggtgctggccaaggtaggggtacgggcctggaggaattcttggttcttaagaaaggctggcacaggtgtctcaagggtagcaggc

SEQ ID NO: 10090 - DNA, 557 bp, Homo sapiens
  MAP TO CHR6.3; EXPRESSED IN LUNG, SIGNAL = 1.1; EXPRESSED IN HEART, SIGNAL = 1.4; EXPRESSED IN PLACENTA, SIGNAL = 1.3; EXPRESSED IN BONE MARROW, SIGNAL = 1.6; EXPRESSED IN BRAIN, SIGNAL = 1.3; SWISSPROT HIT: Q9QUR6, EVALUE 6.00e-22; NT HIT: D21102.1, EVALUE 2.00e-71; EST_HUMAN HIT: BG761528.1, EVALUE 3.00e-71
ccgataagacgacgatttcctataatctagatttctttatatgacctatccctactaaatttcttaactattattttaacaatttggacaatacctaatagatcaaaaatattactctcatattcaggcatagaaattaattccttataatgaattaatcttatacaaggacaagttatctggaatttgtattttacaatttaagaaagcatttactttgaaaataaaaaggaaattcagtaaaagcagtctcaccgttttcctttcttgaagtggcaactatacttgggataatcatatagttcagtcattctctctttgtataaacctctgatgggacactgctcaagaaatggcacagtaatcttattctgggcctccacaaaggcctgtggagaaattaaaatggacaaagcaagttaaatataaaattttccatgtgaaatattatccactaatatgtatcagaaaaagcacactttgtctcttagccagtgcctcttctctctcattaccagcctctctcacctccttactcttcttcatacctgcccagc

SEQ ID NO: 10091 - DNA, 554 bp, Homo sapiens
  MAP TO CHR6.3; EXPRESSED IN ADULT LIVER, SIGNAL = 8.5; EXPRESSED IN BRAIN, SIGNAL = 3.5; EXPRESSED IN BONE MARROW, SIGNAL = 5.1; EXPRESSED IN LUNG, SIGNAL =  15; NT HIT: gi13645838, EVALUE 2.00e-49; EST_HUMAN HIT: AW865734.1, EVALUE 0.00e+00; SWISSPROT HIT: P25232, EVALUE 3.00e-11
tgaacgcttcatgtgcctactctgcaggactgaggagtttgctctgtggtgtgaaaacctaaggaatggggggcgggtgtcttgccacttgtgtgacaggcttaacctttttgtatgaagttcgtttgccttatcggccttactgtttgatagtttactgtgtctgatttcttcccccgtactttttcaactagtctctagtgatccctgaaaagttccagcatattttgcgagtactcaacaccaacatcgatgggcggcggaaaatagcctttgccatcactgccattaaggtaagtgaagtagggtaaggaatagggaatgtaaatgagaattgggttgtgaagacataagcaaaaatgaagcaaggctggggagacttgagtctcatccagatcaccttgactgctggattaagaaaagaaagtggtttagggagagactgacccctttagcatttaccacagaaaataagtgattaaagccaagatagtggtctaaggtcaagccaaaacatttcacctggggaagtggggaggaggtatggttgctca

SEQ ID NO: 10092 - DNA, 538 bp, Homo sapiens
  MAP TO CHR4.3; EXPRESSED IN BONE MARROW, SIGNAL = 0.85; EXPRESSED IN ADULT LIVER, SIGNAL = 0.91; NT HIT: gi7661687, EVALUE 0.00e+00; EST_HUMAN HIT: AW293136.1, EVALUE 0.00e+00; SWISSPROT HIT: P97588, EVALUE 1.00e-19
cctgcatttgttcttgagggtaaaatagcttttcatttgaatgatgcttttgagttggcagcaggacagggatcagataatttgttgttgtttacagattatgttttactttattgtgatgtaattatagatcataattctcatgtttgtccttctcttttttcccttcctttttctagtacttcctcctgtgctggttccaagacacagcgaatataatcctcagcacagcctcttagctcagttccgtaacttaggacaaaatgagcctcacatgccactcaacgccacttttccagattctttccagcaacccaacagccacccgtttcctcactctcccaatagcagttacccaaactctcctgggagcagcagcagcacctaccctcactctcccaccagctcagacccaggaagccctttccagatgccaggtaggttggaatgttcagtgatgttctgtagtcatatcagacagtgttatcacagtgtcacggaaaagctgggtcaacctgcagtggagggaggttttcag

SEQ ID NO: 10093 - DNA, 524 bp, Homo sapiens
  MAP TO CHR4.3; EXPRESSED IN LUNG, SIGNAL = 6.6; EXPRESSED IN BONE MARROW, SIGNAL = 1.6; EST_HUMAN HIT: AA501832.1, EVALUE 5.00e-76; NT HIT: gi16117786, EVALUE 2.00e-52; SWISSPROT HIT: Q9D1R9, EVALUE 4.00e-13
ctttcatcccttgacgatggaatgaatcaaggagaggttaccactaagagggttcagaattactaaacattcatgagccaaatctgccacgaacatagactttttaaaccaatctgagaaatgcagtgaaatgcctttcagataaatgagtacaccatttccctttgtaacctactttaaacttgcccttaacacttaacaaaatttagggaaatttctgttaaagcatcacaaaaatcttaatatttttcttatgcaggttcgtgctgtaagacctaaagttcttatgagattgtccaaaacaaagaaacatgtcagcagggcctatggtggttccatgtgtgctaaatgtgttcgtgacaggtaagttaaatgcttaaatgggctttccttagcaaattattgtgtgtgttatactgtctgctgatcagtgcaatggtgaagcaactcattttaaaccagttgcatgctttagaaccctttctttgctatggataattgatgctgcacaaagcaggaaatga

SEQ ID NO: 10094 - DNA, 525 bp, Homo sapiens
  MAP TO CHR17.3; EXPRESSED IN LUNG, SIGNAL = 3.9; EXPRESSED IN PLACENTA, SIGNAL = 1.1; EXPRESSED IN HEART, SIGNAL = 2.2; EXPRESSED IN FETAL LIVER, SIGNAL =  16; EXPRESSED IN BONE MARROW, SIGNAL = 1.3; NT HIT: gi16179027, EVALUE 0.00e+00; EST_HUMAN HIT: BE902268.1, EVALUE 0.00e+00; SWISSPROT HIT: O00767, EVALUE 3.00e-96
cttacaaagctcggctgtccctgtggctctttctgatcattgccaacacaatggcattccagaatgatgtctatgaatgggctcgcgaccaccgtgcccaccacaagttttcagaaacacatgctgatcctcataattcctgacgtggctttttcttctctcacgtgggttggctgcttgtgcgcaaacacccaactgtcaaagagaagggcagtacgctagacttgtctgacctagaagccgagaaactggtgatgttccagaggaggtactacaaacccggcttgctgttgatgtgcttcatcctgcccacgcttgtgccctggtgtttctggggtgaaacttttcaaaacagcgtgttcgttgccactttcttgcgatatgctgtggtgcttaatgccacgtggctggtgaacagtgctgcccacctcttcagatatcgtccttatgacaagaacattagcctccgggagaatatcctggtttcacttggagctgtgggtgagggctttcacaactaccacc

SEQ ID NO: 10095 - DNA, 597 bp, Homo sapiens
  MAP TO CHR2.3; EXPRESSED IN BONE MARROW, SIGNAL = 0.67; EXPRESSED IN ADULT LIVER, SIGNAL = 0.55; EST_HUMAN HIT: AA150260.1, EVALUE 1.00e-95; SWISSPROT HIT: Q02156, EVALUE 7.00e-24; NT HIT: gi15295562, EVALUE 9.00e-77
ttccgactctgtcctcatccctgcagttcatgacgaagaatccccacaagcgcctgggctgtgtggcatcgcagaatggcgaggacgccatcaagcagcacccattcttcaaagagattgactgggtgctcctggagcagaagaagatcaagccacccttcaaaccacgcattgtaagttggtccccgtgcacgttcagcaccatgggtcgggcccaggtacttgcaggacaggctgcgtgcacccaggaagagttggtcaggggatgcgtattacagtaaaaatgacaaagaccagaggtggctgaggctctccctaagacaatgtctttaggccccaagtgtttactattgaaaacatgtaacctactacagcagcacccaagatgatgatttacgtgggccacagaacaccttttgtctttacagagattcaatttatttattttgattgaaaatgacaaatgatactagttttccatgtatggtagagacataaggtttctttatgaagaactgggtttgttttctaaatgggtcagtttaaaggaaaatattaactaaataatagccgtggtcattccgtggaactagcaca

SEQ ID NO: 10096 - DNA, 546 bp, Homo sapiens
  MAP TO CHR5.3; EXPRESSED IN LUNG, SIGNAL = 1.7; EXPRESSED IN BONE MARROW, SIGNAL = 1.3; EXPRESSED IN PLACENTA, SIGNAL = 2.2; EXPRESSED IN ADULT LIVER, SIGNAL = 0.93; EXPRESSED IN BRAIN, SIGNAL = 1.9; NT HIT: gi16159221, EVALUE 9.00e-86; EST_HUMAN HIT: BG395672.1, EVALUE 6.00e-88; SWISSPROT HIT: P48643, EVALUE 9.00e-25
aatctcggcaggcatgttagccctgtggtcttaaatgacgtctcttaaatgagaaaggatgttttgtcttttcttaccaaccactcctgtggttccatctccaatttcatcatcctgagacttggacagttccaccatcagcttggcaatctgatgatcaacatccatcatgcttaagatggtggccccatcattagttacagtcacatccccatccttatccaccatcatcttatcaagccctaaaaaacaacgtttagtaggctttgcgcaaaaaactggcaaccaatatcacaaactataaaacaagacctcctgacccagctcttatctgtgcaatttattatatacaaataatgcaacatacacaaaatagtagctgcatgaaggcatttttagattggctaacataattggcaaaacattatggagcatcattaagtataatgttaatctcaaaagacaactatgatttggaaaatgctaatgaaatgatgttacatgctaaaaaaaaaaaaaaaaaggtccgacctaatattgcacacg

SEQ ID NO: 10097 - DNA, 595 bp, Homo sapiens
  MAP TO CHR8.3; EXPRESSED IN ADULT LIVER, SIGNAL = 0.68; EXPRESSED IN BONE MARROW, SIGNAL = 0.75; EST_HUMAN HIT: AL515721.1, EVALUE 8.00e-66; NT HIT: X05608.1, EVALUE 0.00e+00; SWISSPROT HIT: P07196, EVALUE 3.00e-17
caggcttcatgaacttgggtattttaggcatgaaggtttttcaaaagatacaggaagttattctaggagagattttatcaaaggtgtgcaccttgattttaatcgaaactaggcctttgcaactacactacagtaaaataatagaagggatttatgctcggattttttttttgttttatttttgtcttcaaacaggacacgatcaacaaattagaaaatgaattgaggaccacaaagagtgaaatggcacgatacctaaaagaataccaagacctcctcaacgtgaagatggctttggatattgagattgcagcttacaggtgaaaatagaggggcaaagacagcagccattaaaccttaggaagaaaatcagatcccatttaaagttatgttggatcagaaaccttcaataatagtccttttgaaataatgaagtgttagtttttggcttcttccaagaagagggtatttagatatataagaatttaaccctgtaattaggagtcctgtttttatcttgtcattacactttaaatctaataggatgatttatttatattttttctggtctccatcaaaagatccccaggcatta

SEQ ID NO: 10098 - DNA, 576 bp, Homo sapiens
  MAP TO CHRX.3; EXPRESSED IN BONE MARROW, SIGNAL = 0.97; EXPRESSED IN PLACENTA, SIGNAL = 1.1; EXPRESSED IN FETAL LIVER, SIGNAL = 0.52; EXPRESSED IN BRAIN, SIGNAL = 1.4; NT HIT: AF207550.1, EVALUE 0.00e+00; EST_HUMAN HIT: AL120075.1, EVALUE 9.00e-87; SWISSPROT HIT: P17971, EVALUE 6.00e-14
gcaggtaagacagaggcagccaaaaccaacaaaacactcctcccgggacttgaagcccttcggctggcctgtggtgctgggactctctccccaggaggctgtgttcactgcctgtgacttcctcatgctcccctctgcttggttttcatagatttctagctgactcaggtgcttggtatgtagcttggacaggggcagcagatggtaggggttgagggccaggcccatttctcacttggccacccagcattttacagagcaagaaactgagggactcagaaggtttgagtgcctggccagggtcacagagctagtccggattagatgggatggagtgggggactgaaaggtaggtgggcacttttcctgaccttggcctacctcccctcgctccagctacggagacatggtgcccagcaccattgctggcaagattttcgggtccatctgctcactcagtggcgtcttggtcattgccctgcctgtgccagtcattgtgtccaactttagccgcatctaccaccagaaccagcgggctgacaagcgccgagcacagcaggtaaccgcactttccat

SEQ ID NO: 10099 - DNA, 595 bp, Homo sapiens
  MAP TO CHR2.3; EXPRESSED IN ADULT LIVER, SIGNAL = 0.83; EXPRESSED IN BONE MARROW, SIGNAL = 0.74; EXPRESSED IN HEART, SIGNAL = 0.83; NT HIT: gi14781420, EVALUE 3.00e-61; EST_HUMAN HIT: AW118919.1, EVALUE 2.00e-97; SWISSPROT HIT: Q91836, EVALUE 1.00e-09
agctttttctccaaattgaggttttttaagtcagtaatttatcaatgaagactgtttaaagtacagagccaacagtttgtctttctattaataatctatgatttttaaaaatatcaaattaagaagactaagtatcttaagccaaatatttatacttaagttcaacctcagaaagtcagagacaataaaagaggagtgtatcaatttttctgcatagaaatatttgaaaacattacgacagaaatttcgatagtcattcatcatctgaaaatatttcaaatgcctttaattgtaagaaataagtaccagtttccataaatgactctagcctgcaaattgtagtatattctctcttatgagcaggtcctccctcctgggaaagggtatattcaggaagtctccagccatgatgaatagccaattcctataaaatcaagatgaggctttaatagtaattttatgcaatggctcaatcacataagtgttttcttaattttgatcccatttctatgtatatgtttgaaaagaatagtgatattctgcaacagaaaaaagagggaagaccctctatttctcaaagacattcccgcatttt

SEQ ID NO: 10100 - DNA, 512 bp, Homo sapiens
  MAP TO CHR17.3; EXPRESSED IN BONE MARROW, SIGNAL = 1.9; EXPRESSED IN ADULT LIVER, SIGNAL = 2.3; EXPRESSED IN BRAIN, SIGNAL = 2.9; SWISSPROT HIT: P16157, EVALUE 2.80e-02; EST_HUMAN HIT: BF879151.1, EVALUE 2.00e-29; NT HIT: gi14774381, EVALUE 0.00e+00
tggctcccaatttctcagacttattctaacagccctacaggctggtatgacagaatcagagtcccgcacacacagatagcgacgccaggctcccgcagtgagtcaggcagtcctctcccatgccatcagccccgcaccgcaccagcctgagccgaagccccctcttaccccgatcttcccggtcccagctgccagagccagcggcgtcattcccttcttgttggtgagctcctccagcttcagcgtcgggtgcagtttggcccccaggatcagaatctcattgtacatgctcgtcacaaacttcgtgttgtcggccgtgttgtcggccacctccaccagggcgtgcagcaccgtgttgcccaccgagtccctggcgctgatgtcggccgtctgccaggagttctgcagcaggaacttcacgatgcccagctggttggtgcacgcggccagggacaggggcagttcacctgcatgaacacagggcccaggtgggcctcaggagtgagatccag

SEQ ID NO: 10101 - DNA, 563 bp, Homo sapiens
  MAP TO CHR8.3; EXPRESSED IN LUNG, SIGNAL = 0.52; EXPRESSED IN BONE MARROW, SIGNAL = 2.1; EXPRESSED IN FETAL LIVER, SIGNAL = 0.54; NT HIT: gi5739523, EVALUE 1.00e-94; EST_HUMAN HIT: AW867534.1, EVALUE 2.00e-01; SWISSPROT HIT: Q14191, EVALUE 3.00e-30
aaaaccaaacgggtctgaagcatgtataaagtatatatgtttgctcttttgttcttctttttctttagttcccactgggaatttgaaggtccaacaatcatctactgtccttctagaaaaatgacacaacaagttacaggtgaacttaggaaacttaatctatcctgtggaacataccatgcgggcatgagttttagcacaaggaaagacattcatcataggtttgtaagagatgaaattcaggtatgaggatcaatcatcattgctctccgttgctcatagtggaagtggatatttctcaaatgtttatttaccagatctttattgaatactttctttgtgttgaacataaagcagtccctctgataaatgtgggagaacaaacttgcagattagtataaatagcaatctgtacctagtgcttaggtgcacagaggagggaggaatagctctgtcaaggtagttgtgtaatgggggtggtccatccaggaaaattcaattagagtccaaacatgtaagtagaagtttttcaagtatgccaggccagtaggtgatgaggggaa

SEQ ID NO: 10102 - DNA, 586 bp, Homo sapiens
  MAP TO CHR1.3; EXPRESSED IN FETAL LIVER, SIGNAL = 1.3; EXPRESSED IN PLACENTA, SIGNAL = 1.6; EXPRESSED IN BONE MARROW, SIGNAL = 1.3; EXPRESSED IN BRAIN, SIGNAL = 1.1; NT HIT: AF149301.1, EVALUE 0.00e+00; EST_HUMAN HIT: BE074096.1, EVALUE 1.00e-52; SWISSPROT HIT: Q9UN79, EVALUE 3.00e-28
gattcctaccaggcctctcctgcatgggatgagtgagacctaatgcttggggcctccaggcgagggatggtgatgacccctaaggccaggcaggagccagatggcacaggataggtatgtaccaagaactgccctacagagccaggctgcgtggccagaccaggagaagagagatggggttcaaacatctcccccacccccaacaggccttcacctttgacatctttggcttccatagagttccttcctagaaacctctccttccagtcactggacaacagcttctctatggctggcaccactggaagacagcaaaggggtgaggaataaccgtcttaacacctccctgcctcaggcctctgcttctaactagggcagacatcctaccttctttcaaatttcggttgaagtccagcttctcctggcttccagaggcagcctccgacactcctggtctcttgggttctggggacccattaccctctggagagctacagtcctgcaagacatactgaattgtcaccataacccccaagagaaggggacaggctgcagggagggctgggcaccccaaagatgtgtaccc

SEQ ID NO: 10103 - DNA, 528 bp, Homo sapiens
  MAP TO CHR1.3; EXPRESSED IN ADULT LIVER, SIGNAL = 0.94; EXPRESSED IN BRAIN, SIGNAL = 1.3; EXPRESSED IN PLACENTA, SIGNAL = 0.81; EXPRESSED IN BONE MARROW, SIGNAL =   1; SWISSPROT HIT: P34820, EVALUE 2.00e-17; NT HIT: gi4502428, EVALUE 1.00e-47; EST_HUMAN HIT: AA534806.1, EVALUE 0.00e+00
agtgaagatgggggttgttgggcctgagctcctgcccagccttttccgccgggggttcctgggtggattcaagcctcttgggggagacggccctgcagggctggaggatgggtttgggccctgaggctcagggaggagcacatggatgggactcaccttctcccttgccccccaggactgggtcatcgccccccaaggctactcagcctattactgtgagggggagtgctccttcccgctggactcctgcatgaacgccaccaaccacgccatcctgcagtccctggtcagtaccgtgcccatcctgcccagccccctggggtgggaggccctgcagagaggggtctggtccagccagccgggagggcagtgaggccacctgctccatgtctggggggctttgtctgcacagagtcagtaacgtcgctaacttcccacagctctgcaggaactggtcctcatacagccacactactacacatagacccacacccaaacacggacacacgtgaacagtcgcgtatgcat

SEQ ID NO: 10104 - DNA, 525 bp, Homo sapiens
  MAP TO CHR15.3; EXPRESSED IN PLACENTA, SIGNAL = 1.2; EXPRESSED IN BONE MARROW, SIGNAL = 0.81; NT HIT: gi11068002, EVALUE 2.00e-80; SWISSPROT HIT: P08069, EVALUE 3.00e-22; EST_HUMAN HIT: BE295728.1, EVALUE 3.00e-80
cagtcctagcacctccaagcctgagcaagatgattcagatggccggagagattgcagacggcatggcatacctcaacgccaataagttcgtccacagagaccttgctgcccggaattgcatggtagccgaagatttcacagtcaaaatcggaggtgtgtccttagctttccaggtctgggcaagaactaaactcaggtgttttgaggactttgttggcattagtctgcccctggagaggttttctagtgtgtcccttgagtgcacggactccttcttgggaatgatgtgattgtctccagttgatggtcacaaacctggcacggtcggtcccaatgctgatagctcatggacatggtggttcagatactgggcacggtccctgaggctggctctccagacgtttgaggcatttcttggtagaacacctcttagcattggttacagaaataattaagacaatgtcttcaggagattttgacttgggaataaaactcactgtccaaccttgcattcatccctccaat

SEQ ID NO: 10105 - DNA, 523 bp, Homo sapiens
  MAP TO CHR20.3; EXPRESSED IN BONE MARROW, SIGNAL = 2.9; EXPRESSED IN LUNG, SIGNAL = 4.4; EXPRESSED IN FETAL LIVER, SIGNAL = 5.3; EST_HUMAN HIT: BI914760.1, EVALUE 4.00e-58; NT HIT: X52255.1, EVALUE 0.00e+00; SWISSPROT HIT: P01034, EVALUE 2.00e-17
gtgtatgactggccctggacccatataaggcacatacccttttcagatgtggctggtcatggaaggggcagttgtccaagttgggctgggtcttggtacacgtggttcggcccagctccacgtccaagaagtagttcaccccagctacgatctacacatgtgaaagagcaggaggcagggacagcacgttctgtcagtttcttacacacacaggcacttcactgtgaccgggtcactgggcttgcctggggcttcaagcctaccttcatgagctgcccacattgtcacctgcaaggcacacaagccacctcctcctgccagctggcagggatgccatgccccaggcctccccggtaacttgtttctctatgccaatgccaaggattaactgaattccgctacctatgacccagggggcagggacactggatctattctaggaaggttctcatgtgatgatgaaatttcggcaaacttccagttcctggcattcagtccacagagcatctcattcctgccattt

SEQ ID NO: 10106 - DNA, 587 bp, Homo sapiens
  MAP TO CHR1.3; EXPRESSED IN BONE MARROW, SIGNAL =   3; EXPRESSED IN ADULT LIVER, SIGNAL = 2.8; EXPRESSED IN BRAIN, SIGNAL = 4.1; NT HIT: AB017568.1, EVALUE 0.00e+00; EST_HUMAN HIT: BG743195.1, EVALUE 0.00e+00; SWISSPROT HIT: O02818, EVALUE 5.00e-10
aaccaatggaagtgccagagtcctggggcaagccagagcatcacctgtcagcaaacctctgctgggcactctaagcaagcacaggacaagccccagagtttagtgtgtccagtatccagcatggagacagcacatgcattgtgcgagaggagcacaagggcccaggggctgcatggtgggggtgggcaaggctgtcagtgcacgtccacattgtgtgtttcacaccactgcaggccgccatatcacagggcctcagttcaaggacacaccttctgaacttccccctgtcccatgccagaagtggggcagtgaaggaaaggggcacgggattaggctgttgctcctgggctatctgcagttcttgggcccaaagcccctgaatccccatagttagttgctgtcattcttgatgacgacctctaatccgtggtgccgcaactgagctcgaagcagcagattcttgtttttaagatcttccacctgacatgggaaggaggcagtaaagggaatgggtagtaaagctggcacttccaagcccctgaatgtattcagacatccactggtgagggggaaaagatgaagccttc

SEQ ID NO: 10107 - DNA, 539 bp, Homo sapiens
  MAP TO CHR4.3; EXPRESSED IN HEART, SIGNAL = 0.57; EXPRESSED IN LUNG, SIGNAL = 0.65; EXPRESSED IN BONE MARROW, SIGNAL = 0.69; NT HIT: X51953.1, EVALUE 3.00e-95; SWISSPROT HIT: P25874, EVALUE 1.00e-28; EST_HUMAN HIT: BG203995.1, EVALUE 1.00e-48
aatgctgacatgaaattgcctgttatttttgttgcaaaatatttttgttgtggcaaaacttcttaaacttaatattttggtcttttcctgcttctcacaaagttatatatggttcaaaattacttaatttttaaaaagagaaaactattggagttaagagattgagtataaggtggctgcagaagctccaagatgaacttctaaaggtgcagacctgtttgttatatgaaatgggaagttacctgctaatatgttgtttttcacaaaggcctccttcattagatcatatgttactagctctgtacaattgatgatgacacttctcatcagattgggagtagtccctggggaaaaaaaaaaagaaaatgtttattaactctactttacaataagttgctagttgtatgtatgtgctttggtggttataaaacccattttgaagttagttacctttccaaagacccgtcaagccttcggttgttgctattattctgtacgcattataagtccccgtgtagcgaggtttgattccgtggaga

SEQ ID NO: 10108 - DNA, 572 bp, Homo sapiens
  MAP TO CHR12.3; EXPRESSED IN HEART, SIGNAL = 0.5; EXPRESSED IN BONE MARROW, SIGNAL = 0.81; EXPRESSED IN LUNG, SIGNAL = 1.3; EST_HUMAN HIT: AA308737.1, EVALUE 1.00e-109; NT HIT: gi7656990, EVALUE 1.00e-109; SWISSPROT HIT: Q9ULV4, EVALUE 4.00e-33
ttcatccatagagggcatccccagaacagaggtcactattctatttaatgattctctgttagagaaaaactgatgtggttagtaaggcgtgtggaacttaacttcaattacatcagagtctaatggtttcacaaatacaattcttagtgaactgtcaatctattaaggaaaaagtatggagactatcagagggtgtctaccagaatggaagatcaaattacctaccttgtgcagagggaggacaaggaacgctcctcccccacttgcctctatgattatggcaacaaatctgggattgacagcacaaaaggaactatcccaggtcacacgagaaacccggatgtcatcatagcactggtcatttttcaccgcttgcccaaatacatgccgaaacttgctctgtcgtaccactcgcctcatcgtgtctgcaaaggaagagtgagaattatgttagaattatgcaccaaactgaaagctttacttttacaaatgaaatgctccaagtaggaaaaacagaatggtatggcattttgtctgctctcctaaaaagtagccaaattgcaatccaaatt

SEQ ID NO: 10109 - DNA, 588 bp, Homo sapiens
  MAP TO CHR18.3; EXPRESSED IN BONE MARROW, SIGNAL = 2.7; EXPRESSED IN PLACENTA, SIGNAL = 2.4; EXPRESSED IN ADULT LIVER, SIGNAL = 2.1; EXPRESSED IN BRAIN, SIGNAL = 2.2; EST_HUMAN HIT: BE180474.1, EVALUE 0.00e+00; NT HIT: D00596.1, EVALUE 0.00e+00; SWISSPROT HIT: P04818, EVALUE 1.00e-14
ccaacgtcacacaatcaaccatgtggctgggggaagttcccagggtcctgcctccctcaggtgcctctgcacaaaaccagattgcttccctctaagagtatggttagtataaatgaagacgacggggttctttcaacctcttggattccaagcgcacatgatgattcttctgtcgtcagggttggttttgatggtgtcaatcactctttgcagttggtcaactccctgtcctgaataatctgtagaattgtcaaaaagagaggacaggtacatacattaatcacacatgtcatgagatggccttagaggtcatctattacagtctcttacccagggtccccccttgacccatggctacaagacatctggtgcatcctgcaaagtttgcagatctcggtgggttgagttcaaggccctgtctgactcctggctctgtcctctggagccctaacaaagtctttttcctcttctacacagtcctttgaatatttggtctgtcatggagtcacctcctcctgttccccccatagctaaccctttccaatctcaacaatcttaatttcttccagtgctcctcgcaaacttagg

SEQ ID NO: 10110 - DNA, 593 bp, Homo sapiens
  MAP TO CHR17.3; EXPRESSED IN BRAIN, SIGNAL = 1.2; EXPRESSED IN LUNG, SIGNAL = 2.2; EXPRESSED IN PLACENTA, SIGNAL = 1.5; EXPRESSED IN BONE MARROW, SIGNAL = 1.7; EST_HUMAN HIT: AA295180.1, EVALUE 1.00e-103; NT HIT: gi14772403, EVALUE 1.00e-88; SWISSPROT HIT: Q13368, EVALUE 3.00e-36
ctcagtcccatctccaggtctggccaggtgggaaaagtctctactgggagatcctgggacaactgggacaaatgccatggtgtccctctgcccctcctcccaagctggtcttcggaggagcttccggctgggctgtagggagagactgggtggctcgcaggaaggaaagatgtcctccggagctgagtctccggagctgctgacttacgaagaggtggccaggtaccaacaccagcccggagagcggccccgcctggtggttctgatcggtaggtgccatcctgggtttccaggaagtgatctggtttcctccctggagcaggtggggagggagctcagcagggaccctggtcagccttcttcttgtttcccagggtctctgggagcccgactgcacgagctgaagcaaaaggtggtggctgagaacccacagcactttggcgtcgctgttccacgtaagagggcccatgtgggagtgtgtgtttgtctgcacacacacaaatattccatggagacttaactccccagatccatccaaatccttactttgggtttaaaggatcaccaggcactgcctgctattggcaaattgt

SEQ ID NO: 10111 - DNA, 594 bp, Homo sapiens
  MAP TO CHR19.3; EXPRESSED IN ADULT LIVER, SIGNAL = 1.7; EXPRESSED IN BRAIN, SIGNAL = 2.5; EXPRESSED IN BONE MARROW, SIGNAL = 1.9; EST_HUMAN HIT: AL570404.1, EVALUE 0.00e+00; SWISSPROT HIT: P55199, EVALUE 2.00e-38; NT HIT: gi15307371, EVALUE 0.00e+00
taaagacaagacatcggggcggcacccacctgctggaggaggccatccagcgcgtccttgtccgcctgcgtcaggccgtccttctgcagtcgcagcagcagctcagccttgcggtagggccgtagtgccaggaggtgcagcactcggtcacggaagggcctctgggacaccccgctgcccccactcacggcactggcaccactcttcctgatggcactcgccaagttgatgggggttgcccgcttccgggagggcaccgcgtctgttgcacctggggctggtttccgaaactgaaccttcttgcctgcaacaagaatccaagctttagggaacagagagggcgctgccgtgtcctaagccagtgctgctgaccaggtgcccagaggtttgagactatagacagtgctggtgggaggcaccacaccaaccacagcaaaagccagcttgctccttggggaccctgggcgaccaagagcgccacctgctgcccaaggcaggcacctgcagggcacccagcctcagaagtgggaggtgcaggcggcagaactgtgttagagccttacttacttcatcacaggcaacctaaatcctgga

SEQ ID NO: 10112 - DNA, 585 bp, Homo sapiens
  MAP TO CHRX.3; EXPRESSED IN BONE MARROW, SIGNAL =   4; EXPRESSED IN BRAIN, SIGNAL = 4.5; EST_HUMAN HIT: BG420725.1, EVALUE 0.00e+00; SWISSPROT HIT: P52795, EVALUE 2.00e-40; NT HIT: gi14769577, EVALUE 0.00e+00
tctgtcaccttgttaggccctgtccctgaagaaatgcaagctgggcctggcctgaaatctgctgtgtgtccctgggacccctggctgactgttccttcccctttcccttcctcagagactgtgaaccaggaagagaagagtggcccaggtgcaagtgggggcagcagcggggaccctgatggcttcttcaactccaaggtggcattgttcgcggctgtcggtgccggttgcgtcatcttcctgctcatcatcatcttcctgacggtcctactactgaagctacgcaagcggcaccgcaagcacacacagcagcgggcggctgccctctcgctcagtaccctggccagtcccaaggggggcagtggcacagcgggcaccgagcccagcgacatcatcattcccttacggactacagagaacaactactgcccccactatgagaaggtgagtggggactacgggcaccctgtctacatcgtccaagagatgccgccccagagcccggcgaacatctactacaaggtctgagtgcccggcacggcctcaggcccccgagggacagtcggcctggaccggacctctcct

SEQ ID NO: 10113 - DNA, 551 bp, Homo sapiens
  MAP TO CHRX.3; EXPRESSED IN LUNG, SIGNAL = 1.2; EXPRESSED IN HEART, SIGNAL = 0.99; EXPRESSED IN PLACENTA, SIGNAL = 0.88; EXPRESSED IN BONE MARROW, SIGNAL = 0.75; EST_HUMAN HIT: BI753094.1, EVALUE 0.00e+00; SWISSPROT HIT: Q9R1V4, EVALUE 1.80e+00; NT HIT: gi14757491, EVALUE 0.00e+00
gatgaaacagcgaaggaagcctcctggtttcctggccctggtgaagctcctgcgtgaggaggaggaatgggaggccactttaggtccagatagggagagtctggaggggctggaagtagccccaaggccacctgccaggatcactggggttggggcagtacctctccctgcctctggcaacagttttgatgtgaggccttcccagggctaccggcgccggaggggcagaggccaacaccgaaggggtggtgtggcaagggctggctctcgaggctcaagaaaacggaaacgccacacattctgctatagctgtggggaagacggccacatcagggtacagtgcatcaacccctccaacctgctcttggtaaagcagaagaaacaggctgcagttgagtcgggaaacgggaactgggcttgggacaagagccatcccaagtccaaggccaagtaggctcgggagaacagggcaacatttcctaccacaggccaaggagacaaaagagatattggaaggaggggaaagagaagcccagacaaacagcagatga

SEQ ID NO: 10114 - DNA, 595 bp, Homo sapiens
  MAP TO CHR11.3; EXPRESSED IN LUNG, SIGNAL = 2.6; EXPRESSED IN BONE MARROW, SIGNAL = 1.2; SWISSPROT HIT: P17405, EVALUE 1.00e-82; NT HIT: M81780.1, EVALUE 0.00e+00; EST_HUMAN HIT: BI818723.1, EVALUE 0.00e+00
agttggtgggataggggaaggaggttggagccagagcctgcaaagcatgggcaggatgtgtggcccctccctggagttacccttgctccttgcccctccagtcagccccacatccttgcaggttaccgtgtgtaccaaatagatggaaactactccgggagctctcacgtggtcctggaccatgagacctacatcctgaatctgacccaggcaaacataccgggagccataccgcactggcagcttctctacagggctcgagaaacctatgggctgcccaacacactgcctaccgcctggcacaacctggtatatcgcatgcggggcgacatgcaacttttccagaccttctggtttctctaccataagggccacccaccctcggagccctgtggcacgccctgccgtctggctactctttgtgcccagctctctgcccgtgctgacagccctgctctgtgccgccacctgatgccagatgggagcctcccagaggcccagagcctgtggccaaggccactgttttgctagggccccagggcccacatttgggaaagttcttgatgtaggaaagggtgaaaaagcccaaatgctg

SEQ ID NO: 10115 - DNA, 554 bp, Homo sapiens
  MAP TO CHR5.3; EXPRESSED IN ADULT LIVER, SIGNAL = 1.4; EXPRESSED IN PLACENTA, SIGNAL = 1.7; EXPRESSED IN BONE MARROW, SIGNAL = 1.6; EST_HUMAN HIT: BI910872.1, EVALUE 1.00e-61; SWISSPROT HIT: Q16637, EVALUE 7.90e-01; NT HIT: U80017.1, EVALUE 0.00e+00
ttgggtactccttccaaacggcaccttctccctgccttccattcacaaatggaacacatgtcctgattttagcatttatcattcccatctaattctttatactttcatgactaatatgcatgttcctaaataacagaaaatttaatagttgtttttgaagttgtataagtatatgtcaatagaaacactgtactaatcacttaagttaaagacattttacactattaaataaggactaatgagacatcctttgaagttaaatctcaacattttaaaataacctgttgtaaggaagctgcagtattcttcttttggcttttattcttcttagcaggttttcttttaggtgtggtttttggtttacccgaagtttcacaaatgtcaccattctttagagcatgctacgaaaataggaataaaaatgtacatgttacagggtggtgcacagaataaaagtcacgacataacccagttactactataagctagtctcaaggctccgtcacctcagaaagcacctattttctcttttgaccaccccctgcactataaaa

SEQ ID NO: 10116 - DNA, 516 bp, Homo sapiens
  MAP TO CHR19.3; EXPRESSED IN BONE MARROW, SIGNAL = 0.7; EXPRESSED IN HELA, SIGNAL = 3.9; EXPRESSED IN FETAL LIVER, SIGNAL =  47; EST_HUMAN HIT: AI133649.1, EVALUE 1.00e-112; SWISSPROT HIT: P01024, EVALUE 1.00e-34; NT HIT: gi4557384, EVALUE 1.00e-112
gaggtgggatcttaggggagggatgcgctcggaaaggggtccctggggtctccaagaggggcagggagcccacccttcttgatgagctccaaggccccctgccgcttctctaggccgaacttctcccactgctccgtttcatccaggtaatgcacagcgatgaccgtgggcgtcatgccgatcatgttctgttccccgcagcccgagggggtcacaatgaggtgcttcagccgttccgcgtcgacggcatcctctgtcatctgggccactggggtccctgcagcaggtgggaagaggacgttgctcaagccaggtgggtgacccaccttggggtggcgtgaaaagggttccagcctcccaaccagccagggccaaggggttagggacaggcgaggactggggaggatgtgactgcggggaggggaggctgcatggctgagtggctgttcgggggtctgcactgttaggagtgggaggtgcttcacaggggcaccctggtccttgggtctcatttca

SEQ ID NO: 10117 - DNA, 538 bp, Homo sapiens
  MAP TO CHR20.3; EXPRESSED IN BONE MARROW, SIGNAL = 1.7; EXPRESSED IN HEART, SIGNAL = 1.8; EXPRESSED IN PLACENTA, SIGNAL = 1.6; EXPRESSED IN FETAL LIVER, SIGNAL = 1.2; EST_HUMAN HIT: AI418222.1, EVALUE 4.00e-95; SWISSPROT HIT: O88943, EVALUE 4.00e-26; NT HIT: gi14769905, EVALUE 3.00e-95
gcccaagtcacgagaagaagcaccgagaagaaaggggagggaggctcgttcacacctgatgggctccagccagagccaccactgactccatccctccacccagggctcttgaagcaaaccccaggcaggggtggggcccggtctgggccaggactctcgctggctgggggcgcccaccgccagccttggggccgtgactcaccttgctgtgggcatagaccacagagcccagcagcttccaggtgcctccccgccggtccatgcggatcatccgcagaatctgcaggaagcgcaggctccggagcgcagatgtggcaaagacgttgccctgggagccggcggccagcaccgcaatggaggcgatgagcaccatgatgtctacaaagcgggcgtggagctggtgagctgctgggccgctccccgcacccccttggagaaaactccccaccccgcgttccaggaggatgtgcagaggggcgggaaggtgtatgcccagcgcctggtgtgggctctgtcaggccccaggaaggacattact

SEQ ID NO: 10118 - DNA, 577 bp, Homo sapiens
  MAP TO CHR17.3; EXPRESSED IN LUNG, SIGNAL =   2; EXPRESSED IN BONE MARROW, SIGNAL = 1.5; NT HIT: gi14770919, EVALUE 0.00e+00; EST_HUMAN HIT: AL157606.1, EVALUE 0.00e+00
agtccatgtctggcttcaggtgggaggaaatgtttcagatgaaacttactcaattcataccaccctgaaatggaggacagaggtgacaaacttcagtttaataggtttctcaccaagttgtatgttccattggcccaggattcttgcactaatgggtttctatcacatcatgtctataaatgggtgcactttactgtttgaatttgtaactgaagtactggatatttaagtgtgagtaatgtcttcattagaaaatagcagaaccgctcttgtcttttagtgtatttttcaagaaaaaaggaaaggaaagacatcaagcagtggatcacaacatttatagcacaagaaataacttgtatataagcatcaaaaagattaagaattttttaatatgaaaaatatttgcagtgattttaaagtgcttttccagcaatgttcttagggactcctgagacacggttactttatctactggatcagtaaggcacacaattaacaattaacaattaatgtttatttacaaagtaaagggaaaacctgtgtaacatgagaatttggcatgacaaaatggagacca

SEQ ID NO: 10119 - DNA, 556 bp, Homo sapiens
  MAP TO CHR5.3; EXPRESSED IN BONE MARROW, SIGNAL =   1; EXPRESSED IN HELA, SIGNAL =   3; EST_HUMAN HIT: BF339185.1, EVALUE 4.00e-92; SWISSPROT HIT: P20700, EVALUE 1.00e-27; NT HIT: L37740.1, EVALUE 0.00e+00
tattcacatgaccgcctgaggacaaacaggaggaagttcgtgtgtaaaacttcagatggctgtgatgtcactcagatgtgtaccaatgcagccatggtaagtagcttggctttatgctttttgttttttccccaggagattaacgagaccagaaggaagcatgaaacgcgcttggtagaggtggattctgggcgtcaaattgagtatgagtacaagctggcgcaagcccttcatgagatgagagagcaacatgatgcccaagtgaggctgtataaggaggagctggagcagacttaccatgccaaagtgagctctcttcagaagattcttttgaacacttaaaatcattacttcacaattcccatgatgaacatggctttatgtttattttgttctagtttttaaaaatgattcccctagtctccatgaaatatatagaaaattgattttttcaaaaaagtgcagttttctataaactaaatgttattaaaaattactagaagaatgtagggttgttgcaattttattagaggttaggttttgtctttttgtccca

SEQ ID NO: 10120 - DNA, 549 bp, Homo sapiens
  MAP TO CHR5.3; EXPRESSED IN BONE MARROW, SIGNAL = 0.89; EXPRESSED IN LUNG, SIGNAL = 0.39; EXPRESSED IN PLACENTA, SIGNAL = 0.8; SWISSPROT HIT: Q93088, EVALUE 6.00e-43; NT HIT: AF118377.1, EVALUE 0.00e+00; EST_HUMAN HIT: AI244216.1, EVALUE 0.00e+00
tcctgaaggctggataccacagcatgtaaaagtgaacatacaacacaaagtagcaaagttttttcttaaatgtaaaaattgaatattgaaaacaattcatttattgaaaattacatacttgtagctacttatcttgaatttttatgaaaagaatgtataatgcctaatggcataatgccacttattacaggactggaacccagagttgccaccagatgggatattcaaaaatacgccagagaggcctacaacctgggggtcaggtacattggcgggtgctgtggatttgagccctaccacatcagggcaattgcagaggagctggccccagaaaggggctttttgccaccagcttcagaaaaacatggcagctggggaagtggtttggacatgcacaccaaaccctgggttagagcaaggtaagcatctttttactaacccaaactaatttagattatgaatatgttcaagtgaggccatttagaagactgcagcaaatttgttgtgtgatgatgaagaatcagtcatccccaaattctctcccagaga

SEQ ID NO: 10121 - DNA, 505 bp, Homo sapiens
  MAP TO CHR9.3; EXPRESSED IN BONE MARROW, SIGNAL = 1.9; EXPRESSED IN LUNG, SIGNAL = 5.6; EST_HUMAN HIT: AW891292.1, EVALUE 5.00e-85; SWISSPROT HIT: Q10713, EVALUE 3.10e-01; NT HIT: AB002283.1, EVALUE 3.00e-85
ctcctctgcttttgcctcacaccgactccaggggctgctggccagaacaaacaacattctattaccaagaacacggccaagctggaccgggagacagaggagctgcaccatgacagggtgaccctggaggtgggcaaggtgatccagcaaggtcggcagagcaaggggcttacgcagaaggacctggccacggtgaggctgcgccggggctctcactcctggggttgtgggtttggggagggggatggccggtgttcagatagcacggggagggtgggctccacccccctggttcccctgcagggaatgcctcgggaagccaggtcagcccggctctcactgcctctcgcacaaaacccagctgcgtgtgggtgcgtaccccaggggccctagaagctgctgttctcaggcgacgcttcgcgcctggttttgcagcagtcctagtggagctgatgtgtataaagcacatcttctctttagaaaatcaatgagaagccacaggtga

SEQ ID NO: 10122 - DNA, 577 bp, Homo sapiens
  MAP TO CHR1.3; EXPRESSED IN PLACENTA, SIGNAL = 1.4; EXPRESSED IN BONE MARROW, SIGNAL = 1.9; SWISSPROT HIT: Q9UPN3, EVALUE 5.00e-18; NT HIT: gi14745189, EVALUE 7.00e-90; EST_HUMAN HIT: AU133489.1, EVALUE 1.00e-89
tctccatatcaaataggtgggctaaaactcatttcaaatttttaaccccaaaatcttgatacctagtattatttgaatttctttttcctttactcattcaccataattgtttgttgtaactattgtattcttactgaggatttttttttttttcatttctaggggaaattagtaaaacaaaaggtatttgaagacattttgaaatttttatttggaatataaaactttgattttgggaattatcaaaatatatgacctaggatactttaagagaaatctttgttttcctggacttttaatttgcttttcaactaagcaaatataaggaggtgtaaggagaccttttaaagttgaatttctggcaaagattttaccaagtaaaatgtgacctttttattattttttttaaggttatcccatcatcaggtagcaagttgaaacgaccaacaccaacttttcattctagtcggacatcccttgctggtgataccagcaatagttcttccccggcctccacaggtgccaaaactaatcgggcaggtaagtacctgccccgtgacctacaagccaggctgag

SEQ ID NO: 10123 - DNA, 553 bp, Homo sapiens
  MAP TO CHR20.3; EXPRESSED IN PLACENTA, SIGNAL = 0.93; EXPRESSED IN BONE MARROW, SIGNAL =   1; EST_HUMAN HIT: BG826847.1, EVALUE 0.00e+00; SWISSPROT HIT: P01024, EVALUE 2.30e+00; NT HIT: gi15306075, EVALUE 7.00e-56
gactttagcggaactgccacttgatattaggcagcatttcacagaaatctaaaagcagggccattttacaacagataaaactccaaactcaaacccttctctggaattgtccaggacaagcatctgacagcactcacttacccccatgactctgccgcgctgctgaacatcctcccacataaaatgaactatgatacgacacatgtacttcccactccggccttcctgcttcattcggactagacacatcctgggtgggaagaagacaaaaaaagtcttggctgtttgcatttttcacatcacacatttccactgaaggtctcctcatctaagagtgagtttagcaaagggcaccaaatcaaactggaagtgaactttttttttttaaacttttactgagatataacaaagatactattaagtgtataaatcttaagtgtactgcctgataaatttttatgtattatacatacacccacacaagcaccacccagatcgagatacagattatttagggcacctctgaaggctccctcatacctggagggaacca

SEQ ID NO: 10124 - DNA, 583 bp, Homo sapiens
  MAP TO CHR1.3; EXPRESSED IN FETAL LIVER, SIGNAL = 0.47; EXPRESSED IN BONE MARROW, SIGNAL = 1.6; EXPRESSED IN LUNG, SIGNAL = 0.6; EXPRESSED IN HEART, SIGNAL = 1.3; SWISSPROT HIT: Q28658, EVALUE 1.00e-29; NT HIT: AF077374.1, EVALUE 0.00e+00; EST_HUMAN HIT: BE715364.1, EVALUE 0.00e+00
aggaactttgatggcacctggctcaggaaacttgatgaagccttggtcagggaccttgatgctgcctggttcagggaccttggtgtagcctggctcagggaccttggtacaacctggctcagggaccttggtacagcctggctcagggaccttggtacaacctggctcagggaccttggtacagcctggctcagggaccttggtacagcctggctcagggaccttggtacagcctggctctggaatctttgtgtttccaggttgtggaacctttgagtggcatggctccttggttgtgggaacaaatatttcctgaggtggaggctggctgggttgtttcacctgctgctgttgaagctgaggtggtggggtaaaggtctgcttctgctggtaagaactcatgcttcaaaggatgctggacctagagacaaaacagctaattcagtgctttgattaagtaggaatgaagcccagtttaatgacaaatatctgtcatttcattctccttcagaactgagagcctctcttttctttctttttccctgaatttgagatcatgggatgctttggtgatccccactta

SEQ ID NO: 10125 - DNA, 591 bp, Homo sapiens
  MAP TO CHRX.3; EXPRESSED IN LUNG, SIGNAL = 0.81; EXPRESSED IN HEART, SIGNAL = 1.3; EXPRESSED IN BONE MARROW, SIGNAL = 1.8; EXPRESSED IN PLACENTA, SIGNAL = 1.7; EST_HUMAN HIT: AW503613.1, EVALUE 1.00e-113; SWISSPROT HIT: Q13613, EVALUE 7.00e-35; NT HIT: gi15309058, EVALUE 1.00e-114
catggacagcatcagactggggtctttgtggagggcttttgtgacatagtgaaaagggaaaaatgcttgccttaggtcaggcttttaaagaacttcgtggccctttaataaggaaccatatttactcctgtagtttttctccagtataagattttttcttttctttttatttttttaatgtgatgctaatatttcctagtgattctcagctgattgcctgccattcttgcttggtttattgaccagaacttccaaagctctccccagaattattttacattgttttacatttaattgaaattcaatgtagcctggtctaatgtgccttttttttctgaagatgctgcttgctggggcagtaagaattgctgataaaatagaatctgggaaaacatctgtggtggtgcattgcagcgacggttgggaccgaacagcccagctcacatctctggctatgctaatgttggacagttactacaggaccattaaaggatttgaaactctcgtagaaaaggagtggataagctttggacacaggtttgcactggtaagttcagacagtgaggtttatgctggactgttttgcggtat

SEQ ID NO: 10126 - DNA, 573 bp, Homo sapiens
  MAP TO CHR10.3; EXPRESSED IN BONE MARROW, SIGNAL = 1.9; EXPRESSED IN ADULT LIVER, SIGNAL = 2.8; SWISSPROT HIT: P33260, EVALUE 4.00e-26; NT HIT: L16870.1, EVALUE 0.00e+00; EST_HUMAN HIT: BG545330.1, EVALUE 9.00e-87
tatcagctgtgggacactggcagtgaatttgaaattctttaaaatacaatctgtcttatctgtaaaatagagtaaacaaggtgttgatgtgatgattaagtttaatagcctgcatactacttgcttggcacattgaaggcactgtatatgtgcagctaaaacaataatcatcatctttgtctaaaatatacaaatatttgaagctgtatttgacagaataatcataacaacattatgatgataatatcagtctgaatcacggacaatatatagaccaaatactgagttttgctactatttgaacctccttttctatgtttagttctcaaaagtctatggccctgtgttcactgtgtattttggcctgaagcccattgtggtgttgcatggatatgaagcagtgaaggaggccctgattgatcatggagaggagttttctggaagaggaagttttccagtggctgaaaaagttaacaaaggacttggtaaatgtgcatgtatcgtgtgtatgtgtacatgtgtatgtactgggcagtggctatagggatggggaggatggaaaacaggcttgaa

SEQ ID NO: 10127 - DNA, 537 bp, Homo sapiens
  MAP TO CHR22.3; EXPRESSED IN FETAL LIVER, SIGNAL = 5.5; EXPRESSED IN BONE MARROW, SIGNAL = 2.8; EST_HUMAN HIT: AL120082.1, EVALUE 0.00e+00; NT HIT: gi14778418, EVALUE 0.00e+00; SWISSPROT HIT: Q04917, EVALUE 1.00e-60
ccgctacttagcagaggtcgcttctggggagaagaaaaacagtgtggtcgaagcttctgaagctgcctacaaggaagcctttgaaatcagcaaagagcagatgcaacccacgcatcccatccggctgggcctggccctcaacttctccgtgttctactatgagatccagaatgcacctgagcaagcctgcctcttagccaaacaagccttcgatgatgccatagctgagctggacacactaaacgaggattcctataaggactccacgctgatcatgcagttgctgcgagacaacctcaccctctggacgagcgaccagcaggatgaagaagcaggagaaggcaactgaagatccttcaggtcccctggcccttccttcacccaccacccccatcatcaccgattcttccttgccacaatcactaaatatctagtgctaaacctatctgtattggcagcacagctactcagatctgcactcctgtctcttgggaagcagtttcagataaatcatgggcattgctggactgatggttg

SEQ ID NO: 10128 - DNA, 564 bp, Homo sapiens
  MAP TO CHR1.3; EXPRESSED IN FETAL LIVER, SIGNAL = 5.4; EXPRESSED IN HELA, SIGNAL =  43; EXPRESSED IN BONE MARROW, SIGNAL = 2.6; NT HIT: gi14721336, EVALUE 5.00e-69; SWISSPROT HIT: Q06830, EVALUE 9.00e-19; EST_HUMAN HIT: AI813514.1, EVALUE 7.00e-69
gaaaggggaaagaggaatgcgtacagtcaagtcaagagtttgaatgtaactgtatgtttgccttttgccatagggtcaatacacctaagaaacaaggaggactgggacccatgaacattcctttggtatcagacccgaagcgcaccattgctcaggattatggggtcttaaaggctgatgaaggcatctcgttcaggtatgtcatcaggacaagtatccagttggctgaaagccttttatttggagagatctagagccctgatctgtagagactccttgtcatttcattcctttatgcaggggcctcctcactaaggccaggccagtaggagtgtggagaccagtccatttccttcaggcttcaagcctctgtattctaacaaagcacatctctaaacctgtattgcttttcctttcatctcttttcccaggggcctttttatcattgatgataagggtattcttcggcagatcactgtaaatgacctccctgttggccgctctgtggatgagactttgagactagttcaggccttccagttcactgacaaacatggggaaggt

SEQ ID NO: 10129 - DNA, 500 bp, Homo sapiens
  MAP TO CHR6.3; EXPRESSED IN PLACENTA, SIGNAL = 1.5; EXPRESSED IN HEART, SIGNAL = 1.6; EXPRESSED IN FETAL LIVER, SIGNAL = 0.96; EXPRESSED IN BONE MARROW, SIGNAL = 1.6; NT HIT: U91328.1, EVALUE 0.00e+00; SWISSPROT HIT: Q30201, EVALUE 1.00e-52; EST_HUMAN HIT: BG747345.1, EVALUE 0.00e+00
ggaagagggaaggaatttgcttcctgagatcatttggtccttggggatggtggaaatagggacctattcctttggttgcagttaacaaggctggggatttttccagagtcccacaccctgcaggtcatcctgggctgtgaaatgcaagaagacaacagtaccgagggctactggaagtacgggtatgatgggcaggaccaccttgaattctgccctgacacactggattggagagcagcagaacccagggcctggcccaccaagctggagtgggaaaggcacaagattcgggccaggcagaacagggcctacctggagagggactgccctgcacagctgcagcagttgctggagctggggagaggtgttttggaccaacaaggtatggtggaaacacacttctgcccctatactctagtggcagagtggaggaggttgcagggcacggaatccctggttggagtttcagaggtggctgaggctgtgtgcctctccaaatt

SEQ ID NO: 10130 - DNA, 600 bp, Homo sapiens
  MAP TO CHR6.3; EXPRESSED IN BONE MARROW, SIGNAL = 3.6; EXPRESSED IN FETAL LIVER, SIGNAL = 4.7; EST_HUMAN HIT: AV651391.1, EVALUE 0.00e+00; NT HIT: J00204.1, EVALUE 0.00e+00; SWISSPROT HIT: P01903, EVALUE 3.00e-54
catgtgtcccccagtacctccagaggtaactgtgctcacgaacagccctgtggaactgagagagcccaacgtcctcatctgtttcatagacaagttcaccccaccagtggtcaatgtcacgtggcttcgaaatggaaaacctgtcaccacaggagtgtcagagacagtcttcctgcccagggaagaccaccttttccgcaagttccactatctccccttcctgccctcaactgaggacgtttacgactgcagggtggagcactggggcttggatgagcctcttctcaagcactggggtatggaccaacactcaatctcctttatttcaaggtttcctcctatgatgcttgtgtgaaacttggtgttctaactgtttcataatatctgctacaattaatataactgtcttctcctactatccagcttccgcctttttttaatctgtaattctctcaatacatcattctgtcttcctcttctttaatctatgaataacttttctctttattaagaaccctacatttgattctgagtgttacttcttcccacactcattaccatgtactctgccttatttccccccagagtttgatgctccaa

SEQ ID NO: 10131 - DNA, 505 bp, Homo sapiens
  MAP TO CHR1.3; EXPRESSED IN LUNG, SIGNAL =   2; EXPRESSED IN HEART, SIGNAL = 1.3; EXPRESSED IN BONE MARROW, SIGNAL = 1.1; NT HIT: V01511.1, EVALUE 0.00e+00; SWISSPROT HIT: O74537, EVALUE 1.60e+00
actgtgtccaggctgaaaccaaaaggtatggcgcaagagtgagaggcaggtgccaccacaggaccatgagaggccaagctccggtaaattttggtagccaaattctagctccttcctgggccttgatgctggtaaaatcccagaactcaaggaaatggaatttgtcctattggcacatgcctccccactgtgtagggcacagggaatgtggtgaggtacagtctaatgccagctctccccctccacagagttttggccagtggtcgtgcagtccaaggggctggatggcatgctggacccaagctcagctcagcgtccggacccaataacagttttaccaagggagcagctttctatcctggccacactgaggtaagtgcctaagggaccttggccttgccaaggtcctccctctgcagctgccagaagcaggagtcccaagtgacaggacctgagagggcaagtcagaaccaactgctgagcagcaggggcctagagaagcttt

SEQ ID NO: 10132 - DNA, 557 bp, Homo sapiens
  MAP TO CHR12.3; EXPRESSED IN FETAL LIVER, SIGNAL = 1.5; EXPRESSED IN BONE MARROW, SIGNAL = 1.2; EST_HUMAN HIT: BF314125.1, EVALUE 1.00e-121; NT HIT: M23114.1, EVALUE 1.00e-121; SWISSPROT HIT: Q03669, EVALUE 2.00e-34
ctttgccaagagacctacggctctattcattttcctcctgcttcccattcagtgggcttttgcctaggggtatgaatgtggcatgccagttggctgacccaaccattgctttccctttcagactggcgatggcgtgaacgatgctcctgctctgaagaaagccgagattggcattgctatgggctctggcactgcggtggctaaaaccgcctctgagatggtcctggcggatgacaacttctccaccattgtggctgccgttgaggaggggcgggcaatctacaacaacatgaaacagttcatccgctacctcatctcgtccaacgtcggggaagttgtctggtaggtctctgtgacagcatcacttactgtacgcctttatctaaatgggtcatggagcccagttctcgcagtttgctctccagattgcagcagctttggtctttgtgcctgagttggaagaggggagtgggcaagacagaaatgccttatggaagcagtggtgctttggccctcgggagggttgtctgcagctgccccaatgtgcaaagaatcct

SEQ ID NO: 10133 - DNA, 544 bp, Homo sapiens
  MAP TO CHR1.3; EXPRESSED IN BONE MARROW, SIGNAL = 0.81; SWISSPROT HIT: Q14739, EVALUE 4.00e-26; NT HIT: L25932.1, EVALUE 0.00e+00; EST_HUMAN HIT: AL596951.1, EVALUE 2.00e-97
ttgggaacaaggactatgcctcattcatacattcccagagccaaaaacagtatgtgacccaaagcaagagctcaatcctctgccttcaaaccgagctgaactgactatcctgagcttagaaaccatacttagagttatttcccacttactgtaaacacactctgataaaccaaaggagctcttaccttaatatcattctctttcaattcaagctctgttccatctttatacttcacagtgtaaagctgggaggtgctgtcgtggctcagaatttctacttcataataaagtgaactcccaggccatcgacctcttaccacttcaccatcggcaaatttcctacttggcattttctataattaacctgaatagttttaaagaaaaaaatttgagtcaatacatacacatttatgtattcgtctttttccacaggctgatcactaaaatacaactttccagaattgactggtcaggattttagggccagaaaggctacattcaatctcatttggaatcatttgagaggatgatttagccactgcgt

SEQ ID NO: 10134 - DNA, 599 bp, Homo sapiens
  MAP TO CHR12.3; EXPRESSED IN HEART, SIGNAL = 1.5; EXPRESSED IN ADULT LIVER, SIGNAL = 2.4; EXPRESSED IN BONE MARROW, SIGNAL =   2; NT HIT: gi7706500, EVALUE 0.00e+00; EST_HUMAN HIT: BE702301.1, EVALUE 0.00e+00
gacttttgccattcaactcgtatcagttcaagaagctctggaataagtaaccactgaaggtaagacatcttttaaataataaaagccaaaccatactattcttaacacctctcagtttctctaaagccagtatgacaatcttaaaaaagggaaataattactcctttttatcccttaaaatttaaaatgtagtttttaccatgttttcagtaagattctcattctgtaccagaaaggcagttccttaaagacccaagttttaaatatttaactttttctgtccataaaataggtattatgtttacatattatcagtaacacagagtatcttggtgtagaacatttatttatttttcccacaaatcactgaaagtttaggtcagtgggaaataattttaatcaaataattgtacatattcttcccacatatcctgccttgtattaggaaatgacattgtgatccatttcattacaagtaaaatattacaaaatatttacaggaaaatattaaaaataactcaaacacaaaaggcaagatgaaataaactgtttttttttctccagaaatctctactccagtgcccacagcacacaagagt

SEQ ID NO: 10135 - DNA, 570 bp, Homo sapiens
  MAP TO CHR21.3; EXPRESSED IN BONE MARROW, SIGNAL = 0.84; NT HIT: AB001517.1, EVALUE 0.00e+00; SWISSPROT HIT: P30042, EVALUE 2.00e-17; EST_HUMAN HIT: BG742214.1, EVALUE 1.00e-111
gcttcactggtcctgagtcctggcttcttaccttcccctctgagtcccaccgtcctgatgagtgcacagaattctgtctgctttagacactcggagagacttccatttcccatgggccttgactgcagaagattcagagtgatttggcgcaggttctgaagtgctgatcggaagagcccagcatagatttagcgttgctagaaccatgttgtctttccaggtagtgaccaaacatgctgacctggaagtaagtccccgtgtggctgagagccacgtgtgtggagcgtgttgcctgtgggctgtgcccctgccgcgctccacagtccttcacctgcatgctgaggctttttgccctgtgctctttcccaggaatgttttgaccgagtctgcgaggatcgcccgtggcaaaatcacagacctggccaacctcagtgcagccaaccatgatgctgccatctttccaggaggctttggagcggctaaaaacctgtgcgtatttgagctccaaggtcttccgctttccatgtggagcagatgggaagggggtgcacctgtctgctgtccaatgtg

SEQ ID NO: 10136 - DNA, 524 bp, Homo sapiens
  MAP TO CHR1.3; EXPRESSED IN HELA, SIGNAL = 2.5; EXPRESSED IN BONE MARROW, SIGNAL = 0.82; SWISSPROT HIT: P11766, EVALUE 5.00e-65; EST_HUMAN HIT: BG574183.1, EVALUE 0.00e+00; NT HIT: M30471.1, EVALUE 0.00e+00
atgggaaccagcacattttctgaatgcacagttgtggctgatatctctgttgctaaaatagattctttagcacctttggataaagtctgccttctaggttgtggcatttcagctggttatggtgctgctgtgaacactgtcaaggtggggcctggctctgtttgggccgtctttggcctgggaggagttggattgacagttatcgtgggcggtaaagtggctggtgcatcccggatcattggtgtggacatccatcaagataaatttccaagggctaaagagtttggagccactgaatgtatgaaccgtcaggattttagtcaacccatccaggaagtgctcattgagcggactgatggaggagtggactactcctttgaatgtattaggaatgtcaaggtcgtgagagcagcacttgaggcatgtcagcagggctggggcgtcagtgtggtggttggagtagctgcttcaggtcaagaaattgccactcatccattccagctggtaacaggtcgcacatggaa

SEQ ID NO: 10137 - DNA, 500 bp, Homo sapiens
  MAP TO CHRX.3; EXPRESSED IN BONE MARROW, SIGNAL = 0.7; EXPRESSED IN BRAIN, SIGNAL = 0.52; EST_HUMAN HIT: BE767245.1, EVALUE 1.00e-107; SWISSPROT HIT: P11532, EVALUE 1.00e-24; NT HIT: L05636.1, EVALUE 0.00e+00
ggaataagcaaatcgccatcctttgtaaaagactcatgtcttttcatcttctcactaactttgaaagatgctgaaggtcaaatgcttatgtacctttacagtttacagtgtatcgttagggaaaaaacaagtaaataaaaatgagggtagaaagtaaaatcttgaattacctgaatttttcggagtttattcatttgctcctctagcttttgacaatgctcaaccagctgggaggagagcttcttccagcgtccctcaatttcttcaaattctgattgatatttccggctaatttcagagggcgctttcttcgacatctctttcacagtggtgctgagatagtataggccactttgttgctcttgcagagaactttgtaaagcctaaaaaacaattttttaaatacatttaccctaattgatgaataataattgatgagttttagtgaaattaactgtacttgaaatctatatgattcaaacatgtaaacaaagtagatg

SEQ ID NO: 10138 - DNA, 562 bp, Homo sapiens
  MAP TO CHR9.3; EXPRESSED IN HEART, SIGNAL = 1.4; EXPRESSED IN ADULT LIVER, SIGNAL = 2.6; EXPRESSED IN BONE MARROW, SIGNAL = 1.7; EST_HUMAN HIT: BG026282.1, EVALUE 0.00e+00; SWISSPROT HIT: O76074, EVALUE 9.20e+00; NT HIT: AF029308.1, EVALUE 0.00e+00
atttgggggtatggtgtgaggtaatgatccaacatcattattaatagtatttttgcatagtttaatttctgtactatttgttgaaaataatattatttcatcattaaactgactttacaccatattcaaaaatgagttaaccatagtggatgggtttatttctgatgtttgtcttctatgttctttttttttttttttagcattacaaaatattttatatttaatgagaaaaaagaagcttgcaggcagcacatgaagcattcacagcaggtatatgattgaaaactagtaaaataagtgtaagttgttgactgatgtaggtactaatagcatctgactttcagcactggccttgattacacaggagatggagaagtcgttacaattaagaaaacatatttaacaaatcattgtcaatttttataatgtttcaagcccattctttgttgatagcctccacatttatatggttaagtcattgttgctgtgtttcttatctatgacattatttttatatcccttcatttgtggatcttaagatgttgcagaaggttcattcctg

SEQ ID NO: 10139 - DNA, 596 bp, Homo sapiens
  MAP TO CHR6.3; EXPRESSED IN FETAL LIVER, SIGNAL = 1.9; EXPRESSED IN BONE MARROW, SIGNAL = 1.4; NT HIT: M88006.1, EVALUE 0.00e+00; EST_HUMAN HIT: AL543197.1, EVALUE 1.00e-115; SWISSPROT HIT: P17707, EVALUE 1.00e-16
tttcacagcaagagtggcagagaatacctaaacacagaagagagcattcatgcaagatatctaactccttgatataataatgcatacaattcaaaatgattacactatcattacatctagggctttctgcaactacacagtggtggttatggaaagcactgcccccagcatcgacatctagaaagcatccaccaccttctacatgtgttctctttttgcgttttttcttcatttttcttaatcaactctgctgttgttgctgcttcttagcaaaactggtaaaaacaaaattgtaatcattgaacatagcactctggcaatcaagacgcttaaaaccttcaatcttctggggcgaagcaagcactgtgcgacatttagaactctgggggaaaaaattaaataaccgttagtgtttgcaatccagagaagtattttcaaccaaaacagttaagtgacagacttttatcttaatgaaactaagacatctgagttattttagctgccttcttatgtgctggaggggccagggcatcttatggttcctcccaccagaggcctgtcaatagcaagacaggaggaacccatcagtttggcta

SEQ ID NO: 10140 - DNA, 526 bp, Homo sapiens
  MAP TO CHR19.3; EXPRESSED IN BONE MARROW, SIGNAL = 1.5; NT HIT: gi14759866, EVALUE 1.00e-112; EST_HUMAN HIT: AV718605.1, EVALUE 1.00e-112; SWISSPROT HIT: Q14693, EVALUE 4.50e-01
ttgttgacttgctgggtcacacagatacaatgaggggctggggcagagggtcaggggatgggaggtgaggtggctgtcggctgaggtttccattctgacccccacaggctcacgctgacaagcagagccacatcctatgggccctcacaggccacgtgcagcggcagaggcgggagatggtggcacagcagcatcggctgcgacagatccaggagaggtgagcctggcaggggtttggcaggcagggcagttggatggggggcgcacagggcagctggaaaggggccccctcacctgggctgagccacatctccctccccagactccacacagcggcgctcccagcctgaatctgcctggatggaactgaggaccaatcatgctgcaaggaacacttccacgccccgtgaggcccctgtgcagggaggagctgcctgttcactgggatcagccagggcgccgggccccacttctgagcacagagcagagacagacgcaggcggggacaaaggcagaggatgtagcc

SEQ ID NO: 10141 - DNA, 508 bp, Homo sapiens
  MAP TO AC013646.3; EXPRESSED IN BRAIN, SIGNAL = 0.92; EXPRESSED IN PLACENTA, SIGNAL = 0.68; EXPRESSED IN FETAL LIVER, SIGNAL = 0.98; SWISSPROT HIT: P48280, EVALUE 6.10e+00; NT HIT: U67574.1, EVALUE 7.50e+00
tcccttttccatttcacaggaaactcctacttattaaggtgagattctacaccaatgtttccctttcatgctttctccatactcagtgatcttcgaatctaaactggattccacagcagaatggaactcgcttttgcaatattggtattttcctatggccctcacccagtggactgtgcattcttagcagatgaagacaacatctcattatttttgtgctttcaggaactaagacaatgctagacacacaaatatccacacacaaacgcactgaagagagaatcagtgatggtgttagtgtcaagcataatgtaccaaaaacacatactggacagaatggaaatcaactgtaattgtaggatatttgtttaaatagtgcccctgctaaaatatatttcaatatctccctcttgtgttcagtataaagtgtaaatccctcacgagacacattctccatatgtccgctaacacagacattcctaaagctggctccttcctgcttcaattg

SEQ ID NO: 10142 - DNA, 593 bp, Homo sapiens
  MAP TO AC008713.5; EXPRESSED IN BRAIN, SIGNAL = 0.69; EXPRESSED IN FETAL LIVER, SIGNAL = 0.63; EXPRESSED IN PLACENTA, SIGNAL =   1; SWISSPROT HIT: O76061, EVALUE 2.00e-76; NT HIT: gi14731234, EVALUE 0.00e+00; EST_HUMAN HIT: BF984659.1, EVALUE 0.00e+00; EST_HUMAN HIT: BF984659.1, EVALUE 0.00e+00
ataagaaaatggacggcgtggaggaaagatttcgtggccaggcctttcatttcacctccggatatcagaatactcagactgttcgtcttcccactcgctgcttccggaaggtccctgagccccaaggcccccgactctgcctcgggcatgggcgtttgggtggctcttgctacctcgctcacccttggcacctcggccagtctccctactgctgggctctgggaggtgatgtcctgcttccccgtggtgggccctggagagcttggttctgtccacctggggctggcgctcggggggcgccgtgggaggcttctggatggccgaggtgcagaagctcaagatggagcacaggcttccccagttctgctcacactgaacctgcacgctgtgggtgatggcctccttcacctcctccccacaggtcagcagcaagttcacgaggtccacgtagggtctaaagattgaaagcaaagagagagagagagagagagagagagagagagagaggctgggaatggagcaagtcccgaatggaccacagagggcaggggcaatgctgggaaggaggcatggccagtgcttgtcttgggttc

SEQ ID NO: 10143 - DNA, 544 bp, Homo sapiens
  MAP TO AC008984.5; EXPRESSED IN BRAIN, SIGNAL = 0.91; EXPRESSED IN PLACENTA, SIGNAL = 0.85; SWISSPROT HIT: Q64281, EVALUE 7.00e-21; NT HIT: gi14768441, EVALUE 0.00e+00; EST_HUMAN HIT: BF901857.1, EVALUE 0.00e+00; EST_HUMAN HIT: BF901857.1, EVALUE 0.00e+00
tgagaggacactctggggtcccagctccaggctctgccctcaggaagggggtcggctctcaggggtgtctccctttcacagcccagccctggggatgatgtgggaggtgggagccccatttaacacggtgcctccttctctcctaggattctacaacaaacccaccctctcagccctgcccagtcctgtggtgacctcaggagagaacgtgaccctccagtgtggctcacggctgagattcgacaggttcattctgactgaggaaggagaccacaagctctcctggaccttggactcacagctgacccccagtgggcagttccaggccctgttccctgtgggccctgtgacccccagccacaggtggatgctcagatgctatggctctcgcaggcatatcctgcaggtatggtcagaacccagtgacctcctggagattccggtctcaggtgaggaagccacagtcttctctagtacaattcagggaagccagacaggttgtggagagctttacaggcagggcagcccctgctaagaaagacaa

SEQ ID NO: 10144 - DNA, 571 bp, Homo sapiens
  MAP TO AC008413.5; EXPRESSED IN PLACENTA, SIGNAL = 1.1; EXPRESSED IN HEART, SIGNAL = 1.7; EXPRESSED IN BRAIN, SIGNAL = 0.89; EXPRESSED IN FETAL LIVER, SIGNAL = 1.4; EST_HUMAN HIT: AL555271.1, EVALUE 0.00e+00; SWISSPROT HIT: P35269, EVALUE 2.40e+00; NT HIT: gi14150224, EVALUE 0.00e+00; EST_HUMAN HIT: AL555271.1, EVALUE 0.00e+00
tgttgccgagatagttgctgaaacaatgaacaactacctgtttgttggagtgtcattttatgccacctgaaaaagtacagaaagaaatctttaaagaccgtaatattccatttaaacagccatcatatccatcagtgagacggtataatcagaatcggcatttcgcaaaagctgcggatggaggggccatttaaaaagaaagaaagattactccagaagaaattagcttaaaatagaattatgattttccttctttgattttacagaaaatggaaagtacttcaaaatcaaattttcggacgtctacaaaaggccaggttttacttaagaagaaaaaggttttaggcactcctgacactcctgaaaagactgtggatacccagggccccacaccggtttgtacatcaacatttttggggagatgaaaatgtgagtgtctgaaatgaatgatgatgacgaggaaaatgaaatagttttcaaacagcccatatcctgtgtaaaagaagaaatacaagagactcaaacacctatacattcacagaaaaaaagacgaaggaaaagcaatcagtga

SEQ ID NO: 10145 - DNA, 500 bp, Homo sapiens
  MAP TO AC010514.4; EXPRESSED IN PLACENTA, SIGNAL =   1; EXPRESSED IN FETAL LIVER, SIGNAL = 0.98; EXPRESSED IN BRAIN, SIGNAL = 0.78; EST_HUMAN HIT: BF796079.1, EVALUE 0.00e+00; SWISSPROT HIT: Q92599, EVALUE 6.00e+00; NT HIT: AF109718.1, EVALUE 0.00e+00; EST_HUMAN HIT: BF796079.1, EVALUE 0.00e+00
agaaaagaaaaattccatatctgagtgtttactcctgagtttttgagattgttattaagatcgtgctctactgtgatgatttgggtttgtttgataatcagaaaaaaagcgtattcttttaggtgttcagccacactgctttggtgtcacaactgcacattggtttcacagctgcaggacaagttcgagcatcttaaaatgattcaacaggaggagataaggaagctcgaggaagagaaaaaacaactggaaggagaaatcatagatttttataaaatgaaagctgcctctgaagcactgcagactcagctgagcaccgatacaaagaaagacaaacatcgtaagaagcaatagtttctcttactattctgagagccttatcattctacatcccatcttcctgtgagtttgtctttgtagcatttaactctaattgcagttctcattttaaaaactggcttgcttattgtatattttccccaactaaagcgtgaactcct

SEQ ID NO: 10146 - DNA, 531 bp, Homo sapiens
  MAP TO AC008772.5; EXPRESSED IN BRAIN, SIGNAL = 0.92; EXPRESSED IN PLACENTA, SIGNAL = 1.1; EXPRESSED IN FETAL LIVER, SIGNAL =   1; SWISSPROT HIT: Q03226, EVALUE 1.30e+00; EST_HUMAN HIT: AL043011.1, EVALUE 2.00e-23; EST_HUMAN HIT: AL043011.1, EVALUE 2.00e-23
caggttccacttgcgtacagtaaccttttctccctccgtaaaaaattttgtttccaattgtcatcagcaaatccctttgtaaaaattttaagcattatcaaacctgctggaactacgagatcttcgcgatgcattgtaactcctgggtggtgttctggattttttatccttctttcttttttcatctatctctttggatctgtctttttctcgttccttttctttgtcctgttccttttccttctctttgtctcgatccttctcatgctctttttcccgttctctctctctgtccttttccttgtctttttcccggtccttttcccgttccttgtcccggtctttgtttttaccccgttccttttctttttcacgttccttttccctctctctctccttttccctgtctttctctttcactctttccttttccttgatcttttctcgagtgtcttttctcttgtccctttaaaaacaaaaataaataaattcataactaaaatagttctacctcctccaaaaagacctctc

SEQ ID NO: 10147 - DNA, 531 bp, Homo sapiens
  MAP TO AC008777.4; EXPRESSED IN BRAIN, SIGNAL = 4.7; EXPRESSED IN PLACENTA, SIGNAL = 3.3; EXPRESSED IN HEART, SIGNAL = 3.2; EXPRESSED IN LUNG, SIGNAL =  18; EXPRESSED IN FETAL LIVER, SIGNAL = 2.8; SWISSPROT HIT: P39193, EVALUE 3.80e+00; NT HIT: AF312032.1, EVALUE 5.00e-04; EST_HUMAN HIT: AV649211.1, EVALUE 1.00e-102; EST_HUMAN HIT: AV649211.1, EVALUE 1.00e-102
ctgggttcgaatctcagctctgtcttttacttgccctataaccttgggcaacttccttaaggaattttctcagatgtaaaatggggatgattacagtaactacttcctcaggttgtcaggagtacatgagataatgtttgttaaatgcctctcacaatgtctggaaaatagttaatttataaaaacagttaccaccaccaccaccaccaccaccactaccaccaccaccaccaccaccaccaccaccaccaccaccaccactacacctagagaagcatgctaaagagaagacacaatacagctctcaaagagtttacaatctcaatttgcaagtattaaaaacccccactctctaaaaatatggtagacatattaagcatatgtaacatatgcaataaatacacacatcatactttcagtaaaatataaagtattcatattcaaaaggcttctgaaagtaggccgggcatggtgactcttgcctgtaatcttagaagtttgggaggccaaggttgcaggatctcttgaggc

SEQ ID NO: 10148 - DNA, 576 bp, Homo sapiens
  MAP TO AC000395.1; EXPRESSED IN HELA, SIGNAL = 1.8; EXPRESSED IN BRAIN, SIGNAL = 1.2; SWISSPROT HIT: P19835, EVALUE 4.00e-52; NT HIT: gi16161507, EVALUE 0.00e+00; EST_HUMAN HIT: AW087963.1, EVALUE 0.00e+00; EST_HUMAN HIT: AW087963.1, EVALUE 0.00e+00
tgcacagcctcttctcactctgcagggaccccaacatgggccactcggctgtgcccacacactgggaaccctacactacggaaaacagcggctacctggagatcaccaagaagatgggcagcagctccatgaagcggagcctgagaaccaacttcctgcgctactggaccctcacctatctggcgctgcccacagtgaccgaccaggaggccagttccatgccctccacaggggactctgaggccactcccatctcccccgacaggcaactccgagtctgcccccgtccctgcaacgggtgactctcaggatgccccgtgcccctcacaagtgactctgaggctgcccccgtgtccccctcaggtgactctgaggctcccccgtaccccctacgggtgactctgaggcccgtgcccaccttgggtgacactgaggccgcccctgtgtcccccacagatgactccgaggaagctcagatgctgcagtcattagtttctagtgtcccatcagccttggtctcaagaggccgagagggtgcaaccccaggggctcccctcccatcttgagctcttcctg

SEQ ID NO: 10149 - DNA, 546 bp, Homo sapiens
  MAP TO AC011513.2; EXPRESSED IN PLACENTA, SIGNAL = 1.6; EXPRESSED IN LUNG, SIGNAL = 9.9; EXPRESSED IN BRAIN, SIGNAL = 0.78; EXPRESSED IN HELA, SIGNAL = 0.71; NT HIT: gi14756175, EVALUE 0.00e+00; SWISSPROT HIT: Q9QXN1, EVALUE 5.10e+00; EST_HUMAN HIT: BE868274.1, EVALUE 0.00e+00; EST_HUMAN HIT: BE868274.1, EVALUE 0.00e+00
ggtctgctctgctcctgaagccctatatgctggagatggacaactcaatgaaaatttaaagggaaaaccctcaggcctgaggtgtgtgccactcagagacttcacctaactagagacaggcaaactgcaaaccatggtgagaaattgacgacttcacactatggacagcttttcccaagatgtcaaaacaagactcctcatcatgataaggctcttacccccttttaatttgtccttgcttatgcctgcctctttcgcttggcaggatgatgctgtcattagtatttcacaagaagtagcttcagagggtaacttaacagagtatcagatctatcttgtcaatcccaacgttttacataaaataagagatcctttagtgcacccagtgactgacattagcagcatctttaacacagccgtgtgttcaaatgtacagtggtccttttcagagttggacttctagactcacctgttctcactccctgttttaattcaacccagccatgcaatgccaaataatagaattgctccctaccagctgaacag

SEQ ID NO: 10150 - DNA, 533 bp, Homo sapiens
  MAP TO AC002325.1; EXPRESSED IN FETAL LIVER, SIGNAL = 0.54; EXPRESSED IN BRAIN, SIGNAL = 0.64; EXPRESSED IN PLACENTA, SIGNAL = 0.68; SWISSPROT HIT: Q09456, EVALUE 2.00e-05; EST_HUMAN HIT: AI190297.1, EVALUE 0.00e+00; EST_HUMAN HIT: AI190297.1, EVALUE 0.00e+00; NT HIT: AF414401.1, EVALUE 0.00e+00
cctagccttttggacattggagaagactctaaagtagatacctaagattggaaaaagttcgaattggaaagcactgagaccaggggtcaaccctccagggctggccagacacggaacaaatgttcaatgaccctcaggttccttcctttcccttccaggactgagggtcctgcatctccggtacccatgattggagggtccagtactggccccgcaggctggcctgagccttcaggaagccctcgctgaactccatctcagcctggctgctctctgactcccagtagagcacctgctgcccatggaacgctgtggtcctcaagctgtgggtgtcccggatctgagagaaaaggggcagcccagaaggaccggccacaagtaataattagcactcacggaagccttcgtgtgcaagggctcacagattccggatcacatttaatgcttacaaagccctactaggaatacgccattactctacccagaaaaccgaggtccagggacgttacatcacttccccaaggacacacagt

SEQ ID NO: 10151 - DNA, 568 bp, Homo sapiens
  MAP TO AC007565.1; EXPRESSED IN HEART, SIGNAL = 2.6; EXPRESSED IN BRAIN, SIGNAL = 2.7; EXPRESSED IN PLACENTA, SIGNAL = 2.4; NT HIT: gi9628002, EVALUE 2.10e+00; SWISSPROT HIT: P27214, EVALUE 2.10e-01; EST_HUMAN HIT: BI912598.1, EVALUE 0.00e+00; EST_HUMAN HIT: BI912598.1, EVALUE 0.00e+00
gggtagggtcactagcctcctgactcacagaaaacacaaggctgagggagggtggtctacttgcccgaggccacatagccagggcagcctccactctcaccacgcacccacccaccttaccctctgcattgcaggctccttggcgatcccagcaccatccatccggctggtgcccccgtacccaagcagccaagaggaccccatccacatcgcatgcatggcccctgggaacttcccgggggcgaatttcacactgtatcgaggggggcaggtggtccagctcctgcaggcccccacggaccagcgcggggtgacatttaacctgagcggcggcagcagcaaggctccagggggacccttccactgccagtatggagtgttaggtgagctcaaccagtcccagctgtcagacctcagcgagcccgtgaacgtctccttcccaggtaaggcccttctatgggatctcactgccgggggcttaattttctcacatggacctcttgtgtgtactgttgactcagaggccttcccagaaaaagccaggcttacaccctgccaggacttactc

SEQ ID NO: 10152 - DNA, 535 bp, Homo sapiens
  MAP TO AC000125.1; EXPRESSED IN LUNG, SIGNAL = 7.5; EXPRESSED IN BRAIN, SIGNAL = 1.3; EXPRESSED IN HELA, SIGNAL = 0.67; EST_HUMAN HIT: BE880539.1, EVALUE 7.50e-01; NT HIT: AL163252.2, EVALUE 7.90e+00; EST_HUMAN HIT: BE880539.1, EVALUE 7.50e-01
aaccaccactccagcttctgccaccaccacaactgccaccaccaccaccattaccactaccatcaccaccaccaccatcactgcactattgccactatcactaccatcgctaccaccattattaccaccactatcaccaccagcaccagcaccactacaccattgccaccatcactaccatcaccaccaccactaccaccactactatcatcaccaccatcaccaccaccaccacatcattgccacctttactaccagcatcaccaccaccaccaccacaacactaccgctactaccataccacaaccaccactgtccccaccatcactatcagtaccaagcagcctagagccagaggtcttactggtatatgtgagggggtggatagagatttgggcctagcatgagtttaatacttaaaaacaaatactactgaatcttaaaacatgtttaataaactgttttaacaaatgtgtgtcttcaaagttgtggaagtgcactattatgcctcaaaggagcccattacccaaagaca

SEQ ID NO: 10153 - DNA, 505 bp, Homo sapiens
  MAP TO AC022127.3; EXPRESSED IN BRAIN, SIGNAL = 3.6; EXPRESSED IN PLACENTA, SIGNAL = 3.5; EXPRESSED IN LUNG, SIGNAL = 4.7; EXPRESSED IN HELA, SIGNAL = 4.1; EXPRESSED IN FETAL LIVER, SIGNAL = 3.5; NT HIT: M23166.1, EVALUE 4.80e-01
ggaaggaatggtaagggaggagccatcacaatcaaacataataagaattcaaaggtgtgaagccagcttgctccagagtcttcctttccccatgtcaacctcccttctcccttgacccagtgcctggacccaaaataaatgttggtgtttcttttccttcccttcctttccttccctccctccctccctcacttccttccttccttccttccttccttccttccttccttccttcatttctttccttcttccttctcctttctctcttcctctctctcactctctttctttctttcttttttcacaggggaagaagggaatagaatatggatgcccttccagaccaaaacacaaatctccaacaaagaagaactcttggctgaccagcactctccttgcagcttctctcagcatctgaattcaaagctgccgtgaaccaactccggctgcacctgaggcccaggcccagtgcccagcaaaagcctgcaattctgtggaccaggtt

SEQ ID NO: 10154 - DNA, 600 bp, Homo sapiens
  MAP TO AC001642.1; EXPRESSED IN BRAIN, SIGNAL = 0.38; SWISSPROT HIT: Q13315, EVALUE 2.00e-24; EST_HUMAN HIT: BE541772.1, EVALUE 9.00e-78; EST_HUMAN HIT: BE541772.1, EVALUE 9.00e-78; NT HIT: U82828.1, EVALUE 0.00e+00
ttcctccaaggagctttgtcttctatggacagagaaatattaatacaacttgaaaaaaaatgctttgcactgactctgatagctgaatgatcatcaaatgctctttaatggccttttaaaattaaaaggtatttaatctgtaactccaggtggttcccctctctcagcgaagtggtgttcttgaatggtgcacaggaactgtccccattggtgaatttcttgttaacaatgaagatggtgctcataaaagatacaggccaaatgatttcagtgcctttcagtgccaaaagaaaatgatggtgagtgacacccaaaattaaaggttattgtaagattatttaatggcttattaaagctgacagctgtcagatattatagaatacaaaaaaactttaatttcatcaggtaattgtcaaagatactaagtaaaagaaaaactcatcagaatgaaagtgtgtgagtgaaaaaggaaggattttaaactacataatatgtcaacccttgtcagataagaaatgtaaaggttattcaatgtgtgctgatttgttttcaatttgggataaactaattcttagcaaacaaaacactaaaatgccaggc

SEQ ID NO: 10155 - DNA, 577 bp, Homo sapiens
  MAP TO AC022150.5; EXPRESSED IN PLACENTA, SIGNAL = 4.5; EXPRESSED IN HEART, SIGNAL = 6.4; EXPRESSED IN LUNG, SIGNAL = 2.9; EXPRESSED IN FETAL LIVER, SIGNAL = 5.6; EXPRESSED IN BRAIN, SIGNAL = 3.1; SWISSPROT HIT: Q02817, EVALUE 4.90e-01; EST_HUMAN HIT: BF821736.1, EVALUE 0.00e+00; EST_HUMAN HIT: BF821736.1, EVALUE 0.00e+00; NT HIT: AB045011.1, EVALUE 3.50e-02
acttcagatgtgggtgggagggcatgggagacagctctgagcctagaactgaaggaggagaaagggacaatgcagtgatcatttagggacatagggtaagagcagggacaatgacctgagacagaaaaggttttggtgtttgggaaaaaaaaaatgtgactggggcagagggagtcatgagatgagggcaagctcccaggaggctggacactggcaggggccctggacacagggctgtggagccacagtgaggagttgggcttttgtcctggggaacacgggaagccggtggagggttccctgccaggcactgacatgacctgctttagatttggctgtgatgtcctcatacagagaaaggccccgaagatggtctctgtgtctgagtctaccgctctgtttcttccattcttctgcttttcttcatttttggggtactgcatcccatttaaaattctagttacaactgggcactcccctctcccagaagaaaagccacacccagacacccactctattttgccaatcatttcaggggccagggtcactcagggtgagcttttctggtctagcccct

SEQ ID NO: 10156 - DNA, 513 bp, Homo sapiens
  MAP TO AC002498.1; EXPRESSED IN BRAIN, SIGNAL = 0.84; EXPRESSED IN PLACENTA, SIGNAL = 0.96; EXPRESSED IN HEART, SIGNAL = 1.7; SWISSPROT HIT: O66875, EVALUE 2.10e+00; NT HIT: AF008210.1, EVALUE 4.90e-01
ttcttgtcatgggtcagcagaccgtatttagtaaatgccagtgtcaagtcagtaagacatcattggaattgttattataaaatggtcagtgctactcagtctttatcctattcattttgtacagcgtccactgaactctctgcattcactggaaaggagatatttttcacagcagagccttaatgaaatccaaaacaagatgagtctcaaccaaggcaaccaaggagacctgattacaggggacctgtgaacttcatgttagagaaagataaggaaatactgaaaatgatttgtaatttttctctttattttaaatatttattaagatgaattgaatacaatactccattgctgtttaaatcaatgttaatgttctttaacaattcactgacatgtactttccatacgtaatataccagaaaacaacacacaaaaaattgtttcttatttattccaagaaaattttaaacacttagcatttaaaataagaaagccaacaaccaagttgcaagg

SEQ ID NO: 10157 - DNA, 593 bp, Homo sapiens
  MAP TO AF037338.1; EXPRESSED IN HELA, SIGNAL = 5.7; EXPRESSED IN BRAIN, SIGNAL = 3.2; EXPRESSED IN PLACENTA, SIGNAL = 2.9; SWISSPROT HIT: P02465, EVALUE 5.00e-03; NT HIT: AF037338.1, EVALUE 0.00e+00; EST_HUMAN HIT: BG011048.1, EVALUE 1.00e-115; EST_HUMAN HIT: BG011048.1, EVALUE 1.00e-115
atcagtcaagggactgcaccttggggtgctgggtgctgacgtcctatgggagggctccaggggtgccgcctgtctggtgctctgggggtcacccaatgaatatgagagccttcctgggagagaggggtctcgttcagcacccctcctgaggacccagccccaccccagggtgtgaggatgcaggccaagggggcctgagggagctgcagtagggtctcagcacctcctcagcctcctggttcccccctaccccctgcgcacagatatccagttctggaacagccggcagtccctggagggcctgtccgtgcgctccgtcttcttcggcgttttccagtcattcgtggtcctcctctacatcctggacaacgagaccaacttcgtggtccaggtcagcgtcttcattggggtcctcatcgacctctggaagatcaccaaggtcatggacgtccgggtaaggctggggcgccatgctgtctcgggagctgcaggggttgggagggggtagtgtggcccagctggaccctggagctggcccccgggggattcccagcaagtgcctcactcccaggactgaggggattttctcacca

SEQ ID NO: 10158 - DNA, 518 bp, Homo sapiens
  MAP TO AF050154.1; EXPRESSED IN BRAIN, SIGNAL =   8; EXPRESSED IN LUNG, SIGNAL = 5.4; NT HIT: AF261279.1, EVALUE 0.00e+00; SWISSPROT HIT: P02649, EVALUE 4.00e-33; EST_HUMAN HIT: AV683336.1, EVALUE 1.00e-106; EST_HUMAN HIT: AV683336.1, EVALUE 1.00e-106
tttgtggagcaccttctgtgtgcccctaggtactagatgcctggacggggtcagaaggaccctgacccaccttgaacttgttccacacaggatgccaggccaaggtggagcaagcggtggagacagagccggagcccgagctgcgccagcagaccgagtggcagagcggccagcgctgggaactggcactgggtcgcttttgggattacctgcgctgggtgcagacactgtctgagcaggtgcaggaggagctgctcagctcccaggtcacccaggaactgaggtgagtgtccccatcctggcccttgaccctcctggtgggcggctatacctccccaggtccaggtttcattctgcccctgtcgctaagtcttggggggcctgggtctctgctggttctagcttcctcttcccatttctgactcctggctttagctctctggaattctctctctcagctttgtctctctctcttcccttctgactcagtctctcacactcgtcctggctctgtctct

SEQ ID NO: 10159 - DNA, 563 bp, Homo sapiens
  MAP TO AC006166.1; EXPRESSED IN BRAIN, SIGNAL = 0.74; SWISSPROT HIT: P09116, EVALUE 9.20e+00
actaccccacattcctgctggttctgcctcaacaaaagctttcccccatcactccatccacagtgatctcacccggctgcgaatgcctagaatgcttgctctctgtaccaacattccatttgtttgacattcatcatggggatctgctgagtcttcatatgaggaaaagtacttgttaagctctaagatatcaaataaatgttagttaattatgttattagataagtaggtagatagataataaatagatgcacacacacatatagctacagatacagttacagttttgtatacttatatttatgtgctgatctcttaatttcccttaacttggttataaacctcttaagacccatattttatacacctttctgccttccactgctcttagttggaacacatttgacaatctactgatgttttaagtgtaggaactagcctctaccagctgaaaaatctgtgaaccatggccacttattttcaccactttcctgtgccctgggaggactagatgagctcatgggtacaaagtgccatgaatcagttagtttcctgtggccgaa

SEQ ID NO: 10160 - DNA, 548 bp, Homo sapiens
  MAP TO AC005854.2; EXPRESSED IN HEART, SIGNAL = 1.1; EXPRESSED IN FETAL LIVER, SIGNAL = 2.6; EXPRESSED IN BRAIN, SIGNAL = 1.3; EXPRESSED IN PLACENTA, SIGNAL = 1.2; NT HIT: gi15307862, EVALUE 0.00e+00; SWISSPROT HIT: P73274, EVALUE 5.30e-02; EST_HUMAN HIT: AA680367.1, EVALUE 0.00e+00; EST_HUMAN HIT: AA680367.1, EVALUE 0.00e+00
gatggtgatctcaggccatctcagtttattgaataaaaacttagaaaacacataactgtactcattagaagcccggaccgctcacttacccgggagttgaatacaaagtatttgggttcacacttgtcatcactatgagcttcatattctactccactgtcatgaagagagcccttggcctggttctcatccagccctgcaggattgcggtgggtgtaatccatcatgaagttcacatcagaactctcagagttgttgggtaacattaccacatgcattggaagcgtgttgttgaatgacagatttccaacactgtgatccaaaacaggtagagggcagggtatttggaatttcttgtaaatcacctagactcagtcattaaaaaagaaaaaaaaatcagctttttgagaaaaaacaatgaaataagaatccatatgtgtggcttatagggtggggggtgagggaactcagttagggattccttttagactaatggacaaagtaaacttcctctagcctctgttctaagggaagagttggagctgtga

SEQ ID NO: 10161 - DNA, 573 bp, Homo sapiens
  MAP TO AC026717.3; EXPRESSED IN FETAL LIVER, SIGNAL = 1.4; EXPRESSED IN PLACENTA, SIGNAL = 1.3; EXPRESSED IN HEART, SIGNAL =   2; EXPRESSED IN BRAIN, SIGNAL = 1.1; EXPRESSED IN LUNG, SIGNAL = 1.9; EST_HUMAN HIT: BI603923.1, EVALUE 0.00e+00; NT HIT: gi14725561, EVALUE 9.00e-43; SWISSPROT HIT: O75347, EVALUE 4.00e-09; EST_HUMAN HIT: BI603923.1, EVALUE 0.00e+00
tttttccccctctcaaactgatctaggtttgaatgtgaaagaattcaagatccttttaataagatcccaaattcttttgaaacattagatcttttaaaattttaatcagtcaactcatcctcaatgtctcaaaagatctttatgtatgaaaaccaaataatcaagacattgctggacaatactggtactatcataacttaaataaatttaactagctaaattttaataaactgaacaaacatgctagaaaacagtacttttactggaggcataattcaaaacacaatttaaactccattaattattttaaaatatagcggtataaagggcaagtgaataagaaatactgccaactagttctcagtgttaaatatttaaacttttggctttccatgtattggattgaaaaaaaaaatttaaacatgacacagaagtctttgcttactagtatccgttgaagatccaaatatgcggcttccaacctgcgctggcaatctgggatcatcatcctggattcttgtaggatctctgcctagaatgagaatctctgtgagacgttcaaagatggcagaa

SEQ ID NO: 10162 - DNA, 521 bp, Homo sapiens
  MAP TO AC007459.1; EXPRESSED IN PLACENTA, SIGNAL =   1; EXPRESSED IN HELA, SIGNAL = 0.83; EXPRESSED IN BRAIN, SIGNAL = 0.73; NT HIT: AF077011.1, EVALUE 1.30e-01; SWISSPROT HIT: Q05646, EVALUE 7.30e-01
ttaggattggttcagcctgggttaattgcctgtccttaaataagttattgtggaggagataaagtagcctccagcaaatcacattttaaagtcatgaaatttaaataataataataataataataataattattattattattattattccctaaaagatggaggatggcacagctttgccactggagtaattactgcaagctgaacagccaccctgaagaaatagaaaactcagagaaaaacaaagggtaagataatgactgttcctgaagcaaatgaacaggtgcacagattcggcgacaccagaccttcaggtcaactgtcagccagtgctgaggactgggatccccctgcaggtgggacagcgacagtccactttgccaaagttcccatacggcctgctttgctcatttatgtcacctgcctggcccccacaggcatctgagtttgagacctgtggcttagtgtgttgccaaatagcacagtcaatcattgggaagaccaactagagcgtccgtttc

SEQ ID NO: 10163 - DNA, 506 bp, Homo sapiens
  MAP TO AC005578.1; EXPRESSED IN PLACENTA, SIGNAL = 3.7; EXPRESSED IN HEART, SIGNAL = 1.7; EXPRESSED IN BRAIN, SIGNAL = 2.8; EXPRESSED IN FETAL LIVER, SIGNAL = 1.8; EXPRESSED IN LUNG, SIGNAL = 3.3; NT HIT: L08187.1, EVALUE 3.00e-70; EST_HUMAN HIT: AL545121.1, EVALUE 4.00e-70; SWISSPROT HIT: O88436, EVALUE 4.10e-01; EST_HUMAN HIT: AL545121.1, EVALUE 4.00e-70
tgcttaaacctcagcttccctatctggaaaatgggctagtagtcctcacctagatggattgcagtggggataaaagatgacagatgacttttgtccatgtacctatttattccgaaagcctttattaggcacctaccatgtacctggtgctggctggcaacgtggcaggagcccagcgcacgggagggctatgacaatctgggggtaaaccagaagctcactctttctgtcttcctccagggcccccagcagctctgacactgccccgggtgcaatgccgagcctctcggtacccgatcgccgtggattgctcctggaccctgccgcctgctccaaactccaccagccccgtgtccttcattgccacgtacaggtcggagagcctggaagggggcctcagggacactggacttcctggagagcccagaactctggccctgagagccctggggtcaggaaaactggagaccccgacatcctgaaccccaggcctatggaattctagg

SEQ ID NO: 10164 - DNA, 581 bp, Homo sapiens
  MAP TO AC013738.4; EXPRESSED IN HEART, SIGNAL = 2.4; EXPRESSED IN BRAIN, SIGNAL = 1.2; EXPRESSED IN LUNG, SIGNAL = 2.1; NT HIT: gi14751202, EVALUE 5.50e-01; EST_HUMAN HIT: BG990484.1, EVALUE 8.20e-01; SWISSPROT HIT: P18043, EVALUE 1.90e+00; EST_HUMAN HIT: BG990484.1, EVALUE 8.20e-01
caggtgggggttgtttaatgtcccacggtcagacaggagtgacagtcaggggctagacaatgggattcaggatggcttggataattttgtaaacaagtgccaaggctggtcttattcctcaccgactaggcaactgctagcttgctttcctctcctccagcagctggggtaagcagctttgagaatggccctagggccgtgacatctctggaaatgaccacgtgtgtaccttgctcttgtctggccacctgtcttcttaccactgcttgctctggctctttgtttccttactgtgtctactcagcatgactatgacctcttgtctcattttgatcttaggtatctgccatcccctaggcatcaaacataacccactccagactgctcaccttttgagaaatctggcttctccttacccatggcctcagctgctctccagcctaatctctgccctcctagccacagcttcactccacagatacctttctgttgatggccaccacctgatgctggtggatggctccatttgcccatctgaagggtaaatcccaaagtaagtgggaatcggaatgacctggaga

SEQ ID NO: 10165 - DNA, 556 bp, Homo sapiens
  MAP TO AC022517.1; EXPRESSED IN PLACENTA, SIGNAL = 1.5; EXPRESSED IN BRAIN, SIGNAL = 1.5; EXPRESSED IN FETAL LIVER, SIGNAL = 1.6; SWISSPROT HIT: P04922, EVALUE 9.20e-02; EST_HUMAN HIT: BG236071.1, EVALUE 0.00e+00; EST_HUMAN HIT: BG236071.1, EVALUE 0.00e+00
aatgagggagtcaatggcagattacagaagtacacacttttaattattaaaaagctctgctattgatcggctttttctcctagaagtaaataccattacaaagatttataaggggagtgtggggagtcacttgtttgaaggctgccaggaattcagatgaggggacccacgctgctgtctggaagggacgttcatctcaagcccatggcgtctgagaggctgaaggacggtccccaggccgggcggcacagggtgctgttcgctgcagtgggacaggggccttcactgtggcagcctctggagaaactggcgcccggccccagcaaccagctggcggtgttggggagcgcagccgtactgcctggaccccgcctgctaccatgcatggtgccagcagccgctctgaggctggtggtgagccacctttggctcaggttcaggaactttacagataaactgcagtgcgatacagatgctgacctgggagtccaggccactcactgcctgcccaccccttcgatgggcacccccctccaggaagcaccactttggagaa

SEQ ID NO: 10166 - DNA, 589 bp, Homo sapiens
  MAP TO AF196970.1; EXPRESSED IN BRAIN, SIGNAL = 0.91; EXPRESSED IN HELA, SIGNAL = 0.85; EXPRESSED IN PLACENTA, SIGNAL = 4.6; EXPRESSED IN HEART, SIGNAL = 1.7; SWISSPROT HIT: Q61345, EVALUE 5.00e-01; EST_HUMAN HIT: BG433676.1, EVALUE 4.00e-43; NT HIT: AF234171.2, EVALUE 2.20e+00; EST_HUMAN HIT: BG433676.1, EVALUE 4.00e-43
ctttcaattttgaggccctgaatttaatgttaaagtccttccatttgcactacctacctgtgtcacctcccacagtcctcagcctgtgccctcccattcctgccccttgatctccaggcgctgagccagaggattgtcgggaggaccctgggcaaagacgcctaccctgccatgctgcgccatctgccctccaggctgccagtcaagatgtggggcaggactttggagaaacaggtgaacaagatggcccctggggatctggggcaagggtgttggcactgaaactggtctagtaacctgtttcccttctctgcgggctcccatttcctgtcctcctctctccctttctctttcagagacaagcagagggcagcagaggcccatggaaaggcccggctctaagccatggagggccctgtgctcaggtgtgcagggctgggccggggctgagggctggctcctcccccagtttagccagggacaggtggagagatacaaaggtggctcacgcagggtgcccccaaagctgtcatgattaaggccatgtggagagaggctaggaaacacagcgctgaccttgagctttagg

SEQ ID NO: 10167 - DNA, 514 bp, Homo sapiens
  MAP TO AC007379.2; EXPRESSED IN PLACENTA, SIGNAL = 1.8; EXPRESSED IN BRAIN, SIGNAL = 1.4; EXPRESSED IN LUNG, SIGNAL = 1.1; EXPRESSED IN FETAL LIVER, SIGNAL = 1.9; SWISSPROT HIT: P10267, EVALUE 5.00e-25; EST_HUMAN HIT: AI685027.1, EVALUE 3.00e-49; EST_HUMAN HIT: AI685027.1, EVALUE 3.00e-49; NT HIT: gi16167590, EVALUE 3.10e-02
gaaggcctctccctccatacatattaccaccatttagtagaagtactaaaaagaatacttaatagatcaagcagattcatatttactttaatagctgtgctcatgggccttacagttgtcacagctactgctgctgttgctgctggtgttgcctcccagacttctattccacctgcgggctttctggcagaaaaatacttcttagctttggaattcccaaagccaaatacatcaaaaattggcaaattaagttaataatctccatcaaacagtaatttggatgggacatcagattatgagtttggagcacagaattcaaatgcaatgtgaatggaatatttctgattttttttattactcctggctcttataatgccaccgaacaccactgggacttgattatatgtcacctacaaggaaaagaagataatttaacattagatattgctaaactgaaaaaaaaaaaacccaaaaactatttgaggcatctcaggctcatctcagcctgttgcct

SEQ ID NO: 10168 - DNA, 558 bp, Homo sapiens
  MAP TO AC026736.3; EXPRESSED IN PLACENTA, SIGNAL = 2.4; EXPRESSED IN HEART, SIGNAL = 2.6; EXPRESSED IN BRAIN, SIGNAL = 1.5; EXPRESSED IN FETAL LIVER, SIGNAL = 2.1; SWISSPROT HIT: P45434, EVALUE 6.90e+00; EST_HUMAN HIT: BG195436.1, EVALUE 3.00e-03
aacattttccaaggtgtggctacagtaacctggccctttgtggaaattctctcagttggggtttgcctaacgttttctcatggttagattgaggttctgcatttttgacaagaataatgccaaagtgagacaccacgtgaccctctccatcgcaaggagactcaagggtgtgtgtgtgtgtgtgtgtgtgtgtgtgttgggaaaaggtgttcttgttaggagaggaagccacacctgtcctactatctcagcaggtggggaggaggagagaaatgggatctggggcatggaaatgggctgcagctccaggaccttcttgaatcccaccatgtaggggaacactgccctggaggtagggatcttgaaattctgccttttcaagagcagcatctaaaataccattgtcttaatagaaacttctgtttccaggtctcttctgagccccctgatttttttcccctgagtctttccttattgaagcctttcaattccttctctaatgagtctcaagattttctgggttttgtttttttaacccccaattcccattacctccct

SEQ ID NO: 10169 - DNA, 575 bp, Homo sapiens
  MAP TO AC016604.4; EXPRESSED IN BRAIN, SIGNAL = 0.88; EXPRESSED IN PLACENTA, SIGNAL = 1.2; EXPRESSED IN HEART, SIGNAL = 1.2; EST_HUMAN HIT: BF739813.1, EVALUE 3.20e+00; SWISSPROT HIT: Q28268, EVALUE 1.90e+00; NT HIT: AF111167.2, EVALUE 1.40e-01
aaatatgcttgcaaatgggcttttctgagatacaatgatagaaatatatctcttagatggttctcttccttctcagaaacatttttagataaatcaaaatttcacagtcacagaggattttttaaattaattggactttttttccagttataaaagtaaaacctagagaaattttcttgctgacctagaatagtcacctgccatgttgtgagtctgtctgtgaaaaggccacgtatcaaggaactgcaggtggcctctaaaagcttagaatgctcccagacaacagcctgcaagaaaacaggaatctttgtcctacacctacaaagactcaactttgtcaacaaccacatgagcctgaaagaagagcccaatctccagaaaagatcacagctcagcagacaccttgattgtagaacacctagctaacctctgcccagactcctgacccatggagataataaatgtattttgtttcaagctgctaaggaaaaaagtagtgttagtttatgaaaacagtacagaaaagcataggtacaaaaattatccttaccacatcccacactgttaggtgacca

SEQ ID NO: 10170 - DNA, 516 bp, Homo sapiens
  MAP TO AC006165.1; EXPRESSED IN BRAIN, SIGNAL = 4.4; EXPRESSED IN LUNG, SIGNAL = 4.6; EST_HUMAN HIT: AA380748.1, EVALUE 5.00e-82; NT HIT: gi14782069, EVALUE 3.00e-82; SWISSPROT HIT: O75955, EVALUE 2.00e-22
aaaagatgcacggattggagaagcagaggccaagagagatgctgggatccgggtgagagagatgggggttgcttagtgggaaaggggatagaagtggcacaactgagaagaagcaggggtgctgggtgagcagggaaaatacatgaggcagaaagagaaccttggtgggaagcaggctgtcaccgtggcctttctccccctgccctgacatttcctacctgatctctgcttggacaggaagctaaagccaagcaggaaaaggtgtctgctcagtacctgagtgagatcgagatggccaaggcacagagagattacgaactgaagaaggccgcctatgacatcgaggtcaacacccgccgagcacaggctgacctggcctatcagcttcaggtcagagccactgccaggccactctctgccccttccccattcctctcaggctgtccatctcaggacaccactacactatttctcatactttaactttggtcttattctggctctccatctctggac

SEQ ID NO: 10171 - DNA, 505 bp, Homo sapiens
  MAP TO AC005853.1; EXPRESSED IN BRAIN, SIGNAL = 0.41; EXPRESSED IN PLACENTA, SIGNAL = 0.4; SWISSPROT HIT: P48044, EVALUE 6.20e-02
tcacttgttcctggggtttctataaagaatccacagcagtagaaatttgacccttctttacagatagagaagctctacaacctttgctcagttttaggaacatgtctgtaagatgtgtccatatatatgtgtgtatgtgtttaagtgaatatgacatcaatgctccaaacaacatcaaactccaatatttctgagaaattccaggtcccaaagaacctctcaggtaaaagtccagtcaggaccaaccaaaagagacccctcaactgctacctgctgtgatgctaatggctctcttctcccccagccttcatctgctgttggagtccatacttcctgtttgacattttggacaatttcaacctccttccagacacccaggagcgtttctatgcctctgtgatcattcagaacctgccagcattgaatagtgccatcaaccccctcatctactgtgtcttcagcagctccatctctttcccctgcaggtaaggggagctcttgcatg

SEQ ID NO: 10172 - DNA, 597 bp, Homo sapiens
  MAP TO AC004237.1; EXPRESSED IN FETAL LIVER, SIGNAL = 3.3; EXPRESSED IN BRAIN, SIGNAL = 1.4; EXPRESSED IN PLACENTA, SIGNAL = 2.7; NT HIT: gi14781205, EVALUE 0.00e+00; EST_HUMAN HIT: BI561517.1, EVALUE 0.00e+00; SWISSPROT HIT: Q9Y496, EVALUE 3.00e-49
aatgtgtgcaaggcactgagttggaaaagtagccttttaaagtttataaatttaatctgatgagggtaaaaattaatgttcttttcattatttgtaaatattatctccaacagatcaataaatcagagaagccagaaagctgcgataatgtgaaggttgttgttaggtgccggcccctcaatgagagagagaaatcaatgtgctacaaacaggctgtcagtgtggatgagatgaggggaactatcactgtacataagactgattcttccaatgaacctccaaagacatttacttttgatactgtttttggaccagagagtaaacaacttgatgtttataacttaactgcaagacctattattgattctgtacttgaaggctacaatggtaagtgaatctttactttttaaaaaactcccttattgagacataattactgtgccataaattcacatattgcagctgtgcagtttgatgagtgtagtaaatatatacagttgtgaaaccatcatcacaatccagctttagaacacccttgtcatcctcaaaatttcctttatgcccatttgcagacccacccccaagcaactattgatc

SEQ ID NO: 10173 - DNA, 516 bp, Homo sapiens
  MAP TO AC012644.1; EXPRESSED IN BRAIN, SIGNAL = 0.41; NT HIT: AF060996.1, EVALUE 1.20e-01; EST_HUMAN HIT: AL523673.1, EVALUE 2.00e-93; SWISSPROT HIT: P05623, EVALUE 2.10e+00
tggagtaagggtgatttccgacgtactccttttccctccccaggaaaggctaaccggtggtttggggttgctccccctaaatctggaaaaatgaacatgaacatccttcaccaggaagagctcatcgctcagaagaaacgggaaattgaagccaaaatggaacagaaagccaagcagaatcaggtggccagccctcagcccccacatcctggcgagtaagtgcctgctggggcctggatggggcctggatgtgagtctttgagggtcaccagcacagggtttggcttgtgagggcagtcagcatgtgcttgccccagccatagcctgatgatccaaggaatgacccagatgcccttgggaggctcactgtggcaagagagaaatgaggggtatgtggaagcccagaggacagcctgccaactcatccactcagcagttatttactgccagccagctgtggtgcagagggaaggggtataacagagtaaaaatctctgccttgagttcaggtgtgct

SEQ ID NO: 10174 - DNA, 576 bp, Homo sapiens
  MAP TO AF196972.1; EXPRESSED IN PLACENTA, SIGNAL = 1.6; EXPRESSED IN HEART, SIGNAL = 1.5; EXPRESSED IN BRAIN, SIGNAL = 1.7; EXPRESSED IN FETAL LIVER, SIGNAL = 2.3; SWISSPROT HIT: Q9UET6, EVALUE 7.00e-41; EST_HUMAN HIT: AI393192.1, EVALUE 0.00e+00; NT HIT: gi14759602, EVALUE 1.00e-107
tcagttgtctccccctgttcctaagacccagatttcaaccagctggatggtcccacccgcatcattgtgccttttgtgacctgtggggacctgagctcctatgattcggaccgcagttacccactggacgtgagtgcccaaccaacagtaggtgggtgggagggaggctgtcctaggttaccaggtcctcaccatctccctacccctctgtccctgcagctagagggcggctcagagtacaagtacactccacccacacagccccccatctcgccaccataccaggaggcctgcacgttgaagaggaaggggcagctggccaaggagatccgcccccaggactgccccatcagcagagtggacacgtttccccagcccctggccgcccctcagtgccacaccctgctggcccctgaggtctggaaatgtgactctcagcctgccttgaccccttccccgtgtgcctttttctgacccaaatctcatggtttctggggccaaaattccctttcctgcctcccaatagctataaaaaattggtaaagccaagcataatgaatggaaaagtttcgccaa

SEQ ID NO: 10175 - DNA, 567 bp, Homo sapiens
  MAP TO AL118556.2; EXPRESSED IN LUNG, SIGNAL = 1.1; EXPRESSED IN FETAL LIVER, SIGNAL = 1.1; EXPRESSED IN BRAIN, SIGNAL = 1.2; EXPRESSED IN PLACENTA, SIGNAL = 1.1; EST_HUMAN HIT: AA028975.1, EVALUE 7.00e-97; NT HIT: gi14746897, EVALUE 5.00e-97
agctctttgcttgaggcttgagaagttgataaaattttaagaactgcttagaaagtgtatttacttagcaagtccaaagattcactggtaagaactaagacttttcactgtcaggaatcattaaaaatttcctttgtttaaataatttgtatcaaactacctctggcaaatagagatcataaatatacgtacacggttctatgggcttacttgggaaactatgttttgaatatttaaaagagcccacactggtgttttgcttcttttataggtggtgttttgcttcttttataggcaaaaatatcaatattctaacataaggtaaaaaatacttacctgcaccaatttctgtaaaccatgaagatgcagagttcaaattgattgtctcaaactgaactacctgattcgattcagtgcctttgctaatagctacacagaccatagggtattcctgttcaggtatcaccagcatttcaaaaacattcaaaggacttggcaaaggaaaatcaaagtgctgcaaaaaaaataaacaatagagccataattcagaaacaatctccccattca

SEQ ID NO: 10176 - DNA, 543 bp, Homo sapiens
  MAP TO AC000080.2; EXPRESSED IN BRAIN, SIGNAL = 0.76; SWISSPROT HIT: P10267, EVALUE 3.00e-03; EST_HUMAN HIT: AU140604.1, EVALUE 1.00e-111; NT HIT: L41825.1, EVALUE 0.00e+00
gggaagagggtatgcttgtgttttaccaggagatcgtcaatcccgtctgggtgcccactaggagacttaaacttcgtgtgaatactgacaataaaaaccacgaggaagagacgttcgcgtcagagactgccctcatacctgatgagatctgtaccgactcctcagaaactggcatgccaaatcaaaatgggtctggttcaatcctccctaatggcaatgtaaacccctctaactaatcccacttctcctaattatctttttctccttacgaacctaaaaatctcaccatttctattagcctgaaaataacatccctctgttcttctcttcctccttcagcactggatctcacttacaataggttttatttaataattatcttccttacactttctgtctcaccagtttccccttaaactgatttacctgctacacaaaattattcttattgggcttatgtgccttttcctccacttattcgacctctcacctggatggatgctcctgcagaaatctatactaacgatagtgtgtggatgcctg

SEQ ID NO: 10177 - DNA, 554 bp, Homo sapiens
  MAP TO AC016951.9; EXPRESSED IN HELA, SIGNAL = 1.5; EXPRESSED IN BRAIN, SIGNAL =   1; NT HIT: AL163285.2, EVALUE 3.40e-02; SWISSPROT HIT: Q9KNH5, EVALUE 6.90e+00
ttcacgggaggcagttaatctaatgtatgtaatgcaatgatgataactggcaatcagcaaagcacttgcatccctcttggctggtaccttagtgcctgtgggtcaaatttgcatctcagcaaaatgacacggaacttcactctacagcattcaaatctcagtgttaaatctggtaatggccagagacaactgagctgtgttttctttatgtttcaccaagcactttgggcccatctgcccttcctttagaaaaatgatgcaaagctttgtctaccagcagaagaaaacacatatctactttatttagtggactcttacctagccagccatggtgcaactaagagagcactggagttgaagtcaaaagataaaggttccaatctaagctgtgttgataatggcaatgtggcactgggtaacccacacaacctctctgagccccagatttcttatcagtagcatggatgcaatatacctgtttcccacgttaatttgaagatcgaatgaggtactttttgtgaagtgtttaacactgcacctggcccataataatc

SEQ ID NO: 10178 - DNA, 557 bp, Homo sapiens
  MAP TO AL117259.3; EXPRESSED IN BRAIN, SIGNAL = 4.8; EXPRESSED IN PLACENTA, SIGNAL = 5.7; EXPRESSED IN HEART, SIGNAL = 4.1; EXPRESSED IN LUNG, SIGNAL =  28; EXPRESSED IN FETAL LIVER, SIGNAL = 4.5e+02; NT HIT: K02212.1, EVALUE 0.00e+00; SWISSPROT HIT: P01009, EVALUE 5.00e-49; EST_HUMAN HIT: AI064974.1, EVALUE 0.00e+00
ttccaaaccttcactcacccctggtgatgcccaccttcccctctctccaggcaaatgggagagaccctttgaagtcaaggacaccgaggaagaggacttccacgtggaccaggcgaccaccgtgaaggtgcctatgatgaagcgtttaggcatgtttaacatccagcactgtaagaagctgtccagctgggtgctgctgatgaaatacctgggcaatgccaccgccatcttcttcctgcctgatgaggggaaactacagcacctggaaaatgaactcacccacgatatcatcaccaagttcctggaaaatgaagacagaaggtgattccccaacctgagggtgaccaagaagctgcccacacctcttagccatgttgggactgaggcccatcaggactggccagagggctgaggagggtgaaccccacatccctgggtcactgctactctgtataaacttggcttccagaatgaggccaccactgagttcaggcagcgccatccatgctccatgaggaggacagtacccaggggtgaggaggtaaaggtctcgtccc

SEQ ID NO: 10179 - DNA, 586 bp, Homo sapiens
  MAP TO AF196969.1; EXPRESSED IN FETAL LIVER, SIGNAL = 4.5; EXPRESSED IN BRAIN, SIGNAL = 0.79; SWISSPROT HIT: Q9ZHA5, EVALUE 3.80e-01; NT HIT: gi5729809, EVALUE 0.00e+00; EST_HUMAN HIT: BF038094.1, EVALUE 0.00e+00
gagaattggcgaaagtgtccccttcctcactggggcttctccttcccctcctgccacccacaggccagatctatggggatgtgctctacttcctgacagagcaccgcgacggattccagcacggagagctgggccaccctctctacttctggttttactttgtcttcatgaatgccctgtggctggtgctgcctggagtccttgtgcttgatgctgtgaagcacctcactcatgcccagagcacgctggatgccaaggccacaaaagccaagagcaagaagaactgaggagtggtggaccaggctcgaacactggccgaggaggagctctctgcctgccagaagagtctagtcctgctcccacagtttggagggacaaagctaattgatctgtcacactcaggctcatgggcaggcacaagaaggggaataaaggggctgtgtgaaggcactgctgggagccattagaacacagatacaagagaagccaggaggtctatgatggtgacgatttttaaaatcaggaaataaaagatcttgactctaacactgagagatccttaattactaaccccagagatgcgcta

SEQ ID NO: 10180 - DNA, 572 bp, Homo sapiens
  MAP TO AL023495.1; EXPRESSED IN LUNG, SIGNAL = 4.6; EXPRESSED IN BRAIN, SIGNAL = 5.8; EXPRESSED IN FETAL LIVER, SIGNAL = 7.1; EXPRESSED IN PLACENTA, SIGNAL = 7.8; EST_HUMAN HIT: BE420422.1, EVALUE 1.00e-114; NT HIT: AL163282.2, EVALUE 2.00e-83; SWISSPROT HIT: Q04018, EVALUE 2.20e-01
ctcatagctgctttcaggggctggcattgagtgcttgtggcttttccaggtgcatggtgcaagctgtcagtggatctaccattctggggtctggaggatggtggccttcttctcacagctccactgggtggtactccagtagggactgtgcttgggggttccaaccccacatttcccttctgtgctgccctagcagaggttctccatgaggaacctgctcctgcagcaagcttctgcctggtcatccaggtgtttccatacatcttctgaactctatgaaaaggttaccaaaccccagttcttgacttgtgtgtactcacaggctcaacaccacatggaagctgccatggtttggggcttgcaccctctgaagccacagccagagctctatgttggacccttcagccatagctggagcagcttagatgcaggacaccaagtccctaggctgcacacagcatggggaccctgggtccaacctgtgaaaccattttttcctcctaggcctctgggcctgtgttgggaggggctgccatgaaggtctctgacatggcctggagacatttcaccat

SEQ ID NO: 10181 - DNA, 513 bp, Homo sapiens
  MAP TO AL118557.2; EXPRESSED IN PLACENTA, SIGNAL = 1.5; EXPRESSED IN HEART, SIGNAL = 1.3; EXPRESSED IN FETAL LIVER, SIGNAL = 1.7; EXPRESSED IN LUNG, SIGNAL =   2; EXPRESSED IN BRAIN, SIGNAL = 2.1; EST_HUMAN HIT: AI267368.1, EVALUE 2.00e-78; SWISSPROT HIT: Q12185, EVALUE 1.20e+00; NT HIT: gi14783456, EVALUE 8.00e-06
gcctctgggttaaggtctccacaactgagctggtcttggtaagcagcgcccaacatggaggctcgaacccaggttgaagggtcaccagagtgatggctggaaaacctggaactaagctggaggacaccggagtactcttaagcaatgcccgtgttgagtaaaaagggtagctcagaagcatcagggtaacaatgagacaagtgtgggctctggttcattccaccttggaaccttttcacactaatgatgaggaggaaggaaagtataacaaagtaacagaccaggtttgtttgccagctaaagctaaagcagcaaaggaggaagaggttcatccctacccttctgcaccccctccttattttgaagaaaaagagtggcctgaccctccagatctttcttttctggaggaccctgggagaaaagtagttgccccagtgactgttcaagcagctccttgagtgaccgctgtcagttctattctggcaggaattcagcaagctagacgagagggtg

SEQ ID NO: 10182 - DNA, 507 bp, Homo sapiens
  MAP TO AC009318.11; EXPRESSED IN HEART, SIGNAL = 1.8; EXPRESSED IN LUNG, SIGNAL = 0.61; EXPRESSED IN FETAL LIVER, SIGNAL = 0.69; EXPRESSED IN BRAIN, SIGNAL =   1; EXPRESSED IN HELA, SIGNAL = 1.1; EST_HUMAN HIT: AI352433.1, EVALUE 2.00e-87; NT HIT: AF183410.1, EVALUE 1.00e-87; SWISSPROT HIT: Q04651, EVALUE 5.40e-01
acacccaggatctttccaactcaccattatataatctaccttacatcattgaatacaatgaaattagttatgtttactggttagtcaatataattttggagttttgtaattaaagcaaaagctatttaaacaccgaaacatgaaaatctgtatacttcttgcccctttgagaagaagcaacttaagtataagcaacactttcagaaattagacaaaaaggaaatggttgttaacctgttgttgaaaagattcctccaacaataccacagagtcttacaaaaaactgccagaatggcatgtgctcctcagtaactgtcaccataagagaactgagatcatatttcataaatatcccagagactccatggctgcctgcagcatggttaatgatacgttcctaaaagggaggcaaaaggaaggggagaaataggaggaagagagaaacagaattcatgtcatctggttacttacatacattcaatattaagccctgaagccctactgtaa

SEQ ID NO: 10183 - DNA, 594 bp, Homo sapiens
  MAP TO AL031707.17; EXPRESSED IN PLACENTA, SIGNAL = 2.3; EXPRESSED IN BRAIN, SIGNAL = 1.8; SWISSPROT HIT: O00358, EVALUE 1.10e+00; EST_HUMAN HIT: BF102728.1, EVALUE 3.30e+00; NT HIT: U53925.1, EVALUE 8.90e+00
agtggccaggtatcaagtggcaaactcaggccagggttgggtgccggcttggagggcccctgtggcagctgagccccgctcctcctggtcctgcccaccctcctggtgctgcccaccctcctggcctgcacaccctcctggcctgcacaccctcctggcctgcacaccctcctggcctacccaggctgccactggcccgagggtcccagtgaggatgagccggagatggacactgagggggttgatgggcctggggcaggctggccggggcaggggggctgggcctgtccagcggccgcctgccctcagaagaatgacaccctgctttctcccctgcccgaggaggtggggtgagggtcagaccccagcacccatgtctctgtttttctttctcctgaaaagcctacagaccctcatctgaattgctccagcagagcccaggcggggtaccacccccacccacacacacaaagggctgagacagtgcagcctggcgtgtgagcagccctggtgtctccaggctggggtgctgtccgcctgcccacctggccacggtccccaacagccggttcagcaaaggacaggcagacccta

SEQ ID NO: 10184 - DNA, 554 bp, Homo sapiens
  MAP TO AC007292.1; EXPRESSED IN PLACENTA, SIGNAL = 1.4; EXPRESSED IN FETAL LIVER, SIGNAL = 1.5; EXPRESSED IN BRAIN, SIGNAL = 1.6; SWISSPROT HIT: P46737, EVALUE 1.00e-03; NT HIT: gi14763270, EVALUE 0.00e+00; EST_HUMAN HIT: AW249465.1, EVALUE 6.00e-91
gctcactagagccgttcaggcccctgtgcccgctgagctgcgcctctgtccccagatctaccagagcctgttcctgcggggcctgtccctggtgggctggtaccacagccacccacacagcccggcgctgccatctctgcaggacatcgacgcacagatggactaccagctgcggctgcagggctccagcaatggcttccagccctgcctcgccctgctctgctgtacgcgggatggggctgtggggggagcaaggaggggggatgctgggccagccgagcctcccagggccaacccctctccctctctcccgccagccccttactattctggcaacccaggccccgagtccaagatctcacctttctgggtgatgcctcctcccgaggtaggtggggctgttgggagagcctggggggcccgggagcactggggcatttgggtcacgactaggcaggggcccctggttccaggctccactggagagttggggccccagtttctccatctatgaaatggggacgtgactgctgccctgcccatattttggtgag

SEQ ID NO: 10185 - DNA, 589 bp, Homo sapiens
  MAP TO AC005569.1; EXPRESSED IN PLACENTA, SIGNAL = 0.63; EXPRESSED IN FETAL LIVER, SIGNAL = 0.47; EXPRESSED IN BRAIN, SIGNAL = 0.4; EXPRESSED IN HELA, SIGNAL = 0.5; SWISSPROT HIT: Q01397, EVALUE 5.80e-02
tcctaaggaccacctgaacgtctccaccacatacattatacgtaagttttaaaaacctaaggctagaaaacctaaagagtagaagaaatttccctcaaccacgcagccaagccacagtggaggacctggaattagaagccaagtctgaagaactccaaaggcccatgacctcacccgcaactgcgttattcacagaacccatcactggcctctctaggagtcatggtctccctcacctacaacagaggcaaaaacaaatcttccgatccaagttggcaagaatctaacagaagaatgtacgaagagcctgaacttcctggaggagttgccttgcagccaccctttgtgcctggccttcaaggaagagttagtgagatggagaagagatgcacagagaccaccaggtgaggtcatgacagatgtgaaagtgcagtgctctgggatgctggcatgccccaaaactggcaggtagttccctgtggctgaaacctaaagaaaacgaaccatgcttggcaaaccacaaggctgaacgggcaggttgggaagagattctgaagggtgtcgagcacctggcttgaaatgtgggact

SEQ ID NO: 10186 - DNA, 514 bp, Homo sapiens
  MAP TO AC009509.7; EXPRESSED IN BRAIN, SIGNAL =   1; EXPRESSED IN LUNG, SIGNAL = 1.7; EXPRESSED IN HELA, SIGNAL = 0.58; NT HIT: AB033056.1, EVALUE 9.00e-83; SWISSPROT HIT: Q9Y884, EVALUE 1.60e+00; EST_HUMAN HIT: BF834095.1, EVALUE 1.00e-82
gagcccttggccttagtttcaaatgctgtttcctaggtcctatgttgtttttcaagggctgccaggagaagctgactctgatttttgaggatcagaaaaaattttatattcgttataattgggattcttatcttcttgtaaaagtgaaatataaatcaaaagctgctgttgtcttctctttgttttatcttttcctaggcaaagatggagaatatgaagagctgctcaattccagttccatctcctctttgctggatgcacagggtttcagtgatctggagaaaagtccatcacccactccagtaatgggatctcccagttgtgacccatttaacacaagtgttcccgaagaggtattaatagactttcagtatttcctttatgttgaagagactgtgttactgaaaagttaaaacactgctcataacatgaaaaacatgggttcctttctcagttccatcaccaactcaagtgaggttatataaataaattgactttggccacttctgatggt

SEQ ID NO: 10187 - DNA, 599 bp, Homo sapiens
  MAP TO AC007559.3; EXPRESSED IN BRAIN, SIGNAL = 0.6; SWISSPROT HIT: O15230, EVALUE 1.50e+00; EST_HUMAN HIT: BG980652.1, EVALUE 8.40e-01; NT HIT: X96983.1, EVALUE 1.40e-01
aggagacacccatcaccaaggacagggaaaaggttttgcaaatgaaaacacatttccgtaatttggcaaacttgcctagggctactcctgaaaagcaggtttcatcccacaaattcagtagagtcagaccctcttgagagaacaccggacttccaataccaaattttcacttgcatgatgggcatttggatgctaaatctcagcccctcacacctgctgccacccctccatgaacgaccaccaccccaagggcccctacacacggttttctttcagggttccttttcgtagtattttcattatctggtaccactcacctgccagaacgggctctacttacctgcccaaagtcacccagtcactgtgcattgtcatttccaagctggtgcttgcctcacctgatggtgtctggtctctgaatctcttcctctccaggggccactttatggctggttctgaagggccctgggacgcatcgggtgggcagctgtgaagtgctttctatagagtggatggggcctgggatcaacccattgtgtagaggacacatgtcagttttgcttgcctctccatcatttgccctttatctgggatgagca

SEQ ID NO: 10188 - DNA, 508 bp, Homo sapiens
  MAP TO AF198097.1; EXPRESSED IN BRAIN, SIGNAL = 0.41; NT HIT: gi8922761, EVALUE 1.20e-01; EST_HUMAN HIT: BG565635.1, EVALUE 1.80e-01; SWISSPROT HIT: P21881, EVALUE 5.40e-01
atgtggtgggaaggagaatgactctcagccatgtcctttctcccatctcagtcttacatggatcctgcaggagagggagacttctcttagctttctcttgcacatggtgcagcccctcatactcagggataggcacagcctagagaaggaaggggggtcttttgacctggttctgtcttagcggcacctagaggaggagagagaaccttctcaggactcctgtacatggggcatgatgaaaagggagtcttctagctaattctcacaaacccagtttgtgaggaaaattgtgtctatatcataaccatatgcaaagatgtaatatgcacacacattttgggttcagaaagtagaatccactcactgtgccatgcctttccatatgcacacttgtttgctcaagagggtgtgtgaagatctgtcttcttagacactcatgtagatatgagtcagattgtgagttttctctgttatctccccagacccaggatttgcagccgattcattt

SEQ ID NO: 10189 - DNA, 551 bp, Homo sapiens
  MAP TO AF235093.1; EXPRESSED IN FETAL LIVER, SIGNAL = 1.8; EXPRESSED IN LUNG, SIGNAL = 2.7; EXPRESSED IN BRAIN, SIGNAL = 1.5; EXPRESSED IN PLACENTA, SIGNAL = 2.5; EXPRESSED IN HEART, SIGNAL = 1.6; SWISSPROT HIT: P35413, EVALUE 1.40e+00; EST_HUMAN HIT: BF514726.1, EVALUE 7.70e-01; NT HIT: AL163210.2, EVALUE 0.00e+00
gcttttgccttcaccttctggatagaacttcaagtcctgttcaaatggtgacaaagttacgtctgagaatagtctaatcgttacttcattagttctcagtacgttcttttgtgttccctgccacgtagtccttggtgtcaccatatcctactggtgctaccacatcccaccagattgtgatggaatgttgctgtgcccaccaggcttcattgccccactgggcattaccactaacatcctgggaactcatggggcaaattatgcaggccatttaatggcacagtggaaaagcctgcctttgccctctttgtgttatagcatgttagaagaatgctaaaagaatacttttatacccaatgttacaaaaaggaaatagtaaaacagtccagagtaaacacattgaataaaatgaagccacttaaactgatacttacaaggactatgttttatataatattaacaaggcaaaccatgtgtatcatcaggctttgtgaggttggaggtaactgctattgaagaaatgcttcaggccctggtcaacacaacgaaag

SEQ ID NO: 10190 - DNA, 520 bp, Homo sapiens
  MAP TO AC012310.4; EXPRESSED IN PLACENTA, SIGNAL = 1.1; EXPRESSED IN BRAIN, SIGNAL = 0.99; EXPRESSED IN FETAL LIVER, SIGNAL =   1; NT HIT: L00942.1, EVALUE 1.30e-01; EST_HUMAN HIT: AA421452.1, EVALUE 9.00e-90; SWISSPROT HIT: P29315, EVALUE 3.00e-04
caaagtcacattgctgtgggcagggatacagagaagaatggacacttatggctacttttaccacctacccacagacgcgtgatctgaggtcgtaaacactggactgtgagagattgcacttgaggcaatggggtgtgcctcaactagacgtctagctcacatcccatcctacctccaccctgaggctggggccgcatcttaccatgtgtctttttattgcaggttggaagaatgtgggttaacgagcacctgctgtaaggatctcgcgtctgttctcacctgcagtaagaccctgcagcagctcaacctgaccttgaacaccttggaccacacaggggtggttgtactctgtgaggccctgagacacccagagtgtgccctgcaggtgctcgggtgagctggggtctgttgtgctctatgggcagagtgctccgggctaagaagggattggctgggacctgcagtgtaatcacgttgcatttaaaatgcaaatgatgttccttgtctcagggttgttgca

SEQ ID NO: 10191 - DNA, 592 bp, Homo sapiens
  MAP TO AF260011.1; EXPRESSED IN HELA, SIGNAL = 1.1; EXPRESSED IN BRAIN, SIGNAL = 1.2; EXPRESSED IN FETAL LIVER, SIGNAL = 1.2; EXPRESSED IN PLACENTA, SIGNAL = 1.5; EST_HUMAN HIT: BF219939.1, EVALUE 0.00e+00; NT HIT: AL163248.2, EVALUE 0.00e+00; SWISSPROT HIT: P53072, EVALUE 1.20e-02
cccactccaccaggaagtccagctggcttcacctctcatgactgctatttcaagatttgtacacaatctgaaatgtccctttgtttggagctttaaaccagggttccaaaaatgtttctgcatattttttcatatcttttaaaaaagctttgcatgtgcctgagatgggtaacattcgtagaataacttgagtcttcttggttttgtactcatcctggagaatatgatgcaccagtttctcaggttctttcccaagtgtcctgatgaaggcgacgttatttgctccactttccactgactggaatcctcttaggctcatctctgtagatgcctcaatgtcaccaacttctttcttcaagacagcctccacatcatcatcttctccctcacttccagagggctgctgatccttgtctgtaaacttttctggcccatacatgtcatcgccatattcgttgagcagggtgtaagcctcctccacacacttggcgctggttcatgttgcaggtgatgaggatgcccatagcccgggctctggctgactgggcccgccagattcgcagtgccgagctcgcttgaccagcacatactg

SEQ ID NO: 10192 - DNA, 504 bp, Homo sapiens
  MAP TO AB023052.1; EXPRESSED IN BRAIN, SIGNAL = 0.56; EXPRESSED IN FETAL LIVER, SIGNAL = 2.4; EST_HUMAN HIT: BF872114.1, EVALUE 0.00e+00; NT HIT: gi14761357, EVALUE 2.00e-74; SWISSPROT HIT: P52441, EVALUE 2.70e+00
ttcctcatacacctgggaggagggagaagaggacacacgtctgagggtcccaggaacccccaagtctttgcccgtgtcccctgcgccatctcctctaccttctctagcctctcagcagctgtgtcatccccttgttccagctgtccctgaagccgccgctcctcttccagcagcttcaatcgcttggtgtcagctcgaagaacagcctggactgctggtgtctcatctgctaccacctctgggaggcagagggagaacagtcaggcagcctcaagagccaagagtctcatctttctttcccttcaattacatttctgttttgcctgaccctgcccagctctttgtacttgttccaaataaaacactctcaagttcctcattgaccctcccctcctttccttagcatccctttcccggtctccagtctccctccacatcccttccaactccatagccacaatttcttctattcttggctggctggcttttctacccaactgccca

SEQ ID NO: 10193 - DNA, 599 bp, Homo sapiens
  MAP TO AC000070.2; EXPRESSED IN BRAIN, SIGNAL = 0.49; EXPRESSED IN FETAL LIVER, SIGNAL = 0.41; EXPRESSED IN PLACENTA, SIGNAL = 0.56; SWISSPROT HIT: P37370, EVALUE 3.90e-01; EST_HUMAN HIT: AI733055.1, EVALUE 2.10e-01; NT HIT: AF111103.1, EVALUE 1.40e-01
ttggggtgaaaactctgctcatgaagaatgatttggtatgtgcacagatgatagcttttctaaatcctattttgtttttctgaaaaataagtgacagtaacctgaacacctttgagtttctccaatgctggcttagtctgaggctggggcctgcctgccatccctttccctctctcactgagtggctgctgcttgcccgtctctgacctttgagagtctcaggtctgatggtggtggagatggagcacaggtgactgattcgggggactcggagacacaccccttggaggagggacagggagggttggaggtagctggtttcatgtgggcagaacacaggacatagacatcctctgtcaacgttggtcttctctgtagtattttgtgcagggtcctggtcagtaaatctggccaagtgagtcatctgaaagcagtcatgtgatctgtgttgataagtggataaagcattggctttcatcactctctggatttgttagtgaactttaaaaaagaaacctttcttgtgcttttaaataatgactgtgttttttaatcttaccatttaaatctagttttcctgaagatgcctgtgtgccttt

SEQ ID NO: 10194 - DNA, 600 bp, Homo sapiens
  MAP TO AC012617.5; EXPRESSED IN BRAIN, SIGNAL = 0.84; EST_HUMAN HIT: AL048811.1, EVALUE 0.00e+00; NT HIT: X04912.1, EVALUE 0.00e+00; SWISSPROT HIT: P03181, EVALUE 3.50e-02
gaaagtgccttctagcaccgaatcttttggctgccacggatgtcagggagccaacgggactgggttttggctgggtgcaggggaggttgcgtcaggggtacctagccggcggcgggctgggggtggggtgtactttgtccaaacctctcggctcctctggcgggcctccctgaacgtggcgtggactcgcgcacaggccctgtctcgcaggttttcaggtgcgcttggcttttcctccgctttgtggggcaggtctccagtggccccccgggcgcacgcctggacatcactgtccgtctcgtcgtcgccccctacggcctcaaagacacacgctgcctgcatgtgctcttgggggacgacagtgccacatgtggacacactggctccagctcggactcgcctctgtctctctttgcccgtgtcgccggaagccgcctcgggttgccggagccctcgggccttggagatgaaggcaggcccctgctcctgccaggaaggagggaggcagtgggctcatgggtcggtgcctttgcagccgacagcacgccttgcggccctggggatcttcctgtgccccggcgagaccctttccgcctcact

SEQ ID NO: 10195 - DNA, 578 bp, Homo sapiens
  MAP TO AC020952.4; EXPRESSED IN BRAIN, SIGNAL = 1.4; EXPRESSED IN PLACENTA, SIGNAL = 1.7; EXPRESSED IN HEART, SIGNAL =   2; EXPRESSED IN LUNG, SIGNAL = 1.3; EXPRESSED IN FETAL LIVER, SIGNAL = 1.1; NT HIT: AF223391.1, EVALUE 1.00e-14; SWISSPROT HIT: Q9MLJ9, EVALUE 3.70e-01; EST_HUMAN HIT: AW295837.1, EVALUE 4.00e-15
atgaaaagaacatgcctgggcttacctgcagggcccagaaagagagcaccaaacactgacagcagagctacccagcagagccccacccgtaggtgccttgagccccagccagcccacagccacaggaatgacagaaatgtttattgttgtgtaccactgacatggtgtatttgcttgcagtgcaacaatagcaagtccacacataatctttctctgactcaacttcatgtcatccagtcccccagatggatgaccctgtacccaagacactgaattggcccaaatgaccaagatagatattatacccatgtccaagccaggacatctgtccttcattcctcagtggacagtagggaataaagaagagaaccacctgactaagtgttgtagaaaaaaaccaggttcctgtcacatgaccaggaaaaataagccatgcagacactttgaagggctggggataatggagtttattgggtgaaaaggaagaagactctcagcaaagcaagaggggttcatgttaacaggccccaatctcacagattgaatctcaggtcagctcccagaaacaggagagacca

SEQ ID NO: 10196 - DNA, 519 bp, Homo sapiens
  MAP TO AC016831.1; EXPRESSED IN PLACENTA, SIGNAL = 1.9; EXPRESSED IN BRAIN, SIGNAL = 1.6; SWISSPROT HIT: P39768, EVALUE 5.50e-01; EST_HUMAN HIT: AA922231.1, EVALUE 0.00e+00; NT HIT: X99826.1, EVALUE 4.90e-01
aaaggtgccaattcagatggctgagctacttcgcctgggtcccgacctgtatcaccacagggtcacagaaatggaaccttctccgtcacacctcctgatggcagtcagctgtgacccgctgaatccaggacatcatgcattccagtttcatttgcgagaacatttccaggtccggctgaagcctagtggctccagcagaggtctcaacccctttgggatgctcagtgggagacagaatcaagggccaatgatccatgacctagtcctagtgcccatgtcagtttgtcaaaggccctcagagcagattgtgttttccctggcgggggcttgacttctttgctttaaaaaggattcttaagtatttattgcagtaaaattaaccaccttcaaatttctgccagatcccctggaggtatatagcttattaacacaaaacaaatgtgacacttgaaaggcaggagacttggtttctattctctggcccactactgacttattgggtggcttcaggcaaataag

SEQ ID NO: 10197 - DNA, 501 bp, Homo sapiens
  MAP TO AL023654.2; EXPRESSED IN FETAL LIVER, SIGNAL = 1.8; EXPRESSED IN BRAIN, SIGNAL = 0.75; NT HIT: gi14779513, EVALUE 1.00e-129; SWISSPROT HIT: Q11186, EVALUE 1.00e-10; EST_HUMAN HIT: BI914652.1, EVALUE 1.00e-121
aagccactgaaatccagtttgtatcttacacatctcagttttgacgagccacatttcaagggcgtgatagccacatgtggctcccatagtagacagtactggtctagagaaatgttggtggcatccttgctgtctggtttctggccttgccaaaagtattaccatcccagtgtggtacattctttcatgtatttgtctcctgtccccagagcagactctgcaggtcctctcagatcttgtgcggaaggccaggagtcggaacattggcatcttccatccatccttcaacttaagcaagttcctccgacagggtctctgcaaatgcctcccggccaatgtccaccagctcatctccggcaaaataggcatctctcttaccagagtgtctgatggggaaaacgttctggtgtctgactttcggtccaaagacgaagtcgtggatgtaagcagtttgcttatctggacgttgtcaagttagaaaagctgttttgggatgggtgt

SEQ ID NO: 10198 - DNA, 527 bp, Homo sapiens
  MAP TO AL109769.4; EXPRESSED IN BRAIN, SIGNAL = 0.65; EXPRESSED IN HELA, SIGNAL = 0.48; SWISSPROT HIT: P51297, EVALUE 2.20e+00; EST_HUMAN HIT: AI219731.1, EVALUE 3.00e-03
tggctctgttctgaccaatgagatgtaaagagaagtcagcttggggcttctgagaaagactttgcttttctgataaaaagtaagaaagtggctggacctccaggtaccctcacccttcctgccttgagagcagacatgatagagctgaggtatccatgtgaaagagactaagagaaccaacagagacattagctctgtctttgtttggttgttaaaccaatgtcaacagtcacccacctctatacttctaattatttgaaaaaaaaataactaatctttgtttaagctactactggccaatttttctgattatctgcagtggaaagcagcccttgctggtacataccttcttttccttcatcacatttccaaattcaaattcagatatcaccaaacacctcaactatccttacactctgctgaactacaaaagcattatctgtaacttagctgtggccatcttcatgtttttgtgtgttattattatcaccatttttccaatggaaagcaaactccttgaggatgga

SEQ ID NO: 10199 - DNA, 588 bp, Homo sapiens
  MAP TO AC004179.1; EXPRESSED IN BRAIN, SIGNAL = 0.47; EST_HUMAN HIT: BI760949.1, EVALUE 0.00e+00; SWISSPROT HIT: P08565, EVALUE 3.00e-06; NT HIT: gi14783121, EVALUE 0.00e+00
cttcatcctacccatcccacccaaatcttactctactcatctcattctcattaattttgggaaatcatcagaagatgtgttcgttgagtaagagattaaaagaaataagctttttgacccctgccaacaccccatccccagggtggtcaccctccaatacaataagatgccaggaagagtaagttgccctttctgatgccgtaatctgccatcatcttcccatcttccagtctctttccattgcaagtcacaatctgggtctcagggattatacccgtcttagtctcgatcattgctttcacttgtgccactgagctggaccttcgcacctggaggaggtgcctctttgcctcatcacctgactccacaagaaacaagggcagctcctcatcactgggcttcaccactttcagggtaaggtggatggtcttctctttgtcagtgccataagatgagaggcttctccgtggctttaagatcttggagcccagcaaaagaacctggtcctgcacaggaaccttggtcttagaccggacatgttctttgatttttttcacgctgtcatatgggttggcatcaaaggtcatt

SEQ ID NO: 10200 - DNA, 596 bp, Homo sapiens
  MAP TO AC005580.1; EXPRESSED IN BRAIN, SIGNAL = 0.56; SWISSPROT HIT: P75445, EVALUE 6.80e-01; NT HIT: AF096709.1, EVALUE 3.60e-02; EST_HUMAN HIT: BE908810.1, EVALUE 5.40e-02
catcacaccccatcacagaggagagcgagcccttggcaaagtgtagaacactcactggagacatcacaccctgacacagaaagacagagagagagccctcggcaaggtgtagaaggctcactagaggcacgacaccccaacatagagggagagcacctttggcaaggtgcagaaggctcactggaggcatcccaccccaacacagagagtgagagccctcagcgaggtatacaaggcccactggagtcatcacatcccaaaacagacaaagctcttggcaaggtgtggaaggctcactggagtcatcacacccaaacacagagagaaagctctcagtgaggtgtagaaggctcactggacacagagagagagagagagagagccctcagcgaggtatacaaggcccactggagtcatcacatcccaaaacagacaaagctcttggcaaggtgtggaaggctcactggagtcatcacacccaaacacagagagaaagctctcagtgaggtgtagaaggctcactggacacagagagagagagagagagagccctcggcaaggtgtggaaggctcactggttcaagacatccaaggga

SEQ ID NO: 10201 - DNA, 517 bp, Homo sapiens
  MAP TO AL049590.10; EXPRESSED IN HEART, SIGNAL = 3.1; EXPRESSED IN BRAIN, SIGNAL = 2.1; EXPRESSED IN FETAL LIVER, SIGNAL = 2.6; EXPRESSED IN PLACENTA, SIGNAL = 5.3; EST_HUMAN HIT: AV741797.1, EVALUE 7.20e-01; SWISSPROT HIT: Q27677, EVALUE 8.20e+00
tctgggaaccaagaagcaagaaggaagaaatggtttagacactgaaatgttaaaatttaggagacatttccatggccttgtgagagctgcagatttgaacttggaaggcagcttaatggactagaaagaacatgagtgtcagggctggacgaggcatttaattctggctttgccatttaggcttttaccttgagcacattctgaggaagaacaaaaaaaggtgcctcttagtgacttacaggagcacagtttcatggcctataataatggaggtggcctgagatgatttcttgtttagataggaaaagaatgaggtttgtgctgagtgagcgcaacgacctacgtcaaagcaaactatttagaaccaatttggtggtatccagtactacttcagagatcacaaaccagttccattactgcttgatagaatcaaagatgttcagtggcatcagaaagggagtgtaagagattttatatctatgcattcacaaggacttctaaaagcctctgggccttt

SEQ ID NO: 10202 - DNA, 594 bp, Homo sapiens
  MAP TO AC004750.1; EXPRESSED IN BRAIN, SIGNAL = 0.62; NT HIT: AF260225.1, EVALUE 2.20e+00; EST_HUMAN HIT: AI655318.1, EVALUE 1.00e-05
gaagccatgaagccagagtctgaggggaaaggctctctgtctgcctgtggccaggcagtttttgaaccccttcattggtcctgctggtcataggagctgaaagaaaatggctgaatcagcaaatatttattgtgtgcttgctctgtgttgaatgctttggagaagaagaagaaggtgaagtcatagaggagcagggaattcccgccgacaggcagtgtttgcccagggccaagggagtgggagatacccagcaacagaggacggtacccactggggctaggaaggctttctagacggggaggagatgtgtgaagaagacaaagttagtcatggagactcccctctgccgccgaaatgtcttcttttggtaactggccccagttaggagactgtattagttttctgttgctgcgtaacaaatgaccacacaatgtggcagcataaaccagcatccatttatcatctcacagttccataggtcagaagtccaggcaggctctaccaggccccctgctcaggacctggaaaggctgaaatcaaggtgtgagggggccaggcactcatccagaagttccaggaaagaacccacttcca

SEQ ID NO: 10203 - DNA, 508 bp, Homo sapiens
  MAP TO AC013602.2; EXPRESSED IN HEART, SIGNAL = 9.4; EXPRESSED IN LUNG, SIGNAL = 7.5; EXPRESSED IN FETAL LIVER, SIGNAL = 6.8; EXPRESSED IN BRAIN, SIGNAL = 7.2; EXPRESSED IN PLACENTA, SIGNAL =   5; SWISSPROT HIT: P24507, EVALUE 1.00e-12; EST_HUMAN HIT: F08762.1, EVALUE 0.00e+00; NT HIT: gi14767838, EVALUE 0.00e+00
cagaaaggaggttgcagaggacgggtcagggctgtccaagaagggaggcagctgggcagctggttacaggtgcagctggtgccacatggcaatctgccggcgagggtttttgagcatctcctcccagtggctgcgctcagagcccgaggtgtgcaggcccaggctgcagtggccaagcgcacagctctgccctgaatcgtcctggcccagcacttccagctccacactggaggcctgcagcaggtcgtcaggcagctcaaacatgatcatctcgttccacacggggttgatcttgtgcttagctcgtttagtctgcttcttcttcagcttccgagcctggtgcttcaaggtcaccttgacagagacatctggggaggggcagaggggaaaaagagacagagagaagggacaagagtgagtttctgggatctggcagggcccaggacaaagctccctcctggtgctggaaagatgctcaagagttcggacatctgtgccccatataccc

SEQ ID NO: 10204 - DNA, 516 bp, Homo sapiens
  MAP TO AC007207.22; EXPRESSED IN PLACENTA, SIGNAL = 0.76; EXPRESSED IN HEART, SIGNAL =   1; EXPRESSED IN BRAIN, SIGNAL = 0.73; SWISSPROT HIT: Q92674, EVALUE 1.20e+00; NT HIT: V00180.1, EVALUE 4.90e-01; EST_HUMAN HIT: BG107468.1, EVALUE 4.60e-02
aacaggccagtgacatttccagggctcacatggaacaatatgcaggaggggggcaagattggcccagggcctgcaagcagtgatggacaggactgaaatgaaatggggcctcacgctggccacaccctccccaccagctttgcccagagtccacactgcaggctttgcccacagagtccatactgtaggctctgaacctccactgtggaaccacatggggagccacagggaccagtcccacggaaaagccaggacatgctccaaaagatggcccaaggaggtaaggacagagatggtgggttgagtcactggaagggagagaaggcaggaagatacagacacatgtaggagacctacagttcagtggatccgcatccacgtccactctgccagtattccagaatgaaggagagcaagcacagcaagcacagaccaggccaagcgttggtagacttggaaaaagctggagtttacaatgtggtatgcacgttttactgggagaaaatgtgtcaggga

SEQ ID NO: 10205 - DNA, 572 bp, Homo sapiens
  MAP TO AF228727.2; EXPRESSED IN HELA, SIGNAL = 1.3; EXPRESSED IN BRAIN, SIGNAL = 1.1; EXPRESSED IN PLACENTA, SIGNAL = 1.5; EXPRESSED IN FETAL LIVER, SIGNAL = 1.3; EST_HUMAN HIT: AV718936.1, EVALUE 0.00e+00; SWISSPROT HIT: Q00196, EVALUE 1.30e-01; NT HIT: gi7705782, EVALUE 1.00e-126
aatttgtggggttctttttggtttttcatttgtaatagaaatgttatatgttgcttaacaatgtttctggatactaaagttgcttaacagtcaaaatagaatacaagaacaaaaatgaagaagccaaaataaaaatatcaattttttattatttattcaggcgatttcacctaaacctcaaagtcagaaaaaaaatgaagctgacattagcagttctgccaacactcagaaacctgcactgttatcctcaactttgtcttcagggaaggctcgcagcaagaaatgcaaacatgaatctggagattcttctgggtgtataaaaccccctaaatcaccactttccccagaattaatacaagtcgaggatttgacgctggtatctcagctttcttcttcagtgataaataaaactagtgagcacagatttttaaaaaatagttatttatcctataagatacattaaaaacagtttgattgtagttatattgtatttttatgaagttgctttttaaaaactcaagtggatatgatagggaaggcttgaaactatttcaggggcaaaaaccatagac

SEQ ID NO: 10206 - DNA, 579 bp, Homo sapiens
  MAP TO AC004800.1; EXPRESSED IN BRAIN, SIGNAL = 0.54; EXPRESSED IN LUNG, SIGNAL = 0.42; EST_HUMAN HIT: AA553359.1, EVALUE 1.00e-85; SWISSPROT HIT: P34413, EVALUE 5.00e-05; NT HIT: gi14749514, EVALUE 8.60e+00
aaaattgccttttggaagggtttaattgattgacattgcaatagtctgctcaaagtctgtgagagtatgaatgcctatctgtaaatctgtcatacatacatatatcagaaatgacaataattatatatagtatacacaaatgtgtctgtatgtttgtataaaactagcatataaccaaatacctacacacctgatgtggtattgtatttgatccactgtaaaagttcttcctgaggcaaattattaaattctcctattatgctccattgattacggaggtttgcataaccttgtattgacatcactgttagaatgccaaagataacattatcaaaacgaactctgcgaaaaagccagccaaagagctgaaacgaaagaaaccatttatttctagttcttatatgaagagtactatagggtcaacaataaattctcaccttgttactcaaaccaacgtgaattaccctttgatatcagcacacatgtatacagaattatcatctccgattgtttctaaagcaacggatatattggcattacagggcccaggtgaaaatgggactttctctcccctgggaa

SEQ ID NO: 10207 - DNA, 581 bp, Homo sapiens
  MAP TO AC004462.3; EXPRESSED IN PLACENTA, SIGNAL = 1.3; EXPRESSED IN BRAIN, SIGNAL = 0.69; SWISSPROT HIT: P18856, EVALUE 2.90e-01; NT HIT: L77570.1, EVALUE 0.00e+00
ctgagaaaggggagcaacacccttcacagtcccatgaccccaaggatggctgtgcttcctccctgggctcagggaaaagttcctcctacagctactccttacaaccagacagctctggctaaaatagcccccacacggattttctgtccttttctttctttctccagacttttaaaaaaaaaatagttatcaaaagaggaaaaataagctatcagcagaatgactgtcttgctacatcctgaacacagctgggctccccactgctgggccttagtccatggcatcccctctccccaggtctcaagacacaccactctccaggaacccctccccaaactcccctaactgagtcggccttcttggcctagccctgttttcctaagcagcccttctctgttcttttcttcacaccctgagtagggtcagcacacttttccttcaagggccagatgataagtatttccaggtggccagcttcacaggccaccctctctctgccacagctgctcaaccctgctgccgtggagctaaagcagctgcagataatatgggaatgcgtgggcataggcatgtccaataaa

SEQ ID NO: 10208 - DNA, 514 bp, Homo sapiens
  MAP TO AC009567.8; EXPRESSED IN FETAL LIVER, SIGNAL = 1.2; EXPRESSED IN BRAIN, SIGNAL =   2; EXPRESSED IN PLACENTA, SIGNAL = 1.5; EST_HUMAN HIT: AW813783.1, EVALUE 0.00e+00; NT HIT: AL163227.2, EVALUE 1.00e-123; SWISSPROT HIT: P38870, EVALUE 4.80e+00
acctgtagaatggggtgctgttgaaaagatactcaaaaatgtggaagtgactttggaactaggtaacaggcaggttggaacagtttggaagtctctgaagaagaaagaaaaatgttggtaagtttggaacttcctagagacttgttgagtagctttgcccaaaatgctgataatgatatggacaatgaaatgcaggctgaggtggtctcagatggagatgaggaacgtgttgggaactggagcaaaggtgactcttgttacgttttaccaaagagactggcagcattttgcccctgccctagagatttgtggaactttgaacttgaaagagatgatttacagtatatggcagaagaaatttctgagcagcaaagcatctaagatgtgacttgggtgctgttaaaggcattcagttttataagggaatcaaagcatgaaagtttggaaaatttgcagcctgactgtgtggtagaaaagaaaaacccattttctgaggagaaattcaagctggctg

SEQ ID NO: 10209 - DNA, 544 bp, Homo sapiens
  MAP TO AC007570.23; EXPRESSED IN BRAIN, SIGNAL = 1.1; EXPRESSED IN PLACENTA, SIGNAL = 0.89; SWISSPROT HIT: P31696, EVALUE 1.70e+00; EST_HUMAN HIT: BE780480.1, EVALUE 6.00e-91; NT HIT: gi6226515, EVALUE 5.20e-01
aatgggctggtttttatcctcttttgttcttactcacaatttattaatatataatgaatacatattatttttataataagaaacaaaacaccacaagctggaagaaagaaagaaggaagaagaagatggtgggagagaggcaggaaagacagtgatttgcatctgggactcacccataatccacagattgggagaaccagccaaggacaggatgccagtgggtcaggttggacttcttctgagacacatacttccgacagtagcacagcgtctgggtgagcaaactcacgaacccatctgtctcctcctctaacactctggggctgagggagcccaagtgtaggaggttgcctacagagagagaaggctgagtgtgatgggcccagacaaacattttggtgcctcccggccctgctccctgcctgtggctcaggcggccacatcccatgtgcagcaagaaatttccacataaggggcacctgtcaatgccggaggctgctgtgtggtgcaaaggtaagaaacgggccaagctgacttcaaatcc

SEQ ID NO: 10210 - DNA, 505 bp, Homo sapiens
  MAP TO AL035609.7; EXPRESSED IN LUNG, SIGNAL = 2.9; EXPRESSED IN FETAL LIVER, SIGNAL =   2; EXPRESSED IN BRAIN, SIGNAL = 2.4; EXPRESSED IN PLACENTA, SIGNAL = 2.1; EXPRESSED IN HEART, SIGNAL = 1.7; NT HIT: AJ131526.1, EVALUE 4.80e-01; EST_HUMAN HIT: BG024833.1, EVALUE 7.10e-01
tccagggtagaatcaatgccttaatgaaaaggatagataccagatgtaattgaacactgggaattatcgtccaatcccagcttacctgacaatattcacgctctcctttagaccctttgaaatgggcctaactttgagttggattaatatacaaatgcagaggctgctggatctatcatggatatatagcatttttatcaaatttgcaagtagcaacactgaaaggagagcaaatgtgttggatgatagaatcagaatccaaagaaatctgataatggcaaacttgggcacacctaacatgcaaccagcatggttctccatccatgtaacttgggtccaaaggatctgagaagtgtctcctggagaagactttgaggtatgagggcaggcacacaaaagctgacttcaaatactggagggtagattaactaccttgtgaaagtatccaaaaaactgtctcaggactgttggataggagctaaagggaggcaatttgggacacagt

SEQ ID NO: 10211 - DNA, 567 bp, Homo sapiens
  MAP TO AC011387.4; EXPRESSED IN BRAIN, SIGNAL = 2.5; EXPRESSED IN HELA, SIGNAL = 1.7; EST_HUMAN HIT: AI261584.1, EVALUE 0.00e+00; SWISSPROT HIT: P44105, EVALUE 8.20e-01; NT HIT: U07563.1, EVALUE 0.00e+00
tgtttgaaagccttgttccctggtgccgtaaagaaatggcacttgaacataaatttaattttctcagcaaggccatttttctattttctgcagaaagggtacactcgccagcagcttagccacgagagtacactgaacaaacgagacagggtcatttataacctgacatgtccaccctactgccgtgtccagtttcaattggctggaacaggacctcacattttgtatttgtcccgattggctagcaacttagaactttttaaaagaggcaaaggcagaggagaacaaaggaagaaggaagtaacttgtggaatgctgagaaaggtaaaaacaccttcaaataaggaagaggaacaggctatgacctaatgcttgcttggaccagtataagcatgccagggcaaatacttaagctaaattgtgggagctaagaacataaagtatattgatttctttattacagctagcagatatttaagaatgatggtacaggtctttgaataaattttgcttttaagagaagttactatttattcctaactagatggggaggaaagtctttgaaga

SEQ ID NO: 10212 - DNA, 553 bp, Homo sapiens
  MAP TO AF274858.1; EXPRESSED IN BRAIN, SIGNAL =   1; EXPRESSED IN FETAL LIVER, SIGNAL = 0.9; NT HIT: J05096.1, EVALUE 8.20e+00; EST_HUMAN HIT: W21788.1, EVALUE 0.00e+00; SWISSPROT HIT: Q12968, EVALUE 1.60e-01
cagggccaagagttcaaaagaagccaatggagggagagggagcgtcagaagcccggaggagctggtggtgggagaatgacggcagggacgcagccacagttcagaccctgtcccctcagcacctggatggactcccactgtttgctttggcaaatgccgaggagtcctcggtagaccaccttgatgtctgctgtgacatcagaggtgccaccaccaaagcactcttcccaccctagtctttgtgtccagcggccaagcttaagccatgaagtcatggatttgtggctcagcaccaggtcctgaggggagcgtatcctggcagtgtgggcacctggtggccaagcctcagtttcccccaaatgagcaaaggggataaagaggggcccgacttttgccaccctcctgaggaagcccctaggtccacacagtgatgccatgggggacccttgccttccacacttgcaggtgtcacgttttgcagggaggtgtttgggccttgggctcagccactgggagacagttgggacctgagggacagaggatcggaatggaa

SEQ ID NO: 10213 - DNA, 593 bp, Homo sapiens
  MAP TO AC022163.3; EXPRESSED IN BRAIN, SIGNAL = 1.1; EXPRESSED IN HELA, SIGNAL = 2.1; EXPRESSED IN PLACENTA, SIGNAL = 1.8; EXPRESSED IN FETAL LIVER, SIGNAL =   3; SWISSPROT HIT: P47107, EVALUE 1.30e-01; NT HIT: AF288742.1, EVALUE 3.00e-21; EST_HUMAN HIT: AL521707.1, EVALUE 6.00e-48
caatgttgatggctgctgactaatcagactggtggctgctgaaggttgaggtgcctctggaaattttctaaaataagataacaatacattttgacagattattgaatcttcttttcatgaaaaatatctttgtagcatgtaacggtttaatagcatttacctaattagagctaccttcagatttggagtcaatctttccctagagctggtttgcaactaagtttacggaatattctaaattatttgttattacttcaacaatgttcacaaaatcttcatcagaagtagatttcatctcaataaatgcctttcttttcatatctgtaaaaaagaacatttcatctgttaaacttttatcatgagaccgtagtaattcagctgcatcatcgggctcaacttctaattctaggtttttgctattctcaccacatttgcagttacttcctccactgaagtcttgatccctccaagtcaaatcatccatgaaggttggaatcaccttcttccaaactcctgttaatgttgacattttgacctctatgaatcacgaatgttattgatgacatctaaaacgttgactccttttccaaagg

SEQ ID NO: 10214 - DNA, 545 bp, Homo sapiens
  MAP TO AC019209.3; EXPRESSED IN HEART, SIGNAL = 3.4; EXPRESSED IN FETAL LIVER, SIGNAL = 2.2; EXPRESSED IN HELA, SIGNAL =   3; EXPRESSED IN BRAIN, SIGNAL = 1.8; EXPRESSED IN PLACENTA, SIGNAL =   2; NT HIT: AJ303052.1, EVALUE 1.00e-04; EST_HUMAN HIT: AW936376.1, EVALUE 2.00e-10; SWISSPROT HIT: Q9K896, EVALUE 5.10e+00
tgatccaaccacctcctaccaggcaccacctccaccatttgggtggtttctatcctaaatgcaaggtttaaagcagggtagtaatatcagctagtcttcgtttttaaaagaccactaatttttggttagagcagagctgtcccatagaaatatattgaaagacacattgaaaatttaaattttctattggttacattttaaaaaggaaaatgaaacaaatcaaattaattttgataatatagtttatttgaccccacacacccaaagtattattgtatcattatataatccatgtaaaattttactattaagacatcttacattctttcttcatatgaagtgtttgaaatttaatgtgtattttatacttacagcacttcttagttcacactagcaccgtactagacagagaagctcactggaatgaagtggaggagactggagtggatgcagatcccagtccagagattacttcagaagtccctgagaaagataaggactgcttggattaagatagtaacaatagagatggccgaaagtgaaca

SEQ ID NO: 10215 - DNA, 556 bp, Homo sapiens
  MAP TO AC025467.3; EXPRESSED IN HEART, SIGNAL = 2.4; EXPRESSED IN FETAL LIVER, SIGNAL = 1.8; EXPRESSED IN LUNG, SIGNAL = 1.7; EXPRESSED IN BRAIN, SIGNAL = 1.5; EXPRESSED IN PLACENTA, SIGNAL =   5; SWISSPROT HIT: P10200, EVALUE 5.30e+00; EST_HUMAN HIT: AI822044.1, EVALUE 3.00e-03; NT HIT: X68650.1, EVALUE 8.30e+00
agaatgtgcatggcagtgagcagtgccacctccaggtctggcccatgagaacgtcccacaggcatgggggagcctccatgctctttctccggctgcctgggatgctgattcccagggtaatcttggaagccattgtcagcctggatccacgaatgaccatgtggaagacagctgccttgacaatctgaacacctgctcagaattgttcctggagcaagaagtaaatgtccattgtgtgaagccactgaaatcatggagactatttgttattggaacctagcattccctgtgaatacccaaaggctcagaaaagataaatgacttgcccaaaatattaacaacaaatgccagcaccagaatccatgttttaattaagaatcctcacatgactctgtggggaactagcattcatcacaaggtattttattcaggtgtctccttctctgtcttccctatgagacaaaaaccaacccagacacaaacagtcagcccaggaacctaccgagctagcaccaggcctggtacattgcaggctcccaatgctttcttgagcaca

SEQ ID NO: 10216 - DNA, 530 bp, Homo sapiens
  MAP TO AC000090.2; EXPRESSED IN PLACENTA, SIGNAL = 0.83; EXPRESSED IN HEART, SIGNAL = 0.98; EXPRESSED IN LUNG, SIGNAL = 0.58; EXPRESSED IN BRAIN, SIGNAL = 0.7; EXPRESSED IN FETAL LIVER, SIGNAL = 0.45; EST_HUMAN HIT: H11869.1, EVALUE 2.00e-38; NT HIT: AJ223837.1, EVALUE 3.20e-02; SWISSPROT HIT: P25953, EVALUE 3.30e-01
tttcttttcacgaagagccgacacttgtagctcctgcggccccaactcagacagcccaggaccatatctatgctaactcttccctctccaaacctttacagtctttgcctccggagccatccaaactacaatttacctgtaattctgcaggccctcccccatccaccacagcccctcaccctcctatcattttggtccctcaaccggtcactttgccatccactcaacctgcttctctgtacccttcttcatgcagggacacccctgccactctggttgtgcaggactgggccagtaatcaccagtatgcttctgcctcttctgctcccccaatgcccctttctcacactcttataccagtccgaccccgtcaatctcagtttctcttatctatacatacttttcctgtcacttctatgccgactctatctcatgtgcctgctcttgaaactttcatgcaatgcttattacgccaaaacaaacaagtagattagaggcgtgggcttattcggtcatgctggaacctccta

SEQ ID NO: 10217 - DNA, 578 bp, Homo sapiens
  MAP TO AL110118.3; EXPRESSED IN BRAIN, SIGNAL = 0.86; EXPRESSED IN PLACENTA, SIGNAL = 0.92; EST_HUMAN HIT: BI488657.1, EVALUE 0.00e+00; NT HIT: gi14748505, EVALUE 0.00e+00; SWISSPROT HIT: P44104, EVALUE 4.30e+00
aatccctaaagtgaaatggtctcattatcaaccactttagctatatatatttctttcagccatagaacgtattgtcatacaacaaatatttattttaaaaggtgatgatgaagatgatgcagaagatgaaaataacattgataacagaactaacttcgatggaccatctgcaaaacggccaaaaacaccgtcttaacaatagccttcatgacatttaaaagatggctgttgtatccttattgtcacactaggacatttaaggaagacttatgctctaatttggaaaaagcatttgtgttgttctcctgggacaattttgtcaaagagaaaactggtttttctgtttctagcaaagatagtaaaggcttagaaataaaatctgttttcttgagaaataaatttcagaccctggaaggaaaatagaacacttcataatgtataaaatcctctaagttggcaactgaatttttatcattgttttctatttttaaaataatcattgatttgtgtgatgtctacatcttttaacttctggttctgttataaagagtacatgtcacggttcataggcagtaaca

SEQ ID NO: 10218 - DNA, 582 bp, Homo sapiens
  MAP TO AC008524.5; EXPRESSED IN HEART, SIGNAL =  14; EXPRESSED IN LUNG, SIGNAL = 5.9; EXPRESSED IN BRAIN, SIGNAL = 3.5; EXPRESSED IN PLACENTA, SIGNAL =  10; NT HIT: AF116710.1, EVALUE 0.00e+00; SWISSPROT HIT: P06366, EVALUE 7.00e-57; EST_HUMAN HIT: AV723732.1, EVALUE 0.00e+00
ctcgaaaggggaaggaaaaggaagaacaggtcatcagcctctgacctcaggtggctgacggagaaaacatatttggtgtccgccatatcgttgcacccttcaatgacacttttgtccatgtcactgatctttctggcaaagaaaccctctgccgtgtgactggtgggatgaaggtgaaggcagaccgagatgaatctttgccatatgctgctatgttggctgcccaggatatggctcagaggtgcaaggaactgggtattactgccttacacatcaaacaccgggccacaggaggaaataggacaaagactcctggacctggggcccagtcggccctcgagcccttgccccctcgggtatgaagatggggtggatagaggacgtcccccccatcctctctgacagcacccgcaggaaggggggtcgccgtggtcgccatctgtgaacaagacaagactcctcaaaatattttgttaataaattcccttcatgaaaaacaaaggcccaattctctacagtgtctacaatattccctagttgctatgtttagtactttataaagggtacacttgggcaaaggaa

SEQ ID NO: 10219 - DNA, 576 bp, Homo sapiens
  MAP TO AC011311.11; EXPRESSED IN HELA, SIGNAL = 2.1; EXPRESSED IN BRAIN, SIGNAL = 0.43; EXPRESSED IN PLACENTA, SIGNAL = 1.5; SWISSPROT HIT: Q9Y2R3, EVALUE 9.00e-24; EST_HUMAN HIT: BF689046.1, EVALUE 0.00e+00; NT HIT: AF084458.1, EVALUE 6.00e-87
aagaagataggccgtttccgagatgcagaagttacctataaatatcatacaaactttctataagagagcaatgaggtttcagagctagagtactttttgcttctcttgaactaagaacttaaaaatgtatcttacctgtcgataggcccaacccagaagaacatgatttcacttacgttagaactgccttaattttgtttcgttaatggcaggtcccatgactcaatgaacatgcttgtccagctcatctggaaacctgctgccttcaaataccatctcatcgtttcaacacaatatgatgacagtgcaccccacagagtgggggactgcacacaaggcattctgaaacttaaatccagaccatggaaactccctggggttggatctggacacacctggaaatagatgaccactgcaaagacaaagatggtggcgatgagattcatgaggttgggaagattctggcggtagaacgcctcccgaagggctcggaccttgtctgtgcgtgtggccagcagatggaaaagtgcgatgatagcaccttcaaattccattcctgttggcagaggaggagac

SEQ ID NO: 10220 - DNA, 504 bp, Homo sapiens
  MAP TO AC011532.6; EXPRESSED IN PLACENTA, SIGNAL = 1.4; EXPRESSED IN HEART, SIGNAL = 1.8; EXPRESSED IN BRAIN, SIGNAL = 1.5; EXPRESSED IN FETAL LIVER, SIGNAL = 0.98; SWISSPROT HIT: P98119, EVALUE 2.10e+00; NT HIT: AL163203.2, EVALUE 1.20e-01
gagggaacaaagaggcagtgaactccagaagcccaacaagaagcaagaatttagcactgggtgcaattcagtgggaaagtgagcttctgcttccaacgttgcattggattcctgtttctcaggaacaagactgttttgctaaatagacgcaggactgctattactgctttagaaaaagtgctgaatatgtgtttgcttgttctctggagccagtgatggggctctccatttatttacttgtttatttttttgagcaaatgaaacccagctctgggccctgacctctctgagtgctgggtgaaacagcacatgagagcttccaggaacggctcatcaacagcttcccggaagcaggggagatgccattgcttcagaataacttccccagccagatgttttaccagttcctcgagatggtagagtctgtgcatggctgtgacgcatcagggtagagatgttgcgcttggaggattaggtgaacgtccacaggaatccacctcctgt

SEQ ID NO: 10221 - DNA, 533 bp, Homo sapiens
  MAP TO AC010527.4; EXPRESSED IN PLACENTA, SIGNAL = 1.4; EXPRESSED IN BRAIN, SIGNAL = 1.3; EXPRESSED IN HELA, SIGNAL = 1.2; NT HIT: L02063.1, EVALUE 7.00e-68; SWISSPROT HIT: Q14833, EVALUE 5.80e-01; EST_HUMAN HIT: BF378925.1, EVALUE 0.00e+00
cctctctcaaccctgctcaccaaggctgtgtccaaacccgcctctgccatcagactgacaggtcctcctgggcagggtgtgtgttgcacagtgcctggcatgggctggatacagaggagactgactgtgtgtctacaatgcccagccaatgcctcctggaaaccctgttccctgtattcccccaggtcacactccaaaaagtcctcttacctggcttgggaggaaggtccttgtagggaggtgttgagttctcatagtcatcatcctcctcctcctcctccatggtcccttccaggggaaaggcaagtcagagcccagccattccctcctccctccatccctcaagccctggtctctgcctcagctgccccatgatggggattctgtaccctggatcttgaccacacctgggccccagccccagcctggccagggccttacctggtgggtctggacacccagcgatagtatacatgttgtgcatggctacagctaacaccaggaacatgacaagtggtagccaggtcttgtcc

SEQ ID NO: 10222 - DNA, 555 bp, Homo sapiens
  MAP TO AC024070.2; EXPRESSED IN BRAIN, SIGNAL = 0.48; EXPRESSED IN HELA, SIGNAL = 0.66; NT HIT: AE000892.1, EVALUE 9.00e-03; SWISSPROT HIT: Q9USK8, EVALUE 9.00e+00; EST_HUMAN HIT: BI561135.1, EVALUE 3.00e-28
ttgtccacattgagcagagctccctgaataactcatgaacaaaagcatctatgactaactgttgctctgtgtcctcttagcctctgaggagtctctagttcacaaggacagaggagatggagagaggccagtcaacgtgagggtaaggttgccttgctttctctgaaatagaaatgttcctttcttggtgtctttctttttcaactgactttacatgtgaaaaaatgacaatgtccatgacaggtattaaatgcagttttctgagggggaggaagaagtgactcttagcaactgatatgtaatccaaaatggcatttagctatgacggcttcaggttgtggactgtatccttggggtccttgtccttggaagcaatgtcttctccttggattcagtattttgcacttgccaacctacgtggacctgagagatacaccgtccagaagctgatgccttttccagtgtgtatcctacccttgttttggaggccttgaagttgactacactttctgatcaagttttcaatattcattgagagaaacacagccttgtgca

SEQ ID NO: 10223 - DNA, 598 bp, Homo sapiens
  MAP TO AC010644.6; EXPRESSED IN BRAIN, SIGNAL = 0.64; EXPRESSED IN FETAL LIVER, SIGNAL = 0.72; EXPRESSED IN PLACENTA, SIGNAL = 0.61; EST_HUMAN HIT: AA346742.1, EVALUE 2.00e-10; NT HIT: AF217490.1, EVALUE 2.00e-10; SWISSPROT HIT: P06163, EVALUE 2.60e+00
cccaaacacatttgggagtcaccagtgagtaggcaagtcaggggctgggtgagtgtggataggaagagaaggctccaagaaatgagccctgggacaccccagggtctgcaggtcagctatcggaggtcggagcagcagaggagatggagaaggagcagccagtcccgctgcaaggggaaggccaggagagcctggggccagaggcgcagccaggagggagggaccaaggaaggggaggactggaaactgacctcgggcttaggaacgtggaggtcagtggtgcccttgatgaaggatcttggtggggtggtgggagcagatgcctgcgggaaaggaacgagaggacggaagagacagattagcagcggcaagcacagaaactcaccggaggaatgctgatgcaaagggagagagaagtggaaccaaagcgagtttggggttttgaaaaaatagcatttttgagatattgttcacatcccataagatccgccccctctttggagtatccaactcagtggtttttagtagtcacaagattgtgcagccatcaccactatccaatttcagaacagtttcatcaccccacagagaaacccta

SEQ ID NO: 10224 - DNA, 520 bp, Homo sapiens
  MAP TO AC005852.1; EXPRESSED IN BRAIN, SIGNAL = 0.4; EST_HUMAN HIT: AW593481.1, EVALUE 1.80e-01
ccagtggtgtgtgattgaggcgggtatttgctgagcctgggacgtgtcctgccagcccaaggtttaatcaaggaatgtggaatctcatatatatgcaaccaagttaccatgattaagagaattttccttcaaaggctgttggtcccctgaaggaaacataccaagcactaccatagaaggaattcaggacaatttgctctcagagggctcaattatttctaaatatattttcaaataaatgagacttacttaaaccatttgtcaccatagcaacgaagctggcaggattggtaggagtttttgcttctaccaactgtgaaacatgcttgttgctggcaagtctatagaaaaaaagtcctagattgaataagaaaagcaataaattaatggaggctagcaggaaattaacaaataaaagaatgacaagagtatttgcaaagacatacaaccttactctgagagttaaataaataataataacaataaaagtccatcacagagcaactcattatgctcccaa

SEQ ID NO: 10225 - DNA, 558 bp, Homo sapiens
  MAP TO AC010609.5; EXPRESSED IN LUNG, SIGNAL = 1.6; EXPRESSED IN FETAL LIVER, SIGNAL = 0.35; EXPRESSED IN BRAIN, SIGNAL = 0.82; NT HIT: L10717.1, EVALUE 1.00e-119; SWISSPROT HIT: Q08881, EVALUE 9.00e-38
tccactaggaccacccaaagtaggtgaaggaagggagaagttgagaaaggaaaggagattatctgtaatgtattatttattaatgcgttcccagtcatttcagtgagaactgtccctttaccctggacctgtgggtgttcaccctgcatgctcataccaagtctctgtggatgacacatgcctcttccaggtaggccatgccctcacacacatccagacacatgcccagcagggtctctgcagcaaaaagtccccgctgggtgcgtagataatctgacaggcagccgtgctccatgaactcaaacaccaggcagatgggggcctgctccaggcacaccccatacagctgcaccagtttgggatgagagagtttcctggaggaaaaagacaaggggtgagatggcctaaactcagtctcccaaaaatgccgaaaatattatggtaccaaaatagccaatggtcattttgtctaatttatggtttggatgaaaataatattcattccctccccaaaacaaaaacatgtcattggagctgagacctgaaaaatggcaagga

SEQ ID NO: 10226 - DNA, 590 bp, Homo sapiens
  MAP TO AC008953.4; EXPRESSED IN BRAIN, SIGNAL = 1.1; EXPRESSED IN LUNG, SIGNAL = 2.1; EXPRESSED IN HELA, SIGNAL = 5.8; EXPRESSED IN HEART, SIGNAL = 1.3; SWISSPROT HIT: Q92973, EVALUE 1.00e-39; EST_HUMAN HIT: AU142986.1, EVALUE 1.00e-122; NT HIT: gi4504906, EVALUE 1.00e-125
gatcctgcaaaacacttcaccaagaagaaaaaagaaaactaagctttctgatataactggaaaattttcaattacgaaacacttcattataggtttaacaccaacactccatcagaaggttgaaaattaagtttttcactgccacaaagaacactgtgttatgaatctgtcccacctgcaggcagcttcttgtactctcttgttgctgtccaggatgcgctttagcaattctgtcattaatggcttcaggtacgtgtctggcggctggctgaccacccagtgtgcatagcggctaagagtccagcatgttatggaacgcacaagagcctttttatcagagaggcactgaataaggtgaggaataagctcaggcaagtatggaatcatgccctgcatgcaacctagaaaaaaaataaatctttcaaaatgctaaaatttagttaacattattttggttgattatgaaaataaaacacgtatctatgaaaaaattcagaatatttctactgctatacacatactacaataacctataccaaaattatttttaaaaccctgaagttagagctacctgctcccaagcatcttac

SEQ ID NO: 10227 - DNA, 599 bp, Homo sapiens
  MAP TO AL096870.3; EXPRESSED IN FETAL LIVER, SIGNAL = 2.3; EXPRESSED IN HELA, SIGNAL = 2.1; EXPRESSED IN BRAIN, SIGNAL = 2.4; EXPRESSED IN PLACENTA, SIGNAL = 2.2; SWISSPROT HIT: P39929, EVALUE 4.00e-05; NT HIT: gi14750838, EVALUE 5.00e-97; EST_HUMAN HIT: AW863668.1, EVALUE 3.00e-99
aagaaggagaaagggccaacccctgaagaagcaatacagaaactgaaggagacagagaagatactgatcaagaaacaggaatttttggagcagaagattcaacaggagctacaaacagccaagaagtatgggaccaagaataagagaggtaatgagggaaacaagcctatggggagggcccagatgggaagcaggtgcttctgactcttgatgttcagggtatgggctgggtcagctgccctacaggctttgcggaggaagaaaagattcgaacagcagctggcacaaactgacgggacattatccaccctggagtttcagcgtgaggccattgagaatgccactaccaatgcagaagtccttcgtaccatggagcttgctgcccaaagcatgaagaaggcctaccaggacatgtgggtacggggggaggggtggaggggacccaggcactgggaagagtggcttgctatcacactttaaactttaaagcctctcagaatgtgaatttgcagtatagatacttgtgatggctagacatccatctgccccttgcttcctataaaattctttcgctgcctggggcattctagggaggaaag

SEQ ID NO: 10228 - DNA, 565 bp, Homo sapiens
  MAP TO AC010327.5; EXPRESSED IN PLACENTA, SIGNAL = 0.92; EXPRESSED IN HEART, SIGNAL = 1.1; EXPRESSED IN BRAIN, SIGNAL = 1.3; EST_HUMAN HIT: BG397528.1, EVALUE 3.00e-93; SWISSPROT HIT: P12949, EVALUE 8.00e-03
ggtccttctcttaggccctgaggggtgacctcggggccattcccaggatgggccttcctcactggtaccccacccctctcccgccaggcatggccgcctttgccaccgcccacctcctctacgtctgggccttcggcttctctcccctgcagcccggcctgctgctgctcatcatcctggcccctggcccctacctcagccttgtgctccagcacctcgagccggatatggtcctgccggtggcagcctatgggctgatcctgatggccatgctgtggcgcggcctggcccagggcgggagtgccggctggggcgcgctgctcttcacgctctctgatggcgtgctggcctgggacaccttcgcccagcccctgccccatgcccacctggtgatcatgaccacctactatgctgcccagctcctcatcacactgtcagccctcaggagcccggtgcccaagactgactgactagggagcttgaagggccggtgttcaggccctctcctcctgcaaggacctgggcctcccagcccagcccagcctgagaaataccctcagcagcg

SEQ ID NO: 10229 - DNA, 519 bp, Homo sapiens
  MAP TO AL096870.3; EXPRESSED IN BRAIN, SIGNAL = 1.2; EXPRESSED IN PLACENTA, SIGNAL = 1.2; NT HIT: gi14750750, EVALUE 1.00e-111; EST_HUMAN HIT: BF855857.1, EVALUE 0.00e+00; SWISSPROT HIT: Q92696, EVALUE 5.00e-36
agggatatccaggatgggtccactgagctggtgctgaaagggatgttggagccaaatgcatcctccgtggagtgcactgaggtgtttctaggggttcctgaggggactctaggggtcccagccaggtagctcctcttgccctgcctctaagatatgctgtcacctctcccctccagttcactgctgggactatcggcggtttgtggccacacaggcagccgtgccccctgcagaagagctagccttcactgacagcctcatcacccgaaacttctccaactactcttcctggcattaccgctcctgtctcttgccccagctgcacccccagccggattctggaccacaggggcgcctccctgaggatgtgctgctcaaaggtaaccagggtcagggatgctcaggaggactctgcagtgccacccttccagcccccatgcctgaccctgttcctgaacctgtcactcaggtttattgagcacctacttcatgcgtggctccaggggtgcttaagaatca

SEQ ID NO: 10230 - DNA, 552 bp, Homo sapiens
  MAP TO AC004792.1; EXPRESSED IN PLACENTA, SIGNAL = 0.79; EXPRESSED IN BRAIN, SIGNAL =   1; EST_HUMAN HIT: BG676331.1, EVALUE 7.70e-01; SWISSPROT HIT: P03330, EVALUE 2.00e-01
gagaagagaccacgtctggcggatgagtcctgtgattatcaggtcacctgggtaacgcccaaccacgacgggctgggtctcagcgcgaggcctgcagcccggcgccgactggaatccccagcactgccgtctggaggacatcggcggtatctccccaagagacgggaagtctgtgtgtcgaagaggcgcgggacgcaagcccaccaacctggccgaccccagggaaaggccgagcgtccagcccgcgggggcccaagatggtgccagagttcgaggccctctgtgcatgcaccccgcccgccttcgaatctagcctgttcgccgttgtggtttgtcctcccggttcctctgaaggagttggtcagtagaaccatggcctccattgactacgtcctcagagtcgcagctctcttcagtcgagctccagtcacagaggacggttgtggtgagacccaggcagaagtatttccggtcaacgaggtcgcgggtagtgcgcatgcgcttcgtgcagggccctgcgcaagggcgcctgggaaaccttgcgagaagtga

SEQ ID NO: 10231 - DNA, 539 bp, Homo sapiens
  MAP TO AC008971.5; EXPRESSED IN BRAIN, SIGNAL = 0.86; EXPRESSED IN HELA, SIGNAL =   1; EXPRESSED IN FETAL LIVER, SIGNAL = 0.89; EXPRESSED IN PLACENTA, SIGNAL =   1; SWISSPROT HIT: P45403, EVALUE 2.30e+00; NT HIT: gi7705868, EVALUE 0.00e+00; EST_HUMAN HIT: AW070985.1, EVALUE 0.00e+00
tgaaatcacaatagtgggcgtccaatgggcagaccctaagattcagagctgcagaaaatgttaacttcctgccatgtgcttcactgtctctgaggttagggtcattgtctctttattgacctaatccacatatctaacaaagagagcgacaaagcaacagcctatcagtgccaccgcagacgctgtgatcaccacgacgacaacggtcccggctgtgttgaccagaaagcccaggccacctccgaccaggatctgagccagctgcaccatgcatgtgagggtggcgcagtccatgcccttccctctcacgctgttgtctgggtcccctcctggggcctgctgcctctgcaaaggaagcacagaaccaccatttgacctacaaggaactgtcatttagggcacaggtcagcaaaatttttctgtgaccagccagatagtaaatacctttggcttcgtggattatacagccctggtcataactactcaactctgctgctgtagtgcaaaagcaggggcaatgtggagctgagttggctttc

SEQ ID NO: 10232 - DNA, 581 bp, Homo sapiens
  MAP TO AC010252.3; EXPRESSED IN PLACENTA, SIGNAL = 1.4; EXPRESSED IN HEART, SIGNAL = 1.9; EXPRESSED IN FETAL LIVER, SIGNAL = 1.4; EXPRESSED IN LUNG, SIGNAL = 1.1; EXPRESSED IN BRAIN, SIGNAL = 1.5; SWISSPROT HIT: O15126, EVALUE 7.00e-13; EST_HUMAN HIT: BG028022.1, EVALUE 0.00e+00; NT HIT: gi14781218, EVALUE 0.00e+00
ttcactgaatgtcatcccccaaaaatatggagaatatttatttagcatgtaatattttttctgcaaggggcactgaaatattaagaaactattaggtaaagtaataagacaaggaagttttcctggttttagcccatgcacaagtgaacaggaaatatccatgctgtctgtactgtgtgttttgaacataaaaatatttgtagaatacagtaactggagaaaaaggtacagtcaaaaggtaacagtgtattgtttgaagattcttaaatctggttacccttgaaagcattctgagctgcactagatgctgcagttgaagctgcatttgcagctgcggtctggacagttttgttggacatcacacctgttgcaaactcctgttgggccttctcaaaactagcacctgttgtgcgatatagtccatgtacctacagaggcacaaaaaagtgggagaaggtaagtagcaacctacgcattcatttccagcagctcttaatctcaacattaatcaaacataaaaatactagattgtagtcatgattcctaagatcaagaatattagccaccaaactgacacacaa

SEQ ID NO: 10233 - DNA, 516 bp, Homo sapiens
  MAP TO AC009087.4; EXPRESSED IN HEART, SIGNAL =   2; EXPRESSED IN BRAIN, SIGNAL = 1.2; EXPRESSED IN HELA, SIGNAL = 1.4; EXPRESSED IN PLACENTA, SIGNAL = 1.4; SWISSPROT HIT: P00737, EVALUE 6.00e-17; EST_HUMAN HIT: BG562917.1, EVALUE 0.00e+00; NT HIT: M84462.1, EVALUE 0.00e+00
ccttagagcagtgccaggacagcaagactcactaggtgagggtgacatcatcatcagcattccttcttttcccacatctgctggagatgtaaatgtgactctgagatttacatgaggtaggctgcatggcatcgcctccccttaacaaaacagaaaacttgaggctgacaaaagttagtctgcccaaagggccatggctactggcgacaaaacgcttattagaatctaaatctcctggctccaaggagagcaacgaactttctggcgaatcacctcagcaccacccatcatggaaatgtcagagaagggggttgtatgtagggcatggagacagttgtccacatcttaccatctccttctgtgcgcagtttgtagtagttcttacactggtagcgaaccgagtgctccacatagccatgtgcaatctcggggggcttcgggcagccgtcatctgcaaagagagagaagccagagagtttgctatttggaaattgttcccagtgaaccgtgaaaagt

SEQ ID NO: 10234 - DNA, 564 bp, Homo sapiens
  MAP TO AF196972.1; EXPRESSED IN PLACENTA, SIGNAL = 0.88; EXPRESSED IN HEART, SIGNAL = 0.99; EXPRESSED IN BRAIN, SIGNAL = 1.1; EXPRESSED IN LUNG, SIGNAL = 1.1; EXPRESSED IN FETAL LIVER, SIGNAL = 1.5; EST_HUMAN HIT: W00507.1, EVALUE 7.00e-60; SWISSPROT HIT: O60224, EVALUE 3.00e-22; NT HIT: gi13629995, EVALUE 1.00e-72
ctggagctgaggaaatttggaagactttccccacgtcacgtggttttttttatatggatgacaactccagtctgtgtctctggaagtcatgtctaacatctcatctggagctaggcgagctcctcagcccagcctggaccctggcttgtctggggtccatgccacacacccagtccacgcacctgaacacagccagggaagccagaggggttgttcccgaattctttcctcttaccagatgtcttgttaatcttctccaaggtacttggatttcccggggggcacagctgtttcccatcattttgtgggccagatgcctctggcacttccttcaaaccattttcttcctctgctggcttcttgggcatgatctttacaatgtgaaggtcgcagataaacagtatcagtgacatttctacagtgctttagagcttacaaagggtcttcacgtgcattagcttattcaatgctctcaacaagactgggagagttacacaggcctaaattaggagaaacctgggaggttagaagggaaaggaatggcctaaacgaatgggctttcca

SEQ ID NO: 10235 - DNA, 508 bp, Homo sapiens
  MAP TO AC061958.9; EXPRESSED IN HEART, SIGNAL = 1.2; EXPRESSED IN BRAIN, SIGNAL = 1.2; EXPRESSED IN LUNG, SIGNAL = 1.6; EXPRESSED IN PLACENTA, SIGNAL = 1.4; EST_HUMAN HIT: AA806055.1, EVALUE 1.20e-02; SWISSPROT HIT: P37774, EVALUE 3.60e+00; NT HIT: AL163208.2, EVALUE 3.00e-05
aattttctctccctgctccaggattatacccatacttcagtgaaggtttgtattatagagcagaccatgaaatggttactaaatgttatgttactttatgattcctacattgtggtagtaagagatgagccaagagaggaaaccaagcaatctggagaactactacttaaggttagcctaaaaggaaaacagagtggcacacaaagtaaacccacatctagattacgtttttcactaaaaagatataaaaaagcaattatagaaagacaaggaagagaaaaagacaacattgaagactgaagatacggcatttgaaataagagaatggatgaaagttcaacttgttgtaaaaacagggagagagagagagagagagagaaagacacaaacagtaaatatgggtcatattagagacatgcctcagagatattttcagtctaactccagaccactacaataaaatgagttttgcaataaaacaagtcacacaagtttttgggtttcctgg

SEQ ID NO: 10236 - DNA, 594 bp, Homo sapiens
  MAP TO AC004180.1; EXPRESSED IN HEART, SIGNAL = 2.5; EXPRESSED IN LUNG, SIGNAL = 2.3; EXPRESSED IN BRAIN, SIGNAL = 1.3; EXPRESSED IN PLACENTA, SIGNAL =   1; NT HIT: X92841.1, EVALUE 0.00e+00; SWISSPROT HIT: Q30201, EVALUE 4.00e-16; EST_HUMAN HIT: AA675914.1, EVALUE 0.00e+00
tttctcacctggaccctctgcagctgatgttttcttcttacaacaacggacatagaaaataataataacaaaaatagcagcagcagcagcagcaacagcagaaacatggaatgtctgccaatgactctgaagcaccagcactttccctgaaaaaaagggacttgttatacactgggcagagagccacagccatccctgctgtccctaccctggcctgaccctctccagggtcaccctaggctcaccagagggcacagggtgagtgctgtgattcccgctgtgttccatgtagcaggtgaacctctgctcctctccttggcaaatcctggtggccacccaggtctggtaggttccattcccatcaggcaggacatccccccactgctgggtgtcgtggctcaaagataccccatcctgacgccaggtcagtgtgatattccggggatagaagctggaagccctgcatgtcacggtgatgttgccctctgaggcctcgctgcgggtgacattcaccatggggggcactggagaagaaagggcagagccagtgaagccctgctcccctctaaggaggggagaggaacagggctgttt

SEQ ID NO: 10237 - DNA, 536 bp, Homo sapiens
  MAP TO AC009286.31; EXPRESSED IN BRAIN, SIGNAL = 0.73; EXPRESSED IN FETAL LIVER, SIGNAL = 0.49; SWISSPROT HIT: P06316, EVALUE 4.00e-09; EST_HUMAN HIT: BE675656.1, EVALUE 2.00e-60; NT HIT: X14613.1, EVALUE 5.00e-72
ccttgttctcatcctggagcccagagatgctcaggaaggcctttttggaaaactgatagcttgagaatcagtcctacatccctaaaagtgtatattggcttctatggatcagaggtttggggacacttcctgttcattgttggtaccaggacacaatcccaagacccttattgctgctgcttccagtgcaggagatggtgactggtttagccacagacagactgtgcaggttaccaagtgagttctgactgcccaggaccctgagagtcaggagagagacacagggtgagggaggtggctcagtaagccaggggagcaaggaagagccctggtcctcccagtgccatccctgcctccttgtctccagctactacaggagttattaataaataatttttaggcagcaagaaagggtgaaagttcttggtggaattttcttttaataaaaagcgacccccaaaccatttctttgctaacagaaagcggcttgaaaaaccagactggcaagcattgatacacaaatgctggtggctaga

SEQ ID NO: 10238 - DNA, 562 bp, Homo sapiens
  MAP TO AC002309.2; EXPRESSED IN FETAL LIVER, SIGNAL = 2.7; EXPRESSED IN LUNG, SIGNAL = 4.5; EXPRESSED IN BRAIN, SIGNAL = 1.3; EXPRESSED IN PLACENTA, SIGNAL = 2.4; SWISSPROT HIT: Q43716, EVALUE 7.00e+00; NT HIT: AL163207.2, EVALUE 4.00e-23; EST_HUMAN HIT: BG699875.1, EVALUE 6.00e-54
ctctgctaggcctgaaatggggagtaggagttacaaggttcctgggatatcagtaattcatatttgtgaatgtcttagataagtgggctaacatgtacagaaaatggtcactaaaatgataacactgtttgttataaaatacttttctgtattctcttgaactttttttttttatcatttattagactgcttcagctgccataacaaaatatcacagactggatggattaaacaacaaaaatttatttctcacagttctggaggctgggaagtccaagatcaaggtgtcagcaaggtgggtgtcattctgaggcatcttctcttagcttataggctgaggccattttgcgttgtgctcacgtgacccctttgtgcgcatgtgtggagagagagcatgggtgcttcttcttataaggatgctgaaagttatgagaacccgacccttgtgacttcacttaatcttaattacttccttagaggccccatctccatatacagccacaatggggattagggcttcaacatatgaatttgtggtggggggacgcaaacactcagttca

SEQ ID NO: 10239 - DNA, 520 bp, Homo sapiens
  MAP TO AC005306.1; EXPRESSED IN BRAIN, SIGNAL = 0.81; NT HIT: gi14764718, EVALUE 0.00e+00; EST_HUMAN HIT: AL522794.1, EVALUE 0.00e+00; SWISSPROT HIT: P78368, EVALUE 3.00e-08
cacagaggagccaagacctcaggtttccagagacttgggatttgcacggcagcagagtcaccgtggagaggccagggtatcacaaacttatggattttgacaagaaaggagggaaaggggagacggaggagggccggagaatgtccaaggccggcgggggccggagcagccacggcatccggagctcggggaccagctcgggggtcctgatggtgggccccaacttccgcgtcggcaagaagatcggctgcggcaacttcggggagctccgcctaggtgaggccctgctcggtggtaggtggggtcgggaggctgctggcagggccgccccgagtcaccggagcctctggtggggccgcccggggtcactggagcctctggcggggccgccccatgtcactggcaggtgcgttgaatcatcagtccgtcgtggtgcgagtgccacttcccttcgaggaggttctgtggggagagtgggtttctggccctgtcaccttttcgggaaacagttctgttggga

SEQ ID NO: 10240 - DNA, 547 bp, Homo sapiens
  MAP TO AC004035.1; EXPRESSED IN PLACENTA, SIGNAL = 7.1; EXPRESSED IN FETAL LIVER, SIGNAL = 9.8; EXPRESSED IN LUNG, SIGNAL =  16; EXPRESSED IN BRAIN, SIGNAL = 4.2; SWISSPROT HIT: Q02760, EVALUE 1.30e+00; NT HIT: gi13648473, EVALUE 0.00e+00; EST_HUMAN HIT: AL557628.1, EVALUE 0.00e+00
gactttgccatcctttgaccatcagagccaagggagtcttaccaagtctgtttgggaacagcactggcaggtctagtttcctgacttcctggccaggattcctgaagtccttttcatccctgtctgcaccatccacagtgccatcttctacctccgtgggttccccattctggtgattcagctctccagcctcaatatcacttccttcttggccaggaacagcatcgcttgccataggaggtgcagaggcccaggagcctgaaagagcattcatttcctcatgaaagatacaaggctcaggcacacggcctctcctcactttgcggtaactcaactgtaggcttttgaacttggtgcgacactgttctggggtccgcagaaaaccctgctcccagagtccttccgccatggccctgtagatctggctgttctgctgacaggtctggagttttccataaaattgagaactactaagaatagccaggagcgtcttggtctcttcatagccccagggcacacctgttgctgggggacaaagaataggtca

SEQ ID NO: 10241 - DNA, 571 bp, Homo sapiens
  MAP TO AC004192.1; EXPRESSED IN LUNG, SIGNAL =  27; EXPRESSED IN FETAL LIVER, SIGNAL = 8.6; EXPRESSED IN BRAIN, SIGNAL =   2; EXPRESSED IN PLACENTA, SIGNAL = 7.5; EST_HUMAN HIT: BE276167.1, EVALUE 0.00e+00; NT HIT: gi11419084, EVALUE 0.00e+00; SWISSPROT HIT: P30515, EVALUE 9.00e-36
gatgtggaggggtagtgacctgcgcccccggccggtgtcactcacaggcctcactctggttgtagtagccgctcagggtccgcaggttcactcggtaaaactgtgctttggccttggcggtccctgtctcctcttcccaatattccggcccctcctgctccatccacggcgcccgcggctccatcctgggactcgtggcgtcgctgtcgagccgcacgcactgcgtgtcgtccacgtcgcccacggagaggaagcggggatccgcgcggccgggccgggacatggtggtgtggaaatacctcaaggagtggaagcctgggagcaaggagggggctgagaccctcccgaccctcctcccggcaccgcaaccgggttcctgcgcccccgccgggcaggcccctagctactccccacagacgccgtttccctcccgaccccgcactcacctgcccaggtctgggtcaggaccagggcccccgagagcagcagaagcagggttcggggcgccatgacaccatcctcggcgactgggaagaatcggagtcccggtgggtgcgtgggaactttagaa

SEQ ID NO: 10242 - DNA, 597 bp, Homo sapiens
  MAP TO AD000833.1; EXPRESSED IN LUNG, SIGNAL =  11; EXPRESSED IN FETAL LIVER, SIGNAL = 6.8; EXPRESSED IN PLACENTA, SIGNAL = 7.7; EXPRESSED IN HEART, SIGNAL = 5.8; EXPRESSED IN BRAIN, SIGNAL = 6.2; SWISSPROT HIT: O43914, EVALUE 1.00e-14; NT HIT: AF019563.1, EVALUE 0.00e+00; EST_HUMAN HIT: BF915115.1, EVALUE 4.00e-89
cctcttcacacattttaagctgaccataagcttgtggttgatcattcggcccagttttggacagatgtcccatgtgccttcaaggtttgggggtgctttaggcagagtggctttgaggtccctctgatggcatgaaggagtatctggggcagatatccctggcaggagtgaaatgtgaggaggacagtctggttttctcacctgataaggcgactcggtctcagtgatacgctgtttccgggtcgctgctggaggtgaggggtgttgtggggtgcagagacaggcagagtggtgagttgagggtgttttgtcattccaaatcagcacctccattaccatccctttggatgtttgagatctgggagtttacccagccccccacccccatctaggcaagtcctcaggatgtcccctgctagccccactcaccctccgcagcccctcgcccccgagggaccagccggcccaggaagtacacggccagggcaatgagcactgtcagcaccaggtctcccatcacgatccctgccagcacgcccgggctcaccgtagagcaactgcaatctgcagcacaggggtcaggggaggtcagtgtgt

SEQ ID NO: 10243 - DNA, 519 bp, Homo sapiens
  MAP TO AF196969.1; EXPRESSED IN BRAIN, SIGNAL = 1.4; EXPRESSED IN LUNG, SIGNAL = 4.3; EXPRESSED IN FETAL LIVER, SIGNAL =   2; EXPRESSED IN PLACENTA, SIGNAL = 2.8; EST_HUMAN HIT: AL533198.1, EVALUE 0.00e+00; SWISSPROT HIT: Q9UGP9, EVALUE 4.00e-08; NT HIT: AF149817.1, EVALUE 0.00e+00
tcccactaatggcttcttggcattgcagtcccaagggtgcgcttcgccaatgatgaccgacaccgcctggcctgctgctcactcgacggcagcatctccctgtgccagctggtgcctgccccacccacagtgcttcgcgtgctacggggccacacccgtggtgtctccgacttcgcctggtccctctccaatgacatcctcgtgtccacctcactggatgccaccatgcgcatctgggcctctgaggatggtcgctgcatccgagagatccctgaccccgatagcgctgaactgctctgctgcaccttccagcctgtcaacaacaacctcactgtggtcaggctccaggacacccactcaccaagggctggtgggctgggtcaggaaggctatctgagggaatcagagtataaggagggacagccagggggggcctaggacccccccaccccccacccaatctcgtcagagcagtcctagtgtggtcagacttaaaagggaagcagatcagaagacggg

SEQ ID NO: 10244 - DNA, 508 bp, Homo sapiens
  MAP TO AC005854.2; EXPRESSED IN HEART, SIGNAL = 1.6; EXPRESSED IN FETAL LIVER, SIGNAL = 0.44; EXPRESSED IN BRAIN, SIGNAL = 0.52; NT HIT: AF193836.1, EVALUE 3.00e-79; EST_HUMAN HIT: AU118969.1, EVALUE 1.00e-76; SWISSPROT HIT: P46571, EVALUE 6.10e+00
tgagcttgcccagaggatacttttagagagaaaagaatccctacagaaaccaggaggtgtagcaacattcaaagaggaatctgagaaagataagaggagcaataggctaaaataattaaaattattacacattattaatggagacaaagacattgtaacctcaattctaaatcagtcacaaaagagattgacattatcactgtatttcaggaccagggaattgatgtgctagcatcaatatcattgttatcacaaatttacctgtaataaatccagttcttcccatcaagaccctgttttccatgtccacatcctgtcttatttttccatggaacatagtaatttttaaccccatacctgctcattgctgccttttctgaatttcctatcccgatgtagctatctggagcactttctccactgctgctctcatcatctggttcgatgttgacatttctcagttccatgggatccatttgagctgtcagcgctttcttgtccacacaca

SEQ ID NO: 10245 - DNA, 545 bp, Homo sapiens
  MAP TO AC004511.1; EXPRESSED IN BRAIN, SIGNAL = 1.6; EXPRESSED IN PLACENTA, SIGNAL = 2.2; EXPRESSED IN HEART, SIGNAL = 1.9; NT HIT: AF058764.1, EVALUE 5.20e-01; SWISSPROT HIT: P36645, EVALUE 5.90e-01; EST_HUMAN HIT: BI767960.1, EVALUE 1.90e-01
tgtgggagaatcagggtagggcctgagcttgggtccagggctccttccgtccaggttgaccagggatggatgaggctgggtcatctggtgccctgctgtgcaccagagccctgaacctgtttcaggagctctgctatgaggagtttacaaagaactttaccttcaccctgaagagtctcattaacaaatatgacaaacaggaccatcacataacgaaggtttacatggacatggaataactcatcaaaatctgcccaaagctgaaagtacattgtttgctgtttgctcttagcagaacctgagacatcatttccctgcaccacagccaggggcccagtgaggcaaagggcttttatacaccctgactgccacatgcaaggtctctggtgctactcctaggccacaggtggctatcctctggaattgtctccaatctaaaagaagtctactcactgacacaaggtggagggtggggagtgcagggctgggtgtgaggaagtggggattcagagattctcagggtttctgtctgtgctctctgccaa

SEQ ID NO: 10246 - DNA, 561 bp, Homo sapiens
  MAP TO AL035402.7; EXPRESSED IN PLACENTA, SIGNAL = 1.4; EXPRESSED IN BRAIN, SIGNAL = 1.3; EXPRESSED IN LUNG, SIGNAL = 1.4; EST_HUMAN HIT: AI539359.1, EVALUE 6.00e-91; SWISSPROT HIT: Q9ULD4, EVALUE 1.60e-01; NT HIT: AJ296980.1, EVALUE 2.10e+00
atggctcttattgtgttggcaaaaatagattctcagaatataatctccagattttgtaatccactgatacaattacatactgattacctactctgtaatatggaatttaaaaaattccatgtgtgattttctaactctatcataggtcggtaacctctatacatctggaaaggctagatgtggcaaatgtttccttgtaaaagttttgggggaagctgagagcagctttctcacattatacacgcaggtctcctataaacgccggtacatcctcccaaagcgtgatgggaatctccaaatcgctaaatgtgtcctgttactccgtttctcttttcccacatcaacgtctggtagaaggaaggccaactgccccatggtcgctaccattccacccgtcctcatccgggacttcgctgaccttccggccgttaaggctgttgtctgttgtcatcaggaccaggtaggtctcacccaattgggacagagaggtcccccgaggacagcatctgcgcggcgccgtggcctaaagaggaggccaggcctctccctaactccgccttc

SEQ ID NO: 10247 - DNA, 577 bp, Homo sapiens
  MAP TO AC009482.4; EXPRESSED IN BRAIN, SIGNAL = 1.5; EXPRESSED IN LUNG, SIGNAL = 0.45; EXPRESSED IN PLACENTA, SIGNAL = 2.4; EST_HUMAN HIT: AL597818.1, EVALUE 2.10e-01; NT HIT: AE007487.1, EVALUE 6.00e-04
taatcagacccctccgactgcaagtgttaaatgggcatctagacttcaccttcagacttttcaccttggcacaacaggaaatccttttctgtgcctctcttccacttttcatgatcatttctctggcatcctcccccattctgtcctctggatgccctgggatctgttccttctccgaggacatcccctttcagttctgccctccctaggtaataatattccatgatctggaacttctttggggctttctttcccattcctacctagccacttccttattggaagtataactctaataataggagttagtataactcctgtgttcctgcctcagaggctatgctctatgttttttagatagttaataaaataattctacaagaacatggagattgttagatgctaatggattaataaattatggtgcagtcactattttcctctctcagtttcctccttgggaaaatgaaaaggtgggactgaagtagctctaaaatcccatctttttcaatttcattttcaatctatgatccatgaacctgtacacgttattcttacattttgacaagggccttct

SEQ ID NO: 10248 - DNA, 524 bp, Homo sapiens
  MAP TO AC008857.4; EXPRESSED IN PLACENTA, SIGNAL = 1.4; EXPRESSED IN HEART, SIGNAL = 1.2; EXPRESSED IN BRAIN, SIGNAL = 0.77; EXPRESSED IN LUNG, SIGNAL = 0.43; EST_HUMAN HIT: AA663368.1, EVALUE 1.90e-01
tttaacgcaggctttgttccaaaggaacatgacttcaagtgattcattaattaccagcaaattctcattgcttcaccacaacctaaaaggttcccactccattttcattttgactcaagagaaacagccacccttgagagcacagggactgctccttggccaattgatgggaccaggcacctaaggaagaagttgatgctctacttacatttttcttgaatagctggaatcctcagggtggccactggagacttcccaagagaattataagaaatcatagacacccaaaagctctcgcctcccagatgcagttcaagctgctggttagtagtgttcattgtttctgtgaggttagtgttgctttctggatagtaccatatgttgtagccaagtgttttctctaggactggggctcctcttgccttctgaacccaaagaaaacaaaatttattgccaataacaaagaaaaagaaaggcattgagacagtgagaagcggtgggggtgagggtggggaataaggcta

SEQ ID NO: 10249 - DNA, 517 bp, Homo sapiens
  MAP TO AC009509.7; EXPRESSED IN FETAL LIVER, SIGNAL = 1.1; EXPRESSED IN LUNG, SIGNAL = 0.83; EXPRESSED IN PLACENTA, SIGNAL = 0.84; EXPRESSED IN BRAIN, SIGNAL = 1.1; NT HIT: gi14767659, EVALUE 1.00e-17; SWISSPROT HIT: P13385, EVALUE 9.40e-01; EST_HUMAN HIT: BG573864.1, EVALUE 3.00e-03
tgaccttcctcctggacatcttggcggcatggagggtgtgggctgggtgtctgcaggctgtggtgcaccgagagccttcccgaaactgggctgcctggccacagctgctgcatccgagaactacaaatcttatattcagcatgtagccaagtacttctaaaactctgatcagaactgcatgtctcagattttattttagaaaaccataggtatccactactttatagaagtctcaaatctaaaactgtactcatgacgtaaatccccaaacttgctcctcctccagtgttctttagaaatggcatcctcatctgctcatcttttcagtaccacaggctggcctcatcctggacgtcattccttctctcacacactttcattcctgcatacagtcactcagaaagtcccatcagtcccatctcctaacatatgttacatctgtctacttctgttgccttcactacctccaccttgtccagtctaccaactcccaactggctcttcccacatcttctcg

SEQ ID NO: 10250 - DNA, 571 bp, Homo sapiens
  MAP TO AC005621.1; EXPRESSED IN HEART, SIGNAL = 0.98; EXPRESSED IN BRAIN, SIGNAL = 0.85; EXPRESSED IN FETAL LIVER, SIGNAL = 0.5; EXPRESSED IN PLACENTA, SIGNAL = 0.76; SWISSPROT HIT: P21405, EVALUE 3.70e-01; EST_HUMAN HIT: AW137625.1, EVALUE 2.00e-07; NT HIT: AB038490.1, EVALUE 1.00e-04
ttggcttgcataacttggtgtataatggtgccttttcttgatttctcttttttttaatgaacctaacattatgaacataaaaggatgccttttcttgagatggagaagagtatgtggtattggtgttcaacaaatactctggttctcccctcttctcggccccttttcgcctacgtggggccttatgacttgttcttgacaatgagatatgtcatttctgggtcacaacattcaacttcccttgcaaaatcctccagaactctctccccagtggtggctgctgctgtgtccatctgggtcctggaataaggatggtgaggagcagagatttctcgccaacttgcattcaagttgtactgtaagaaataaacctgtgttgttttaagtcactgagatttgggggttgtttgttattgccccacagcttcacctattctgacctgacatactgggggaggagcaggaaaaaagaattgtgaattggccatgtgaagtttaaggtgctttttcagtggtgttccaggtctcaggcctctctgcccactgcactgctgtgccgtgaggagtgtaa

SEQ ID NO: 10251 - DNA, 557 bp, Homo sapiens
  MAP TO AC006167.1; EXPRESSED IN BRAIN, SIGNAL = 0.63; EST_HUMAN HIT: BF837648.1, EVALUE 0.00e+00; NT HIT: AL163303.2, EVALUE 2.00e-06; SWISSPROT HIT: O60841, EVALUE 2.70e-01
atcacagaggcttccaaacgtgccccaccccttcaagctcccttcccagggctctgctgctccctctcactttctcttgctctttttccttcccactctaagtgtcctacttccatcttcttcccatctctttgtctctttcttccctctcgggcccacctttggcttttctaggctttgataaagagtttcctgaggctcaccaccggcagctgaattctggtctcctcttcctgcctctgcttgcctccgtggactcctagacatgctccttgagcttgtgggcaggcatctcagcacagctgtgggatctggggctcagagacccccaactagcctgtgcctagaatcatatttcaatagaatgatttcttttgaatcttattgatgcagaactttgttccttaaaccctaaaaccaggttcttgtcacacaagcaggaaaagctaggaacgcagacgcattgaagggtgaggggaacagaatttattgggtgaaaaaggaaaagaagaaaaaaaaaatctctcagcaaagcaagaagagttcctgccaacagc

SEQ ID NO: 10252 - DNA, 567 bp, Homo sapiens
  MAP TO AC002107.1; EXPRESSED IN FETAL LIVER, SIGNAL = 0.62; EXPRESSED IN BRAIN, SIGNAL = 0.68; NT HIT: AF186772.1, EVALUE 0.00e+00; SWISSPROT HIT: O75683, EVALUE 9.00e-09; EST_HUMAN HIT: BI758612.1, EVALUE 1.00e-73
agaaccaacatgccctgaagcctctcacctgcagggttccctgctgagctggaagcccaagctgcttcctctttggctgcctcaggcctcctggccccagaggctgctggagatttctcccccaaggacttggccttgtgctcagcagccttctcttctcgcttccggaatttcttttgtgttttcttccttttcttttttgggggccctgcagtttctgagccttgagttttgccagctgaaatgcaaaataagaaagagttaagtcccaatctcatggcccattcaataggcaggaaaggctcaccaaggctttgatcccaggaagatgccgaaagaggatcaggatcgggggccagagacactgatcctagagctcagaaccacaaccttgacccagtagttctgcttgtgagaattcatcaggcacaaagatgaggcttcaaggacgttcatcaccattatttgagtgaaacattagaaaaacctgaatatccacctccactaacaatttctggccctgctttacaataagctaccatgctgccatcaaacacaatggcaagg

SEQ ID NO: 10253 - DNA, 510 bp, Homo sapiens
  MAP TO AC005604.1; EXPRESSED IN BRAIN, SIGNAL = 0.41; EST_HUMAN HIT: AI218263.1, EVALUE 7.00e-04; NT HIT: AL163300.2, EVALUE 9.00e-12; SWISSPROT HIT: P53439, EVALUE 1.20e+00
gggaaaaatttggtttccagaataaacacattataatatccaaaatgtccagttttcaacaaaaattaagaagcatgcaaataaacacaaaactatggcccatttacagaagaaataaatgagactctccctgagtaagcagatattagaaatattagacaaaaactttatataactgtcgtaaataaacttaaagagctaaagaaacccaagagaatgacatataaataaataagaaatatgaattttttaaaaggtacaaaaaaattctgaggctgaaaagtacaataactaagtaaaaagttactttttacttagggttccaatagaagatttgagcagctggaaaaaagaatcagtgaacttgatagatcaaatgaaatgattcagtctgaagagcaggaaaatgaaagaatgacaacaaaaaagaatagagcctaaagacctgtgtaacaacatcaagaatgcctacatacagaatcctggtggggagtgaggggcaggaagact

SEQ ID NO: 10254 - DNA, 531 bp, Homo sapiens
  MAP TO AC006022.1; EXPRESSED IN BRAIN, SIGNAL = 0.41; NT HIT: AB014016.1, EVALUE 5.00e-01
gcaaggccgtctaaattgtccttccagtgtaaagtccattgaatttttctccctccctttcttttctacctcagggacatggagttaattaataacacgactcttgtcaattcacgacatcctgccatcactggtccttgagaggccatcttttattaactaatgaatcaatagaaataatataaaagatgctgaagaaacaaatacactcatgacacccagagcacgacggatacttatcattacctgcgttgttctcatctgccatgtccttgaccttcccattcccaggtaactgctgacctgaatcgtagcttcattttcttgcttttagttttataaagctttaccaaagctccattttcctaccagaaattatgacttcttggtttaagttgtttttaagcttatacaaagattttatgctatctgtcatcttttgggagttaacctttgcactcgtattcccattgttaagatttcatgtgtagtccattgcattgttgagaatgtgaatgaaatgattgccca

SEQ ID NO: 10255 - DNA, 558 bp, Homo sapiens
  MAP TO AC008488.6; EXPRESSED IN BRAIN, SIGNAL = 0.77; EXPRESSED IN FETAL LIVER, SIGNAL = 0.97; SWISSPROT HIT: Q13418, EVALUE 3.10e-02; EST_HUMAN HIT: BF034083.1, EVALUE 2.00e-01
atggaattgtgggtcaaaggcttctgcacattttaaaatctttgagtatacaatattgctaaaatgatctcccagaaatctttcaccattttaccctcacagaggtcaaatggaatttcttttgttgctccatgttttgctagcaattggtagcaaagttagaacaaggagcatggatgatttttttcctactggttcaaaaaactatacctttttatttaaaacttaaaaatgtataaatttcacttaaaactgcagatacagtggtccacactctggaccgcagctttaaccaaaatgaaaacttccagaaactccattgcagcccttactattgaaggagcatgctctcctggcacaggggtttctacgtcgagtgtgtctctgttgcaggggggaaacactgccttgcacctcgctgcgaagcatggtcacagtcctgcagtgcaggtgctgctagcccagtggcaagacataaatgagatgaatgaggtatgtggaagtgctcgttattgccataggacttaaatgtggaagggttggaggaatggctttcaa

SEQ ID NO: 10256 - DNA, 593 bp, Homo sapiens
  MAP TO AL109764.2; EXPRESSED IN HELA, SIGNAL = 2.5; EXPRESSED IN BRAIN, SIGNAL = 2.8; EXPRESSED IN PLACENTA, SIGNAL = 2.9; EST_HUMAN HIT: N73172.1, EVALUE 1.00e-121; NT HIT: AL163207.2, EVALUE 7.00e-16
atgggagacaaccaagcatctgtaaggaaaaaaaaaaaaagcagagaaatagaaacatgtgctgctcccaaacatttcttaggccatctcctaaatcccagtattttcattcaccaggtctggaggggacattagagattcttccattctgaccaacacgctcagaagaagcagtgtgaagctgttttcagggagcccatccaccacttctggagacactcgcttttcaggtgcaccgtctttgtggaatctgtctcagctccccaggcagagagcaggggctcctcctctatgttccagagcccttcttcccagagctcttttgctatgtgccgcaattgcattattattttttacatgtccatgagcactagttgataagacgacaagaaccgtttgccaatgtattgcaatggactgaatgtttgtgacccactctccaaaattcttatgttgaaatcctaatccttgatatggttgtattaggaggtagggcctttgggaggtgattaggtcatgagggtggagcccttatgaataagaatagtgcccttataaaaatgaccccagagagctctctcctctttctgcca

SEQ ID NO: 10257 - DNA, 516 bp, Homo sapiens
  MAP TO AL109797.18; EXPRESSED IN LUNG, SIGNAL = 1.6; EXPRESSED IN HELA, SIGNAL = 1.7; EXPRESSED IN FETAL LIVER, SIGNAL = 1.7; EXPRESSED IN BRAIN, SIGNAL = 1.3; EST_HUMAN HIT: AU133527.1, EVALUE 1.00e-125; NT HIT: gi14764091, EVALUE 1.00e-125; SWISSPROT HIT: Q93008, EVALUE 3.00e-40
ggacaagctttcacctgtttggtaactctgagagaatagaccaagtcatagtatttatctattgttttaatattagaagcaacctttgctggttctctccagcagtagaggaagatctttgtcttttttttttggttcaatgagactcatccttttactatagagaacaagttattgacttaatagtcataggtttttttgttttattttaggtatgatgcattgtgtattctccttcgtcacagcaagaatgtacgtttttggtttgctcataacgtcctttttaatgtttcaaatcgcttctccgaataccttctggagtgccctagtgcagaagtgaggggtgcgtttgcaaaacttatagtctttattgcacatttttccttgcaagatgggccatgtccttcaccttttgcctctcctggaccttctagtcaggtaattgcacagctttctttctaaatgatgagatgtttacaaataaattgtgtttcctggaagtcgaagtcacaagca

SEQ ID NO: 10258 - DNA, 581 bp, Homo sapiens
  MAP TO AC008625.4; EXPRESSED IN FETAL LIVER, SIGNAL = 0.7; EXPRESSED IN BRAIN, SIGNAL = 0.41; SWISSPROT HIT: P34678, EVALUE 8.00e-12; EST_HUMAN HIT: BE273893.1, EVALUE 1.00e-122; NT HIT: gi14734400, EVALUE 1.00e-122
atgcagcaggtgggaaatacagatcatgtcatttcacccattctgaacatgagttacatgctgttaatctgaattttaaattgtcactgcataatataaagatgaaaggtaaaattcatgctaataacttaaagttttaatttttctacactgagaacactaactaacaagtaaaaatacaccatgacaaggctagagagagaccaggaaagaaaggaaacgattttatattcacgcctttcctccctgcactgactttctaccttttgaacatgggatctgcatttgcattttgcacacccattaaattatggagccagccctgccctccagactcacctccccccaagctgcagccgggggctccacgggtgggtagaatttgggcaggtcccaggctatcttcgtcataaaccacttgaaactcttgcagttaagggagctgcggagctttttctggactgcgacatccccagcggagaggtggcggtattcaggccggcgctggtaaatgtactctgcgtactcatccatccacacttcggccacccgcttaaggttctatggggcaagaagcaatg

SEQ ID NO: 10259 - DNA, 573 bp, Homo sapiens
  MAP TO AL109772.2; EXPRESSED IN BRAIN, SIGNAL = 0.57; EXPRESSED IN LUNG, SIGNAL = 0.55; EXPRESSED IN PLACENTA, SIGNAL = 0.56; SWISSPROT HIT: P48302, EVALUE 6.30e-01; EST_HUMAN HIT: BG220582.1, EVALUE 7.00e-32; NT HIT: gi14771057, EVALUE 7.00e-22
tacatagggtgccgcttctccagctggaaacctctgtggccagctgcaccttctgcctaagtattgctcatgcccagtgggctcatcccacccacttggcccgacaggctaagctcagttcccattaccagtccagatcccacatctgccaagtgcgagccaggcacagagtggagaggggtgtgtgggtgaatgagcgtggggtccagccactgcacacagcaaggcactctgactgctgcggcagggcaggcagttccaggtatgagcacaagtgccagctccatgcatggccgtggctgggccatatgtattgcatgtgacttccactgaggacacccatggctggacaaggagaacatggtggcgccagaggcttggatattccaagaactacaaagcctcaaagagaatgtcacagctctggcttggggagcccctaggtctgggcttcacaaagggcctcagctcttctcgccttctcattgcccgcaatgtggtgagcagggagcatgtttcagccttgtttgtgttacagcttttttagccccaccattcagtgggtcccaagtt

SEQ ID NO: 10260 - DNA, 584 bp, Homo sapiens
  MAP TO AC016594.5; EXPRESSED IN BRAIN, SIGNAL = 0.42; EXPRESSED IN FETAL LIVER, SIGNAL = 0.93; SWISSPROT HIT: P38110, EVALUE 1.30e-01; EST_HUMAN HIT: AL529336.1, EVALUE 1.00e-103; NT HIT: gi14781340, EVALUE 1.00e-103
ttttgcacgcatcttgagacacaggcagaaatcatagttgtggaggtgccaggatgaattgtcagggaatgtaaagtaattgctacatcctgaattggggatccaagcaatggtcctagacaagggaaaaaaaattgtatcatactctgctagatgtgaagtgagaagtaactgagaagtgcaaaggaatagggagaaaacactaacaaagttaggaaaaagactgaaataatctgtaatataaggagtgattaaatggttgagtgggatactaatgcttactctcatttgagtgtcttaccttggagacatgcgctgtgaattccattttcaatggcctcttgggagaccttcaaaaggccttcattgatactttcagcatactcaaactcaatcacaggcataacagatgatgtttcaattggccttgcttccacttctacagtcacaagatgccttttgtctcctaaagttctatctaaggtatctgtaaacaaattgaatatggcacctcagagattaattctggaaaggtatcaaggtactataaacagcaaaattatcatcaacaagctcagggtctc

SEQ ID NO: 10261 - DNA, 547 bp, Homo sapiens
  MAP TO AC010514.4; EXPRESSED IN FETAL LIVER, SIGNAL = 2.3; EXPRESSED IN BRAIN, SIGNAL = 2.1; EXPRESSED IN PLACENTA, SIGNAL = 3.5; SWISSPROT HIT: P23961, EVALUE 2.60e-01; NT HIT: AF109718.1, EVALUE 0.00e+00; EST_HUMAN HIT: BI906728.1, EVALUE 0.00e+00
gattttcctaccctggcctcccaaagtattggtattacaggcatgagccattgtgcccaccgtctctggttcttaaccttctgcctccctcttccagttttaaagaatgcttgtaattacatgggctctcctagatactccaggataatcttgttttaaggtcagctgatgagcaacattaattttatctgcactcttaattcccccttcctatgtaattgtgctgtgtaacataggacatgagcaattggtggcggtgggggttattactttggccaccacagtaactattttatgccaggtactcagctaagcactggtgaattaagcatgaataacacacactccttaatctccatccattcatgggaggagcacttcacctgccatgctcctgagaatctcgggagtcatagaagtcttctatgaggaggtgatgccaaagcggacaagtgacagaggagtcaaagctagctaggaagagagtagaggtttaaggggaagcatattataagcagaggatattacccacttcagagactcccag

SEQ ID NO: 10262 - DNA, 539 bp, Homo sapiens
  MAP TO AF274855.1; EXPRESSED IN HELA, SIGNAL = 0.74; EXPRESSED IN BRAIN, SIGNAL = 1.4; NT HIT: AF314199.1, EVALUE 5.10e-01; EST_HUMAN HIT: AA491464.1, EVALUE 1.00e-05; SWISSPROT HIT: O67240, EVALUE 2.30e+00
tcctgggaacactgaggaagaagcccctgggggagtaaagcacaggagagctacggccaagctccatgttttcagaagatcccttttcctgcagcatgctgagaggacaggagagtggcaaaagtagaagtgaggacaccagagaggaggcagttgcagaagtccaggtgagagatgattataacctggacttaaaaagtgccactaaaacagatggtgagaagggattaaagctaagagactggggagaggtagaatgtcctactcttagggactgattggataggtgtggtaaaggagagagaggtgtcaaaggtgattctcaggtttgttgcttagggagcatagtggacgggggccactgggggtcaaaaagccctgggaagaagatcgagagttcagttttggacattgaggcattttctggtacatttaagagaaaatagctagtagacaattggttatataggtctgaagctcagagctgatgttttaaccagagatagaggttgaagtacagtagagaaggaggggccaac

SEQ ID NO: 10263 - DNA, 501 bp, Homo sapiens
  MAP TO AC010168.6; EXPRESSED IN FETAL LIVER, SIGNAL = 1.7; EXPRESSED IN LUNG, SIGNAL = 3.6; EXPRESSED IN BRAIN, SIGNAL = 2.5; EXPRESSED IN PLACENTA, SIGNAL = 1.9; EST_HUMAN HIT: H88396.1, EVALUE 0.00e+00; SWISSPROT HIT: P52177, EVALUE 2.40e-01; NT HIT: gi9635487, EVALUE 0.00e+00
atcctataaaacggccccacccttatctccctttgctgactctcttttcggactcagcctacctgcacccaggtgaaataaacagctttattgctcacacaaagcctgtttggtggtctcttcacacggacgcgcatgaaatttggtgccatgactcggatcgggggacctcccttgggagatcaatcccctgtcctcctgctctttgctctgtgagaaacatccgcctacgacctcaggtcctcagaccgaccagcccaagaaacatctcaccaatttcaaatccggtaagcggcctctttttactctcttctccaacctccctcactatccctcaacctctttctcctttcaatcttggcgccacacttcaatctctcccttctcttaatttcaattcctttcattttctggtagagacaaaagagacatgttttatccatgaacccaaaactctggcgccggtcacggactgggaaggcagccttcccttggtgttta

SEQ ID NO: 10264 - DNA, 533 bp, Homo sapiens
  MAP TO AC025436.2; EXPRESSED IN BRAIN, SIGNAL =   2; EXPRESSED IN PLACENTA, SIGNAL = 0.99; EST_HUMAN HIT: BI753524.1, EVALUE 1.00e-114; NT HIT: gi14861872, EVALUE 0.00e+00; SWISSPROT HIT: Q9Y5I1, EVALUE 1.00e-38
ccttgccctcagacttgaacaaacaactcgtgatttttctggggaggttcagcctgcctatgcagtactcctgtactctaccagcagtgtggcatcaagagcatgtgttgaccctgttaatgatttgtaatgttttgtctttcagaaccagaggcaggagaagtgtcccctccagtcggtgcgggtgtcaacagcaacagctggacctttaaatacggaccaggcaaccccaaacaatccggtcccggtgagttgcccgacaaattcattatcccaggatctcctgcaatcatctccatccggcaggagcctactaacagccaaattgacaaaagtgacttcataaccttcggcaaaaaggaggagaccaagaaaaagaagaaaaagaagaagggtaacaagacccaggagaaaaaagagaaagggaacagcacgactgacaacagtgaccagtgaggtcctcaaatggaaacaagccacttagccagtttttgtaataatggcaaatctctcccatgtagcaattccctgct

SEQ ID NO: 10265 - DNA, 575 bp, Homo sapiens
  MAP TO AC004224.1; EXPRESSED IN BRAIN, SIGNAL = 0.72; EXPRESSED IN LUNG, SIGNAL = 1.7; EST_HUMAN HIT: AI086196.1, EVALUE 0.00e+00; SWISSPROT HIT: Q9Y2N3, EVALUE 2.50e+00; NT HIT: gi15319200, EVALUE 1.00e-130
atggacaggaagccacagtccctctcccccagaagttaaggatataaaatcgtccagggagggtggccgccgttgatgtagaggacataggtgaagccatctttgaggacccctcgaatggagtagtaataggggagatagtggtgctgcttgaagtctctgttttcatagaagtttattgctgtgttgttggtggtgaggacatgcaggtaaatggctttgcagtggtcctgggcggtggttgatatgtgatcctttaaactttcaagtaagagggaaccttggggagaagaggtaaaggtaatgcaggcagagcagttaggaaggaaggatgactgggctaggatgggggctttgcatgagtctctcggagatgtctcggcccaccgtatcagagaccagcctttcttcaccaccactgtcaaagtccctaaaatctcatggccagatggagcctggtagctacagactgctgggagggactgcagaggtggcctggtagcgccctcccatgggctgggcccgcatggagactccctttcagacaacaaacagggtaaatgtgagcccaggaa

SEQ ID NO: 10266 - DNA, 543 bp, Homo sapiens
  MAP TO AF196971.1; EXPRESSED IN LUNG, SIGNAL = 4.1; EXPRESSED IN BRAIN, SIGNAL = 2.4; EXPRESSED IN PLACENTA, SIGNAL = 2.6; EXPRESSED IN HEART, SIGNAL = 4.8; EXPRESSED IN FETAL LIVER, SIGNAL = 3.5; EST_HUMAN HIT: BF981688.1, EVALUE 1.00e-106; NT HIT: gi14760227, EVALUE 1.00e-106; SWISSPROT HIT: Q9UBN7, EVALUE 7.00e-44
gatcctgattgtggattgggatgtccaccacggtaatggaactcagcacatgtttgaggatgaccccaggtaagggctgcagtcaggggccgcagtgtgatcagggaggcgggtgagcacctcaggggtactggagcccctaaccagccatggtccgcttcccaccccctccctggcagtgtgctatatgtgtccctgcaccgctatgatcatggcaccttcttccccatgggggatgagggtgccagcagccagatcggccgggctgcgggcacaggcttcaccgtcaacgtggcatggaacgggccccgcatgggtgatgctgactacctagctgcctggcatcgcctggtgcttcccattgcctacgaggtacagctcaggatagatcgcaggacgtatgtgacacgcctgtgcaggtggcagcctggacctgcctccttggcatgtgtgtgtgtgactaccatgtggctgatgatatgagacagcgcatgggtgtttaatgaggctaccagggcagttggtggctgtgatcaccttgtg

SEQ ID NO: 10267 - DNA, 598 bp, Homo sapiens
  MAP TO AC044786.2; EXPRESSED IN BRAIN, SIGNAL = 0.57; EST_HUMAN HIT: AW770582.1, EVALUE 8.40e-01; NT HIT: L27833.1, EVALUE 2.30e+00; SWISSPROT HIT: O57424, EVALUE 1.00e+01
tgcctatgttttgaacctggttcttcaattttccaatatctttgggtgctatcccaatatattccaggtaaattatttttttggttttggttaaccaggacccatttttgtttatcataaccaagaaagctgactgagtctcaaaatcttcaatgtaaagaagtgtatcttcagaaacctagatttcataaagacttgtgaaactaaaatttagaagaacaacttcagctttcaaagaacatctggaactttccaataacttccagccctatcaaagaaaataattttggtcctggaaggtatcgagggaaccaaatcggtcctccatgaggcagccgtgagtatactggctgcccacgccctgcaggtgcacacctttcccaaggactttagaataagtggcggtcattcatgacatgagaaaacactttcatttctcactgccatttttcaaggagagctatgactgtccttcaaaagtgtctccaacatatactcagaaaggtgtgtgtgtttgagaatcaacattgagtagaatatgacctttattaagaacaagacttgcagagttggctggagagaaagaggcccacaattg

SEQ ID NO: 10268 - DNA, 558 bp, Homo sapiens
  MAP TO AC008145.1; EXPRESSED IN BRAIN, SIGNAL = 4.8; EXPRESSED IN PLACENTA, SIGNAL = 4.8; EXPRESSED IN FETAL LIVER, SIGNAL = 3.1; EXPRESSED IN LUNG, SIGNAL = 6.5; NT HIT: AF263461.1, EVALUE 0.00e+00; SWISSPROT HIT: Q9QXC1, EVALUE 1.60e-01; EST_HUMAN HIT: T57883.1, EVALUE 0.00e+00
tgggaggagaatggactgagtgtgattcgaatccgagggcatgggacggcgctcagtgcctgcgaaaggagaaggtgcggacggcagagcgtgacccatttacatttataggagaaacagtggaccagggagcgacacactcagcttccctacttcaggcaactggccgactccgaccaacagagaaatcgggaacatcatcatacggcttttcggtcacctctgcggacgctcagtcccactccccctccccctcagcgtcgtcctcgtgcggcgcctccaggtcgttgaggtggaagttggccatcatgtcgcgcacagccagcatcagcctgttcaggccatggttgcggttcagacccccagccactccttcctcgggcctctccccctgcagcaaggggacatgtctgagaagggggctgtctgtgctgggactaggggcccggggcccaagcaggaggcactgtggagcccgaggtggcccttgccccagcaccggaccctgaaccctccccaggtccctgtgaggaggaagctctcaaaaccaaatgccgt

SEQ ID NO: 10269 - DNA, 517 bp, Homo sapiens
  MAP TO AL031716.8; EXPRESSED IN FETAL LIVER, SIGNAL = 1.4; EXPRESSED IN BRAIN, SIGNAL = 1.6; EXPRESSED IN PLACENTA, SIGNAL = 7.3; EXPRESSED IN HEART, SIGNAL = 1.5; NT HIT: gi14777067, EVALUE 2.00e-99; SWISSPROT HIT: P05997, EVALUE 6.00e-03; EST_HUMAN HIT: AL562131.1, EVALUE 1.00e-94
gactctcctcctaccctggcgtccccaacccacacgggcaggctgtggggctggcaccacccgactttctcctgcccttgggcaggggcccccagctgagccacctaccgaatctgggctcgggccgggcccctcggatgtccctctgcatctgcagaactcggtccttcaggctgcctggcccagaggggaacaagaatcccagggtggcgtcatcaaagcaggccaggctgggcaccatagtcagccagttcaggaagctgaggttcccgctgacgatgaggacggcctgtggagacgccgcagctgagtctcgtgcaggggctcgtgtggggcccctgggcagctggcgcctctcttcctggagcagggaggggggagggaacctgcacccagctctgcccttgctgtccctcgggcccagcatcacaactgaaacccagctgtgccttcatggaggggacagcagatgcctcagaggtgccttccggcaggtgcttccagaacattcctccca

SEQ ID NO: 10270 - DNA, 542 bp, Homo sapiens
  MAP TO AC002055.2; EXPRESSED IN BRAIN, SIGNAL = 1.3; EXPRESSED IN FETAL LIVER, SIGNAL = 2.2; EXPRESSED IN HELA, SIGNAL = 1.2; SWISSPROT HIT: Q9UBK7, EVALUE 2.00e-11; EST_HUMAN HIT: AI905466.1, EVALUE 0.00e+00; NT HIT: gi14725107, EVALUE 2.00e-46
atggtcaatggacttctgcctcatcaagtccaggcccatcagctcctcccctccctgccacccatgcccatgcactgtcccggttctctccatcacacctgcagtaagcccttctcttcacagcttccctttaccacctagcgccctgaccttgctagctacctctgcagtcaaccacaccttcacaacattggtaccatcagcagccgagacgaaatacaggggcagggagaacttcttggcaaaattgaagcttttttgggtcacgtttatgtctgctgtagagagaaggtaggacattggtctgtctgtcaagggaagggaagaaggtttggaggggggggccactggaggccttcattccagaaagtgggataggcagggatgattgggaaacaggtcctagaaagagctcagttaatagggatctgtgtcttggaaagagggcaggtcggcttagctggcttctttataaggtgggaagaatgcaagcaaccaaccaagggttgtatcttatcgtgggagggaggaccaatcactga

SEQ ID NO: 10271 - DNA, 579 bp, Homo sapiens
  MAP TO AC012055.8; EXPRESSED IN PLACENTA, SIGNAL = 2.1; EXPRESSED IN FETAL LIVER, SIGNAL = 1.6; EXPRESSED IN BRAIN, SIGNAL = 1.7; EST_HUMAN HIT: AW993305.1, EVALUE 3.20e+00; SWISSPROT HIT: P03080, EVALUE 3.20e+00
ggactggggaatgttgtgagcttgtggtctatttccagtattttcctatctgaactttcttttgattgaatttccctattttagctacaaaggcaaaagtttaagtttgccaaagagtttcttgggaaatgaaatcctatggtcctaatgactgtccagcaaattctgaagcttaactcaccatgatttttgtgttttttgaaggtgtgttttgcttggtgaaaagtgcttttgccatcaggtgccccagatgtgtctaagtgttggcaggtgtctgagtcagcaggtgaacaaacacatttatgccagttggaagttattctgtggatgaggtcagctggtggctgcttagttagaatactcctaggaccttttaaatacagttggatggggatggggaagctaggatggcaagaaagggaatcatttagtggctgggaatcaagtaagaatgttcatacatgtgtggaatctgacctaagtcctatattaggatggagaataggagatagagtggtttgatgggagttaactctaccaatttccagatggttagtttggtctttggggtcatttcct

SEQ ID NO: 10272 - DNA, 583 bp, Homo sapiens
  MAP TO AC012085.4; EXPRESSED IN FETAL LIVER, SIGNAL = 1.7; EXPRESSED IN BRAIN, SIGNAL = 1.3; EXPRESSED IN PLACENTA, SIGNAL = 1.5; EST_HUMAN HIT: AI863385.1, EVALUE 0.00e+00; NT HIT: gi14763467, EVALUE 0.00e+00; SWISSPROT HIT: P78560, EVALUE 9.00e-41
ggaccccattgtgtgaaaagcagaaacagaaaagatgattcatcttcattgttgttcattatgttaggaaacattcaaaattaacctggcttggcttaatcagtgaattaaataccatgacctggcagtctgctatggtttaaagatgtgcttgacctgaaggaacttacattgcagtgacactgtctttagggccacatcaacatgtctgtaatttgagctgtgattttggctctttccagggagaaatggaggccagagacaaacaagtactccgctcacttcgcctggagctgggtgcagaggtattggtggagggactggttcttcagtacctctaccaggaaggaatcttgacggaaaaccatattcaagaaatcaatgctcaaaccacaggcctccggaaaacaatgctcctgctggatatcctaccttccaggggccctaaagcatttgatacattcctagattccctacaggagtttccctgggtcagggagaagctgaagaaggcaagggaagaggccatgaccgacctgcctgcaggtaggcctcagaaagatcactttgaaccagctccaaa

SEQ ID NO: 10273 - DNA, 600 bp, Homo sapiens
  MAP TO AC007570.23; EXPRESSED IN BRAIN, SIGNAL = 1.1; EST_HUMAN HIT: BI821961.1, EVALUE 1.00e-95; NT HIT: AF245511.2, EVALUE 4.00e-14; SWISSPROT HIT: P53119, EVALUE 1.00e-01
ggagaggcagaggtcaagtgccttgcaaggagcaagcccagctcttcacttcttgaatctggctgctgtcagccctgctgttgctccccttaaataccttgaacagattgagtgctgggtcaaaaactctcttgatgatctcttccaagaactccttaaaaacaccgtcttgatcaatccctgcttcgtccaccccgaggtcattgacaaacttcacacggatgacccccttcatggcgtgctgggagagctgcctaagctgctcgtagccgtcctgccaagagcagaattacagcccattaggaagcccaaagccttatgcacacaattcggggttccctctcctctgtgcgaagctctcccagcatcattaccaaatgtgcaaattatgaaacgtggatgcatgacaggagccgttctcacctgcttttgaatgagtgctgattaaaagcaaagattcatttggggatgtgacagtatcactccttggcaaggggagactgacctcaaggggacagagcagtgagatggggaagttagacaaaatgagtcatgacaagctcctggccatcagacaaaggatgaaagaaaccgggacaa

SEQ ID NO: 10274 - DNA, 578 bp, Homo sapiens
  MAP TO AC008626.5; EXPRESSED IN BRAIN, SIGNAL = 0.82; EXPRESSED IN LUNG, SIGNAL = 0.88; EXPRESSED IN FETAL LIVER, SIGNAL = 0.76; NT HIT: AB026898.1, EVALUE 0.00e+00; SWISSPROT HIT: P26808, EVALUE 6.00e-31; EST_HUMAN HIT: BF996761.1, EVALUE 0.00e+00
tttcccaggtacggtgaaacagtcaggccagtatatacactaagtaaactcagaaagccaatacccatttagtaagatggacacctgaagcaaaagaggctttccaggccctaaagaaggccctaacccaagccccaatgttaagtttgccaacagggcaaggcttctctttatatgtcacagaaaaaacaggaatagctctaggaatccttacacaggttcaagggaccagcttgcaacctgtggcatacttgagtaagaaaattgatgtagtggcaaagggttggcctcattgtttacaggtagtgacggcagtagcagtcttagtatctgaagcagttaaaataatacagggaagagatcttactgtgtggacatctcatgatgtaaatggtatactcactgctaaaggaaacttgtggctgtcagacaaccatttgcttaaaaatcaggctctattaattgaaggactagtgctgagactgcgcacttgtgcaactcttaacccagccacatttcttccagacaatgaagaaaagagagaacgtaactgtcaacggtgattgctcaaacctatg

SEQ ID NO: 10275 - DNA, 596 bp, Homo sapiens
  MAP TO AC009003.7; EXPRESSED IN HEART, SIGNAL =   2; EXPRESSED IN LUNG, SIGNAL = 2.5; EXPRESSED IN FETAL LIVER, SIGNAL = 2.9; EXPRESSED IN BRAIN, SIGNAL = 2.1; EXPRESSED IN PLACENTA, SIGNAL = 2.3; EST_HUMAN HIT: BG982797.1, EVALUE 1.00e-123; NT HIT: gi14757758, EVALUE 7.00e-56; SWISSPROT HIT: P13983, EVALUE 1.10e+00
cagaccttaatgagagccgccgtgcagacgtaagcctgtgatgcccccagggccactctgactccactgattacagaacccaagcccccttaaagtctccccgaaacctcagatgaccccacatgtccctgggttttgctgagctctcagacctctgctgacttcagagagttcccaccctaggatctcctctgagcccccaatgcaccactgggccccccaggggccccaagactctgtgggccccccctaagagcctcaccagtgtcaccccacaggtgcttgccttcccaagctctggcttcactgacttggcagagattgtgtcccggattgagccccccacgagctatgtctctgatggctgtgctgacggtgaggggcccaggggaccccccaagagggaggggagtggctggagatggcaggccagccccaatcccctcacctgtgccctgctccccgattccaggagaggagtcagattgtctgacagagtatgaggaggacgccggacccgactgctcgagggatgaaggggggtcccccgagggcgcaagccccagcactgcctccgagatggtgagagtgggtgg

SEQ ID NO: 10276 - DNA, 500 bp, Homo sapiens
  MAP TO AC000381.1; EXPRESSED IN BRAIN, SIGNAL = 0.48; EXPRESSED IN PLACENTA, SIGNAL = 0.7; NT HIT: gi13376061, EVALUE 1.00e-127; SWISSPROT HIT: Q60677, EVALUE 2.10e+00; EST_HUMAN HIT: AA886018.1, EVALUE 0.00e+00
tgctttagggcctttctctgcctagctgcaaaaagtttacatgcagaacagagacacacacagggagcaaatgtgactttgattagactttgaaatagactttgactagcccagagcacccagattccagtattcatgtcagaagacctttattacacatgttacaggcgatgacttgcagggagtcaggtcactggaatcaatagttaacaagatggttgtcctttggggccacaggtgtgttgctaacttccacttttcttcctgatttgctttgctttccggggtttgaggatggtgtagtttacgtacactgtatactgatctgacaggaaggggacatagaatgcccgcagcagctttgaagatctgaaaaacaagggataaaaaaaagaattttatcacttgggagaatttactaatggtactaaatgtgattaaaataaataaactaatctgtagtaaggattatattttattcaagtggcacagaaaagcct

SEQ ID NO: 10277 - DNA, 512 bp, Homo sapiens
  MAP TO AC010387.4; EXPRESSED IN BRAIN, SIGNAL = 0.62; EXPRESSED IN FETAL LIVER, SIGNAL = 0.48; EXPRESSED IN PLACENTA, SIGNAL = 0.55; EST_HUMAN HIT: BG702413.1, EVALUE 4.60e-02; SWISSPROT HIT: Q39287, EVALUE 3.60e+00
ccccacacgtgttctttaggtaagtgattcttaaaaagcaatccagtcgcacttttggttgacatatggctcttgatgtatcagttggcaatggctcctcctgtaccatgatattactgtcactgtgcaacctaccacaagatctggtaaggggaagacttgatcttcagctggatgatttgaagaagcagaatatctatagaagtagtaccagagcagatctgatattcagaatctttagagtcctatttctgacaccaaaaccagaggtctcaccgctgatgtcttttcctcaagtttattgtgtaagaatcagtggtaccagtcttaatgagcttattcaactacacgtgtaactcatcagaaatgagattattaatattagtataaataattgaccaagtaaatcacaacttagtaaaatgagaacaaaattagaaagtttaaactgagatctttagctgcatcatggtgtctgtttttccctactgtttcattcagcaatttgagga

SEQ ID NO: 10278 - DNA, 566 bp, Homo sapiens
  MAP TO AL109797.18; EXPRESSED IN PLACENTA, SIGNAL = 2.2; EXPRESSED IN BRAIN, SIGNAL = 0.72; EST_HUMAN HIT: AU140296.1, EVALUE 1.00e-121; NT HIT: gi14764084, EVALUE 1.00e-121; SWISSPROT HIT: Q93008, EVALUE 2.00e-39
gcgggtgattggataagaagctgcacagtggtgcctgttgctgtatattttagattgttggaagatgaagtgcaaactcagaacactgcttcaggttgctgtagggttagtcgaattatgggtggtagaattattgccagggttgctttgtcagcataatagagtttgaaaggacagaatggccgtgttcatgctacaagaatctttccttctctcagcttgtgaagcacttactgagtgggaatatctgccacctgttggaccccgcccacccaaaggattcgtggggctgaaaaatgccggtgctacttgttacatgaattctgtgattcagcaactctacatgattccttccattaggaacggtattcttgccattgaaggcacaggtagtgatgtagatgatgatatgtctggggatgagaagcaggacaatgaggtaaatttgagttaccatttctgttttctgtgtttcaagttatgataccagatactattctctcttaagagagtgttatactttcatcaaacgtattaaagtatatttgaaagttagggatgggccg

SEQ ID NO: 10279 - DNA, 567 bp, Homo sapiens
  MAP TO AF230666.1; EXPRESSED IN FETAL LIVER, SIGNAL = 0.53; EXPRESSED IN BRAIN, SIGNAL = 0.65; SWISSPROT HIT: P22555, EVALUE 3.60e-01; EST_HUMAN HIT: AW662822.1, EVALUE 0.00e+00; NT HIT: gi14748787, EVALUE 0.00e+00
tctgaactgctgtttttccaactttgttttaaggaataaacatcatcctgaccttcatctctgggcttgttccgggaagcgaaaagaccaagatcaaataatagctggggtggagaaaaaaatagctcaagacacagttaatcgagaagaaaagaaatatgtacagaaccataaagaaccacctcgtttgcccctaaaaatggaaggaacttatataacaagtgagcatagctatcaaaagccacaaagttttggtcaggactgtaaatctctcgcagaccctgggagctcagatgatgatgatgttagtagtttggaagaagaacaagaattccacatgagaagtaaaaacagtttacagtactcagcaaaagaacatggaatgcctgaaaaggtaaaactagttcatttttctttgcttggaaactatgagagaagaacaaaggaaaattttataaaataaggcatactgaattcccagattttagttgtatttccaagttccccagtaccttgttaaagtaaggagatttttttgttttctctacaggaaaacactggccattt

SEQ ID NO: 10280 - DNA, 546 bp, Homo sapiens
  MAP TO AC016594.5; EXPRESSED IN LUNG, SIGNAL = 1.5; EXPRESSED IN FETAL LIVER, SIGNAL = 1.1; EXPRESSED IN BRAIN, SIGNAL = 0.58; EXPRESSED IN PLACENTA, SIGNAL = 0.77; SWISSPROT HIT: P40078, EVALUE 4.00e-23; EST_HUMAN HIT: BI256608.1, EVALUE 1.00e-105; NT HIT: gi14781342, EVALUE 1.00e-105
aaagataagcgaaaacgaccactactcatcactgttaacattttggacgtaaacattcttatgttgtgtttgacttactagggcttgcgtttcaagaaagcccatgtaacacatcctgaactgaaagccaccttttgcctaccaatacttggtgtaaagaagaatccctcatccccactgtatacaactttgggtgttattaccaaaggtactgtcattgaagtaaatgtgagcgaattgggccttgtgacacaaggaggcaaagttatttggggtaagtgaatttttgaatacagggctgctgtgttctgcagtactaatagaaatactattcaagttgatgtattaataaaatatacagcaaatttttttaatgcagtagagctaaaacactgtaaatcagatgtaaatatttagtaaaaaatactttatagaaaaagttgttataaatacaattgttttaaaatttagcttactggttttagttacataaggtgtaatacattctgctagatttatttttatcctttttagccaggcacagca

SEQ ID NO: 10281 - DNA, 589 bp, Homo sapiens
  MAP TO AC009006.5; EXPRESSED IN BRAIN, SIGNAL = 1.8; EXPRESSED IN PLACENTA, SIGNAL = 1.9; EXPRESSED IN HEART, SIGNAL = 2.4; EXPRESSED IN FETAL LIVER, SIGNAL = 1.4; SWISSPROT HIT: P10272, EVALUE 5.00e-11; EST_HUMAN HIT: AA883982.1, EVALUE 4.00e-06; NT HIT: K02918.1, EVALUE 3.60e-02
taaaggcaacccaaaccttgatatgatgtcttttagtagcacctttgtcacctcttgtgccttttcagttctggtggggaaggcctcaactcaccccgagaaggtgaaacaaacactagcatataccagtaacctcctgctcaaggcaactcggtaaggtctacaagcaggttctcacaaggcacagctcccatttcctgaatttctgggggtcgagtaggtccttgttttggattagatattgttcgcaggatagacattgttcgcaaacagcacgggtgatggcagagagccgtggcacatagaagtgttgacctatcaaagtctctagggccgtgcttccagcatgtgttccttgatggatctgcttcacaaaccttggggctattgtctctgggacagctagcctcccgtcagagaacagccaccatccacctttaatatattttcctgtttcctggccaaaccaagctttttcaattgaagagtaattgggtacctctggcaaagggggctctataaagagaggcattgctagagttatttcttcaggtaaaaccttgctcattgctgcccacctaacttcttg

SEQ ID NO: 10282 - DNA, 564 bp, Homo sapiens
  MAP TO AC005197.1; EXPRESSED IN BRAIN, SIGNAL = 0.4; EST_HUMAN HIT: AW732756.1, EVALUE 4.00e-83; NT HIT: gi14766943, EVALUE 2.00e-83; SWISSPROT HIT: O14579, EVALUE 1.00e-24
tgtactcaggtgaggggtcccacttgcaggtcccgggccaggcagctgaggtgacaacaaggacggctcagaccactgaggcccaggctgcccagatgccccatttctgtgaggccggaatctggatttctttgcaggtgagatccctgctttgtggatctcgctgctgactgggccttagaagccctgtggggccacacgcacacccagggggtctctgctacacttgtttctgtccgccctgaccccaccctctggccgcctggccttccctccgtccccactctgggacaggcttgtgcctaccttgtctagcgcctcctgcagcaggccctcagcggcctcccagcggccctgggccatgtggcaggccgcctgcccattgagcagcagcagggtgggcgagcacttgtcagccatctcctggaagatgtagtaggcatcctgcagcttctcaccaccctgcagggagggtcccgcatcattgcctgtgcccctgctgcccggcccttcccccgccagccccctcccctagcgggggggactccagcactgcacagagac

SEQ ID NO: 10283 - DNA, 600 bp, Homo sapiens
  MAP TO AC012331.9; EXPRESSED IN HEART, SIGNAL = 1.3; EXPRESSED IN BRAIN, SIGNAL = 1.1; EXPRESSED IN PLACENTA, SIGNAL = 1.4; EST_HUMAN HIT: H62289.1, EVALUE 0.00e+00; NT HIT: L29162.1, EVALUE 0.00e+00; SWISSPROT HIT: P01717, EVALUE 5.00e-29
ttttccccaagtcacactccagcccagaaaacaccaggacctactggacctgccaaccccgaatttattattgatccaccttctgtagggcctccgtagagatctggaaggaaggaggcctcagagtctctgatctgggtgtactgggccagacctgttcgtggctttgtccacagtcctcctggggctggaggaagaaggtgacacagatggcaaggggtttgtgtctcatttctccatctgcctgtgtcactgtgagattgttgtcagccgcagagtaacagtaatagtcagcctcatcctcaacctgggccccgctgatggtcaaggtgactgtggtccctgagctggagccggagaatcgctcagggatccctgagggccgctcactgtctttataaatcaccagcacaggggcctggcctggcttctgctggaaccaccgagcatatttttttgccagtacatctcctgagcaggtgatcctggctgtctgtcccggagacactgacactgaggatggctgtgtcagctcataggaggccacagagactgcaagaaaagacaggagagggggcttgaggacaaaggatgcattgc

SEQ ID NO: 10284 - DNA, 526 bp, Homo sapiens
  MAP TO AC010238.4; EXPRESSED IN BRAIN, SIGNAL = 0.9; EXPRESSED IN PLACENTA, SIGNAL = 0.92; EST_HUMAN HIT: BF681106.1, EVALUE 2.90e+00; SWISSPROT HIT: P16356, EVALUE 1.50e-01
tggcagagctgagcatattgtgtttctgagctgttccccagtggttcttgttctccccagcttgtggaggcaaaccttcaggtgagtcacctgtgagaggcattgggctgtgtgaagggaggacaagaacttttccagccaatgtgccccaaataggaattcattcccggggccttatgtaagctcaccctctctctcttttcttttttctttctctcttcctttttctttctggagctccaagcaaaattgccaggaaatccatgctaggtttggtgatggtgctggggcttccatgtggggtgctggtgacggtgtcagggcttgtggtggcaggtgctgggcacacagtggacaccatcatcctcacagggctgggcttggaagctcagggtgtttgcccaacgccatcagagaagctgggtctagtctattgttagcagataaagcaatgacaaaggcagcgaaagtgttccggggggtcattttgatctgtctcccccaagggggattgcttggttatcct

SEQ ID NO: 10285 - DNA, 500 bp, Homo sapiens
  MAP TO AC009086.5; EXPRESSED IN BRAIN, SIGNAL = 0.47; EXPRESSED IN PLACENTA, SIGNAL = 0.77; EST_HUMAN HIT: AV654608.1, EVALUE 1.80e-01; SWISSPROT HIT: P32718, EVALUE 5.30e-01
acggcagcatctcttctgaactccagagccattccctaccaccctctgggcaccaccatccacatctcctgctgccgcctcagccttaacctctgcaaaaccaaatccgttctttctctcgagctctgcagaagctaagctgtttcaccaggccacgattcaggaaacgctttgggattcagcttctgttcttgtgaaatgggaagaatccctgtggtgagctccagatgagagcacaaaggggaacaggggtgcccgcggctggcacgccatggctggcacgccatggcactcagtggggtcaccgccccctcctgctgtcccacctccaccctgcctgctcttctcctggaatgactccttctgccagctctcagctacccaggccagaggcccaaggctcccacatctctttagctactaattctggtagatccccttttggaaatagccctcaaatctaccccagagctactgtcaaagttcagggctccatctct

SEQ ID NO: 10286 - DNA, 591 bp, Homo sapiens
  MAP TO AC000109.1; EXPRESSED IN BRAIN, SIGNAL = 0.41; EXPRESSED IN PLACENTA, SIGNAL = 0.39; EST_HUMAN HIT: AV731382.1, EVALUE 2.00e-47; NT HIT: AF202635.1, EVALUE 2.00e-28
gagaacccggtagggagaacatcatgaaagtctggaaggtttacaccattgaagatgctgctgtttttacagaaaagctcatgcaagccatcaagcctgaaacaataaattcctgctagagaaaactgtatccagacgttgttcataacttcccagaatttacaaaagagccaatcaaggaaattatgaaagagattggggatatggcaaaaaagttggggagtgaagggtttcaagatacgaatcttggaaatattcaagcgctaatagataccatgccagaggaattaacagaagatgacttcatggaggtgagttcttctgaaccagtgctagacaatgaggaagaagatgtggaagaagcagtgccagaaaacaaattgacattagacaatctgggagaagggctcagattatccaagattgctttttatttcttttatgacatgggctttctgtatatgggcactgaaactaaagcaaatggtggaagaattggtactaaatagaaacattttgagagacatgaaaaagcaaaaaagtcagataaattaccacatattttcctaaagttacaccaactgtgcctgc

SEQ ID NO: 10287 - DNA, 556 bp, Homo sapiens
  MAP TO AC009265.5; EXPRESSED IN BRAIN, SIGNAL = 0.74; SWISSPROT HIT: Q03410, EVALUE 3.10e+00; NT HIT: gi11641266, EVALUE 2.00e-96; EST_HUMAN HIT: AW295334.1, EVALUE 0.00e+00
agctctaggatcctttccaggatgaaaagttgaatcctttaatactcaaacgaaggcctttcctttttttttttttttttttttttttttatagcctacaatggttggaagaaaaaatacttggaaacaaagaaagtcacagcatcaatggaggaggttttaacaaaacttcgagaagatttggaactctactataaaaaactgctcatgcaacttgaagccagggagatcaagatgagaccaaagaatctggcaaacatcacagactccaaggtattactaaatgtatcccccttccgttagagaagttctgttcaaaacacatgctttataagtgctagtagtatcacaagatgcattaggctaactttgacttaaacttgcttaaaacaataaaaaaactcatgaccttatgtaataggaggagcattgctgaggagatacagtcagcagcttaatgttgcctttaaggggtctgatattttcttcctattattttcagtgttaatttcattgtaagactgcttctaatagtagcaatagagtggtcaagggc

SEQ ID NO: 10288 - DNA, 587 bp, Homo sapiens
  MAP TO AC000073.1; EXPRESSED IN PLACENTA, SIGNAL = 0.86; EXPRESSED IN HEART, SIGNAL =   1; EXPRESSED IN FETAL LIVER, SIGNAL = 1.8; EXPRESSED IN BRAIN, SIGNAL = 0.97; SWISSPROT HIT: P54198, EVALUE 4.00e-08; NT HIT: gi14776998, EVALUE 0.00e+00; EST_HUMAN HIT: BI833228.1, EVALUE 0.00e+00
tctcacaaatggctcaatcgtcactgctgaagcagcatggcgcctgcagcagcaggggctagtgtccaccttggggccgtgctggagacggcaggcctgggactgccttgctggccccagggcacctgggcagagctccagccctagctccgcatcgggggcttggagggagggatgagcttccccctcctgaggcaatgtcagacccaggacacagggcacatctgcccagggagctgggctggcgctggtgcaggacagcacatctcctgccagtgtctcctccccctacagcctggtcaggtgagaggcggtcctgcatgtcatcagcggcgagagtgtggccctgcccttgctgcagccagggcaggctggggcaggctacttgtccctcaggatgtcgagctgttcctgacactcggtgaagaggcgctggaatcggaggttctgcccgatgactggtagcagctccttcagcagctccctcttccgcagaccctgtggacacagagtgacagctgagtgcaagtgtcagtgaagagacctagattgtggggactttcctggcctggcagagaaccttgtgt

SEQ ID NO: 10289 - DNA, 565 bp, Homo sapiens
  MAP TO AC000081.2; EXPRESSED IN FETAL LIVER, SIGNAL = 0.43; EXPRESSED IN BRAIN, SIGNAL = 0.84; EXPRESSED IN PLACENTA, SIGNAL = 0.7; NT HIT: gi14776991, EVALUE 1.00e-110; EST_HUMAN HIT: BF882652.1, EVALUE 1.00e-128; SWISSPROT HIT: P53675, EVALUE 5.00e-34
caagtctccgagctcctctgagcactccagctgtggtatgccaagggacaaggcaaagttaggaggcaggtagggagcctggaccaagttttcaagctgtgcgggggggctacgagctcacaagtgtttctaccttatcttctttcagccacttctctaggagttgcttacgcccctgctgaagaaccagatggcaaagttctaaggattcaagtttattgagctgaccctggtcgagcaggattccgaagtactgcagcaatggagaagcctggccagactgagcgggtatactctggaatttctggaccgtctctctggtacgcaggattccctaataataaatggaaaaataggtcattgtgttgtaatcacaggggatcccttcactcaacttccttgtatgtaaaaacaaaaatctgccagtggaaattccacactgctctgtcatagacaaaaagtcctctaccaaggcaactgcttctatcttcaacaataaccataagtataggggaatctaggtcctccaggtggcttcacacttagggtcttacttctcccccag

SEQ ID NO: 10290 - DNA, 508 bp, Homo sapiens
  MAP TO AC010163.7; EXPRESSED IN BRAIN, SIGNAL = 0.48; SWISSPROT HIT: Q9P4C2, EVALUE 2.70e+00; EST_HUMAN HIT: AW104573.1, EVALUE 1.80e-01
tagtcacacagcccaagcacaaatgtaggggaggctgggcattggaggggagcacatggatattgggtgggcactcatggtctgggcatgtatctgtcagggttccaaattgcaagcaatggagagtgacttcaggtgtttcaagcagaaaataaatttactaaaacaatattatggagtttactgaatctcctaaaaagccagaaaactaagattaaaggtgatgtagctagaaatagcatccccaatcatgctgtagagcagctctgagatgttgctcctgggcgcagacaccatggccatccctgccaacagtgctggcactgaacatgaagtctgccacatagccatagccatagctgccccagagactggatatggttactgcattaaggacacccttgtcagcctgcagcctgtacagccccagctcctttgtgtcactcacttctgactcaaggtctaggatcagcatgtctgattgaggagcctaaatgagccatgtgct

SEQ ID NO: 10291 - DNA, 588 bp, Homo sapiens
  MAP TO AC008995.5; EXPRESSED IN BRAIN, SIGNAL = 0.4; EXPRESSED IN FETAL LIVER, SIGNAL = 1.4; EXPRESSED IN HELA, SIGNAL = 0.7; SWISSPROT HIT: Q60857, EVALUE 1.90e+00; NT HIT: AF074981.1, EVALUE 8.80e+00; EST_HUMAN HIT: BI559610.1, EVALUE 1.30e-02
gtgtctgggtgcaatgtctgagtcatttgattctcctgtatgggctctgcccccagggacattattacctatcatgtcgttagtcacctaggtgatgtgaatcacattttctgcctggtccctgccagaaagaataatagtgacttatcactggacccagcatcttagtgatgtgactcacctcttttacctgggccttgcgtatttttggtattggacatattgctgggtccaacacctaggagataagagacttttaccttgaccctgactagagggggcttattgtatttctcagcatctatcttgtaggggttgtgcctttttcctgcctgttctctaccctcagggaagattgtgactgggtctggcaaccaggtcatgtgtttctccagcctgggcctagtccactgggaagcactgtgacaatattgctggtcccagaaactaggtgatgtgattctcctgcctagtctttgctttcaaggaagattgcaacatattcctgtcccagcacccaggtgatataacaatactgcttggactcttccctcaggagttattgtgacacattgctggactcagcat

SEQ ID NO: 10292 - DNA, 544 bp, Homo sapiens
  MAP TO AC000039.3; EXPRESSED IN BRAIN, SIGNAL = 0.42; EST_HUMAN HIT: BF312101.1, EVALUE 4.90e-02; SWISSPROT HIT: Q9NR09, EVALUE 8.00e-03; NT HIT: U14331.1, EVALUE 8.00e-03
ccctgcttcctgtctgactcagtgggatccctctgaaacacaaatatgatcatgtgactctcccacttaaatgagtccctacccttacaagataaagccaattgcttctgttgcacccatatccctccctgatttgttctcctcagctcggccacagtcaatttctgcctttgccagttcccccctcactttgaccatgcgatcccttggcctgagatgcgctttctatcttctctgctcaatccctctgccctcccagacccagctggaaggtcacctcccctgtgaagtcttccctgactcccccagcagaattaactgccccctctcttgggcttctggctccactcagtttgtcacaggcctgatgagcaaggatatcttgataaaggtgataactggccgaaaagcagttggggcgcccaatggcgcagccttcagaagcaccttctgtgtttttggaactgttggcagcatcccaaggtgaaatggtagaagcatatggcatgatcatggggaaatgggtctggggaagggaagagaa

SEQ ID NO: 10293 - DNA, 554 bp, Homo sapiens
  MAP TO AC000051.2; EXPRESSED IN HELA, SIGNAL = 0.44; EXPRESSED IN BRAIN, SIGNAL = 0.43; SWISSPROT HIT: Q9UMN6, EVALUE 1.00e+00; NT HIT: AF210835.1, EVALUE 5.30e-01; EST_HUMAN HIT: AA609662.1, EVALUE 7.80e-01
aggggatttgagggtttgacgccagctgccaccccaggctgtgcccctcctctgctcaggaggacatgcagagatgcgacacccacttaaactcgaagttgcaaagatgcaaatgagactggggtctcaggcaccagagaccacccatgggcacgtggcttttgggagtggggacctgctgccacagatctctgaagagtctggacctgctgggtctccccgagtgactgtctgggggtctccatagcatgccctgctgtgtgcgcgacggtcactggttgggtaggggtctctactctaaagctccctctgccggcatcccctcgaactctcccttggtgaagagaggatgtggttttcccccagtgttttatcaaacaactctctccacttcctgttttaagaagctgggagtggaagagagcctggggctggccccagctgctgctgcgaaacaggggtcactggacgctgggaccctggccgggctggctggaggcctcaggaagaggcctgctacagtgtcatcctggccaagattcctccctgcagag

SEQ ID NO: 10294 - DNA, 583 bp, Homo sapiens
  MAP TO AC018844.2; EXPRESSED IN BRAIN, SIGNAL = 1.1; EST_HUMAN HIT: AU118966.1, EVALUE 5.30e-02; SWISSPROT HIT: Q92750, EVALUE 4.30e+00; NT HIT: AJ271735.1, EVALUE 2.20e+00
aaagctgggaaacaccactgtgctcatggagctcgcattccattgtcggtaggaagaaggagagatagaacacaaatgaacaaggggcgaatgttctagtcatgatatgataaagcaggatcgtgtgcggagagcgatgagggcaatctcagaaaaggctgtctgaggaaaggacactcgagattaaggcattcatgggacaacagagctgatcttgagaggatcaagagagatcagcaagtgcaaaggcccaagacgggatggaataaggatggctcctagaggaacgactgcagttgcaggaggcaagatgggagtggtgccaggtaccaggttatgcagagccttgcaagcaaggatgaggacctccagctttgttctcacaaaaccattgtgtgataaagccactgggaacagacaggagaagatgcgtgcatttaaagcatgactcgggctggatggaggagaatctagatgcaggatctgtgtatgaggctctggtggtaatgactcaaagatgacggtgtttgcccagggtgatggtgctggaggggccaagaggtgagcaagccccagatacaaa

SEQ ID NO: 10295 - DNA, 555 bp, Homo sapiens
  MAP TO AC000086.1; EXPRESSED IN BRAIN, SIGNAL = 0.41; NT HIT: gi14768982, EVALUE 3.40e-02; SWISSPROT HIT: Q63691, EVALUE 1.80e+00; EST_HUMAN HIT: BF799104.1, EVALUE 5.00e-02
aagtgggacctgacaaatgcagatgctataatgtaaggatggctgatctcattattgttgtcatactattactgaaaatcagtgtgaatgaaatctctaaactttgcaatcaacactgctcacctgggtctccgtagaagctgcagcgagctggggctgaggcagacaagcctgtggacatgagaacagatgcatgtgctcctcagacagacagacagtagggtgttgtggaaggggtcatctttagaggccacatactgtagtccatctccctcacagagcaggaaggtgaagcttgccaagcctgagggaatcctccagcccagacatcctatgagggcattgccaggacttgggggtagtgccctcgctccaggcatgtcttttccccatcccttgagcaggaagaagcacagcagacagcagggtgcatgcagagtacctggcagaatcgcctcggtagtgagaacaagcctgcgtgatgctgcaggtgcccctgactgtgactgagcctggcttcacacacctgggtttcctcatggctgttttcagcaa

SEQ ID NO: 10296 - DNA, 565 bp, Homo sapiens
  MAP TO AC021090.5; EXPRESSED IN LUNG, SIGNAL = 1.8; EXPRESSED IN BRAIN, SIGNAL = 1.5; EXPRESSED IN FETAL LIVER, SIGNAL =   2; NT HIT: gi13654291, EVALUE 5.00e-32; SWISSPROT HIT: Q02773, EVALUE 1.80e+00; EST_HUMAN HIT: BE888130.1, EVALUE 4.00e-49
gaaggcaggtcctcattcaggtggcaaactacagaactactgtttttggctaaagacaagaaattgttccacctaacttggttcccctgagaattttaaacttactctgtaaacatcccaaactcttcccagtcacagtctgggggggtcctgcctttccagaggcctggagaaatacacccatttagagccatgctggcaggcctgcagaccttgacctttactgtggtccctgaagcagttccatgactcagttccagctccctgagccatagttcatggccggttttgcctatgtagaaacccaaagttacctcggaaaatcctctcctgtactcagtgaaagccatgctcatccacatcctgatataaaactcaccatatgcaggcctgagtgcagaaacctgcccttgggtctgccctgcacagcaaagtcctgaaggatattcaatctgtccaaaaattaaatgagaattacaactatccaagctccttttaagaagacaactgaaggtggacccttgtgcaaacccagcagccttaaggccaagctacaacccctctt

SEQ ID NO: 10297 - DNA, 591 bp, Homo sapiens
  MAP TO AC018766.2; EXPRESSED IN FETAL LIVER, SIGNAL = 2.2; EXPRESSED IN LUNG, SIGNAL = 1.5; EXPRESSED IN BRAIN, SIGNAL = 0.87; EXPRESSED IN PLACENTA, SIGNAL = 1.4; EXPRESSED IN HEART, SIGNAL = 1.5; SWISSPROT HIT: P35198, EVALUE 5.80e-02; EST_HUMAN HIT: AW401670.1, EVALUE 0.00e+00; NT HIT: AF354258.1, EVALUE 0.00e+00
gggtggtcactgtgggtaacgcaggagctgacatatatcattctccccactgcttaactgcttacaacgatccctgcatttatcattaggcccatttctcagaaaagtaagtagaggctaaaaagttgagagcacgcaacaaacgtgggattgggtcccagtctgtggcggctccctcagccctcggcgtggccctcaccttgccctggggtttcaccccagctgcggtgaacactagcaacttctccaagttctcccagccggggtttgacttccgcatacgcttcttcggcagctcagcatctctcttctcatcttgggacaccagaggggtgccaggcggagtatctggctgggattctggtgtgcgggtctcttcccagcgcagggtcagtgggtggaggccattgaccaaatacagtgtgtcccccacccccagagagccctccaaccccggcttcaactcctgggtcccggtagttgaggggttaactcccagctgcagaaagagagggaggagctgggactggctccgcccccaccgggagcttcctccaatcaaatacccagcggaaaaatcagcccttctcc

SEQ ID NO: 10298 - DNA, 544 bp, Homo sapiens
  MAP TO AL078581.11; EXPRESSED IN BRAIN, SIGNAL = 8.1; NT HIT: gi14751693, EVALUE 0.00e+00; SWISSPROT HIT: P25232, EVALUE 4.00e-67; EST_HUMAN HIT: BI524043.1, EVALUE 0.00e+00
tgatccctgaaaagtcccagcatattttgccgagtagtcaacaccaacattgatgggtggcggaaaatggcctttgccatcactgccgttaagggtgtgggccgaagatatgctcatgtggtgttgaggaaagcagacactgacctcaccaagagggcgggagaactcactgaggatgaggtggaacatgtgatcaccattatgcagaatccacactagtacaagatgccagcctggttcttgaacagacagaaggatgtaaaggatggaaaatatagccaggtcctagccaatggtctggacaacaagctctgtgaagacctggagcgactgaaaaagattcgggcccgtagagggctgcgtcacttctggggccttcgtgtccgaggccagcacaccaagaccacaggctgccgtggccgcatcgtgggtgtgtctaagaagaagtaagtctgtaggccttgtctgttaataaatagtttatataccaaaaaaaaaaaaaaaaaaaagtgcatataaagtcagctttcctaggccctgaatc

SEQ ID NO: 10299 - DNA, 524 bp, Homo sapiens
  MAP TO AJ251973.1; EXPRESSED IN BRAIN, SIGNAL = 0.67; SWISSPROT HIT: P39581, EVALUE 3.70e+00; EST_HUMAN HIT: AL546787.1, EVALUE 7.30e-01; NT HIT: AJ251973.1, EVALUE 0.00e+00
catcgcttctctcatccctccttctgagcctagggtgccccctttgcgtcctctggctcattaaagatagatgaccctggggagggtgagggccggggtcaccagctgctggggcttcttgccctgagttaggctggggatcatttgcagggagaatgcagccaggaccaccagccctggctgcagagggaggagggtaagtctgggaagctggccccagtgggtgatcagcaacatgtccctaagaataggtacatgctattgacaaagatgagaagtgaaccgggagccgtaaatagccaggagcctgtgttctctgggctctgtgttctgtcggttgcttattcattgaaagtcagggatgggcgagatgcagtctccagagtgacgcagtgggacgagccctggagctggagacagagaagctgggttctaatcccagccctgctgctttgtaactgagacctaaatcaaattgcttatcagtctcttcagctgccaaacgaaccaagaagctgcctcac

SEQ ID NO: 10300 - DNA, 523 bp, Homo sapiens
  MAP TO AL049824.4; EXPRESSED IN FETAL LIVER, SIGNAL = 0.6; EXPRESSED IN BRAIN, SIGNAL = 0.45; SWISSPROT HIT: Q9UNP9, EVALUE 4.00e-35; EST_HUMAN HIT: BG397659.1, EVALUE 1.00e-103; NT HIT: gi16168526, EVALUE 1.00e-103
ttaaccccagcgctttttcctttctcaattccagagaatttccgctgcctgtgcactcatgaaaagggctttggctttaagggaagcagcttccaccgcatcatcccccagttcatgtgccagggcggtgatttcacaaaccacaatggcactgggggcaagtccatctatgggaagaagttcgatgatgaaaactttatcctcaagcatacgggaccaggtaggagccagttggcatgtggtgacgagggaggctgggcaagggtgggatggccaggcaggatggaaggacaggttgtagttctggctggcggacactaagagtctggaggagacccagccaccagacataggagaaccatgcagccttgctagggtggagttggcttgttgacattcaggtactgttcatcccccaaccgtgtccacaattcctattagccccgcttggattctgtggtctgctgttgcaggctcttatgctctcaaccccactgctctccctgccctcaccatcagattt

SEQ ID NO: 10301 - DNA, 509 bp, Homo sapiens
  MAP TO AC010320.7; EXPRESSED IN BRAIN, SIGNAL = 4.2; EXPRESSED IN HELA, SIGNAL = 5.9; EXPRESSED IN FETAL LIVER, SIGNAL = 3.3; EST_HUMAN HIT: BI907936.1, EVALUE 0.00e+00; SWISSPROT HIT: P54612, EVALUE 2.00e-39; NT HIT: gi7657474, EVALUE 1.00e-130
aggatgtggcctatcaggtggtaagcaggagtgggagtggagagagttcaggggcatttgggccccagctagaccaaaaggagtctgaggctttagagaaggttggagctgagatgggagcttggagcttccaaggaggcagagactcactgtcgaagttccgccttcacagcactggacactcgggggtagcagacggagaagaggccgcaggccgaggtgcgggaggtgaaccagtcgccgcccgccagccgcttcactagcggcacaaagtgcgcctccaggtcagagggcgagtgctcgtgtgagatggcccgtaaggactccactgccttgtcccgcaccactgtctcctccactgtggccagcgactccagcggtggctgtggtgagaacacaaagtcactggacagctccctctccaccatccgcagccctggagccccatcctgcaccccatcatgggctcatctcctcagagaaaacttccctattacccatcccgacct

SEQ ID NO: 10302 - DNA, 572 bp, Homo sapiens
  MAP TO AC010285.4; EXPRESSED IN HEART, SIGNAL = 1.7; EXPRESSED IN BRAIN, SIGNAL = 1.3; EXPRESSED IN LUNG, SIGNAL = 1.5; EXPRESSED IN FETAL LIVER, SIGNAL = 1.4; EST_HUMAN HIT: BF526943.1, EVALUE 0.00e+00; SWISSPROT HIT: P08666, EVALUE 2.40e+00; NT HIT: X16012.1, EVALUE 8.50e+00
ttctgtccttgcatcaggtgtaaaaacagcctatgaccttttgacaagcccctgcgctgcccgagctcctgctgccctctctgcagccctgtgctgtggggctgtcctggctttctgatgccttggattcctgctcatttccagggtccccaaatcaagctgttagcgttgatctttttctttctgctgagctccagatctctgcttcaaaccatataagctttggttattacacaactctctagcaactcctgatttcagctcctgctcgccaccctgacttgctccttcaactccctatttttacctaatctatcttcctgccttcatgccctaccacagcaagcaacttcgcagccactaggaatatctctctgctgaaaggccttagagcccattaccagctctttataagaatcaagtccaaaatctgtctcctgcctaccgtcaccaccacctacagcagacacaccaaaccacacaactcgctgatcctgctctgtgcggtcctcactgtgtgccctaattatgcccaggctggttcctaagtcactcttccatgcagccttttc

SEQ ID NO: 10303 - DNA, 536 bp, Homo sapiens
  MAP TO AL118558.2; EXPRESSED IN BRAIN, SIGNAL = 7.5; EXPRESSED IN FETAL LIVER, SIGNAL = 4.8; NT HIT: gi15300984, EVALUE 1.00e-117; EST_HUMAN HIT: BF529787.1, EVALUE 1.00e-129; SWISSPROT HIT: Q9JHU4, EVALUE 5.00e-34
gagcaccttccagattttgctgcagttcccagtgtggactcactcaccatgtggcctttacgttcaagtcccttttccctctgtgatttcttgcccgtcccctccctccttcctgctgcgactgtgggactgtggcccaggtgtggacatgatcagtaaaatgctgaagatgcagatgttggaggatgaggacgacctggcctacgcagagactgagaagaagacgaggacagactccacgtccgacgggcgccctgcctggatgcggacactgcacaccaccgcgtccaactggctgcacctcatcccccagacgctgagccacctcaagcgcaccgtggagaatatcaaggtagctgggagggtggcgggccggccaggtctcaaggtcccaggtgctgggtatggtcatggaccattgttccatggaccattggttccactgtgccggacggaacgtactcacaccggtgtcacctcagagcaggtgtccagctgagcccaggcattgggcaagatgagttggcccttttgaa

SEQ ID NO: 10304 - DNA, 590 bp, Homo sapiens
  MAP TO AC002110.1; EXPRESSED IN BRAIN, SIGNAL = 0.55; EXPRESSED IN PLACENTA, SIGNAL = 0.41; SWISSPROT HIT: P28740, EVALUE 3.30e+00; NT HIT: AE000916.1, EVALUE 3.60e-02; EST_HUMAN HIT: BE883182.1, EVALUE 0.00e+00
tccattccttttatcaggcggcacttcgggaaaggggcctgtagtcagtccggtaacttcttttgctcaggagtgagtttcttgcttggaagccatgttgtgcgggacaccatggcagctggcaaagcatcttggcatggatgacagggctggcagaaggactgtgtgcaggaaaagcaaccgtgtctattccaatgaggccgagcccccttctcctccatggggaacgaagtccaatggcatcaacctgctgccacttggctggctgcttccccaggtgatggtgtcctactgggagctcagggccaggttcttttttttttttttttaatcagcaggtcaggtgcccagcagtggcagtgcacaggtcagctctggagggggaggtccatgctgccgtccatgcccagcctccacccttcccccactccacacttggagcccatcaaacatgcacgggagagctgggaaaagaggctgatgatgcctgcagagggggcagctgtggagatctgagcaccgagagcccctctgaagcgaacagacctcagagacacccgcccggcacagctatccccacagctgtccat

SEQ ID NO: 10305 - DNA, 595 bp, Homo sapiens
  MAP TO AC002991.1; EXPRESSED IN HELA, SIGNAL = 0.71; EXPRESSED IN BRAIN, SIGNAL =   1; EXPRESSED IN PLACENTA, SIGNAL = 0.6; SWISSPROT HIT: P81122, EVALUE 9.00e-03; NT HIT: gi4505398, EVALUE 5.00e-66; EST_HUMAN HIT: BI544655.1, EVALUE 8.00e-66
tgaggacattccagaccctcccatctccttcctggagcctcacaggcccccagagcccctgaaagggcagaaattggtcagctcagcagccactcacactggatcttatagaggttgctggtttccttcttggacagcagggtggagtgggcatccttccggggatccactttgtgaacaaagagggagcggaaccagctgccttcattgtccttggaatagaaactgcaggacagaggagttgagggggacgcgcggaggttgggggagccccagcaattccatccacttggatgtcctgctcccctagaccagtgacccacatttctgggaacagggccacggagtcctgtggcagctccagactgtgaaatgctattggagccagctcctttctacagatattccagctgcccagttggcttcttgaagctttgcagagcctcaggacgccaggagaggcagccccacctcccacttctctctctagcctccctgcctccacttcatcccccttccaagaggtcctctacttgggtcatataactccagcctctcgccaagaggatcaaccccaaatccaccttgcatcatg

SEQ ID NO: 10306 - DNA, 569 bp, Homo sapiens
  MAP TO AC016604.4; EXPRESSED IN PLACENTA, SIGNAL = 0.75; EXPRESSED IN BRAIN, SIGNAL = 1.2; EXPRESSED IN LUNG, SIGNAL = 0.65; SWISSPROT HIT: Q51659, EVALUE 7.10e+00; NT HIT: U62293.1, EVALUE 2.00e-06; EST_HUMAN HIT: AI241450.1, EVALUE 8.00e-04
gctggatgtcaggaagaagcgcctgggacattggagagaggccagcttgactacatgggagagtgaccttcccttcccgtcccttttccagcttccctctctgctgagagccactttcatcacttaataaaattctccacattcaccattcttcaatttgtctgcttaacgtcattcctcttgggcaccaggcgggaatgcatcaggtgcgggtacccaaaaaggctgtcactggccctctgcctttgctggtggaaggcagccacctcacacaatgagataaagggcccacggagctgttaacacacttctgtctgtgaaaagcagagctaagagagcattgtaacacaccctctagggccttggggtcacaggcacccccacatggacactgccgcagggcccgcaaggaattcgcttctgccagcaccaaagtggccggttcctgcacttgctcactccggttcctgcattcaatcactggcatgctccttcctgcaaggggttgagtggggtggactgaataaacaaggcacccctgtcatgactcctgtgaaggggtcaagaaa

SEQ ID NO: 10307 - DNA, 578 bp, Homo sapiens
  MAP TO AC067968.1; EXPRESSED IN BRAIN, SIGNAL = 0.74; SWISSPROT HIT: P30945, EVALUE 7.30e+00; NT HIT: AB026133.1, EVALUE 2.20e+00
tcttctttggaaaagcagcctatgattttgctagtggtcttagcagagacagagcacttaaccatgacctaccaaattagcatgcgtgccaagctttccatcatgaattgggtgttgttggcccttccttgtctttaaattgtatgtgcacatcggtattccatttgtaagtggtatatgtatgattgggtttgagcaggctctgaagccacagataagtgtatctaaggcccatgacccctactcctactatgttatcttcagaatgagtgaacatgaagacaagtcctatgaattattgtgtcacagcagcaaaaagaaatgaagtgattaaaagtaaacaaagcctaaaggaccacatgtgcattataggtgtcctgggtagagagaaagaaagccaagagagattacttatagaaataaaagctgaaaacttctcaaatatgaaaaacacatcattctgtaaatccaagaagctcaatgcatttcaagtaagataaacccaaaggtacccaactgagacatgttatttaaaaattgttggaaaccaaagacaagcgaaaaatttgacagcagca

SEQ ID NO: 10308 - DNA, 537 bp, Homo sapiens
  MAP TO AC010398.6; EXPRESSED IN FETAL LIVER, SIGNAL = 0.61; EXPRESSED IN BRAIN, SIGNAL = 0.71; EXPRESSED IN PLACENTA, SIGNAL = 0.64; EST_HUMAN HIT: BF989495.1, EVALUE 3.00e+00
ttccaccttcctgatgttccatgtgtctgtaatgtcacttcctgatttttatttaaaatttaagagcttgggttctggtatcccagagcctaaattttacaacttacctgttcattgccatagagcaagtggtccaaactatctaatctttaatttttttaataaaataatttggaaaattatagtaactgccacatagtattgttgtaagatttaaatgaaataataaattaaaatttttggcccatagtaagttctcaatgatcactagctattgctgtagttacgactgtatctcttcagtatgaaacacatagccttcatgtgatagtatctgtattaataattattgaattaataaaaaatgtccttagtgttagaaaaattcttcaacgtatattcttctccactgcatggaaaattacttcttgtacagagatataacaataatggttcagagagtgagcggactgtggagtcagacaaagatttcaaggttggctctgccattttttacctctgggaactgggcaaata

SEQ ID NO: 10309 - DNA, 593 bp, Homo sapiens
  MAP TO AC000395.1; EXPRESSED IN PLACENTA, SIGNAL = 0.88; EXPRESSED IN BRAIN, SIGNAL = 0.81; SWISSPROT HIT: Q12967, EVALUE 2.00e-38; EST_HUMAN HIT: BF347174.1, EVALUE 1.00e-119; NT HIT: AF295775.1, EVALUE 0.00e+00
gcctcccctcctaatgagacagacacccagggagtccccagagggcacgcctgcgacccgggggtgacaggaggattttagctcaacccaaggaaagagtgtaaggaagacgtgagcatccaggcagtgggctgggagagtcaaggccagcatgcccctgggaagggtagactggggcctgtacagggccttggactgcagaccacaacctgagaacagatgaagccaaagtgggggcccaggcccctcctctggcataccctggccacctcgatccagtgctccaccaccctggccctgtctggggctttcgtgcttcggttcccgaggcaggtggtgatgacacagttggccacactgttgaactgggtgacagtggcgcggatggtgggcgccaggtgctccttgcccttcttgtcccgctgggaccagatggagcccaggcagtggtagggcaccaccttcttgaacagttcctggggaggaggctaaatgtcacctggtcctgccccagcagtctgggctggtgctggggaagctgaggatgcagcttgagccttgtggggatctctgggttttatcccgtgtccatg

SEQ ID NO: 10310 - DNA, 591 bp, Homo sapiens
  MAP TO AC011387.4; EXPRESSED IN BRAIN, SIGNAL = 0.74; EXPRESSED IN FETAL LIVER, SIGNAL = 0.68; SWISSPROT HIT: O73942, EVALUE 5.70e+00; NT HIT: AJ271735.1, EVALUE 5.60e-01
tgagtgcttgacctcaccagtccaattaaagtgaatctcaaaagttttgtggaggtaagggggaaactcttacttttttccattgggattgaacttgatgtgagtttggagcttctcagccctcttgtcaccataaaagaagagcctgaaacttttgcagacaccacgtacagcctgtgaataaagctgatgtgtagatttgtcgtgttctttgctgaacattcttaatatgtttatggaattttcagccttatgaatcttttctctctaaggtagaattcagaaaacttatttctctagccccctttgcacctagccgctagtctattctaggtgccaccaacaagatgtattcatgtagactttgaatataatgtaagaacatggaaaaggaggctcttctcaaaatccaagttgctagagaaggtagcaccagaaacatctggttgtgagggtgttggtagtagtttaaaagtgaaattactagaacagaaataacatcagtgctggcagcagtattcattgcactgaagttgagttcctgacagcattgtgagatacagaatttagtgcttggtagtagcaatggcc

SEQ ID NO: 10311 - DNA, 588 bp, Homo sapiens
  MAP TO AC010520.5; EXPRESSED IN LUNG, SIGNAL = 2.8; EXPRESSED IN BRAIN, SIGNAL = 3.7; NT HIT: AF186772.1, EVALUE 0.00e+00; EST_HUMAN HIT: BG679415.1, EVALUE 0.00e+00; SWISSPROT HIT: Q62137, EVALUE 1.70e-01
ttggatacaaggcagaaggggcagggtaaagaatgtgagtcacctccagtgataggtaaggtcacgtgggtcacatgtccactggacagggggcccttccctgcctggcagctgaggcagagagggagaggagacaaagagaaagacagcttatgccattatttctgcatatcagggactattagtactttcactaattgactactgctatctggaaggcagagccaggtgtacaggatggaacatgaaggtggactaggagtgtgaccactgaagcacagcatcacagggagacaggcctctggataaccgcgggtgagccggactgatgtcaggccctccacaagaggtggaggagcagagtcttctctaaactcccctggggaaagggagacccccccccccaccccccaccactttcccggtctgctaagtagcgggtgttgtttcttgacaccttttgctaccgctggaccatgatcagcttggtaacgggcatcttcccagaagctggcgtcaccgctagaccaaggagccctctggtggccctgtccgggcataacagaaggctcgcacacttgtcttctg

SEQ ID NO: 10312 - DNA, 548 bp, Homo sapiens
  MAP TO AC004461.3; EXPRESSED IN BRAIN, SIGNAL = 0.51; SWISSPROT HIT: P26372, EVALUE 3.10e-02; NT HIT: L77570.1, EVALUE 0.00e+00; EST_HUMAN HIT: AL037568.1, EVALUE 2.00e-04
cttggctgtcaagatgatgctgatgtcagacagtgtcctgggggagagtctgggggccaggctggggaatgcgcatagcacaggacagaacccttacagacctctcaggcctgcctctgacagtagagaatgtccctcttcccgcggagggccagcctttggtaagctggggggcctcttccacctccaccagggccatggggcccgagcagccctgcctcacagcccagctggggacctggtgcaggggtcactgtagcacccagagccacatctgctccgactctgggctccatgacctgtgcagctcggagcacatgtgcccctcctgcctccagcaccactagagtgccacgctgctgcttccccagcacaggaacacactggagagcaagttcaacaaggaaacagaatcagggagaatacctagaataccactccacagactatttattcacaaattacttttcgtcacaaaaagggaaagaaatattcacaatagtgatcaaacttaacatcaccaataatgagacaaaatgaccttgggc

SEQ ID NO: 10313 - DNA, 513 bp, Homo sapiens
  MAP TO AC004826.3; EXPRESSED IN BRAIN, SIGNAL = 0.45; SWISSPROT HIT: O95235, EVALUE 1.00e-46; EST_HUMAN HIT: AI889336.1, EVALUE 0.00e+00; NT HIT: gi14781173, EVALUE 0.00e+00
acccttagccctctcgtttctctaatataccagacaaaagtgttttctataactttattgatcttccttaggaccagactctggctgaactgcagaacaacatggtgctagtgaaactggaccttcggaagaaggcagcatgtattgctgagcagtatcatactgtgttgaaactccaaggccaggtttctgccaaaaagcgccttggtaccaaccaggaaaatcagcaaccaaaccaacaaccaccagggaagaaaccattccttcgaaatttacttccccgaacaccaacctgccaaagctcaacagactgcagcccttatgcccggatcctacgctcacggcgttcccctttactcaaatctgggccttttggcaaaaagtactaaggctgtggggaaagagaagagcagtcatggccctgaggtgggtcagctactctcctgaagaaataggtctcttttatgctttaccatatatcaggaattatatccaggatgcaatactcagaca

SEQ ID NO: 10314 - DNA, 527 bp, Homo sapiens
  MAP TO AC000073.1; EXPRESSED IN BRAIN, SIGNAL = 0.65; EXPRESSED IN PLACENTA, SIGNAL = 0.6; SWISSPROT HIT: P54198, EVALUE 5.00e-17; NT HIT: gi14776998, EVALUE 6.00e-87; EST_HUMAN HIT: H23459.1, EVALUE 5.00e-85
cactaactgctcagggcctcttctggggcctgatggccagccttgtccactgccttccctgcccctgcagtgaggtggggcctacacagccctgtcctgccctggctgaagcccaccccaccctgtgcctgcctctcaccagacagagagtgtggctgcagcggtgagcgccatgacgtaggagcctgtgcaatgcaaagtagagatcggggatggcaggaggatgggagagaggagacggcgaccacaggtggagaacactgacagcatccttttttcacaggcgacacacaccacgtcactgagaaggcagagtgggggcaggtgtcatgggggctgagtgctgcagccaagacagtagccctggaagtgtgggccttccctctgcctgggcccaacaagggcctcccctgagcaggtacagccagaagggaaggtggattgggtcagggtagggctggtggggctgttggagcctccctgagatcttggatgaaagaggcttctgtcctatttccacaggctgc

SEQ ID NO: 10315 - DNA, 565 bp, Homo sapiens
  MAP TO AC000092.1; EXPRESSED IN BRAIN, SIGNAL = 0.69; NT HIT: gi7219909, EVALUE 4.00e-54; EST_HUMAN HIT: BI914128.1, EVALUE 6.00e-54; SWISSPROT HIT: P54198, EVALUE 7.00e-28
agtctcctaagggcagagcctgaaatccactgttgttagcatctaggatttttagaaagaccagaaggataaaattcgtaagttcttacaagagatgacctcctctgggctcctggggataaggaggcctttgataaagaggatccaggccccattactgcatcatgcagcagtgggcaaggggccaacaggcccgaggctggctaacccacagatcccgtaccactctaaacaaaccccttccttaccaccactggtgtctgcccctcaccctgtccctgggcatatgtccatgtctttagcgccaccaggcagggctctcaccttcctgatatcttcaagactctccccgttgacaacgcctgcgactgaggtggctgagcccatctccctggtcgcagcactcttctggtccagctgctgctgctgctgccttcgctggtacttgagcatctcagggttctcaatgacggctgtggagagctgggcctcggtcatgatggctaggctcttgccataggtggactggtgaatgcggctctggggaagcaaggagaggcatgac

SEQ ID NO: 10316 - DNA, 570 bp, Homo sapiens
  MAP TO AC004798.1; EXPRESSED IN LUNG, SIGNAL = 1.5; EXPRESSED IN BRAIN, SIGNAL = 1.5; NT HIT: gi7657217, EVALUE 0.00e+00; EST_HUMAN HIT: AW505318.1, EVALUE 0.00e+00; SWISSPROT HIT: O60885, EVALUE 2.00e-53
gagtggactgagcaaggagggaaaagttactctgagggtgcccacagaaggaaccccatgcccagggggcccaagcacaccttgaggtttccttttcttccgcaaacaggaggtgacatagcgctccagctcacgcagtgtggacggcttcagggtctcaaagtcgatttcaatctcgtcggggttggaattcttcagggagggctcccgtgactggatgatgtgcaccacgcggcccagcttctcgccggggagcttgttgatgtccaagctgagctgccgcttctcctcataggacataggcttgcacttgtcctcttcctccgactcatacgtgggagggggcttgctcttcatgggcgctggctccttcttgctacgaagggacgatgcagacaccatcaagaacgggccccctgaggaagccaggcactcattcctccacatgtatgttggggggaaggggtgcccttcccataccccccacccaccagccttcacaggaaacggggcatgggcaactcaatctctgggagcacccagtggagaccgaagcaaactgtgactgga

SEQ ID NO: 10317 - DNA, 579 bp, Homo sapiens
  MAP TO AC004509.1; EXPRESSED IN LUNG, SIGNAL = 0.52; EXPRESSED IN BRAIN, SIGNAL = 0.47; SWISSPROT HIT: Q92793, EVALUE 4.00e-29; NT HIT: gi14778077, EVALUE 1.00e-97; EST_HUMAN HIT: AA928265.1, EVALUE 0.00e+00
gcgggagttcttagcaagtggtggtctcttcccatgaggaagggcaggatgtgagccctgtgcttgccatcctctggggttgtgaagccttggatcattctggctcaccttgaaaactctggccgtcagcttccgaactacagctctggtggtgcttgttgtctcgtagatggccatttctccttcccgaatgcctcagcctccgaacatgatgggtgcacacaccaacaacatgatggcccaggcgcccgctcagagccagtttctgccacagaaccagttcccgtcatccagcggggcgatgagtgtgggcatggggcagccgccagcccaaacaggcgtgtcacaggtactgtgccccactgggaccgtggctccctaggaaataaaattcttgtgttaagttttggttttttttttctgtcttccttcgtggaaattaaaattccagaatgcacatttcatgtctttgtatcagcttctctttgttttctccacctttgtcctgtagtccttaactcgtttggaatttctcttatcctttctgggttaactatatgcaaaagtgggaatggattt

SEQ ID NO: 10318 - DNA, 553 bp, Homo sapiens
  MAP TO AC005502.1; EXPRESSED IN BRAIN, SIGNAL = 0.39; SWISSPROT HIT: Q10977, EVALUE 9.00e+00; NT HIT: U52852.2, EVALUE 9.00e-03; EST_HUMAN HIT: T64949.1, EVALUE 1.00e-21
ggccaggtctgggttcttacctgaggctcagctagggaagcatctgcttctccacttgtatggttgttgatagcattcaatcccttgcagctgaaggatgcatagcagtttgctctgttgagaagtataagaatgagagattttggttgcaggcaatagaggccaactcccaataatttaaacaaaagagcaatttattggcaggatttcaatggttaatagtactgacaggaatcctgcaatgaagattaggtcagaaacaaggtagaaaccagggctactctctagctacgtgcaccaggaattggtaacagtcacatcacggtgctggtgctggaaggaagcaactccagctatgacttttcatctcagattattctgctcaagattcaaacccccacatcagagccttagcctggcttggaaaggtcaggcagggcacagtgattcacatcctcaccaatctggcacaccacagggaaaagaaggtttcctaaaaggtaaaaggagtgcaattactgaaatgaaaatgaggggaaacagagttgcaaaa

SEQ ID NO: 10319 - DNA, 593 bp, Homo sapiens
  MAP TO AC004826.3; EXPRESSED IN PLACENTA, SIGNAL = 1.1; EXPRESSED IN BRAIN, SIGNAL = 0.92; EST_HUMAN HIT: BG475862.1, EVALUE 0.00e+00; SWISSPROT HIT: P14317, EVALUE 5.10e-01; NT HIT: gi14781171, EVALUE 0.00e+00
aggaatgcaactggaaaaccaaaaagcctaagctgtcacttcttatctaaggtataaacctccatctccccagccccgatctttcttaagtacctctgtcttcacatttgtaagtggagtctcatcgcctttcccaatggcaacatctgcttcaacaatctctccagctgcagtacttcccagttcctcatctaagtcctgactcctgagttctggtggctccatacttgtggctggaacaactccagctactatttcggctcctgaaatgactggctctggttctgcaggttccaccttgatctctgcactgggctccctgatgtccaccagttcatgtattcccttgttttccgtttcctcaaagtccagtctctcttgcttgaccgtcatttctggtgcagggagaggtactggcttgtcccgctcctgctggataggatgctcccaggggccaggcagggactgaggatcatcattttcttcacaaaatgacagtgctgcttccactgctgccacatccagcacttcaggatgatcatctacctgtcccacaaaacacaagactattgaggtcacagaaagaagcccaa

SEQ ID NO: 10320 - DNA, 590 bp, Homo sapiens
  MAP TO AL022342.6; EXPRESSED IN PLACENTA, SIGNAL = 1.3; EXPRESSED IN LUNG, SIGNAL = 1.3; EXPRESSED IN BRAIN, SIGNAL =   1; NT HIT: gi14786223, EVALUE 0.00e+00; EST_HUMAN HIT: BG397203.1, EVALUE 0.00e+00; SWISSPROT HIT: O77788, EVALUE 4.00e-03
tttgtgactacgccacatgctgggttttctttttgaatttaggcataaatgaaatctcggaagatgtctatacggccgtagagcacagcgattcggaggattctgagaagtcagatagtagcgatagtgagtatatcagtgatgatgagcagaagtctaagaacgagccagaagacacagaggacaaagaaggttgtcagatggacaaagagccatctgctgttaaaaaaaagcccaagcctacaaacccagtggagattaaagaggagctgaaaagcacgtcaccagccagcgagaaggcagaccctggagcagtcaaggacaaggccagccctgagcctgagaaggacttttccgaaaaggcaaaaccttcacctcaccccataaaggataaactgaagggaaaagatgagacggattccccaacagtccatttgggcctggactctgattcagagagcgaacttgtcatagatttaggagaagaccattctgggcgggagggtcgaaaaaataagaaggaacccaaagaaccatctcccaaacaggatggtaagtgattgtatctgtttccagttttcttaatttgg

SEQ ID NO: 10321 - DNA, 594 bp, Homo sapiens
  MAP TO AC008536.5; EXPRESSED IN BRAIN, SIGNAL = 1.5; SWISSPROT HIT: Q14957, EVALUE 5.80e+00; NT HIT: AF222782.1, EVALUE 3.60e-02; EST_HUMAN HIT: AW978668.1, EVALUE 0.00e+00
caggtagatggagcattcccattaacttggctacttgacagtaactcaatacattattttcttaaccagaatacaaaataaaacccacagtcacacagaataaatgccctcaaagaaagcaacttaaacttgtactgaacactgaaaaggtaaatctgtataaaaggttataactgcatttacagtgcaaactcgtgtttctttctactctcttataaacagaaaatgtcttcagaaacattgcctccctgcatttctttaaaacacctgagaaaggtaaggcttgaggagacacccactcaaattcaacaggtctctgatcctgggacatttacaatacatgtgctgctatcaaaggtccaagattttcattatagcattatggtcaaacttgaaactcaaaaaggctctggatgaaaaggggaacttgcaatgtccattacatgccacgggctgtccctcagcatgttctagcaactggtcttcactggagctaggcaagtcatatacagcatctgtttaaagaaaaaacaaaataaataagctcagtaaccttagtaagaaatcaaatactgccctttgccttttgttaca

SEQ ID NO: 10322 - DNA, 535 bp, Homo sapiens
  MAP TO AB014080.1; EXPRESSED IN BRAIN, SIGNAL = 4.6; EST_HUMAN HIT: AV730970.1, EVALUE 0.00e+00; SWISSPROT HIT: P13747, EVALUE 1.00e-53; NT HIT: M21533.1, EVALUE 0.00e+00
ctctgggaaaagaggggaacgtaaggggccctgacccccaggcctcagccctgaccctgcggaagggctccagaagggctcccgctttccctgagaagagacatgacctcccatccccctccttactccatctcagggtgacgggctcgggtagcccctcatgctgcacatggcacgtgtatctctgctcctctccagaaggcaccaccacagctgcccacttctggaaggttccatcccctgcaggcctggtctccacgagctccgtgtcctgggtatggccctccccatcctgctgccaggtcagtgtgatctccgcagggtagaagcccagggcccagcacctcagggtggcctcatggtcagagatggggtggtgagtcacgtgtgtctttgggggctctgaggggaagagtcagaaaattcaggcactttgtatctctcatgggacactccagcagcacccatgtgaccatcctgagaaggaagaggacaattatagtaggagaagaggacaaaaccttgacaccagcct

SEQ ID NO: 10323 - DNA, 515 bp, Homo sapiens
  MAP TO AC002471.5; EXPRESSED IN BRAIN, SIGNAL = 0.47; NT HIT: gi14777514, EVALUE 7.00e-62; EST_HUMAN HIT: BG982754.1, EVALUE 6.00e-26; SWISSPROT HIT: P25871, EVALUE 3.60e+00
gtcataccattcatgcgtgctctggggccctcagagcccaagctcccagcctgagggtctagggctgaggcctcacccgcccatagtcctgcagtgaccccagctctgtcatgagtccagccggctccagccgggccaggagcagctgtactgggacacgctgaagcagctgtccaagcacatcaagcccctgcaccgcgtggtcaacaagatcgacaagagtgaaggtgggctgcggccggggtgggggccagtgccctggggatgccaccaggctcgtgtcttatggtcccctctgctgtcccagacagaaaaaaggacctgagcaagatgaagagccttctggacattgtgacagacctctccaagcagtgagttttgcctacagccaacgtagggtccacaagggcgtgggtcgtccagccatggatgggcatttggtgatgatgtggggttagcaaaggccccaggcagctctttgggccctggacagaggcctccaagtctccactctg

SEQ ID NO: 10324 - DNA, 512 bp, Homo sapiens
  MAP TO AC004179.1; EXPRESSED IN BRAIN, SIGNAL = 0.71; SWISSPROT HIT: Q9NPA2, EVALUE 7.20e-01; NT HIT: AY051802.1, EVALUE 4.90e-01; EST_HUMAN HIT: BE535681.1, EVALUE 1.80e-01
aacaggaaagcaaagcgaaggaaaaaatgctgccactctaacaaatttcaggaagtactccatgaaggatgccaggatggtgcgggagatggagaaaggtcttgcagctcctttttctggatgtcgttcagtctggaacaatctgagatttcatttgacctgcaggcaggagtatgtatgaaagagctcctggagtccaggacctggaccccacctctctctagcttagtctcctcaccttcttcacccgtgcctccctccagcaatctctcttcatggcttcctgcagggtggcagctacctcgcccacccatgggagcgtcttctgtacaggttcgattggcttcagctgttcaaacatcttctcttctgtggtgtctctttctagctttatccactcctggcctggtgcccaggcctgactggattccttcctggggctatctacctcccagtaactgggcagatggagaggcccagcaaaggccccagggtttgatgtggcttcctgt

SEQ ID NO: 10325 - DNA, 553 bp, Homo sapiens
  MAP TO AC002984.1; EXPRESSED IN BRAIN, SIGNAL = 1.8; SWISSPROT HIT: P27272, EVALUE 1.40e+00; NT HIT: AL163284.2, EVALUE 0.00e+00; EST_HUMAN HIT: AW818143.1, EVALUE 0.00e+00
gagagaatgggcgatgtttctcagggctgcttcaagcgggattaggggcggcgtgggaacctagagtgggagagattaagctgaagggagatcttgtggaaaggggtgatattgtggggatgttagaagaaacatttgtcgtatagaatgattggtgatcgcctggatacggttttgtatgaattgaaaaactaaatggaataagaaaaggagcaaaacaggtataaaaggactaagaattgggaggacctaggacatctgattagagagtgcctaaggagattcagcatagtcctgccagcaaagattatttatttacttcaagagttaagagtggcagtttggggatagcatgaggagatatcagctgtgatggcttggagaaactgtgtaaactggcagtgtaaacaagagcagggcatgtatgagtagttgagaacggtgaataggagtatgactagacagaagatagtagggatgacaagttattcgggggcacagtctaagttggtctggtgtctggaatgagactggggcctaataaaaaggagcg

SEQ ID NO: 10326 - DNA, 582 bp, Homo sapiens
  MAP TO AC020952.4; EXPRESSED IN BRAIN, SIGNAL = 0.68; EST_HUMAN HIT: AA742776.1, EVALUE 7.00e-97; SWISSPROT HIT: Q14031, EVALUE 1.90e+00; NT HIT: AF093016.1, EVALUE 2.00e-03
acccacgtcagttgcatttcttcctctgcacaatgtttctaccctcttccctacacaggggttgatccctctgaaacatcttgcaaccaaaactccatcttggcgtctgcttccttctgaagaactcaacctgggacacagtaagaggacagatcacctacctgtgaggacccctgtgattcaggtgggtggtcagggaaaaactctgcagaggtagcatgtaagcagaacccagaagcaagggcaggagcaacaagaccctgtgggggagactggtgcacagaggagccaagaaatactgcaaagatcgtggagaaggagacaggcaaggcccgtgtggtctggtgggagtagtaggagatgaggtcagaaaaggaagaggtgatcatatgatgctgtgaggtcataaaaattgctgctggcttttactagaagtgaaatgggaagtcacatgaattttgagctagcaagtgatgtcttatgtttcaaatggtgaattctggctgctgggtggacaatggcgtgagaggagaggagaagcagagtagtagtgtagaagggtgttttggtggtctagggcaa

SEQ ID NO: 10327 - DNA, 576 bp, Homo sapiens
  MAP TO AB014086.1; EXPRESSED IN HEART, SIGNAL = 0.96; EXPRESSED IN BRAIN, SIGNAL = 0.55; NT HIT: gi15304529, EVALUE 1.00e-128; SWISSPROT HIT: Q62191, EVALUE 7.00e-04; EST_HUMAN HIT: BE162373.1, EVALUE 0.00e+00
ctcaggctagacttccctcctttcaaaagaatgaatcttttctttggaacagattaagcacataattgctgaccagagataagaacacaaaaatggttagaaggggatgggagaaatcacttttccgtagcaaagaccctttgagtacacctggcagaaagaactggatttagagaaggagagcagaagaatgagtatcccaggctgacaaatcccaggctacgcaaagctacgctgcactcagcctgaggggctatgcaggggcaaaggtcgaaccttaagcatctcgaagcctgactgtaagcacttgccctccacctcggcagccaagtgggccaggtcccggcgcttgtccccaaggtgagcagcattttctcggagtcgctgcagaatgtcctgttcctcttcttccagtcgtgaaagcaacacctgctgctcttcatccagccgcctatgaagctcttcaaactccctcaagatctgctgtcggcgactttccactagtctctgagaagagagggaagatgttgtatcagcagggtcagtgtggtataaggaagcctttctctcacccac

SEQ ID NO: 10328 - DNA, 573 bp, Homo sapiens
  MAP TO AC000374.1; EXPRESSED IN BRAIN, SIGNAL = 0.47; SWISSPROT HIT: P32225, EVALUE 1.90e+00; EST_HUMAN HIT: AW130770.1, EVALUE 9.00e-07; NT HIT: X56452.1, EVALUE 2.00e-13
tggggaaaaaggaaatgttggtcaattagattggagacataagttctagtgatttactgcacagcaaggtaattatagttaataacactgtattctatatatacaattactttgttaattaaaaataaaactaaaaacaacaattgtatatatttatggggcgtgatgttttgatatgtgcgtatatacatatatacgtagaaagatcaaatcaggctaattaacatatttatcacctcaagtacttatgatttctttatgatgaagacatttaaagtccactctttcagccattttgaaatgtacaatacattcttattaactatagtcaccttgctgtacaatagaacaccagaacctagtcctcctgtcttactgaaattttgtgccctttcatcaacatttccccttttcctgtcctctctcccctgccccctcaacctctggtaaccaccattctactctctatataaattccacttttgtaagttccatctgcaggtttcttcttgttagttggatttctgctttgttcttcgaatagaaggtgctagagggagatggaagacagga

SEQ ID NO: 10329 - DNA, 537 bp, Homo sapiens
  MAP TO AC004182.1; EXPRESSED IN BRAIN, SIGNAL = 0.42; NT HIT: gi16160405, EVALUE 1.00e-100; SWISSPROT HIT: P00374, EVALUE 2.00e-40; EST_HUMAN HIT: AL525560.1, EVALUE 1.00e-100
aacgagctcattttcttgccagaagtctggatgagatcttaaaacttacttaacaaccagaattagcaaatagagtagacatgatttggatagttggtggcagttctgtttataaggaagccatgagtcgcccaggccatcttaaactatttgtgacaaggatcatgcaggactttgaaagtgacacgttttttccagaaattgatttggagaaatataaaattctgccagaatatccaggcgttctcttggatgtattaagtacaaatttcaagtatatgagaagaatgattaatatgaaggtgttttctggtttattttaagttgttccccctccctctgaaaaaaaagtttatatttttacattagaaaaaaagacttttgttgactttagatctttggataattatttctaagcaacatgtttttactccccactaatcttgactatatcagataccacttatgaaatattcttgctataattaagtgcctctccaagaccctgaccgagtccccagcacctgctacagtgag

SEQ ID NO: 10330 - DNA, 544 bp, Homo sapiens
  MAP TO AC008821.4; EXPRESSED IN BRAIN, SIGNAL = 0.82
aagatcaagagaacggcctgggagcaatcacggagagcccatattcatgtttaatgtgcctttacctgatgcagctttcagtatactgtgacagcagacaggatgagggagcactattagcaaataacgttaaaagtacattctcggaagaagccaggccaacagcgaataacaatctacggctgccggagtggccaaacgtctttaagcaatgcatggctgcatctgaggttcttgaagatttaatttgagcttttaatctgaagccacggacttcaataactgcacctgtatctgtgtagtagatgatggtgagcaatgttaaaacaagttcacctgaggagcaagccaaaaaatattttgaggaggaaacaccatcggccgaaggcatgggtttcaatgtgtaaatgtttctaagagaaagctgtggctaaatatttgcttttaatgagatgtacagtaaactgagcaggatttccagctccattctcctcattctgagttccaatagctgctaatggagggaaaactccaagcaagcagg

SEQ ID NO: 10331 - DNA, 549 bp, Homo sapiens
  MAP TO AC000355.1; EXPRESSED IN BRAIN, SIGNAL = 0.66; NT HIT: AF217523.1, EVALUE 2.10e+00; SWISSPROT HIT: P53936, EVALUE 4.00e+00; EST_HUMAN HIT: BG007196.1, EVALUE 1.90e-01
cttcctggacagcctgaatcagtaagtcgttactcttcaccaaatgtagcttatgtacaaatggcttcatttccattccccttcgctgtgggagcctcaagaaccacagttacaggagctagaggatgacgctgacagcggtcacacaggcagtacccactcgtttcaatagccttcgccttttccatttgttggtttgcggaaagacaaaactgtgctgatcctgattgtatgagacaagaaaatccagccaattctattttacgtggtactcttgccttagtttctttttcagtgagaacagacgcgccactgctacagctggccctgtatgttatttttttccagcattagtaatggagtcattgattcaatctatatgaatggagtccctactaagtgccaagcatataacagtgaacaaaacaacctctggcctcatagaactttcattcaaggcggtgagatgggaggagccaccaacatacgaaaacaaatgtagtcacatttacattaatgcctgaattaccaagactcgggctttctttg

SEQ ID NO: 10332 - DNA, 593 bp, Homo sapiens
  MAP TO AC003038.1; EXPRESSED IN BRAIN, SIGNAL = 1.8; EXPRESSED IN HEART, SIGNAL = 2.5; SWISSPROT HIT: P34545, EVALUE 8.70e-01; EST_HUMAN HIT: R86185.1, EVALUE 0.00e+00; NT HIT: gi15529983, EVALUE 0.00e+00
gacctcaggctcaccaactctgaggctgagagttccaaagccataggatagatcctggagcttccctgagcctgtttccttgcctgggagttagccatgccttgtggggctgccaagagggtaaagtagagagatgggtctagcttgatacagtataggcagctgctggatgtcagctgtggttatgatcacctccatcttgttatgatgaagaccctgaggtcagagtggaccccaccccaaagccccatctggcagctcacagctgctctctcctacagaaacaggcttgcatgctgatccgaaacctggtggcccacggccaggccttctcgaagcccatcctggacctgggggctgaggcactcatcatgcaggcccgatctgcccaccgtgactgtgaggacgtggccaaggccgccctgcgggacctgggttgtcatgtcgagctccgagagctgtggacaggccagaggggcaacctggcgccatgaccccaggcccagtctgggccgtgactctgggtgagtcgtgtgactcaggaatgggggtagatccatgtcctccactgtcccccattagttctgtcccct

SEQ ID NO: 10333 - DNA, 525 bp, Homo sapiens
  MAP TO AC010371.5; EXPRESSED IN BRAIN, SIGNAL =   1; SWISSPROT HIT: Q9YGZ4, EVALUE 5.60e-01; EST_HUMAN HIT: BI057229.1, EVALUE 2.90e+00; NT HIT: D85752.1, EVALUE 5.00e-01
caaactgggaggagaattgcaggctggcaggaccatgtgaaacacctggagagtgtggaatgtgagggagtcctcatgctctggcaggttctttctccatgaacctctctggcctctcacagaaaaggcctaaaataatcactaagaagtgcccagtgtcatggagaacagagggagaaaacaacagccacgtaagaggaacaagtaccactacccctatcatccgcctctatctccatgacaaaacaaaagccttaatctgtaagaagacaagtaacactactggccttatggcactggctagttttaagatccttataccacaggtgaagcagcatataatttgaaggcagaacctgcttaattaaagatatagtcattaaagatgtaaagatgtatattttaaatcccagataaatcactaaaaaatataaaatatgtatcagtaataaatcaatggaggaggtaaaatgacataatctagtttatcattgtttattgatgtcaaggtatgtagagcgtggg

SEQ ID NO: 10334 - DNA, 585 bp, Homo sapiens
  MAP TO AC002102.1; EXPRESSED IN BRAIN, SIGNAL = 0.58; SWISSPROT HIT: Q13751, EVALUE 4.40e-02; EST_HUMAN HIT: BF686580.1, EVALUE 5.30e-02; NT HIT: AF135118.1, EVALUE 9.00e-03
caaagtccttgtcaggggtggtgcacgcttcctggtgccccactccggaggcttctatgccagggatgccaatcagaatcttcaagggcggtttctccaaaaagtgcagaaatgaccgatcctttgccccatctgcccttggtaaaaaaccaaaggcagagcctgcgcacatggtcccaggaggcgggggaccggacgcgcacacagtaggtgcacaatcgacactcatcacggaacctgccagttttctgaagacctacagggagggggcaaagtcagggcaaacagcagggccacgactgagaactcccaaccccatggagatgctcagatgccaggccttgggcaccacgcccaggtcagtgagcctcggggccggctgtacgctcgtgggagctgacactgccattgggggcagccatggtgggatattcgggaagcaggtgagcaaaggaggagcaggaggtggagcccgcagcagacagaggcccagcaatgccagcctggctgtcctcagccactcccccagactctgcctcccacctccctggagctcttcgaaggggtttctgtttggtccccact

SEQ ID NO: 10335 - DNA, 511 bp, Homo sapiens
  MAP TO AC008685.6; EXPRESSED IN BRAIN, SIGNAL = 0.62; SWISSPROT HIT: O58698, EVALUE 2.10e+00; EST_HUMAN HIT: AL135179.1, EVALUE 4.00e-18; NT HIT: AB045146.1, EVALUE 4.00e-14
atgatgggatgggaagtcagacacgcctcatcatatcttctctcttgctaagcagcattaggctttcttctctaagggctcaacagaaaccaaccctgtcaacagactccaacaccactaatatcaacctaccacctgactcttgtccctcccttttgtagtttcaacaaaataatacacagcatttctttctggtaagagaccaccaaccatggagtggttctggccagctgatggaggatgcatggtaagagtttccagtcctctgcttcgctttttgacatcagagggccgaaaactctccccttggattatgctaacactgtcattttttgaacatgggtccaatggagaggtatgaggctcaattgcacatgcatacctttctgctttcataaatattcatggatcttcctataggttattgaatatatgtatctggccatcctgctcagcatacattcctgttccatttgcccctcccttgaagggtctgtttccagcttctggc

SEQ ID NO: 10336 - DNA, 562 bp, Homo sapiens
  MAP TO AC000071.2; EXPRESSED IN BRAIN, SIGNAL = 0.44; NT HIT: gi14777017, EVALUE 1.00e-60; SWISSPROT HIT: O75419, EVALUE 6.00e-16; EST_HUMAN HIT: AA576429.1, EVALUE 8.00e-72
ggtgctctccgactccatagacaaagaaccggcgctgcaaactgctgcccctggtgatggctgcccccctgagcatggagcatggcacagtgaccgtggtgggcatccccccagagaccgacagctcggacaggaagaagtgagcagcttccactcgtcctgggactggagggtcgggggtgttggggttatcagcttattagccctgctgagtagagtggtatttgcctctagtgtctgtcctggggcggggggtgggaagggtccattgcaggccgcctggcccccgacatgtcttgtgtgtcagcagcttttttgggagggcgtttgagaaggcagcggaaagcaccagctcccggatgctgcacaaccattttgacctctcaggtgagagtctcctgccactctgccacactttcccacctgaccctttgaggctattgcaggccctggaaccaagcaagttggcatggctggaggagcctggccagcagccctcttgaccttccagatctggccctgggacaggctactcctggtggctcagggagctctggtgaac

SEQ ID NO: 10337 - DNA, 589 bp, Homo sapiens
  MAP TO AL121915.8; EXPRESSED IN HEART, SIGNAL = 6.5; EXPRESSED IN BRAIN, SIGNAL =   4; NT HIT: gi9845501, EVALUE 0.00e+00; SWISSPROT HIT: P38982, EVALUE 2.00e-60; EST_HUMAN HIT: BG119459.1, EVALUE 0.00e+00
tccactgagtgagcttcctgttgcatgggatggcaatgtccacatggtgcagaggagaatctgtgtgacacagagcaatggtaggtaggttataacataagatgcctctgcgagaggctggtggccggtcctgcaatcagtaaccacaagaacccgtggattcgggaatgttgcctggatctggttagtgaaggttccaggagtgaagtggccagcaataggagtggctccagtggcagcagcacacttcagcatggccctctggccagtgctactggaggatatgacactgacatcagcagggttttcaatggcaacgatggcaggagccaccagcagaagcttctcccagctcctctttagatttatgatgtagatgccaccacttttcctcttacagatgtgctgttccattcggaagtcaaggtcggtgccacctaagtgggttcctgctgcaaggaacttaaggacatcctcctctttcatttgcaggacatcaagggctgtggacattgtgaaagtttccctttaagttatgacgggaatccagaaccacactgtatggacccctctgtgggtagcagggaaa

SEQ ID NO: 10338 - DNA, 548 bp, Homo sapiens
  MAP TO AC000081.2; EXPRESSED IN BRAIN, SIGNAL = 0.55; NT HIT: gi14776991, EVALUE 1.00e-110; SWISSPROT HIT: P53675, EVALUE 8.00e-22; EST_HUMAN HIT: BE669749.1, EVALUE 7.70e-01
tatgcacacaaagtgggaggcgtgaagaagtgccgatgcagcaagagtgtgttttttgtttacttcctttactgttatgccattggtgcaaaaattttaaactaaaaactcctaacataacactaatagactgcaatatcactagtgaaatgcttttatgacttattttcctctcaaggttggttcttaacactcagaacacttgaacagtattcaaggtttatcacctttggtgcagacgctgcaactttggcggcttcagcatagctgccctgtgcaaagagggtattgaattttctcacaaacaacttctctgccccagccaggttactacgaacggccaaacgcagaccaaggtctggattctgaagcacgttggttgcataattcacaatgttatcttcctcaacacaaactgacagtacctgtaaggacacaacaagtgagagcagcccggcctagaagagtgctccaccatccctctgccatgttcccttccgatgctggagtggtagccacattctcaggcgagtgttgagcacacctgt

SEQ ID NO: 10339 - DNA, 573 bp, Homo sapiens
  MAP TO AC000024.1; EXPRESSED IN BRAIN, SIGNAL = 0.87; NT HIT: gi16167544, EVALUE 0.00e+00; SWISSPROT HIT: P78395, EVALUE 2.00e-78; EST_HUMAN HIT: BG769045.1, EVALUE 0.00e+00
tgcacatcctggctttagtgtccaagtatgcagaatgaagcatttgatatgtgcacccagctagttaggcatgaaacaggggcacaggatgggctccgggtcatagaaggttctgtccccacagtgaggacaggggttggcactaagccagaccatgctgggccgccccaactcacacagcaactccctgagcctggcatgcagataggcaagcctctccaggtggagggtaccatggatgtcctcataactctccagggggacaggatacagcacgtgggtcagattgctcagcccgatgaggtgctgcaggagactctgcaaggcagatatggagatggaattcccgtagaagcttaaggttgtaagctgggagcagtggctcagggaaggcaggagggcaaggagctgatcatccgtgatcccacactcatcaaagaccaggtcctggagggtggcagaggctctctccagcagagcttggaggggctcgggacttacatcggtcagcatgaccccacttagactcaggacacttagctgactgacgctgggactctgggacagatgcat

SEQ ID NO: 10340 - DNA, 531 bp, Homo sapiens
  MAP TO AC002132.1; EXPRESSED IN BRAIN, SIGNAL = 2.7; SWISSPROT HIT: P20916, EVALUE 2.00e-49; EST_HUMAN HIT: AL582364.1, EVALUE 0.00e+00; NT HIT: gi14766572, EVALUE 0.00e+00
gtagtgaggtcaaggcgctctcagtcaggacagagaaaaaaggaggggaaattggagggccctacaggaagctaccgcccccatccttggccacactggccttgccttgagccaaggagtctccggggccgggcctcgcgttggctccgggccaccctcagacctgattttgcccctgcagtcgcccctgtgctcctcctggagtcccactgcgcggcagcccgagacacggtgcagtgcctgtgcgtggtgaagtccaacccggagccgtccgtggcctttgagctgccatcgcgcaatgtgaccgtgaacgagagcgagcgggagttcgtgtactcggagcgcagcggcctcgtgctcaccagcatcctcacgctgcgggggcaggcccaggccccgccccgcgtcatctgcaccgcgaggaacctctatggcgccaagagcctggagctgcccttccagggagcccgtgagtggcgtggacttggggtgggagccacaggagggagcgggcacgtcttagatccaagc

SEQ ID NO: 10341 - DNA, 505 bp, Homo sapiens
  MAP TO AC008910.2; EXPRESSED IN FETAL LIVER, SIGNAL = 2.3; EXPRESSED IN BRAIN, SIGNAL = 2.2; EXPRESSED IN HELA, SIGNAL = 3.1; EXPRESSED IN LUNG, SIGNAL = 2.2; SWISSPROT HIT: P48612, EVALUE 1.00e-10; NT HIT: AF143952.2, EVALUE 0.00e+00; EST_HUMAN HIT: BI755412.1, EVALUE 0.00e+00
accttgcggatggtggaggcgcgcaggctgtcgcccacctgcacgaggttgtaagtgtgccacatgtcctcaggctcctcggggaccagggtcacctggcccgcattgtccttctcgatgttcttcctcacgagcttcatggccaaggaaggggctcactgacagaaccaaaggaaccaaggaggtcctcacctccgccccgggagaggggatgggaatgcaggccaggaagggggcggggcccggtttctaagggcacttgcctggcgggaaggaaacacgcttgcttcgactcatgcagcctagggcagcacttcctctatcctttcctctctcagtctcccggcgcgctgcgtctaacaggctcggggaacactgcagcgaaaatctacccctacacagttcccgctggcagcacgcaacagcgggctgacgaaatgaaggcgcatgcgcagcccccgtcccgcgacccgacgcacgtctcccgtccccaaaggagaggcgg

SEQ ID NO: 10342 - DNA, 500 bp, Homo sapiens
  MAP TO AC022377.1; EXPRESSED IN LUNG, SIGNAL = 0.98; EXPRESSED IN BRAIN, SIGNAL = 1.5; EST_HUMAN HIT: R87221.1, EVALUE 7.00e-04; SWISSPROT HIT: P04474, EVALUE 5.30e-01; NT HIT: gi7662289, EVALUE 8.00e-83
cagctccgagtcatcgtcccgtgacagcctgcgggagcagacgctcagcaagcagacctaccacaaggaggcccgcaacagctgggactcgcctgcctttagcaacgatgtcatccgcaagaggcactaccgcatcggcctgaacctcttcaacaagtgagtaccatgggtgacccctcagggtgggcagctgtggcttgctgggccttggcgggtgggcgtggctgcatccttccaagcgcggagcttgaggtccaccgtggcctatgagcataggaagctgccacacaaggtcggtggctaggacggtgccagcctgtgcgctgaggcctagcccctcctgggactgctggtggggatggcaacacacacaggctgagcaggggcagaatgggagctttctgtgccgaagcaacttgagtcccgggcccttccgtcccatcccccccaagtccgccatagcaagtggggtatgttgggccatgccctgcgcaactttg

SEQ ID NO: 10343 - DNA, 505 bp, Homo sapiens
  MAP TO AC007498.2; EXPRESSED IN FETAL LIVER, SIGNAL = 0.99; EXPRESSED IN BRAIN, SIGNAL = 1.3; EXPRESSED IN HELA, SIGNAL = 1.1; NT HIT: gi15316964, EVALUE 0.00e+00; EST_HUMAN HIT: BF948172.1, EVALUE 1.80e-01; SWISSPROT HIT: P39806, EVALUE 2.00e-06
ttcagtcggcctgccgttgcccccaaccctcccaagcctcatacccttcatcaagacggaagagccagcccccatccccatcagccattctgccaccagccccccaggctcagtcaaaagtgactccgggggccctgagtcagccacaagaaacctaggtgggctcccagaggaagccgaagggtccactctgccaccctctggtggcaaaagcgaagagagtggcatggtcaccaactcagtcccgacggcgagcagtagcgtcctgagctccccagcggcagactgcggccccgcgggcagtgccaccaccttcaccaaccctttgttgccgctcatgtccgagcagttcaaggccaagtttccttttgggggactcctggactcagctcaggcatcagagacgtccaagcttcagcaactggtagaaaacattgacaagaaggccactgaccccaatgagtgcatcatctgccaccgggttctcagctgccagagcgccttg

SEQ ID NO: 10344 - DNA, 557 bp, Homo sapiens
  MAP TO AC005609.1; EXPRESSED IN HEART, SIGNAL = 1.4; EXPRESSED IN LUNG, SIGNAL = 1.3; EXPRESSED IN FETAL LIVER, SIGNAL = 0.95; EXPRESSED IN BRAIN, SIGNAL = 1.8; EXPRESSED IN HELA, SIGNAL = 0.48; SWISSPROT HIT: Q9Y5H9, EVALUE 1.00e-101; NT HIT: gi14861872, EVALUE 0.00e+00; EST_HUMAN HIT: BG023736.1, EVALUE 0.00e+00
taacacggtggccgtggctgtcaacgctggttcgccgtggtccttcaccagcacgagtaggcggtgtcgaggggagtcagcctcgtctagggcacgtgtcgtgctgatctcacccgtgtatagccccacgcggaacgggatgcgagcgctgccagtacccagctgaagctcgtacgaaagccacgcgttgtagcctgagtcagcgtccactgcgcgcaccttcgccaccacgtgccctgcacccaccgaccacggcaccagctcactcactgcgccagcagcggtgccagccctaggcgccaacagtgccggcgcgttgtcgttctcgtccagcacgaacacctgcagcgtcacgttgctgcccagaggcggcacgcccgcatcccgcgcgctcacctggaactgcagcagctccacttcctcgtggtccagcggctgcagcgcgtacaccttgccgctctccgcgtgcaccgaaacgtagctcgacaacgcgcgctcgcccacccgccgctccaccagcgagtaggacaccagcgcgttctcctgcgcgtccgcat

SEQ ID NO: 10345 - DNA, 522 bp, Homo sapiens
  MAP TO Z98044.13; EXPRESSED IN BRAIN, SIGNAL = 0.8; EXPRESSED IN HELA, SIGNAL = 0.61; EXPRESSED IN LUNG, SIGNAL = 0.92; EST_HUMAN HIT: BI032198.1, EVALUE 1.00e-103; SWISSPROT HIT: O95479, EVALUE 3.00e-32; NT HIT: gi4758497, EVALUE 1.00e-100
gtggaagacgagctgccggggcaggcactggctctgcgccgcggcccagtgcttttcgctctgcacacagcaggcctggttcttgaacaagatccgagcgtagcccactctctcgtccaaggctttgccagacatcaggatgaaaggcacgccctcccagcgaaggttgtcaatgtgcactaggacggctggggtgagggaacagcagagggtgactctctggcacagaccaggactctccggccagccctctcctctccttgccggctcctctgggcgtccccctgcctcagggaagcccctcgccttgccatgctcacccctcgcctggcatctcttccatgaccttctcttcccagtccatgcttgaaaaccggcctctggggctatctctatggctttgacacctgccttcattgaggcccctcttagagttatggtcccccaggaaaggagaaccgggctgagagcatccaacctggagactctaaaggacgccccacagtgggggcaagtggggtg

SEQ ID NO: 10346 - DNA, 529 bp, Homo sapiens
  MAP TO U73167.1; EXPRESSED IN BRAIN, SIGNAL = 1.2; EXPRESSED IN HELA, SIGNAL = 0.66; NT HIT: gi14737404, EVALUE 0.00e+00; EST_HUMAN HIT: AW960740.1, EVALUE 0.00e+00; SWISSPROT HIT: P37398, EVALUE 3.70e+00
ctgccccaaggggtcccaagggacctccattgccaccaccccctcccctacctgagtgcctgaccatctcacccccagttccatcagggcccccttcaaaaagcctgctggagacacaatatcaaaatgtgagggggcgccccatattctggatggaaaaagacatctgaggccatccagggcaaggaactgtctttctggttcaatagactgccccgacagtctacaagcctcagcccactgaccatacctcagcccctagcccctggggggcagctttaacctgggcatgtttcctgggtaccagtggggccaggaggtggctctggctcagagccgtcagtgtggctgaataaaggctctcttgggtatggctgtgacagtttatttgttgatccccctaccctcacctctcacctcttctgcaggtcccttatccctgcagaagtctccagatccaccttggccctgaggccattgatgggaggatgcctgtcctttgcctttaccccccacctggctcaggaga

SEQ ID NO: 10347 - DNA, 506 bp, Homo sapiens
  MAP TO AL133375.3; EXPRESSED IN BRAIN, SIGNAL = 0.83; EXPRESSED IN HELA, SIGNAL = 0.68; SWISSPROT HIT: Q14999, EVALUE 7.00e-18; EST_HUMAN HIT: AL596679.1, EVALUE 0.00e+00
tgggcgcagccaactcttccatttcttaaaccccttcttcatcccctctctgtcttcactccattctccttctgttataaatcccaaagtatgttcagctatttattccatcctattttttgccttttctgtttggcctcctaaattctaccatgcagcctaccgatcaccacccaccttctctgtgtctcaagattccaccccctccatgtattttttttcttttctcatactgccttatctttctccttgtgtatcccaggaggtcaggatggtgggggaacggcatgctggggacctcatggtgcccttagggcctcggctgcaggcatatcctgaagaactcattcgacagaggcctgggcatgacgggcatcctgaatacctgatccgatggagtgtcctgaagtgtggggaagtgggcaaagtgggtgtggaagaaggcaaagcagagcacatcctcatgtggctgtcggctcctgaggtctacgccaactgccctgggc

SEQ ID NO: 10348 - DNA, 549 bp, Homo sapiens
  MAP TO AC007567.1; EXPRESSED IN BRAIN, SIGNAL = 0.85; EXPRESSED IN HELA, SIGNAL = 1.1; NT HIT: AL163280.2, EVALUE 1.00e-128; SWISSPROT HIT: P03360, EVALUE 6.00e-03; EST_HUMAN HIT: AU121481.1, EVALUE 0.00e+00
gggaactgccaagcggacattgaagcaaaaagagctgcaaggcaggaccctccattagaaatgcttatagaaggacccctagtatgtggtaatcccctctgggaaaccaagccccagtactcaaaagaagaaatagaatggggaacctcatgaggacatagtttcctcccctcaggatggctagccaccaaagaaggaaaaatacttttgcctgcagctaaccaatggaaattacttaaaacccttcatcaaacctttcacttaggcactgataacacccattagatgaccaaatcattatttactagaccaggccttttcaaaactatcaagcagatatagtcagggcctgtaaagtgtgccaatgaaataatcccctacactacacaccatacatttcaatcaccatacatttcaatccctgtatctttaacctccttgttaagtttgtctgttccagaatcaaagctgtaaaactacacatcgttcttcaaatggatccccagaggcagtccatgactaagatctaccatggacccctggactggc

SEQ ID NO: 10349 - DNA, 583 bp, Homo sapiens
  MAP TO AC006379.2; EXPRESSED IN BRAIN, SIGNAL = 0.93; EXPRESSED IN HELA, SIGNAL = 0.66; EXPRESSED IN FETAL LIVER, SIGNAL =   1; EXPRESSED IN HEART, SIGNAL = 1.4; SWISSPROT HIT: Q05858, EVALUE 4.30e+00; EST_HUMAN HIT: AL521707.1, EVALUE 1.00e-73; NT HIT: AL163303.2, EVALUE 1.00e-48
gcggctggtcacccaagagctctgatagagattgacaaggagattaaggttgcaggaaagcaggctggatcaaggagtcatttcaactttcaagtcttgttatttaagaaatatatgtcataaggctatagctgtcatagatagtgattcctgtgatggatttgggtaaattgaaaatcttctggaaatgattcaccattctagatgccattaaggatatttgtgattcatggatggaggtcaaaatactgacatcaataagagatgggaagcagttgattccaacttattttctactttatctgtcattttcttagaatgttttcttctcatataatattaaaaatgattccaaccctcatgggtgactctgaggggtccaagacttcagcagaggaagtcactgcagatgtggtggaaacagcaagagaacttgaattagaagtagagcctgaagacgtgactgaattgctgcaatctcatgataaaactttaatggatgaggagttgcttcttatggataagcaaagacagtggtttcttgagatagaatctactcctggtgaacatgctgtgaacactg

SEQ ID NO: 10350 - DNA, 502 bp, Homo sapiens
  MAP TO AC006965.2; EXPRESSED IN BRAIN, SIGNAL = 1.1; EXPRESSED IN HELA, SIGNAL = 0.8; SWISSPROT HIT: P50302, EVALUE 2.70e+00; EST_HUMAN HIT: BI551295.1, EVALUE 0.00e+00; NT HIT: AF242432.1, EVALUE 1.90e+00
gcaggacgccattgacttgggtcagccagttttcaaaggtttcttccccttgggctggcaccaccctccccgagaacaacttcatgtttctgtctgccatgctggccattataggaccgagacttctccccagggacctcagcatggaatgggcccaaggcggcaagggtgcattcagccgccggctgttaccgacacgtgcaatgatgctagccatgactgacgacgatagggtatctgaatataagaagatgcctaggctttttagaaaagcttaatctgcaggtgggagaggagaggaggtggctctgccttcctatctcagcaggggctgtaaaaaagaaaggggggctggttaataagggagcgggctgcagctgcattctcttcctacctgaatatcctgcagtacattttatatttgcccactaccctaaaaataatcctgtaggagattgacacttacaacctcccagagctacccgatgcctgcgtgctagca

SEQ ID NO: 10351 - DNA, 557 bp, Homo sapiens
  MAP TO AC005670.1; EXPRESSED IN LUNG, SIGNAL =   1; EXPRESSED IN BRAIN, SIGNAL = 1.2; EXPRESSED IN HELA, SIGNAL = 0.77; NT HIT: gi13633133, EVALUE 0.00e+00; SWISSPROT HIT: O60309, EVALUE 3.00e-33; EST_HUMAN HIT: BG772380.1, EVALUE 0.00e+00
tcctgaggcgaggtccggtgacttccttgggaagctctgccgcgcccccatcccaccctaccccaccctaccccaccacagcaggcgctggagtcctgggaccaccagggtctgaggcccaaatccttcctcactaaggggaggagaggggtgttccggcagggcaggatgggaaggcgtgcttgggcgggattgtgacataagagtgccctggtgacatggagcagatctgtggcataaatacaggtgtcataaagacagggcgggactcacgcttacaaggggcacgagtgtctcggagctgccagaatgacttccgctcagtgcccggcactagcgtgtgtcatgtcccggctgcgtttctggggcccatggcccctccttatgtggcaactattgtggctactagtcaaggaggctcagcctctggagtgggtcaaggacccgctccagctgacctctaaccccctggggccgcctgagccctggtcttcccactcctcccatttcccacgggaatctccccatgcgcctactctcccagcagacccgtggga

SEQ ID NO: 10352 - DNA, 525 bp, Homo sapiens
  MAP TO AF127019.2; EXPRESSED IN HELA, SIGNAL = 0.61; EXPRESSED IN BRAIN, SIGNAL = 0.93; EXPRESSED IN LUNG, SIGNAL = 0.93; NT HIT: U28960.1, EVALUE 5.00e-01; SWISSPROT HIT: P41809, EVALUE 7.00e-04
tgcaggtggctgggtgcaagcgcagtctgagaggttcctgacctgaattttctgcgatgtgctctagagctgcaattgacagccccatcagatctgctgtgtgctctagagttgctattgacagccctgttagatctgtggtgtgctctagagctgcaattgacagccccatcagatctgccgtgtgctctagagctgcaattgacagccccatcagatctgccctgtgctctagagctgcaattgacagccccatcagatctgcaatgtgctctagagttgcaattgacagccctgtcagatgtgcggtgtgctctagaactgcaattgacagtcccattagatctgctgtgtgctctagagttgcaattgacagccggccagatctgccaggtgctctggagctgcatttgacagtcccatcagaactgcgacgtgctctagaggtgcagttgacagccccatcagatgctaccagactaggggaacatctaaccatacttagcaatggcccccaatccatgg

SEQ ID NO: 10353 - DNA, 515 bp, Homo sapiens
  MAP TO AC004590.1; EXPRESSED IN HELA, SIGNAL = 0.79; EXPRESSED IN BRAIN, SIGNAL = 1.8; NT HIT: AF134986.1, EVALUE 0.00e+00; SWISSPROT HIT: O43497, EVALUE 1.00e-56; EST_HUMAN HIT: AI859918.1, EVALUE 0.00e+00
ctggacagcggctcccaaccccacctgggcacagacccctctaaccttgggggccagcctcttggggggcctgggagccggcccaagaaaaaactcagcccgcctagtatcaccatagacccccccgagagccaaggtcctcggaccccgcccagccctggtatctgcctccggaggagggctccgtccagcgactccaaggatcccttggcctctggcccccctgacagcatggctgcctcgccctccccaaagaaagatgtgctgagtctctccggtttatcctctgacccagcagacctggacccctgagtcctgccccactttcccactcacctttctccactgggtgccaagtcctagctcctcctcctgggctatattcctgacaaaagttccatatagacaccaaggaggcggaggcgctcctccctgcctcagtggctctgggtacctgcaagcagaacttccaaagagagttaaaagcagcagccccggcaactctggctccaggc

SEQ ID NO: 10354 - DNA, 505 bp, Homo sapiens
  MAP TO AC009336.12; EXPRESSED IN BRAIN, SIGNAL =   1; EXPRESSED IN HELA, SIGNAL = 0.92; NT HIT: AF202118.1, EVALUE 0.00e+00; SWISSPROT HIT: Q01822, EVALUE 6.00e-04; EST_HUMAN HIT: BG766603.1, EVALUE 0.00e+00
agggaaggcgggctgcagagccacgggccgggcgtcggagcggcagaacttgggtgccaagctgagcacgtcgccgccgaccccgccgctgctgctgcatgacacgtactccaggtaggagctcatggttcgggccccacctttctgagggcgcaggccggggccggagtacggagccgggcagaggctgagcaggactgccgccgtctgcgccgctccgccagccctctctacccgagctgccctctccaacccatggcgagtgagccggaggtaaatagtggcctaatataccggcgggggcggccacgtggcgctggccggccaatgggcggcctctccgctcggcccggtcggcgcgccgctcctcgcgcctgccccgcagccaagttagccaaagcagcccagggccgccgcccagcgcccccgagccccgaggagagccgtcgcgaccgggggctgcctgggcaagggcggggcgagagggcagaacgcctgctctcgg

SEQ ID NO: 10355 - DNA, 557 bp, Homo sapiens
  MAP TO AC002310.1; EXPRESSED IN BRAIN, SIGNAL =   1; EXPRESSED IN HELA, SIGNAL = 1.1; NT HIT: U22511.1, EVALUE 1.30e-01; EST_HUMAN HIT: AW969032.1, EVALUE 0.00e+00
gaccgccctggaagcccatcggtggatccaccgctcctgcagcgagaggcgcgcgtggcagcaggccgtggtggggcgttcagagcccatccctgttttgggaggcaaggatcccccagttcacttccggcactttccagatatatttcaagagtgtgggtgatggcgttcacacaaactggtcagcgtttccctggagaggaagaggcaaggtttgtgtatttgggggataaggaaaggaagtgggcgtttgaggaaaacaaagttctgccttaggtaaaaagcagaggtaggggcacagagggctgtggggaggaggcaggaatctgaaaaggtgcctgggggttgaccccattttctgaagctccagcacacagggccccgtgttcacgtcccatccttcactgaaaaccattcacctaactggcttttccttcatgattgttctctcccttgtagctctctgctttttggcctgtatctctcctactcctctgagatggggtcccctacattccagtgcctattaaaggagcctgcacccactctggaccccc

SEQ ID NO: 10356 - DNA, 550 bp, Homo sapiens
  MAP TO AC000113.1; EXPRESSED IN HELA, SIGNAL = 1.6; EXPRESSED IN BRAIN, SIGNAL = 0.78; EXPRESSED IN LUNG, SIGNAL = 0.92; SWISSPROT HIT: P32323, EVALUE 4.00e-05; NT HIT: AB037739.1, EVALUE 0.00e+00; EST_HUMAN HIT: AL040448.1, EVALUE 2.00e-01
tccacagagcatgagccccgggctgcttcctgctcttctaagaggtagcagagtgctggggtcaacattccgaaggatggcacttcctttggtggtggtttcgcagtttcaggagttgtggcagtcatgtgcgatgtgggctttgatccagaggctgtgatgttaatgtgagaggtggatgcctctccagagtctgtggctttgatttccggagtggacatcactccaaaggctgtctgtggtgtggacattgttccagggcctgaggccctcattagtggtgtggacatccctctagagtctgtggctgtcatttgtggcatggacatacccatgccacatccagaggctgtggctcttggtagtggcatgggcatcgatccagaaactgaggctctcataaatgatgtggaccttgctccagaagcagaggctctaattggcgctgtggccatccttccagacacggtatatgttgtttgtgacaaggacatagatctagagttcgcaacactggtttgcaatgtggacgttgctccagaggccatgg

SEQ ID NO: 10357 - DNA, 510 bp, Homo sapiens
  MAP TO X66401.1; EXPRESSED IN PLACENTA, SIGNAL = 1.4; EXPRESSED IN HELA, SIGNAL =   1; EXPRESSED IN BRAIN, SIGNAL = 1.3; EXPRESSED IN FETAL LIVER, SIGNAL = 1.6; EXPRESSED IN LUNG, SIGNAL = 1.4; EXPRESSED IN HEART, SIGNAL = 1.6; SWISSPROT HIT: P11077, EVALUE 2.80e+00; NT HIT: X87344.1, EVALUE 0.00e+00; EST_HUMAN HIT: BG423357.1, EVALUE 1.00e-57
cctggagcgccaacagggacgcagcccaagtgactacccactccacgctcctgcttcccagtccctctgcacccggcgataggagggagcggagcccggaccacttagctcgccgcggcaggcgggggtgggggtgggggtccggggattttttttttttttttttttaagcacgaggctcctgatggtcatgcttccagctccccagaaggccgaaagctgtctgtcgtaggaggggtgtacggatgagcaccggttactcaggagagctctcagggttgaataggataaaatgagaagccgatggacgggttaggcggagccgggcgggtaggagggcagggacaaggattgggactccacccccatgatttctcatctcgtatccgttgacagagccatgcggctccctgacctgagaccctggacctccctgctgctggtggacgcggctttactgtggctgcttcagggccctctggggactttgcttcctcaagggctgccagg

SEQ ID NO: 10358 - DNA, 511 bp, Homo sapiens
  MAP TO AL135998.2; EXPRESSED IN HELA, SIGNAL = 1.1; EXPRESSED IN BRAIN, SIGNAL = 0.93; EXPRESSED IN LUNG, SIGNAL = 1.1; EXPRESSED IN FETAL LIVER, SIGNAL = 1.1; SWISSPROT HIT: P55041, EVALUE 3.00e-16; NT HIT: gi12083632, EVALUE 2.00e-55; EST_HUMAN HIT: BE669923.1, EVALUE 1.00e-125
ctagggagggcctgggcgtgcggtggcaagggattggtactagtgaatcttgcaaccgagagaacatggctgagctcatatggtgggtctgtggaggtgcgaaggagagggagaaggaggcctaggagagaggtgaggggaagtgacaagaagggattctcaggatcctcgagtggggcattgggagtgtccccctagcctgggtctgattgcaagtgagtgcgtccgcgatggtaaaaaggccttagggagaagaggtgacttggaagggagagcattcccctgagatcgcaagtatggaatctgttcaggatacacaccctccagtgatacctcccgggagcgggccaagtcgctcttgtttccaacgaggataacgggtaggtcgtggtgcggcctcccagcccggagccgaagtagggtctctggaactttggagaaactccgtcggtcggtgactgagaagacgatgagaaaggcgtccccggtctgaaggcagtggtcccgcagc

SEQ ID NO: 10359 - DNA, 505 bp, Homo sapiens
  MAP TO AC005058.1; EXPRESSED IN BRAIN, SIGNAL = 1.3; EXPRESSED IN HELA, SIGNAL = 2.4; NT HIT: gi14752265, EVALUE 0.00e+00; EST_HUMAN HIT: BI333453.1, EVALUE 0.00e+00; SWISSPROT HIT: P75327, EVALUE 1.80e-01
gccaggatgccaggatctggagatcttaatttcccctcttctacctttttatcttcaagttctgatttgtcccggaaatgttcattttccttttgttgagacattttttccttacgtttgaaatatgaattaatatgatttgataaaaagtagaatgagtctccaaattttgtggttatagaacttgtgtaatgaaaaagactgcgtttacctatatcttcttctttgtctataatgtgacttttctcttctggaaaaggactcttttctgctgatttgtcactatattttttcagagatttgatggcttgtttgatgtttttctgttttaaccagccactatccgatacttttcttaaaatttgggaacttggcttaaattgagctaaacgtgaaatcatttcattttgattgccaaaaacagcctttgaaacagagttcaaagtacttttaatacgggacatacaaatgttcacttttgtaagtcccttgggagcagaagtgc

SEQ ID NO: 10360 - DNA, 501 bp, Homo sapiens
  MAP TO AL157773.3; EXPRESSED IN HELA, SIGNAL = 1.4; EXPRESSED IN BRAIN, SIGNAL = 1.1; EXPRESSED IN LUNG, SIGNAL = 1.2; EXPRESSED IN HEART, SIGNAL = 1.6; SWISSPROT HIT: Q9P2N7, EVALUE 4.00e-09; NT HIT: Z22668.1, EVALUE 4.80e-01; EST_HUMAN HIT: AW294693.1, EVALUE 0.00e+00
acaaatgcccagcctcccccatgtgcacatctcgtaaatcccactggatgatagatatttgaatatggaggaaagggggactgaaagctcagtctctgtgggctcttctccaagtggccccataaagggagtgcttataaacggaggagaggcttataaacgggggcgaggggtggtcaatgcctgctttgtcttttccaagtgtcacacatttttactggctgagagagaaactccagcctccaggtgaggtgctgggccaggtccctcgcctccttgcaggggtagtgtcaggcttcccactcatgatttgcaaagtaacatggggtccccagctgccgccgacaaagctgttacaccttctctatcatttccagatacgatccccgcttcaacacctggatacacctggccagcatgaaccagaagcgcacgcacttcagcctgagcgtgttcaacgggctcgtgtacgccgcgggcggccgcaacgcagaaggaagc

SEQ ID NO: 10361 - DNA, 531 bp, Homo sapiens
  MAP TO AC004883.2; EXPRESSED IN BRAIN, SIGNAL =   1; EXPRESSED IN HEART, SIGNAL = 1.5; EXPRESSED IN LUNG, SIGNAL = 1.1; EXPRESSED IN HELA, SIGNAL = 0.54; EST_HUMAN HIT: AF121179.1, EVALUE 0.00e+00; SWISSPROT HIT: P57511, EVALUE 2.50e-01; NT HIT: AF267747.1, EVALUE 1.00e-29
gctgcacgggggatttctgggttggacttgggtttgcaaacacttgtttttgctcgggacactcggtgtctgacaagcctaagagatacttcctgagcccttttttcagctcgtgaagcttctcgtcacgcattctttccatatactggtcataatgcttgctgtgattggtttgatagtggcgtcttaggttatattctttggacacagacatgctttgtttgcatatgagacatgttggaatattctgtacttccacgaagaaatacgctctctcccacttttcttgaaacacacggccctcctggtctatcttgcgttttcccacttttgacagagacagggagacaaagatatttcacttttctcttatcactactatgaggaaaacaacagcaaatgcttgatgacgcacgagagggaggaagcggggcggggcagggcgtggttaacaggagggtgacccaccctgcagagggacggctgaccctcaactccagcaaaccgctgccaggatgccagctgtggcca

SEQ ID NO: 10362 - DNA, 537 bp, Homo sapiens
  MAP TO AL109754.13; EXPRESSED IN HELA, SIGNAL = 0.76; EXPRESSED IN BRAIN, SIGNAL = 0.94; NT HIT: gi14771960, EVALUE 1.00e-20; SWISSPROT HIT: Q03278, EVALUE 3.40e-01; EST_HUMAN HIT: AI888450.1, EVALUE 1.00e-117
cctgttggcctgaagtcccctgagcaagtgtaccaatatggtgtgtgtttcaaatatctctagggataaatgttctaatcctattgtaaattgtaaacgtatcttcttcagaattcaccaaagtgatgctcacagaaaaaaaaaatcacagctcaattttgtaattataacagcaaaatgtgcacatctctatatacatataatttggggacacattttttactaatcacgagaaattaagaaaacagttggatgagtgtcacttatagccatgcaaatgccttggcaccattcataattaatgatgctttatgttttaggatgtgacctgaaatggaagaatttagatcataaaacgcccagggctgtggctaaggaaggcggcttcaaagcagcaagcaaagaaatacgccgagcagagagaatcgctaataaactagccaggccaggagccaaaaatccaaatccactgtgggcccttagactgcacgattggtccgtagaacgtgaggctttcctccgggaagcctttgcggt

SEQ ID NO: 10363 - DNA, 501 bp, Homo sapiens
  MAP TO AL121907.2; EXPRESSED IN HEART, SIGNAL = 2.7; EXPRESSED IN LUNG, SIGNAL = 2.2; EXPRESSED IN FETAL LIVER, SIGNAL = 1.5; EXPRESSED IN HELA, SIGNAL = 0.67; EXPRESSED IN BRAIN, SIGNAL = 1.9; EST_HUMAN HIT: N35382.1, EVALUE 2.00e-59; NT HIT: gi14769949, EVALUE 1.00e-94; SWISSPROT HIT: P42694, EVALUE 3.00e-06
gtcctgcgctcatccccgagcttggtgggggtgccctctccttgtcgggggtggccgagtcctcactgcgtccagcactcatccccggccctgctgcgtcttcaggtcagtgcactgaggcaggagctgaggaggcgggacctaggccaggtgtctgtcggcagttttgagatcctgccaggtgggtgaccagcggggccaggtgctgccagctgccccaggataccccgggtggctcggcccactcctcagcctggcatcggcaggggtggggctggtcccaccgtcttgcgcacccagcctgacctgactgcgtgccccctgcagggcggcagttccgggtcgtggtgctcagcactgtgcacacctgccagagcctgctcagccctggggcactggcccctgagttcttcaccgacgcccgcgtgctcaacaccgtcctgacccgcgcccagtcccagctggtggtagtgggggacgccgtggccctctgctccttcg

SEQ ID NO: 10364 - DNA, 505 bp, Homo sapiens
  MAP TO AC007191.1; EXPRESSED IN PLACENTA, SIGNAL = 1.6; EXPRESSED IN BRAIN, SIGNAL = 1.1; EST_HUMAN HIT: AL543803.1, EVALUE 5.00e-76; NT HIT: gi14761169, EVALUE 2.00e-92; SWISSPROT HIT: O53657, EVALUE 4.10e-01
aggatgggggccagaatggggggacccttaagtggtaccaaaattagctgccgtctgctccctgctggtgggtccttggggtggaaagcatggcagggagggggttggggctgaatggagaagaaagtgagatgctgataaaaaaaaaaaaaacacccttctcagagggtccacggccctggttctgaagagtagaaaatcaacaggatcaagcagagggctttcctgggtcacccctgctgaaccccagctcagttccggtgagggatcaatgctgcctggagtaggggaatgggcaggcggcccagtccggaccctcggctcccggggggagaggggaggggtgggcgtggtgggctctcccctcccctcccccggcttcacctcccctcctcccggccggcccggcccccgcctggcccattgcagggcagcacccagttgttatcgtggaggcccaggcggcagccgggagtctcgcggtcggctcgacggcagcacatcc

SEQ ID NO: 10365 - DNA, 522 bp, Homo sapiens
  MAP TO AL031588.1; EXPRESSED IN BRAIN, SIGNAL = 0.79; EXPRESSED IN HELA, SIGNAL = 0.6; EXPRESSED IN HEART, SIGNAL = 1.3; EXPRESSED IN LUNG, SIGNAL = 0.92; SWISSPROT HIT: Q9Y6T7, EVALUE 4.80e+00
tgaggtggagcgccaggaggcccagagctgctgggagatcccgcatgaagcagatgtgggaggcggtgagcagccgcgtcaggatttcccacctgggcactgccgccccttggggacgatgacccttcattgtgaggcctgttctgggcagcattcctgacctctggtcactagactccagctgttcccctaacccggttttgacaaccaagaggtcttcatcattgtcaggcccctgaggtcatgccctggatgagaaccactgggctagtgagacgggagctcagctagcgggagtcctggtagcttcaggtggagatgcgagaccctgggccggagcttgaggcagcagcctctacgtgggcagcaggtggtctccaaggggcactcggcatccgtcacctggccggggacgatgctgtgctggtcgcgatcgccatgctggccacgggtggctagaccacacgcaatgaagccccatgcctgagctggctgctggagtccttgggactctgcctcggc

SEQ ID NO: 10366 - DNA, 541 bp, Homo sapiens
  MAP TO AC010130.2; EXPRESSED IN BRAIN, SIGNAL = 1.8; EXPRESSED IN HELA, SIGNAL = 0.45; EXPRESSED IN LUNG, SIGNAL = 1.4; EST_HUMAN HIT: AI879705.1, EVALUE 0.00e+00; NT HIT: AY029472.1, EVALUE 0.00e+00; SWISSPROT HIT: O60315, EVALUE 1.00e-103
ggtgggcttggagccaccagccctttaggagttcatccatctgctcagagtccaatgcagcacttaggtgtagggatggaagcccctttacttgggtttcccaccatgaatagtaatttaagtgaggtacaaaaggttctacagattgtggacaatactgtttccaggcaaaaaatggactgcaaggctgaagaaatttcaaagttgaaaggttatcacatgaaggatccatgctctcaacctgaggaacaaggagttacttctcctaatattccgcctgtcggtcttccggtagtgagtcataatggtgccactaaaagtattattgactatacgttggaaaaagtcaatgaagccaaagcttgcctccagagcttgactactgactcaaggagacagatcagtaatataaagaaagagaagctacgtactttaatagatttggtcactgatgacaaaatgattgagaaccacaacatatccactccattttcatgccagttctgtaaagaaagttttcctggccccatccctttgcatc

SEQ ID NO: 10367 - DNA, 527 bp, Homo sapiens
  MAP TO AC013602.2; EXPRESSED IN BRAIN, SIGNAL = 1.1; EXPRESSED IN HELA, SIGNAL = 1.7; EXPRESSED IN HEART, SIGNAL = 1.2; EXPRESSED IN FETAL LIVER, SIGNAL = 1.2; NT HIT: gi14767848, EVALUE 3.00e-67; EST_HUMAN HIT: AA468023.1, EVALUE 1.00e-64
gctgcaaaggttgggggagttgatactcacttggctctgaggtatgttcccaccacccagtgtgattaagtgggatgttgttttctagggtcataggaaagaatgttcaattactctcccttatagatttctcttaacttataaccgtagagcttgtagacatgaggcgtcttggaaactgtctctttctaaaaggtctttccaccgttcaggtcctatgagtctagctctgatggaccactgagtgattcgtatctcccctttgcaacacttgccccaaaagcccagatctagagggatgtgtcaggtgacctaacaggaggcctgctttgttttctgttggtttctccaatttgggggttttccccatttccttacaccctggttttccttcctaggagagaagaggttgcagagggagaagtctgagcaggttctggataacccagaagacctgaggggtcccattcatctctctgtgctgagacagggcaaaagtccctacaagcgtggctttgatgaggggg

SEQ ID NO: 10368 - DNA, 512 bp, Homo sapiens
  MAP TO AC005224.1; EXPRESSED IN BRAIN, SIGNAL = 0.94; EXPRESSED IN FETAL LIVER, SIGNAL = 1.2; EXPRESSED IN HELA, SIGNAL = 1.5; EST_HUMAN HIT: N71828.1, EVALUE 9.00e-96; NT HIT: gi14771550, EVALUE 1.00e-102; SWISSPROT HIT: P46804, EVALUE 4.80e-02
atgtcgggccgcttggacagcgtctgcgtgtagtccgagatggccctggtcaccgggtcccgcaccaccacgatgagcttggtgtccttggacatggccgagatgcgcgcaggggcctcccgcgtgacgaagtaactgggcgtcttctccatggtgatctgcccgtccagggttctgggcatcaggtccctgagaaacgcaagcaaacaaaccgggatcagaaggtgacgcctctctggccacacgtcttaaggtcacgacttctaatcccagctccctcttatttctggaagcagtggtagaaacatgtaaaatgcaagtagaactttagagctgaaaggtagattagcatcccacctggtttggagggcaggtaccatctaccggaaaacacgaaggccccttcatgcaaggtagaaagggcaagctatctgtttctctaagatcctcttgtgggtataacctttcccttattttcccagctttcagattgccccaagcatctgaagcca

SEQ ID NO: 10369 - DNA, 538 bp, Homo sapiens
  MAP TO U58675.1; EXPRESSED IN BRAIN, SIGNAL = 0.81; NT HIT: AF101769.1, EVALUE 0.00e+00; SWISSPROT HIT: P47883, EVALUE 2.00e-44
tgaaggtggcccccacaagcagcagctgcccattgaggtggatgctggagcaagagagctggaaaagaggtgggaggtcacagtagaagtggttgaccacattagggccacagaagtcaagcgcagacacagccactgtgtgagtcagagcattgatgaaggagacagtgcagcaaattcccaccagggcaccctggacttcacagctcatgcgagtgctgttggtgagaagctgacagatagccaggtagcggtcataggccatggctattaagaggtgacagtccaccccagccaggaggtggggaaagaagagctgtgaactgcaggcagcatagggaactctgcactggtgggcctggagacacgccagcatcggaggaacagtgactgatgcacccgacgtccagcagagatgtccagtagatgagtgggttcagcatggggctgatgacagtgttgaggatgccaatgcccttgtccttgtccgaagactccactgaacccagccttgtgtagctgaagacgcccgtcccat

SEQ ID NO: 10370 - DNA, 503 bp, Homo sapiens
  MAP TO AF129756.1; EXPRESSED IN BRAIN, SIGNAL = 0.77; EXPRESSED IN HELA, SIGNAL = 0.75; NT HIT: AF129756.1, EVALUE 0.00e+00; SWISSPROT HIT: P39188, EVALUE 2.10e-02; EST_HUMAN HIT: AA909516.1, EVALUE 5.00e-17
ttcaggtgctgggggcttgcagggaggacccccacgatcctgtcaattggcaagacccagcagggccaggggaatcagttactatgctttctatcatctcttttacaacaaatcaactgtcgctacttgcaggatgcaacgacccaggctttggggttgatctctctgggtggtgacaaactcattatcctggtcttctttgagaccacgtcttgctatgttgcccaggctggtcttgaacttgggctcaagtgatccttctgcttcagcctgctgagtagcttggactactgatgcatactaacagatccagctatctagccaccctagtctttttatttttctgttccctctctccttccgaaacccaaacacccagggctcctttttcttctttcctcattagcatcccagtttctcacttcttacccagactcccctattaccaaagatatttaaaagcttcccaggatgttctgcagcctggcacttcacacagccca

SEQ ID NO: 10371 - DNA, 571 bp, Homo sapiens
  MAP TO AL121997.7; EXPRESSED IN BRAIN, SIGNAL = 0.93; EXPRESSED IN HELA, SIGNAL = 1.7; EXPRESSED IN FETAL LIVER, SIGNAL = 0.97; NT HIT: gi15298936, EVALUE 0.00e+00; SWISSPROT HIT: Q99698, EVALUE 1.00e-102; EST_HUMAN HIT: AI114747.1, EVALUE 0.00e+00
gcagcctgacccttttgcaccaagacaaaagaaaacactgcaggaggttcaggaagattttgtgttttcaaagtatcgtcatagagcccttcttttacctgagcttttggaaggagttcttcagattctgatctgttgtcttcaaagtgcagcttcaaatcccttctacttcagtcaagccatggatttggttcaagaattcattcagcatcatggatttaatttatttgaaacagcagttcttcaaatggaatggctggttttaagagatggagttcctcccgaggcctcagagcatttgaaagccctaataaatagtgtgatgaaaataatgagcactgtcaaaaaagtgaaatcagagcaacttcatcattcgatgtgtacaagaaaaaggcacagacgatgtgaatattctcattttatgcatcatcaccgagatctctcaggtcttctggtttcggcttttaaaaaccaggtttccaaaaacccatttgaagagactgcagatggagatgtttattatcctgagcggtgctgttgcattgcagtgtgtgcccatcagtgcttgcgc

SEQ ID NO: 10372 - DNA, 502 bp, Homo sapiens
  MAP TO AC005764.1; EXPRESSED IN BRAIN, SIGNAL = 0.78; EXPRESSED IN HELA, SIGNAL = 0.34; SWISSPROT HIT: P32517, EVALUE 6.00e+00; EST_HUMAN HIT: BG771998.1, EVALUE 0.00e+00
ggccggcagcccttttgaagcatccctgggcctccttgggtccaaagataccctgagccttcaagaagttatctcaaagcttgcccgggtaccggcaaatcacagacctaggaatgatccattggccacaggcccaggcagctggcagctcctgggacagaatgtagcagggcgatgtcacagaagctgggggcatctagaaccctggtgactcctggtctccatgtcatctgccagaaaggccacctgcgccagcacctcctgagaccggccttcaaagacacgacgcatgccgctctgccgtccggagcacttaatgcctagagccagcagggtcccagtggccgcgtcactgcctctgagccacgcggtcattccaactcaactgccctcgcgtcctggccacaggccccctgggagaccccggagatgcccaaaggcctcatgcctgccgcctccagtgggacctagcagcacacagacagcgaagcgggtgaccatg

SEQ ID NO: 10373 - DNA, 531 bp, Homo sapiens
  MAP TO AF030453.1; EXPRESSED IN PLACENTA, SIGNAL = 1.5; EXPRESSED IN BRAIN, SIGNAL = 1.4; EXPRESSED IN LUNG, SIGNAL = 1.4; EXPRESSED IN FETAL LIVER, SIGNAL = 1.5; NT HIT: gi14739530, EVALUE 1.00e-122; EST_HUMAN HIT: AI475827.1, EVALUE 0.00e+00; SWISSPROT HIT: P17277, EVALUE 9.80e-01
gagccccgcgacaagtggacgcggcgcctgaggctgtcgcggacgctggctgccaaggtggagctggtggacattcaacgcgagggggcgctgcgcttcatggtggccgacgacgcggccgcgggctccgggggctcggctcagtggcagaagtgccgcctgctcctgcgcagggctgtggccgaggaacgcttccgcctggagttcttcgtgccgcccaaagtgagttaccccataatcccacctagcctggggggaccagaggaggcacctgggcagcagctgagggtgccagggactgcctttggggaccgcgtggtctaatctggttgacagggtgaagtatttggtgccaggaccctgggaggtgggcctgtcatgcctcttgaacaagtcaccccttcaaccccggttcttcctttgcgaggaagggtcctctggctacaccaaagggttctggggcactaattttttcttttcgtgtgtgtgtgtgtgtgtgtccgtgtgtgtgtgtgtgtgtgtgtgcgcgcg

SEQ ID NO: 10374 - DNA, 525 bp, Homo sapiens
  MAP TO AL008726.1; EXPRESSED IN BRAIN, SIGNAL = 1.3; SWISSPROT HIT: P29503, EVALUE 3.00e-10; NT HIT: gi6679436, EVALUE 3.00e-05; EST_HUMAN HIT: BI915986.1, EVALUE 9.00e-93
gcgggcctcgcagatcgtagcccgggcgcacgcgatcagatgatcctgttgtggacggctaagttgtaggcgggatggctgagaaagcggcgctaggacccccgggcagaggctcggggaagggagtcaggggggaaatgccttacaaggtcgccttgcggtcaccatcattgcccgccgcccaaaatagcccccggcgccagctggcctgccctatggccgagagatggctgctgcctccgagcccgtggattcgggtgcactctggggactcgagcgcccggagccccctcccacccgcttccatcgggtgcacggtgccaacatccgcgtggacccctctgggacgcgggccacacgcgtggagagcttcgcccacggcgtgtgcttcagccgcgagccgctggccccgggccaggtcttcctggtcgagatcgaggagaaagagctgggctggtgcggacatctgcgtctcggtctgaccgcgctggaccccgccagtctggcccccgttcccgagttttc

SEQ ID NO: 10375 - DNA, 562 bp, Homo sapiens
  MAP TO U66083.1; EXPRESSED IN PLACENTA, SIGNAL = 1.5; EXPRESSED IN BRAIN, SIGNAL = 0.8; EXPRESSED IN HELA, SIGNAL = 0.33; SWISSPROT HIT: P43362, EVALUE 2.00e-88; NT HIT: gi14768849, EVALUE 0.00e+00; EST_HUMAN HIT: BE793498.1, EVALUE 0.00e+00
  unsure 326
cccagagtcctcagggaggcgcttcctcctccatttccgtctactacactttatggagccaattcgatgagggctccagcagtcaagaagaggaagagccaagctcctcggtcgacccagctcagctggagttcatgttccaagaagcactgaaattgaaggtggctgagttggttcatttcctgctccacaaatatcgagtcaaggagccggtcacaaaggcagaaatgctggagagcgtcatcaaaaattacaagcgctactttcctgtgatcttcggcaaagcctccgagttcatgcaggtgatctttggcactgatgtgaangaggtggaccccgccggccactcctacatccttgtcactgctcttggcctctcgtgcgatagcatgctgggtgatggtcatagcatgcccaaggccgccctcctgatcattgtcctgggtgtgatcctaaccaaagacaactgcgcccctgaagaggttatctgggaagcgttgagtgtgatgggggtgtatgttgggaaggagcacatgttctacggggagcccaggaagctgct

SEQ ID NO: 10376 - DNA, 536 bp, Homo sapiens
  MAP TO Z79996.2; EXPRESSED IN LUNG, SIGNAL =   1; EXPRESSED IN FETAL LIVER, SIGNAL = 0.98; EXPRESSED IN BRAIN, SIGNAL = 0.82; EXPRESSED IN HELA, SIGNAL = 0.86; SWISSPROT HIT: O14791, EVALUE 4.40e-01; EST_HUMAN HIT: BF768083.1, EVALUE 7.00e-72; NT HIT: gi13449280, EVALUE 2.00e-74
tcccagaactctcccgccattgttcccaagttctttatcttgagtggggttttaacatttccccactgcccctcctctgcagcagtgctgtgctttctctgaacaaggctgaaaacatacctcaggacttaattttccttccccattccttgaccaaggctggggtgattcacatttgtccttccacatgcccctcttatgtgtttcttttttccatggaaccagtagttttcagcgaaggctgaactactctacaatgctctaggacttttcaggggattttgtagggaggtacagggaggattcgaagctgagagtggcaagaatatccaagagccacatgggttttcccatctgggaagctgaagcaaaatctttatttcatttctcctcagggatgaggatgacgctcctctgtgtgaagacgtggagctacaagacggagatctgtcccccgaagaaaaaatatttttgagagaatttcccagattgaaagaagatctgaaagggaacattgacaagctccgtgccctcgc

SEQ ID NO: 10377 - DNA, 507 bp, Homo sapiens
  MAP TO AC005033.1; EXPRESSED IN LUNG, SIGNAL = 1.3; EXPRESSED IN FETAL LIVER, SIGNAL = 1.1; EXPRESSED IN PLACENTA, SIGNAL = 1.7; EXPRESSED IN BRAIN, SIGNAL = 1.2; EXPRESSED IN HELA, SIGNAL = 1.3; NT HIT: U70987.1, EVALUE 5.00e-75; EST_HUMAN HIT: BF689816.1, EVALUE 7.00e-75; SWISSPROT HIT: P05143, EVALUE 3.60e-02
cctgtccggcctttccctgggccttctgccggtggatggcagtctcaactgcctggaagatgtcatttccctgtgccgtctggaaggtgaaggttccagggcctgaggggcagcggcggccggcctcgaaagagaacatgacctaaggagggtagagggggaaacacattaccaggagccatcagaggaagtgagtcacacgcctgcactagttagggtatctacaaagaagagaccacctgcgaacagacgcggggtcaccgggtaggcaagaaagggggatccaaaggtcagagcttcccactttctgtcctgccccacccctcccacagctgcccaacccaggaagccctcccggacagcccctgcaccttgtcccggccatagcgacgcaacagagtgtagggccaggacaggagtggctccagtatctgactctgggcccccacggtcaggagagtcagcctttcagcctccaccctcagcacgtaggagccatgcaggcca

SEQ ID NO: 10378 - DNA, 522 bp, Homo sapiens
  MAP TO AC008770.3; EXPRESSED IN LUNG, SIGNAL = 0.99; EXPRESSED IN BRAIN, SIGNAL = 0.97; EXPRESSED IN HELA, SIGNAL = 1.4; NT HIT: gi14760093, EVALUE 0.00e+00; SWISSPROT HIT: P52737, EVALUE 5.00e-57; EST_HUMAN HIT: BG675741.1, EVALUE 0.00e+00
tgggaatggattcacatctgccaagattcttcaaatacatgcaagaacacacattggagagaaacactatgaatgtaaggaatgcggaaaagcattcaattatttttcttccttgcatatacacgcaaggactcatatgggagagaagccatatgaatgtaaggattgtgggaaagcattcagctagcctggttccttttatggacatgaatagactcacactggaaggaagcactatgaatgcaagcaatgtggcaaaactttcacattttccagttcttttcgatatcatgaaaggactcacactggggagaaaccctatcaatgtaagcagtgtgggaaagccttcattccttttacttcttttcaatgtcatgaaaggactcacacgggagagaaaccctatgagtgtattctagttccgtttgatatcatgaaaggacttacactggagtgaaaccctatgaatgtaagcaatgtgggaaagccttcagatgtgcctcgcaccttcaacggcatgga

SEQ ID NO: 10379 - DNA, 524 bp, Homo sapiens
  MAP TO AL137790.1; EXPRESSED IN BRAIN, SIGNAL = 0.96; EXPRESSED IN HELA, SIGNAL =   1; SWISSPROT HIT: Q03721, EVALUE 3.00e-16; NT HIT: gi14739513, EVALUE 2.00e-71; EST_HUMAN HIT: AA442709.1, EVALUE 3.00e-71
cggaagtgcacgctggtgatgttccctacgcggaggatctctgtcacgttgcggtcgatattaaaggcctcatgggtctccaggcagaaagtggtgatggagaccaggatgaagaagagagaggcaaaggccactacctatgggcaggggaggagagcagggggcagctgtcagacagggatggatgggcccagctggggacgtggacttctgcatgaaggttaccaggaagggcattccagagtgagaggtgggattaacgtatggagtcagggctggaagtccctcctcagagggtctttatccatatgcttgggggctctcgggcaatgtttcccaatctttgtcacaaaagatagaagctgctcttggctggaaacactggtcaggtatctacagctgctagacctgcctttgatagctctgcccacctctgacccatttgcattttaaggcttctcaagctgcaatgggaatcttgttacaatgcattcctgatccagaggcttggggcaggtcctgtg

SEQ ID NO: 10380 - DNA, 530 bp, Homo sapiens
  MAP TO AL117376.2; EXPRESSED IN LUNG, SIGNAL = 2.8; EXPRESSED IN HEART, SIGNAL = 2.4; EXPRESSED IN BRAIN, SIGNAL = 2.8; EXPRESSED IN HELA, SIGNAL = 1.4; EST_HUMAN HIT: BI869262.1, EVALUE 5.00e-76; NT HIT: gi14786584, EVALUE 1.00e-78; SWISSPROT HIT: Q49736, EVALUE 1.70e+00
ggggaaagagagggagacaggcaagggagataagaaagaaggagaaatcaaagtggaaactttctagtcttgcatttatcaaaatattaaaacacgcacattccataggacagtgggataatgtacatgggctttgcttttgtttgtgtgtttttcaactctaggctaacaattctaaaagaaggacactaaggagaaatacaagaagtttaggagtacttttctcagttctggcaaatataagcatttgcctatgtattaaagaatatgaaggctaaaagaataagttaaaaaaaaaaaaggataaacacaacatgaggagtgaaaaatgagcactcatttggcacccactgtatgccacacccttccttcccaatctcacctctcctggtccttctccagggcttcctgctcagcctccaggctagcctggagccctgactgctctctgctgccactgttcagactggcaagtttctgcctctgctcttcaatctccatgcccagggtggagtgcctctgcagcgcag

SEQ ID NO: 10381 - DNA, 501 bp, Homo sapiens
  MAP TO AC007900.1; EXPRESSED IN PLACENTA, SIGNAL = 1.5; EXPRESSED IN BRAIN, SIGNAL =   1; EXPRESSED IN HELA, SIGNAL = 1.3; EXPRESSED IN LUNG, SIGNAL =   1; EST_HUMAN HIT: BE251176.1, EVALUE 7.00e-01; NT HIT: AF275366.1, EVALUE 4.80e-01
  unsure 57
  unsure 160
ggctatgcactctgctgttggcactcaatataaaatgctctgtacccttcttagagnactgacatttcaagctggtcaatctattaaaattttcttcatccttttctatccaggtatttagttatactgcatctggactggaactttaaagttaagaggncaccttatagaaaaagaggcccacaaggagaatgatttgtctaaggtcacaaaggaagtctgtagcatatatagaccagaaaaccaggtttcatggtcatttcaatgttcttccaattacactatgcaacatatctaatgataataaacaccagaggtctaaaaacagtgccagtgtacatgttttgtttcatttttttaatcacttcatttttctttcatacattctttttaatttttttattattgcatgtatttttaaataaataaaaattaccttcctgtccttaactttgtcatgaacctatttcttttgggccccaagtccatggatcattatca

SEQ ID NO: 10382 - DNA, 515 bp, Homo sapiens
  MAP TO AC002511.1; EXPRESSED IN HELA, SIGNAL = 2.7; EXPRESSED IN BRAIN, SIGNAL = 1.7; EXPRESSED IN HEART, SIGNAL = 1.5; EST_HUMAN HIT: H90136.1, EVALUE 1.80e-01; NT HIT: U62631.1, EVALUE 0.00e+00; SWISSPROT HIT: O15529, EVALUE 1.00e-14
cctggcaacggagctcaaggcatctttgtgccactgctcaacagtgagtgatgtcatgggcacggccaggtctttatcagttctgccggataaatagccaactgcactaggtctggagagacagcaaggtgctgtgcggcagagcatttggggtctcaaagaagcaggtgagcctgggcccgaggggctgggtggaggagcaccttggtgcttctctgctggggaagggacaggggacagggcatgctcaggaagacaggcaggctgaccccgcctggaaggcacccagagacaagaggggtgggcgtagtgacctcgtgcccttttaggggagatgctgctggccagaggccgttagggcccccactaccaactccatgttactctctctcaccagtggccaccaccatggatacaggccccgaccagtcctacttctccggcaatcactggttcgtcttctcggtgtaccttctcactttcctggtggggctccccctcaacctgctggccct

SEQ ID NO: 10383 - DNA, 501 bp, Homo sapiens
  MAP TO AC010198.8; EXPRESSED IN BRAIN, SIGNAL = 0.9; EXPRESSED IN HELA, SIGNAL = 1.4; EXPRESSED IN LUNG, SIGNAL = 0.93; EST_HUMAN HIT: AL536436.1, EVALUE 1.00e-100; NT HIT: AB058776.1, EVALUE 1.00e-100
gctggcaaaggcggaacagccttggtagaagaatccgaatcaagcaattcttgccagtcttaggcaagtccaacagaagttgctacttttgatgtatcgaagtctgtatttctgttaattgaggaaaaaggaatggacagaaaagtaggaaagtaggaaagagaagtaggaaagtcttttcaagtagaataaggacagaaatttaatattagtgcaacaacttagatcagaggacatagcaatactaatagagttgaatattccctccaaggtcttctatgaattttgtgacttaagtgcattgtttctctatctagtttcttaacagacgctatatgacagaagtagattattcaaacaaacaaggcgaagagcaaccttgggaagcagattatgctagaaaaccaaatctcccaaaacgttgggatatgcttactgaaccagatggtcaagagaagaaacaggagtcctttaagtcctgggaggcttctggtaagcacc

SEQ ID NO: 10384 - DNA, 506 bp, Homo sapiens
  MAP TO AC004472.1; EXPRESSED IN BRAIN, SIGNAL = 0.97; EXPRESSED IN LUNG, SIGNAL = 0.94; NT HIT: gi14739857, EVALUE 2.00e-12; SWISSPROT HIT: P13095, EVALUE 3.60e+00; EST_HUMAN HIT: BE710056.1, EVALUE 1.00e-118
ccaagccgagactgcctgccatggcacagtaaaaggacctggaagaaaagatatgccacgttacagtcacttcttattccctaatccataggctactgctccacaatcatatactcctactacttcagtatcaattctcatacacactcacatgcctatcagcccaacctccttacagtcaacattctgttattctaattctctctgtggtacaaaagcgccatcaggcttatctgaatcctgctatggccaatctctttctttctctcaaacacatacagctcagtgccattatatattcacaatttactacttccatcactggaaaatcaagaaatgtgctcatgaggatgcagcatttccacagggagtcttagaggactccttgtctctcctctccatgaaccctgggaaccaacaggagggatcaatttgcttggctatggcaggtaagagagaggacaccaagaagaccttcctagttgtgtggggcatgggaccctctg

SEQ ID NO: 10385 - DNA, 525 bp, Homo sapiens
  MAP TO AC005028.1; EXPRESSED IN HEART, SIGNAL = 1.2; EXPRESSED IN LUNG, SIGNAL = 1.2; EXPRESSED IN FETAL LIVER, SIGNAL = 1.1; EXPRESSED IN BRAIN, SIGNAL =   1; EXPRESSED IN HELA, SIGNAL = 0.58; NT HIT: AJ250408.1, EVALUE 3.00e-64; SWISSPROT HIT: P10071, EVALUE 8.00e-17
gcctggggacttgcctggaactcaagcgttgtgtaccatcacaagattctttttgtccttgcacagcgcttggggaggggcttcagtgaatcgagggagttgttattgttttgtttaagccaggcatcagcaaactacagcctgcggccatctccagccgcccctgtttttgtaaaggaagcttcatggacaccccgccacgcttgcttgctcactgctctctgtggccgtgttggggctacactgcagagctgagtagttgtgaggcaggcaatgtggcctgggacaccagaaatagttcctagctggccctttacagaaaagggttgctcatgcctggtgtaagtcatgctcgaagggaattcatctccgcatggtctctccctttctctgtctccaggcacacagtccaacaacacctgcagcttgggtgggcccatgacgcttctcccgggcagaagcgacctctctggggtggacgtcactatgctgaacatgctcaacagaagggacagcagcgccagc

SEQ ID NO: 10386 - DNA, 516 bp, Homo sapiens
  MAP TO AP000348.1; EXPRESSED IN HELA, SIGNAL = 1.2; EXPRESSED IN BRAIN, SIGNAL = 0.93; EXPRESSED IN FETAL LIVER, SIGNAL = 1.1; NT HIT: gi14768119, EVALUE 4.00e-14; SWISSPROT HIT: P52740, EVALUE 5.00e-34; EST_HUMAN HIT: AI040613.1, EVALUE 0.00e+00
ggctgccctccctatcaccccaccttcccttccatgcagaaaacctgctgagagctggcgtgcttggcccagggccacacagggccttcctgctagtgggatgttcaagagcgcttaggtgggaaggtttccattcagcatcagggaggtaggtggggtcttggagaccacgcgacgtggaataaaggctccatctggcacaggctttcaagctttgtgtgggctcctctttctatagcttctccccagaatgaatcttctgatggcgaatcaggtgcgagctcccccggaaggacttgccgcacagattgcacacgtagggcttctctctggtgtgggttttatagtgctcaatgagggctgaccggtgccggaaggctttgccacactcgcaggtgtagggcttcttgccggtgtggattctctggtgctggatcagcgcagagctgtggcaaaaggccttgccacactgacagcactcgtagggcttctcaccggtgtggatgcgctggtgct

SEQ ID NO: 10387 - DNA, 518 bp, Homo sapiens
  MAP TO AP000123.1; EXPRESSED IN PLACENTA, SIGNAL = 1.6; EXPRESSED IN BRAIN, SIGNAL = 1.3; EXPRESSED IN HELA, SIGNAL = 2.3; EXPRESSED IN LUNG, SIGNAL = 1.4; EXPRESSED IN HEART, SIGNAL = 1.6; EST_HUMAN HIT: BF591373.1, EVALUE 2.00e-19; NT HIT: gi14762502, EVALUE 2.00e-16; SWISSPROT HIT: P08547, EVALUE 3.00e-10
tgatggaggtcagcatggtgggtaacttggtgggccatggtggtgactggtgagtaatagctggggagggacatgaaggatgcttccaggtgtgctggcattgttctatttcttgacctgatatgggtgtgtttattttgtaaaatttcagcaaggttttgatttgtgtatttttctgtatgtatgttatacttcaattagaaaagtatagctttttattgattatacctcatagccattaggatggctagtatcaaaaacagaaaataacaagagttggcaaggaggtagagaaatcagaactgttgtgcactattgatgaaaatgtaaaatggtgtagccactgtgcagaacggaatggcagctcctcaaaaaattgaaaatagaattaccacatgatccagcaattccacctctgtgtatgtatctaaaagaattgaaagcagggtcctgacgagatatgctcaatcatgtccacagcagcatccttcaaaatagccaagatggcagcaacccca

SEQ ID NO: 10388 - DNA, 501 bp, Homo sapiens
  MAP TO AC011465.4; EXPRESSED IN LUNG, SIGNAL = 1.1; EXPRESSED IN HELA, SIGNAL = 0.99; EXPRESSED IN BRAIN, SIGNAL = 0.83; NT HIT: AB011117.1, EVALUE 2.00e-68; SWISSPROT HIT: P46062, EVALUE 5.30e-01; EST_HUMAN HIT: AW503608.1, EVALUE 0.00e+00
gcggggatgtcattggctggactccagactcctccacactcaaaatcttctatggacgaggagaccacatcttcctacaggcgacagagggttctgtggaggacataagggagatagtgcagagactgaaggtaagggagagagcccggcgatagggcggcgatttgtatggtttcggcctcaggaaccactgaaatacttccctagcccagtcagttaggctaagacacgcactggcccggagagaatcacagttgtcacttacaaactagacatcttgtgggttctgtagctaggttcttcctctggaaggtttgtgccagagatctgtggatcttcatgctattaccttggaaagacaagagatacttattaaccttggacactgatagaaagtataaatttaagcttaggttaaaaatgtaggccaggcgccatggctcatacctgtaatctatctcagcactttaggaggctgaggtggtggatcgcttgagccca

SEQ ID NO: 10389 - DNA, 536 bp, Homo sapiens
  MAP TO AC008543.4; EXPRESSED IN FETAL LIVER, SIGNAL = 2.4; EXPRESSED IN HEART, SIGNAL = 1.9; EXPRESSED IN BRAIN, SIGNAL = 2.9; EXPRESSED IN HELA, SIGNAL = 1.5; NT HIT: U93305.1, EVALUE 3.00e-21; EST_HUMAN HIT: BG570853.1, EVALUE 8.00e-78; SWISSPROT HIT: P39188, EVALUE 1.00e-13
atcagccaagcctggtggcgcatgcctgtaggcccagctacttgggaggctgaggtgggaggactgtctgagcctggaaggtggaggctgcagcgagctgtggtcataccactgcattccagcctgcgcaacagagtgagaccctgtttcaggaaaaaaaaaaaaaaaaaaagaataagaaaaaagaaactgcctagtaacatcactgttttgataatagctgtaatagagcccctttgcagagaattcagtccactcactgtcagacacttcagacagaacataaagcctacatttctcatgataatgtaaaatatgcaaatcaaatgcttgctaatataaaattatttatcaacaaattctttgtaatgtgcttcttattttttatagaaatcatatggcagagagactctgtgaatgtaaagatggtcaatgtggagaaactttcagcctgattccagatggtataatgaacaagaacactcttcctggggtaaaaccatgtgaaagcagtgtgtgtggagaaggcaacgtgg

SEQ ID NO: 10390 - DNA, 520 bp, Homo sapiens
  MAP TO AC011899.2; EXPRESSED IN BRAIN, SIGNAL =   1; EXPRESSED IN HELA, SIGNAL = 1.3; NT HIT: AJ006345.1, EVALUE 7.70e+00; SWISSPROT HIT: P54736, EVALUE 6.40e-02; EST_HUMAN HIT: BI521613.1, EVALUE 7.30e-01
tgtggggaatccgtgggaggatgagaggcctggattgcaccggaagcacctccggctggagctcggccaaggagcccgggtcccttcagtctgcgctccctgcggtgggcagtggcttctgtgttttgccgtcgaggtgcaacatgcagctggtgatgccctgtggcatctgcctcctgccctcggacatgctggcccgccctccctgagtcttgcagggcccagccgctgtgcctctgtgtggcctccccaccttacctgcagacacgctccctgtactcaaagccgagctgtgtgaggcttttggggctgccagaacaaaggactccagacggatgggcttgaaacagtggatgcctgcagtctcacaggctgggtttggagaccttgcttggaggtgtctgcagggccttgaaggggacaccgacccttcctgactcccagcctctgcgttgccagcagccctcggcccacagacacagcgcttccctcctgcctccgagccacgcagacggcttcc

SEQ ID NO: 10391 - DNA, 521 bp, Homo sapiens
  MAP TO AL135838.2; EXPRESSED IN HEART, SIGNAL = 2.3; EXPRESSED IN PLACENTA, SIGNAL = 1.6; EXPRESSED IN BRAIN, SIGNAL = 3.2; EXPRESSED IN HELA, SIGNAL = 0.69; SWISSPROT HIT: Q14146, EVALUE 4.80e+00; EST_HUMAN HIT: BE383083.1, EVALUE 0.00e+00; NT HIT: M87060.1, EVALUE 3.20e-02
aacgctgccaccttcgccaccgtcacggtggtgctcacctacgcgcgcggcgaggaggccgggcccgagggcgaggctgtgcccgccgcccctgcggggcctgccctggcgcagccctccagcctgtgacgctcaccccgccctccttccccagggctccttctcagaaacctgggacataaattggcccctgagtcgattgccctgcttcctgctgggatgctgcgagctgtggagtctatcagacgtgggctgaattttgctgatcagctgggtagttttggccgagaactgcacttgcctcagtgttctcatctatgaaataaggaccctcatgcccacactgtagagtcacgaagctcagagattattcccagcagcagccagcacctggcctggctgaggccattgcaccgttatcctggaaactgaggcagacactccagcccctttctgggatcctggccacgtcattgtgctcctgccctgcaggctggctcccgggggtctctgatggccaa

SEQ ID NO: 10392 - DNA, 565 bp, Homo sapiens
  MAP TO AF107256.1; EXPRESSED IN HELA, SIGNAL = 1.5; EXPRESSED IN BRAIN, SIGNAL = 2.2; EST_HUMAN HIT: AL045967.1, EVALUE 2.00e-97; NT HIT: gi14743786, EVALUE 1.00e-97; SWISSPROT HIT: O15197, EVALUE 6.00e-31
gtgctggctggaggcttggccactgtgtgcccctcttatttctgggcagaggtattgctggacaccaccggagagacatctgagattggctggctcacctacccaccagggggggtgagtgccactctaattctgaacctgaatcccttggccctgcccctccctgttccctggagagtggaattcatgaaggaaaccctgggtgaggattatgggaaaaggatccctccctctagagcaccaagatttcaaggtatcctctatctgctttgcttgtcattaattttaagtctcagtggaagagatatgtccccttccctataacctctacctcgccttgcttaagcccggagcccctaaagcttctcctggcccttcctgcagtgggacgaggtgagtgttctggacgaccagcgacgcctgactcggacctttgaggcatgtcatgtggcaggggcccctccaggcaccgggcaggacaattggttgcagacacactttgtggagcggcgcggggcccagagggcgcacattcgactccacttctctgtgcgggcatgctcca

SEQ ID NO: 10393 - DNA, 505 bp, Homo sapiens
  MAP TO AC010209.13; EXPRESSED IN HELA, SIGNAL = 0.37; EXPRESSED IN BRAIN, SIGNAL = 0.78; EXPRESSED IN FETAL LIVER, SIGNAL = 1.1; SWISSPROT HIT: P03356, EVALUE 3.00e-11; EST_HUMAN HIT: T02825.1, EVALUE 1.00e-118; NT HIT: AJ271736.1, EVALUE 0.00e+00
ccagcaggggcaagggacagtcaggcatatacaagaactagtgaactatttcatatccccccaccgagcaggtctgtggtagacagaaagcctgcttagtggaaactcctgttgctcagattatatcaatggttttcttggataagggggtgacctggggggtcactactgaatgttcagcaccagtatcgaccaaaaacttaatgtccttgcccccagttgtaatcctgaccgtgggctccttgggggtgcttgagaccggtgcctttcagtccagtagcccttcagccagattgaacgaagctccctcacctttatctgaggtcttttgttccaaatcagcttgcttttccttcagctggggacacttatctttccaatgtcctatttccttacagtaggtgcattggttacattgcaagcatggacgattagactgggtattcttcccggaacccccctttccctgtcctttcaggggaattcccctaatggccgcagccag

SEQ ID NO: 10394 - DNA, 537 bp, Homo sapiens
  MAP TO AC005538.2; EXPRESSED IN HELA, SIGNAL = 1.3; EXPRESSED IN BRAIN, SIGNAL = 0.86; EST_HUMAN HIT: BG482415.1, EVALUE 0.00e+00; NT HIT: gi5803103, EVALUE 0.00e+00; SWISSPROT HIT: P50536, EVALUE 2.00e-06
aagccgagccgcaagcagtgcagtctctgaggcggtcctcgccccacaccgccaactgtgacaggctttctaagagcagcacctcacctcagcccaagcgctggcagcaggacatgtccaccagtgtgcccaagctgttcctgcacctggaaaagaagacacctgtgcatagcagatcatcttcacctactctgactcctagccaggaagggagtcctgtgtttgctggctttgaagggagaagaactaatgaaataaatgaggtcctctcctggaagctcgtacctgacaattacccaccaggtgaccagccacctccaccctcttacatttacggggcgcaacatttgctgcgattgtttgtcaaacttccagaaattcttggaaaaatgtcctttactgagaagaatctgaaggctttattgaagcactttgatctctttgtgaggtttttagcagaataccacgatgacttcttcccagagtcagcttacgtcgctgcctctgaggtgcattacagcaccaggaacccccagg

SEQ ID NO: 10395 - DNA, 501 bp, Homo sapiens
  MAP TO AC010876.1; EXPRESSED IN BRAIN, SIGNAL = 0.9; EXPRESSED IN HELA, SIGNAL = 0.85; EXPRESSED IN LUNG, SIGNAL = 0.92; SWISSPROT HIT: P46556, EVALUE 2.10e+00; EST_HUMAN HIT: BE560938.1, EVALUE 1.00e-115; NT HIT: gi11545921, EVALUE 0.00e+00
tgcctgcatgttcccggaggtggcgactgtcctctgaatctgctccttcacctctgcaggcagaaaggtcaggtagtccagcacaggctccacctggatgtacattttcaccctggccctgaagcacgagatgagatagcggaaattctcgtctgtggaatacccattcgacatctttctttctcagagaagggagagggttctcccaagcagatggtgctgttgtctgcgggacaggtgaaatgtgcgtgccgctgtccgctgcccacttagagaagcagggtctaccgctctgtgcctgacaatgacgaggttgtccacagggctctcaggccggcgcgcggggctgcactcgcacctgggcaggtgggcaggcgggcaggtgggcagcggggcgcgcgcgcggggccgcggcaggcaggtgcggccggcaggcgcggcactttggactctgcggtgtgcgcctggggtcccggaccggggcgatcctgctgcacactc

SEQ ID NO: 10396 - DNA, 510 bp, Homo sapiens
  MAP TO AC006115.1; EXPRESSED IN HELA, SIGNAL = 3.1; EXPRESSED IN HEART, SIGNAL = 1.7; EXPRESSED IN BRAIN, SIGNAL = 1.5; EXPRESSED IN FETAL LIVER, SIGNAL = 1.7; EXPRESSED IN LUNG, SIGNAL = 1.7; SWISSPROT HIT: P52740, EVALUE 3.00e-30; EST_HUMAN HIT: AI418432.1, EVALUE 0.00e+00; NT HIT: gi7657696, EVALUE 0.00e+00
aacaaggtggggctagtgaaaggccttctcacactcacaacactctaggaggaagccaataatgttgagaaaagtgtgtgctgtgactaaaggtttctcaacagtgatcgcactcaacagttttctcttgagaatggagttgataatgttgagtgaggtatgagggtcggccgaaacatttcccacatagctgacactggtaaggcctctcttgagtgtgagttctataatgctgaatgagatatgaattccgactgaagactctgccacagtcacaacactggcaggctctctctccaacgtagtcatgtttccgctgataacgaattaagtatgtcttgctgtgggacaacccaggaggaaggactcttgctgcctcatgggctttgagatgttgaagaagatgcacattctggagaaaagctttgccgcactgaaaacattcaaagtagtcctcctgactgtgaattcttacacgttcacagagattcgcacactggacggaaggct

SEQ ID NO: 10397 - DNA, 599 bp, Homo sapiens
  MAP TO AL079300.11; EXPRESSED IN LUNG, SIGNAL = 0.96; EXPRESSED IN FETAL LIVER, SIGNAL = 0.94; EXPRESSED IN HELA, SIGNAL = 0.58; EXPRESSED IN BRAIN, SIGNAL = 0.95; EST_HUMAN HIT: AI473266.1, EVALUE 2.10e-01; SWISSPROT HIT: P32088, EVALUE 1.20e+00
tggggaaactggggatggcagaggttacaagatttgcccaaggtcacattgctgagatgtgacagagtcaagacataaccctgcttttctaatgcagagcttgtgctctacactatttggttatcctgtcccttgttccacaaatatttagcgaggaccagtctgtacaagaagctgttttgggtgctaaaaagtcaaggatgaatgagatacagaccccaccttcaagaagcacattgtcatttgggaaagaaatacatataaacagataattgctaagttatctgtgatcagagctaaacaagggaactatacacttttgggtttactttttcaaagtgcttatatcattcaatctatgattacatgtggacacacacatacgtacacacacacacacacacacacacacactccaccaaagaaaccaaggtaggtattatctgcatttgacagatacagatgctgaagcccagaaaagatagagaactggctcaggtaacagacaaaattggtatcatgcccaagtctccagcttctagcttgggttctttctccaccagaccaccaggagcatccaaacagcctcctggtggcca

SEQ ID NO: 10398 - DNA, 514 bp, Homo sapiens
  MAP TO AC008468.4; EXPRESSED IN BRAIN, SIGNAL = 1.1; EXPRESSED IN HELA, SIGNAL = 0.33; SWISSPROT HIT: Q9UN75, EVALUE 3.00e-83; NT HIT: AF152308.1, EVALUE 0.00e+00; EST_HUMAN HIT: BI465306.1, EVALUE 5.00e-79
gcgcaggaggcgcagttagcgagttggtaccgcggtcggtgggtgcgggccacgtggtggcgaaagtgcgcgcggtggacgctgactccggctataacgcttggctgtcctacgagttgcaaccggcggcggtcggcgcgcacatcccgttccacgtggggctgtacactggcgagatcagcacgacacgcatcctggatgaggcggacgctccgcgccaccgcctgctggtgctggtgaaggaccacggtgagcccgcgctgacgtccacggccacggtgctggtgtcgctggtggagaacggccaggccccaaagacgtcgtcgcgggcctcagtgggcgctgtggatcccgaagcggctctggtggatattaacgtgtacctcatcatcgccatctgtgcggtgtccagcctgctggtgctcacgctgctgctgtacactgcgctgcgttgctcagcgccgcccaccgtgagccggtgcgcgccgggcaagcccacgctggtgtgctccag

SEQ ID NO: 10399 - DNA, 555 bp, Homo sapiens
  MAP TO AC004913.2; EXPRESSED IN BRAIN, SIGNAL = 0.86; EXPRESSED IN HELA, SIGNAL = 0.79; SWISSPROT HIT: O15226, EVALUE 1.00e-38; NT HIT: gi14764865, EVALUE 0.00e+00; EST_HUMAN HIT: BI093603.1, EVALUE 0.00e+00
tgcagattgctgtgctatgccctttaaaatgataatttctcagggtaaaattccatttggatatgtgttcttgcttgtcaaactactaaaatctgagggacacagcaatatcaaagacacaaacagtaactgcacaatatcatctgctggattaagctaatacaagtggacagaattctttaggttccaatatctaataaaccactatgtgaaatgaacaaggtgagacatcttatgaatatactctgcaaccggaacatgtagcatttctttaattcaaaaatctgcctcattaggcatttacaaaataaattagtaagatctcaatttgcttgaggcataacaagctcgtaatggcccacttggccttcctgtttgagctgatctagtaggtcttccttccgtctttttctacctaccactaggtacctatcatggcccaccccatgagacttactcttaagaccatacttctgggcaatctgatgtatttgcttccgttcatcattagtcagctctctagagaaagtcaaatctgtgtggctctcggagcgg

SEQ ID NO: 10400 - DNA, 514 bp, Homo sapiens
  MAP TO AL049732.11; EXPRESSED IN BRAIN, SIGNAL = 1.3; EXPRESSED IN HELA, SIGNAL = 0.87; EXPRESSED IN LUNG, SIGNAL =   1; NT HIT: gi14760407, EVALUE 0.00e+00; EST_HUMAN HIT: BF057117.1, EVALUE 6.00e-66; SWISSPROT HIT: Q03477, EVALUE 8.20e+00
gccaccctgcgggtcaagagagggtctagggctcggaaggctgccactaaggctcgggcaactgaaagccagactccaaatgctgaccaaggggcccaggccaagatagcctctgctcagaccaacgtaagtgcccttgagactcaggttgctgctgctgtccaggccctggcagatgactatctggctcagttgagcctggagcccacaaccaggacccggggcaaaagaaaccgaaaggtgagatctctgacattgccatccttaactttgtgcttcttttccatttctacccttctagtttgttcatttcttctataaaagttttactttgagctagtccctgtgttcagataggctgtggaagatgctgagaagaaggtgatatagtttctgctccctagcagttcacagattggtgaggaaataagacatccatacactcagctacaacctgtatgtaatactacttgtatttaaatagtagttaccacgtgccaggctttgtgttggg

SEQ ID NO: 10401 - DNA, 518 bp, Homo sapiens
  MAP TO AL022323.7; EXPRESSED IN PLACENTA, SIGNAL = 1.5; EXPRESSED IN HELA, SIGNAL = 0.34; EXPRESSED IN BRAIN, SIGNAL = 0.88; EXPRESSED IN HEART, SIGNAL = 1.4; EXPRESSED IN LUNG, SIGNAL = 0.96; SWISSPROT HIT: Q21565, EVALUE 2.80e-02
caggcctgggtgagatgggcaaggaggagaccctgacgaggacctacttcctccaggccggcgaagcctctggggctcccccagcccggatcttggaagcgaagagccccctgcggagcccggcccggttactccctctgccaaggctcgcccccaaacccttctcgaaggagcaggacgtgaaatctcctgtcccgtctctgcggcccagttcgactggaccttccccctctggggggctctctgaggagccagcagcaaaggatctggacaacaggatgcccggcttggtggggcaggaggtgggcagtggggagggcccgaggacgagctcgcccctcttcaacaaggctgtgttcctgcggcccagctccagcaccatgattctcttcgaaaccaccaaaagcggccccgctctggggaaggcggttagtgagggggcggaggaggccaagctaggtgtgtccggctcccggcctgaggtggctgccaagcccgccctgcccacccagaagcct

SEQ ID NO: 10402 - DNA, 555 bp, Homo sapiens
  MAP TO AC024166.1; EXPRESSED IN BRAIN, SIGNAL = 0.85; EXPRESSED IN HELA, SIGNAL = 1.5; SWISSPROT HIT: P35367, EVALUE 1.00e-106; NT HIT: gi14726259, EVALUE 0.00e+00; EST_HUMAN HIT: BI333356.1, EVALUE 0.00e+00
gatgagctcccggtgctggcagtgttgtcgtacggccttgtagatcttggcatagaaccagagcatgagcaaggtgggcaggtagaagttgatgatggcagtcatgaccttgaaccaggtgacatcatagaagtctgtctcacacttgtcctctcggcgcaccgaggtctgctgcatgaagtgattccagcctagaatgggaataacccacagaaaagagagaaaccaggcccccagaatggtggccgaggctcgggtcttggtacgatacttaaggtacctgaggggctgctggacagagcggtagcgatcaatgcacaggatgaagacactgaaaatggacgctgtgctggccacatagtccatggaaagccaaaagaggcagagaggacggcccagtgaccacttggacatgagcaggtagaggatgttcataggcatgacgacggcacccacgatcaagtccgccaccgagaggctgacgatgtacaggttccccacagtgtggagcttccgctcactccgtacggcatacagcaccagcaggttgagccc

SEQ ID NO: 10403 - DNA, 533 bp, Homo sapiens
  MAP TO AC005063.1; EXPRESSED IN HELA, SIGNAL = 0.48; EXPRESSED IN BRAIN, SIGNAL = 1.5; SWISSPROT HIT: P52945, EVALUE 1.30e+00; NT HIT: AB033105.1, EVALUE 0.00e+00; EST_HUMAN HIT: AL598786.1, EVALUE 0.00e+00
gcggggaaggaggtgggaacacgctcattgacaacttcatttccatgagaatggttgctgtggtgattgctgcgtcttcccattggtcattgccgagcgtattgcggttctccgggagggttatattggttcccattccacagcggccgcaacgtgtcgagagccgtaagtaaagtgtcgcaaagcagaaggaaggcgggagtcccgactgcaaacattgaggaaagccaggcagtagaggccgctatggcgaacgttccgtgggcagaggtctgcgagaaattccaggcggcgctcgctctgtcgcgggtggaactgcataaaaatccggagaaggaaccatacaagtccaaatacagcgcccgggcgctactggaagaggtcaaggcgctgctcggccctgcgcctgaggacgaggatgagcggcctgaggccgaggacagcccgggtgccggtgaccacgccctggggctgccggctgaggtggtggagcccgaggacgccgtcgcccagcgagcggtgaggctggcagt

SEQ ID NO: 10404 - DNA, 501 bp, Homo sapiens
  MAP TO Z73417.1; EXPRESSED IN PLACENTA, SIGNAL = 2.4; EXPRESSED IN BRAIN, SIGNAL =   2; EXPRESSED IN LUNG, SIGNAL = 1.7; EXPRESSED IN FETAL LIVER, SIGNAL = 2.1; EXPRESSED IN HELA, SIGNAL = 1.8; SWISSPROT HIT: P40078, EVALUE 3.00e-32; NT HIT: AF077615.1, EVALUE 0.00e+00; EST_HUMAN HIT: BI495327.1, EVALUE 0.00e+00
tggtagtggggcagggaacttgctcccttccatttgcaaacacttttaaaattgactactctcttcttactttctgaaatctttttttaaccattttaatgtttgcaatttaataaatctcttgatgattgcagacatataaggctgtttggtggtattcagaaacatcacagtaatggcagttttttcaattggtttgtagtcctcaataattatatattaaattgctgtcaaaccagtaagactgcatttatgcatccatcattttcaggattgttggtaacctgggcatattttccccaaataactttgcctctttgcgtcacaagtcccagtttgctcacatttacctcaatgacagtacctttggtaataacacccaaagttgtatacagtgggaatgagggattcttctttacaccaagtattggtaagcaaaaggtggctttcagttcaggatgtgttacatgggctttcttgaaatgcaagcccattggcctg

SEQ ID NO: 10405 - DNA, 523 bp, Homo sapiens
  MAP TO AC004770.1; EXPRESSED IN HELA, SIGNAL = 2.3; EXPRESSED IN BRAIN, SIGNAL = 0.91; EXPRESSED IN FETAL LIVER, SIGNAL = 1.3; SWISSPROT HIT: P39748, EVALUE 1.00e-22; NT HIT: gi6325465, EVALUE 7.00e-99; EST_HUMAN HIT: W05005.1, EVALUE 0.00e+00
tgcagcacatccccaccctggcgaacagcaatcaggaactgataaatgctcatagaggcatcaatggccaccttacggccaaagtagctcttgatgtcattctcccggatggcactgggggccacatcagcaattagtttggccaggccttgaattcccatggcaacacagaggagggatgactaaaaaagaaaggcaagtcagagacggaggaaaggagaaaggttataactggtgttatctcaccaacttcatgccttcaactaaattccacacaacaaaaaggacaccatgtcagcactgctaaagataaaaagatgaacaaggtccccattctcaaaaaactcagtctagcaggagaatttactcaatagtaaggctcaacgagtaccagaaattgaaccacgtgcttagagaaataagatactgttgatattctaaggtagcagcattatttattacacaaaaaaaacctgcaacataggtctccatcaaggaccacagaaggccaggatgcttggcc

SEQ ID NO: 10406 - DNA, 517 bp, Homo sapiens
  MAP TO AL049649.4; EXPRESSED IN PLACENTA, SIGNAL = 1.8; EXPRESSED IN BRAIN, SIGNAL = 1.3; EXPRESSED IN HEART, SIGNAL = 1.3; EXPRESSED IN LUNG, SIGNAL = 1.2; EXPRESSED IN FETAL LIVER, SIGNAL = 1.5; EXPRESSED IN HELA, SIGNAL = 2.5; EST_HUMAN HIT: AI822021.1, EVALUE 1.80e-01; SWISSPROT HIT: Q02384, EVALUE 2.80e+00; NT HIT: M77195.1, EVALUE 2.00e-03
cagctggtctcctcccagggcatcaggaagacttagactacaccaacactatcctggaggtatgagaatccatcacagatatgaatttcagaagatttcacaagcacgtttatcaaactcctatctttgcagaaactcttccttgtttctgcaaatggcactatgctaaatggctaaaatgcattatggtaaattattatgaaaatcttggaaggcattgttatccatcttgaagaaatgatatcacagaaaaactaagaaaatttcctaaataataaggaatggagcaaagatttgaaagcatgtgctctttattctgtttgaccctatgctatatatcttaaggattcttacatacagaaaatgcaagacaagaaaccatttgactttataactaaagcaattatataactgtgttcttttctgtaataacaattctccattttcctttgcatacaaaccaatcattacatgttaaattattgttgttcaccttctttcatgggacctgctagcc

SEQ ID NO: 10407 - DNA, 507 bp, Homo sapiens
  MAP TO AP000505.1; EXPRESSED IN BRAIN, SIGNAL = 0.9; EXPRESSED IN HELA, SIGNAL = 0.8; EXPRESSED IN LUNG, SIGNAL = 1.6; SWISSPROT HIT: Q06643, EVALUE 1.00e-26; NT HIT: L11016.1, EVALUE 0.00e+00; EST_HUMAN HIT: AW188005.1, EVALUE 0.00e+00
acccggccaggagacaagggtacgggcctctctggtacacgagcgtggggttcggcggcctggtgcagctccggaggggcgagagggtgtacgtcaacatcagtcaccccgatatggtggacttcgcgagagggaagaccttctttggggccgtgatggtggggtgagggaatatgagtgcgtggtgcgagtgcgtgaatattgggggcccggacgcccaggaccccatggcagtgggaaaaatgtaggagactgtttggaaattgattttgaacctgatgaaaataaagaatggaaagcttcagtgctgccgataaagatgctgagttgcgacacacgtcttaattcagggtgggtgcacgggtgcgggttaaatattctcagtactcttctggttgcttgaaacaattcatcacaacacagtgtatggcctttgctcctagggatgatggtctgcctgtcccaccccctccctgcctctgaatggccaggccccaccattagccc

SEQ ID NO: 10408 - DNA, 502 bp, Homo sapiens
  MAP TO AF188030.1; EXPRESSED IN BRAIN, SIGNAL = 0.95; SWISSPROT HIT: P40603, EVALUE 2.70e-02; NT HIT: gi13641230, EVALUE 1.00e-44; EST_HUMAN HIT: BI523270.1, EVALUE 3.00e-12
cagcgaacacgctcagcacgatgaagtcgtcagttttcatctccagtgggactcgctcccctggtgtgatgtttctgcttttgtgtaattgacccagttttgaagttgttgtttttttgtttttgttttggttttaaacagttctcggtaaaatcaggagtgctgtggggagtgcccagcttctcatgtcccagaaattccagcagttttattggctttgccaacagaatatggtaagtgaatcctcagtgaacccctgttccctgtaaccaagctaatgggcatcattccacagattctcattgttttcttccttgtcaaagagttcccatcggtatgcggaatatcacgtgcacttactacagaagaagcttcccgccctggggaaagagacgattcggccctggtttaaacgcggtaccgaggcagggaggcggatacggccctggtttaaacgcggtaccgaggcagggaggcggatacggccctggtttaaacgcgg

SEQ ID NO: 10409 - DNA, 538 bp, Homo sapiens
  MAP TO AL133418.2; EXPRESSED IN BRAIN, SIGNAL = 0.9; EXPRESSED IN HELA, SIGNAL = 0.99; NT HIT: gi16167963, EVALUE 0.00e+00; EST_HUMAN HIT: AV709169.1, EVALUE 0.00e+00
ggccttctcttcctttttgccaggtgatccagtttttagacactcttctgtattgcaataccttcttttaccacgttttatttgtggttttgaagatttatctgttgtgtccttcttgacatcctttctcttttttgtgacttcatcttcttcataatcagtatcttcggataatacttctatatctttccttaatctttctggagattttgacactggtttggatattaccaaatctgcatgaactttgttttcttctagcaaagatgaactgttctgttcctcctttgaaataagatcatttctgttgttggtcaaatgatcaatcttagattcctctttgccattattatccatgtcttgagcacctctctcatcttcctgctcactgtcttcagcagaactttcagaagctagaaaataacagaaaaaaaaatgatgagtatgataagaacactagcaatgtcttctatgtgccagggactgtatatattaggtcctgtgtatacagccacccgaggttgctggcttttatctc

SEQ ID NO: 10410 - DNA, 501 bp, Homo sapiens
  MAP TO AC006014.2; EXPRESSED IN LUNG, SIGNAL =   1; EXPRESSED IN BRAIN, SIGNAL = 0.94; SWISSPROT HIT: Q62267, EVALUE 4.60e+00; EST_HUMAN HIT: BI008058.1, EVALUE 6.00e-97; NT HIT: gi14742337, EVALUE 3.00e-61
caaaggaggggctggggagcagccctggcggccctgactgtgataaacccagcgggggtaggaggctgggtgtctttggaggtgagagggcctcagtggttgctgctccagcagattctggaagaagaatagaaaatgtgaaattggaataaacacttcaaagatgatggtattcagtatttcagcgtcctccccatgcctaccacagagcctgggatccaagagtcagtcaataaactcagctaagtctacactacaggcctgtacagtaaatcaaggaagtgttcattatttccacctcacagatcatcagacagaaggggataaaatggggcctaaatgggggcctaatgtgtagagactaagacagtccaattgtctgaactctgaagttcacgtatgaatctagatatactttatttgcctactaagctcacctgccaggcgctaagagcacacaactatgaatggggaagtctctgcccttgagcagggagggtg

SEQ ID NO: 10411 - DNA, 511 bp, Homo sapiens
  MAP TO AC008806.4; EXPRESSED IN HELA, SIGNAL = 0.68; EXPRESSED IN BRAIN, SIGNAL =   1; EXPRESSED IN LUNG, SIGNAL = 0.99; NT HIT: U81557.1, EVALUE 2.00e-31; EST_HUMAN HIT: AA626677.1, EVALUE 7.00e-38; SWISSPROT HIT: P52742, EVALUE 1.00e-38
gatccgtttgagtgcattgtgggaaatggatttaaaggtagcaaaaataaatacaggaaaacctgtttgaaagctatattagtaatcagagtgagatgaatcagaccaaggtgacaacattaaagataaaaaacagtataaattctagaaacatttaggactcaggatctataggacttggtgattgactgggttgggtggtgacagtgactccccaatgtgaattctctggtgatgagcaaggtgtgcatgctgcctgaaggtttttttgcattccttacattcatagggtctctctccagtatgaattctctgatgttgggcaagggatccacagtaactaaaagcctttccacaaacagtacattcataaggtttctctccagtatgaactcgctgatgttgagtaagggacgagtcattgctaaaagccttcccacattcaatacattcatagggtttctctccagtatgaactctttgatgctgagcaaggtaggcaatctggctg

SEQ ID NO: 10412 - DNA, 512 bp, Homo sapiens
  MAP TO AC008174.2; EXPRESSED IN BRAIN, SIGNAL = 0.8; EXPRESSED IN HELA, SIGNAL = 1.2; EXPRESSED IN LUNG, SIGNAL = 0.98; SWISSPROT HIT: P22607, EVALUE 5.50e-01; NT HIT: gi15594346, EVALUE 1.20e-01
tgcttcttgaatttcccatgctttctctttttctctaccctttttggtgccatcagaaatgctcgaagttaaatggtaaagtactgactcagtgagatgttcacaacattgataaattgaagaatcatcgtatatgtttcttaggaactgttttgattcatattttttccttgaccatgtagaaacagacatcttttcctcactaaaaacttaaaaaaggaaacattgtaattttagcatggattaaagaaaatatagaaaattcaatatatttgaaattattatttacatatatatttcaccctttgagcaactcactaaagaaaaatctaaacaaaaaaagaaattagattttcctcaaacatttattttctcaccttgcaaaatcttaattttagccaataaattgagaaaataacaccccaaaattcaatcctctaagtcaaatgctgatgtctgccttggttggatggttatgaactcttaagaagctggaaagcttggggcagaga

SEQ ID NO: 10413 - DNA, 563 bp, Homo sapiens
  MAP TO AC005752.1; EXPRESSED IN HELA, SIGNAL = 0.7; EXPRESSED IN BRAIN, SIGNAL = 1.2; EXPRESSED IN LUNG, SIGNAL = 1.2; EST_HUMAN HIT: BG718561.1, EVALUE 0.00e+00; NT HIT: gi14861873, EVALUE 0.00e+00; SWISSPROT HIT: Q9Y5F1, EVALUE 2.00e-93
ctgaggccaacgccaccaccaggtagacagtgagcgagtcggcctgggcctgggccggggccgcctccgggagaggcaggtagggctgggagaagccgtccaccaggagcacgtgcagcgtggcggtggccgagcgcggaggctcgccattgtccttgaccagcaccaccagcctgtgcttggccgcgtcgcgctcgctcagcagcctggcggtgcgcacctcgccattgtgcgcccacacgccgaatagcccgggctccgtggccttgagcagctggtacgacagccaggcgttctggcccgagtcaccgtccaccgccaccaccttggtcaccaggtagcccggctcggccgcccagggcaccagctcggtgcagggcgcggagccgttctgcagcgggtacagcacgaagggcgagttgtcgttggcgtccagcaccagcacgcgcaccagcgcctcgctgctcaaagccggggagccgtggtctgtggcgcccacgcggaactggaacccctgcagggcctcgtagtccagcgacctgagggcaaacaggtggccgttg

SEQ ID NO: 10414 - DNA, 508 bp, Homo sapiens
  MAP TO AL009030.4; EXPRESSED IN PLACENTA, SIGNAL = 4.7; EXPRESSED IN BRAIN, SIGNAL = 5.6; EXPRESSED IN HEART, SIGNAL = 6.2; EST_HUMAN HIT: BI061650.1, EVALUE 0.00e+00; NT HIT: U21556.1, EVALUE 0.00e+00; SWISSPROT HIT: P08640, EVALUE 2.00e-03
gccagcctcatcccactgccagctggcccacagttcctcaaacacagtgagtgaggacggacctcaggctgtctcttcgggtcaccgctgtgaaaacaaggcaggtacagcaccagggcagacactcgcccccaggggtggctcccccagatcccaggcctctaggccccgcatcaacagtgcactgcacgttgaggacaaggccatctcggactgcagaccctcacggccttcccacactttgtcctcacttgcaacaggggcttcgggtgggcctcccgtttctaaagcacccactatggatgcacagcaggacagacccaagtcccaagactgcctgggcctactggcccccctagcatctgctgcagaggtctcctctacagctcccgtgtctgggaagaagcacagaccaccaggacccctgttctcctcctcagatccccttcctgccacctcttcccactccggggactcagcccaggacacctcgctgattcctgccccc

SEQ ID NO: 10415 - DNA, 514 bp, Homo sapiens
  MAP TO AP000563.1; EXPRESSED IN HELA, SIGNAL = 0.7; EXPRESSED IN BRAIN, SIGNAL = 1.6; EXPRESSED IN HEART, SIGNAL = 1.6; EXPRESSED IN LUNG, SIGNAL = 1.2; EXPRESSED IN FETAL LIVER, SIGNAL = 1.4; SWISSPROT HIT: P57203, EVALUE 6.20e+00; NT HIT: gi15300850, EVALUE 3.00e-61; EST_HUMAN HIT: AI445495.1, EVALUE 4.00e-61
tggtatgacgatgtcctgaagacaggcctagatattgggagaaacaaagtggaagatgcgttctacaaaggtgaactcaggctgaatggggaaaagttatggaagaaaaacagaacggtcaaagtgggagatacactggatcttctcattggagatcttctggatccaatgtatctgggagatatattggatcttctgtttggagaggataaagaaggaggaaccgagacagtgatgaggattctcctgaaaaaagtgtttgaagactgaaagtgaaaaacacagtggtgttacggcggtggaaaaacttaaagttgcctaggaagagaatgtctaaataaacggattgctttttgcaatacagctgctttctagtggtagaggaagcagtcaaagaaaaaagaaaaaaagaaaattgccatgttggaactgcctatgaaggggctgtgtggcaggaactgtgggtgtctataggtagggagaacggcctctaagcactgaggtggcctccagc

SEQ ID NO: 10416 - DNA, 519 bp, Homo sapiens
  MAP TO AL121906.18; EXPRESSED IN FETAL LIVER, SIGNAL = 1.3; EXPRESSED IN LUNG, SIGNAL = 1.2; EXPRESSED IN HEART, SIGNAL = 1.7; EXPRESSED IN BRAIN, SIGNAL = 1.3; EXPRESSED IN HELA, SIGNAL = 0.23; SWISSPROT HIT: Q9UKJ3, EVALUE 3.20e-01; EST_HUMAN HIT: BI830596.1, EVALUE 0.00e+00; NT HIT: AF365973.1, EVALUE 4.90e-01
cacaaggccccttcgccctcaaagttctgctcctcccgggggcttcttaggatctaaaaggatcagtcctagccatctcgtcagccatctcagcaagggctgacggggcggaacagcaaagcagaggcgggtcctgagagcgtggagcctgaagcccggcgccagagggagaccaagagggtgagatgcggctggaacccagccagagcggagactgaagcctgaactaggggccgggcctcaggcctaggaactagccacgagctgaaaaggaggcggatggcccggacagaagaggcggggctttcagaccagagggcggagccaagagctgaaaagggtggtgatttggtccagaagaggaagaacttaggctccggaggcagagccaaaggctgaaggggactactccctaggacagaggccgggaggtatcgggccgacgaagccgagtggcgcggaggagcggagccttcagccccgcggctgggccgagcccgaaggtggcgtcggtgtcgg

SEQ ID NO: 10417 - DNA, 546 bp, Homo sapiens
  MAP TO AC009948.2; EXPRESSED IN BRAIN, SIGNAL =   1; EXPRESSED IN HELA, SIGNAL = 1.5; NT HIT: X92412.1, EVALUE 0.00e+00; EST_HUMAN HIT: BI463872.1, EVALUE 0.00e+00; SWISSPROT HIT: Q00872, EVALUE 7.00e-04
tcctgcaagcaacaccgcagttccatcctggttacccactgaaagagaaatattatggagctgtgggttccacacttcggcttcatgttatgtacattggtcgtccagtacctgccatgacttggttccatggtcagaaacttttgcaaaactcagaaaacattactattgaaaacactgagcactatactcatcttgtcatgaagaatgtccaacgtaagactcatgctgggaaatacaaagtccagctcagcaatgtttttggaacagttgatgccatccttgatgtggaaatacaaggtattttatttttattttcagtgctttttatttttaaagaaaaaaaaatctcaaaaacacactatgaaaaccaccacaattgtattttcccccaacagataaaccagacaaacctacaggaccaattgtgatcgaagctctattgaagaactccgcagtgatcagctggaaaccacccgcagatgacggaggctcctggatcaccaactatgtggtggaaaaatgtgaggccaaggagggggctga

SEQ ID NO: 10418 - DNA, 516 bp, Homo sapiens
  MAP TO AC004152.1; EXPRESSED IN HEART, SIGNAL =   2; EXPRESSED IN FETAL LIVER, SIGNAL = 1.3; EXPRESSED IN LUNG, SIGNAL = 1.7; EXPRESSED IN BRAIN, SIGNAL = 2.3; EXPRESSED IN HELA, SIGNAL = 0.48; NT HIT: D89870.1, EVALUE 0.00e+00; SWISSPROT HIT: P70315, EVALUE 4.00e-02; EST_HUMAN HIT: AI475768.1, EVALUE 0.00e+00
ccggcattggcctctcatggagacaatgacagaacccacgcggaagagcgccctggctgctggggaaggcagaacacagagagacattgatcagcggggttgtccacacctggaagtggcgtgggggccctggcttcagagagctgctgcccaacacaggaggcgctggccagcccccagccctggaggggcagctgcattcctgggaagcccttgacccacatccccagcacgggaggggaggctctggagtggggcattgctctctctgctgcgctcctggactctgcaggaagagggtgtcttggctatcatggagacgctgacctcagccccagccctgcctcctgggcaggcctggaccaggtgtgttcgccctgggttggggtcagtcccacagcagcgccagggcctggcccatcgaggactcggtggcctcggccaggtattcgcaacacagccagtcctcgaggctgggagcttccccacctgcggcccgctctgctaggcgcagga

SEQ ID NO: 10419 - DNA, 535 bp, Homo sapiens
  MAP TO AL157858.2; EXPRESSED IN HELA, SIGNAL = 0.55; EXPRESSED IN BRAIN, SIGNAL = 0.88; NT HIT: gi14748462, EVALUE 0.00e+00; SWISSPROT HIT: P13843, EVALUE 1.70e+00; EST_HUMAN HIT: BF921516.1, EVALUE 0.00e+00
ggagcaggctttaccggcgagtcaactttcacctcgaaagtctccatacagtttaacctaacctctggtatgacaggccttcgagcatctggaaacccttccatagctgggttctcggggatttcactattgtcaggcctcgtagcagagttctgtctagaacgtccagggtcgtttggtctttgtgcgatatacgcagcttgggtcggaggcttctctatgtcacaccgatctatgcacgacttcctacgatgttcgtctaatgtaaacaaaagcgagtctgcattccctatatcaagagatttttgtttgaaagagcgtagcttttttttcggaatgctttcttctctcacacagtggagaaggctgtcttgtaatgcacccgtctctctatattcagccagttctatttcacctgatcaaaacagaaaaagctagtactattttacttggagatttcaccattttttcccctcatccttgggcatacaattggcataaatcatcatcacaatcccagctccaccaggaggga

SEQ ID NO: 10420 - DNA, 571 bp, Homo sapiens
  MAP TO AC003046.1; EXPRESSED IN BRAIN, SIGNAL = 0.81; EXPRESSED IN HELA, SIGNAL = 1.3; EXPRESSED IN LUNG, SIGNAL = 0.93; NT HIT: gi11421043, EVALUE 0.00e+00; SWISSPROT HIT: P08953, EVALUE 6.00e-10; EST_HUMAN HIT: AI307338.1, EVALUE 0.00e+00
cagacgttggtggctcccctgaaatatgggcaatctcatttcttgaagaatttcaaaacacgcttttggtgtgatatatatgaaaacaatttaaacagccaggcctctccttggtaaactaggcagttgtgttttgcaaagaagggctagaccgtttccttgaacacctgactataggccacatgattgtctgtggccagggcgttctttagacactgccagaagtatgggtgagcttgcgggtttgttggccactcaaggacagaactcccacagagccttttccggagctggaggaacttggacttctgaaagggcttctcaagaaatatcaagataatcacatcaactttttcatccatgagcctctgatgggacaagtaaaatgctatcttaaaattttcagtctttgcatacttgtctgtcatcacaaacactgtctttttgctaagctgtatgctctgggaaaggttttccagaactggctgccctggtaaccagtccctttcctcgagacataaattaaaatgtttctctcttgggtcttccagtttggccaccagctcagcca

SEQ ID NO: 10421 - DNA, 506 bp, Homo sapiens
  MAP TO AP001711.1; EXPRESSED IN BRAIN, SIGNAL = 0.87; EXPRESSED IN HELA, SIGNAL = 0.72; NT HIT: AE004660.1, EVALUE 1.20e-01; SWISSPROT HIT: O62683, EVALUE 1.20e+00; EST_HUMAN HIT: BE535415.1, EVALUE 1.80e-01
caggacgcgtcgccgaaaagccaggcccggaggtgcctaagtcagggaccgagacgcaaacatagacacaaggatgcacaagcacgccctccccgaagttgacaaaaatcagccgataaaatacaaagtgccgcggccgccgcaggtcagcgctgacctcctgctgccgagaggaccgaatgccgacgtccggacgctgtcatttccatccagcgaaggcacctgggctgcacggtctcgtctccctccttcgcgcgagggatgcctcctcctgcctctcctccccgcatctccccacctcccaagtgtgtgaacacgaaaacaatacgtggaaagcccgatcggggggagctaggacccgccgggagccccagtgtgcgggagacgggggtcagaacgtgcccggcacgggcaccgaggctccgggcatcctcgccgccgtctcccggggcggctccggccggacgcccgcgcaccccaggcccgcggtactcacccgcgacggt

SEQ ID NO: 10422 - DNA, 507 bp, Homo sapiens
  MAP TO AC022014.2; EXPRESSED IN BRAIN, SIGNAL = 1.2; EXPRESSED IN HELA, SIGNAL = 2.6; EXPRESSED IN LUNG, SIGNAL = 0.99; EXPRESSED IN FETAL LIVER, SIGNAL = 1.4; SWISSPROT HIT: P41594, EVALUE 1.00e-26; EST_HUMAN HIT: AW296587.1, EVALUE 5.00e-54; NT HIT: gi14762655, EVALUE 1.00e-111
gggtccttgccttggctttgtgagctaactctgctctgtctgccctctcaacctcactccccctacgctgtaactctgctttattagagattttgacttccatgtttctagacttggcctaagtaattggacccacatcccattaaccccataaataccattttatgagaaggtccatgccgtaagtcaccctgcctcacatggtttcatttacccagatttctcccatttaaaagacccaggaaacacatgcctctgctccagttttaggggccagcatccctgtaagcccccacaacttttaccttaaggtttccccagaggagccccttctcttccacaggttgactaggctgctggatctgctggctgcggaggatgacttgccatcccctacatgcatgcgcaccacggtagatgtggtgaaggcgctgcgcacgtttctctctggtttggccaggatgatgtacaccttcggcacaaacatgcagcctagggccactgtgg

SEQ ID NO: 10423 - DNA, 526 bp, Homo sapiens
  MAP TO AC001237.1; EXPRESSED IN LUNG, SIGNAL = 1.8; EXPRESSED IN BRAIN, SIGNAL = 1.3; EXPRESSED IN HELA, SIGNAL = 1.9; NT HIT: gi16164876, EVALUE 0.00e+00; EST_HUMAN HIT: BE256570.1, EVALUE 0.00e+00; SWISSPROT HIT: P82910, EVALUE 3.70e+00
cgaggaggggaaaagggagggtataggctgatggaaggagcctcagagaggcaagagtttatatcctgttgtgggagtggcatcaggtataaaggaacacaaactccttattttttattgatttgcttctttgtttgctatctgtaatgtgattggttacttcctgcagaagattttttttttccaaatgaattatttcctttttacatttgcaggtttttcacgactgaaaataacatagcaaaataagccaagatgtctgtggatccaatgacctacgaggcccagttctttggcttcacgccacaaacgtgcatgcttcggatctacattgcatttcaagactacctatttgaagtgatgcaggccgttgaacaggttattctgaagaagctggatggcatcccagactgtgacattagcccagtgcagattcgcaaatgcacagagaagtttttttgcttcatgaaaggagattttgataacctttttagcaaaatggagcaactgtttttgcagctgattt

SEQ ID NO: 10424 - DNA, 503 bp, Homo sapiens
  MAP TO AC007721.10; EXPRESSED IN BRAIN, SIGNAL = 0.78; EXPRESSED IN HELA, SIGNAL = 0.94; SWISSPROT HIT: O43426, EVALUE 2.70e-02; EST_HUMAN HIT: BG390523.1, EVALUE 1.00e-112; NT HIT: L35911.1, EVALUE 4.80e-01
gtgccactgcgggaggtgtgagctccacgctgcaggctgtgtgagagaggggtgagccggcgcccccgagtgaagacacaaagaatcccgagggcctggtgaggcacaggcccgcacctcccacccccatggcctcgtggctctgtggggtgacaggaacccgacccacatgtagctcaatcctcccaaggtcagcttgtgaagaagggaaagaaaattatggaaacaggcgtctctgtaggggatgctccaagacgcatttggaggcaggaaaatgcctgaagtccctcaatgggcggatgtcacagtgctgggcgagccacggtgtgtactcggggcctcactttgggagctcagacgtgtcgctggccctgacgctcattggtctgaaggacaaatcgaaggccctctggtcacggaagctctgggctttgtacttggccaggtgcctggacctcccgcgacgctcgggctccgatgcctccatcctgtcctgcagggcc

SEQ ID NO: 10425 - DNA, 543 bp, Homo sapiens
  MAP TO AP000344.1; EXPRESSED IN BRAIN, SIGNAL = 0.8; EXPRESSED IN HELA, SIGNAL = 0.54; NT HIT: gi15302005, EVALUE 8.10e+00; EST_HUMAN HIT: BF894212.1, EVALUE 2.00e-50; SWISSPROT HIT: P46608, EVALUE 3.00e+00
ggattgctggcaggggagggcgacaggaggctgccagagttgtccagctggacttcttccctgacacagacaggctggcataggattggtgtggtagtggggatgggaaggagggaatgccgcgaggtcaggaacttcctccagtcgccaagaggcgtcttgaccgtttaaaaatgtctctgaagatttagcacaccaaggccccctatagtcccagggtataggccacccttgagattagaaagaaacccctgggagctgtggtggggtgggtgtggctgttggaggtgtccctattcagactcctgctctaccatttgctttgggatcaccttttacagtggatctgatattataatacccacttcttatgatgaaaaggaactgaatgagtgtggaatccctaggaccccgctggaatataatgggccctcggggtttagtttctttccttcttgccggtgaggtttgagagggactggagaacagtggatttcgaccatccatttggggttgtcagtctgtgccaggccagctggagac

SEQ ID NO: 10426 - DNA, 529 bp, Homo sapiens
  MAP TO AC002104.1; EXPRESSED IN BRAIN, SIGNAL = 1.3; EXPRESSED IN HELA, SIGNAL = 1.4; EXPRESSED IN HEART, SIGNAL = 1.7; EXPRESSED IN FETAL LIVER, SIGNAL = 1.5; NT HIT: gi11429600, EVALUE 8.00e-71; SWISSPROT HIT: Q60992, EVALUE 1.00e-21; EST_HUMAN HIT: BE674923.1, EVALUE 2.00e-56
gcacagaaggaccccgtcgcgcagcgcctgcgccaggtcgaagaccacggccgagggccacaccacccggtggttgggcggcaggaccttgcaatcgatgagccagcggccgcactgccgccactgctccatggcgcccgcgggcccgaccggctcagggcagtgctcgagccaaagtgcagcggccgcggggcatcccgcccgcgcgcgcgcggggctcagggccggggcggggcttcgcgcgggctgccccaggtcccccgctgcgccgccgtgcgtcccctcctcttcctcctcctactcctcgggctcctctcgggccgccgctcccgcccacgtgcggccgcggggcgggcaacgggcagcgcgccggatctccccgcttcacacacgcaagtgcctgcgggccccgggccgggctccacgcagccagtcgccgcagcgctccccaatccgcgccgccgggcgccgcattctgcgctcggggcgccccgcggccgccgcggctcctgccccgcccgagacaaag

SEQ ID NO: 10427 - DNA, 514 bp, Homo sapiens
  MAP TO AP001479.1; EXPRESSED IN LUNG, SIGNAL = 1.5; EXPRESSED IN HELA, SIGNAL = 0.85; EXPRESSED IN BRAIN, SIGNAL =   1; EXPRESSED IN HEART, SIGNAL = 2.8; SWISSPROT HIT: P12109, EVALUE 1.00e-15; NT HIT: X99136.1, EVALUE 0.00e+00; EST_HUMAN HIT: BE336811.1, EVALUE 4.00e-61
gctcgctgtgacttccgggggcacggccacccctgtgctcggccgggaggtcctgtgacatctccttgcggggttataggtggagcagtgggctcacactgcacggcttttctcttttacagacaagaagtgtccagattacacctgccccagtgagtacctcggcggccgggacacgtggggaggagggcaccgtggttggggcgagggctctgagaggacggggctctgggaggagggcctggcggtcacgagagtaggtgcatggctcactccggtggctgagcaccaccgtgccgtgccctctctggggagcttagacgctctctggccggcccactgcggctgcatcaccagggcctcatgctaacggctgcccaccccgccccgcagtcacgttctcctccccggctgacatcaccatcctgctggacggctccgccagcgtgggcagccacaactttgacaccaccaagcgcttcgccaagcgcctggccgagcgcttcctcacagc

SEQ ID NO: 10428 - DNA, 503 bp, Homo sapiens
  MAP TO AC013584.3; EXPRESSED IN BRAIN, SIGNAL = 1.1; EXPRESSED IN FETAL LIVER, SIGNAL = 1.2; EXPRESSED IN HEART, SIGNAL = 1.4; EXPRESSED IN LUNG, SIGNAL = 1.1; SWISSPROT HIT: P02845, EVALUE 3.20e-02; NT HIT: gi14721470, EVALUE 0.00e+00; EST_HUMAN HIT: AU124751.1, EVALUE 5.00e-45
ccgccttcagcgtacctgccttcaggaattcctgctcccacccccctaccccccaccactgttcctggctacacctaccagggccatggtttgacacctattgcaccgtcggctctgacaaacagttcagcaagttctctcaaaaggaaagctttctacatggcagggcaaggagatatggactccagttatggaaattacagctatggccaacagagatctacacagagtcctatgtacagaatgcccgacaacagcatttcaaacacaaatcgggggaatggctttgacagaagtgctgaaacatcatccttagcatttaagccaacgaagcagctaatgtcctctgaacagcaaaggaaattcagcagccagtccagtagggctctgacccctccttcctacagtactgctaaaaattcattgggatcaagatccagtgaatcctttgggaagtacacatcgccagtaatgagtgagcatggggacgagcacaggcagct

SEQ ID NO: 10429 - DNA, 500 bp, Homo sapiens
  MAP TO AC006544.19; EXPRESSED IN BRAIN, SIGNAL = 0.77; EXPRESSED IN LUNG, SIGNAL =   1; SWISSPROT HIT: P27460, EVALUE 1.60e+00; NT HIT: gi14738419, EVALUE 0.00e+00; EST_HUMAN HIT: BF690205.1, EVALUE 0.00e+00
ggcccagccttccctgaacctggtactgcaactggcagtggcatcaaaagccacaactcagccctgtacagccaggtccagaagagcggggcctcagggagctgggactgtgggctctctagagtagggactgacaagactggggtcaagtcagagggctctacctgagaaggacggcaaggctgaggtggctaagggggaccatggggaggtggcactagggatcaaagaagatggttagaaccagcagaagccagagggtgggaggggccatgctgtgtgagaccaggggaccagagggatgggagagtcaagggaaggacaatcccaggaagtcctaagaagtggggcagatggcagggctgaggatgggctctgcatcccccaaagccatcccttccctacttccccaaatgaagggacggctgtgggaccaggtctgtggaaagtggtgcatggtcagaatgggtgcagtttgaggggcctgtgtggaggcctca

SEQ ID NO: 10430 - DNA, 502 bp, Homo sapiens
  MAP TO AL139227.1; EXPRESSED IN BRAIN, SIGNAL = 1.1; EXPRESSED IN PLACENTA, SIGNAL = 1.4; SWISSPROT HIT: Q61967, EVALUE 9.00e-86; NT HIT: gi6756066, EVALUE 4.00e-97; EST_HUMAN HIT: BE019675.1, EVALUE 0.00e+00
gcctgctcacaatcataggggttctctgcagtatggatcctctgatggtcagtaaagtctgtaatgtgactaaagtcttccccacagtcattacaatggtaggatttcacttcggtaagagtgctttcatcttgagtgagagatgtgctgtgcttgaaatctatgctgtagttactgctttggtaaggtttgcctctcttatgaatcctcatatgtttataaagggatgggctctgaccaaaagccctcccacatatgctacattcaaaaggtttctctccagtatgagtcctctcatgttggacaagggaagaacatcgactaaaggctttcccacattccttacactggaagggcttctctccactgtgtgtgacctcgtgttgagtgagggatgtgccatgcctaaaggacctcccacatagattacatcgatagggtttctctccagtgtgaattcgctggtgttgaacaagggaggagctgcgctggaaggctttcc

SEQ ID NO: 10431 - DNA, 562 bp, Homo sapiens
  MAP TO AL049872.3; EXPRESSED IN BRAIN, SIGNAL = 0.82; EXPRESSED IN HELA, SIGNAL = 0.84; SWISSPROT HIT: P15924, EVALUE 3.00e-07; NT HIT: gi10863904, EVALUE 0.00e+00; EST_HUMAN HIT: BI712063.1, EVALUE 0.00e+00
tcagccacaggtgcggttcgactctgctcttccctgagtcgttccaattcttcttgcagatgattattttcctctttcatggatccaagacttcggtctttttcctctatggtctgtcttaaaatttcattttttcttaaggcctgagaatatttatccaattcctcctgcagctttgaacttctttctttaagcttttcaataaaaatttctttcttgtttataagttgtgtcaactgcttctgctcttctaaactagatgacaaaacgtccttagtttctttatggtcagtatccatttgttcaatattctttttgagttctgctatttccatgtctttcttttgattgagtttaattaaatgctcatgttccagctgtaaggcagaggtattcaaattacgtgcatttgacagttcttcaatggttttctcatacttgtttgcttcttccaacagcctctttttagcccaacacaattctgcctctatctctcctttttccatttttagagtctccacaatagtgtttttttccagagaaagctgattgttaccagcaa

SEQ ID NO: 10432 - DNA, 501 bp, Homo sapiens
  MAP TO AL355833.1; EXPRESSED IN BRAIN, SIGNAL = 0.9; EXPRESSED IN FETAL LIVER, SIGNAL = 0.96; SWISSPROT HIT: Q13258, EVALUE 4.00e-23; NT HIT: U31332.1, EVALUE 0.00e+00; EST_HUMAN HIT: BI760106.1, EVALUE 1.80e-01
ccgtcaggccacacaccagcatgtagaagaccgagggcagcgggcgcagtggacgccgcgagcaccaccccagccccgagcgcgccagcagccccagggccagcaggttgcccaggaggccggtgctgaagagcaccccgcccatcaccgccgagttgcctttttccacagaggtggtgttctggcagcggtagaacggcgacttcatggcgtgcgggagcagagggctggagtgaaggctgcggaagggcgagggccccggcgcccgggtgctaaggagcccccggcagctccgcgcgcggctcgggcggagaagctgcgccacagaaaaagctccgagggcggcggggtgttccccacggcaggaacctcctatctaaactcgcgggtcacacccctctttgagaggcgggacgctctgcagggtgagcgcctggcgctggcattgaagagcgcggagcaggccagtgaagagctcggccctgacgcgctgcgttctca

SEQ ID NO: 10433 - DNA, 558 bp, Homo sapiens
  MAP TO AP000344.1; EXPRESSED IN BRAIN, SIGNAL = 0.78; EXPRESSED IN HELA, SIGNAL = 0.31; SWISSPROT HIT: O88751, EVALUE 2.10e-01; NT HIT: AB051514.1, EVALUE 8.30e+00
ggttcatcctcccgccccactcactcagggacacagagagcagggggcaggccccgccccactcactcagggatgcagagagcagggggcagccccctcccctgctgctcaaggcctcctccaccccaccccagggccacctcacctcagggttcctccaagaggccttccttagcccccatcccaagttgccccatggggtctctgagctcagcaaatccggagacccatgacattccagcaaggaatgaacagggcagaggccaggggaggttcctgaaggctgccgccgccctctggcagctaacagacagcctccagtagccagggccaggtatccagccgcctctgctggggaggccccacgtggcactgagaacaggagagaggtcttctgcagacaagatctttcaagacacttcttgaagtggagagcagaggctgacatagcaggacaccctggcaggaagaaggcaagcagctggcaagcagtagcctcgtcactggtatgaggagacgtgtgctgcaaacaagcatggcaggacagcagcgggagct

SEQ ID NO: 10434 - DNA, 530 bp, Homo sapiens
  MAP TO AP000346.1; EXPRESSED IN BRAIN, SIGNAL = 0.8; EXPRESSED IN HELA, SIGNAL = 1.4; EST_HUMAN HIT: AA121317.1, EVALUE 1.90e-01; SWISSPROT HIT: P11680, EVALUE 3.30e-01; NT HIT: gi14725816, EVALUE 5.00e-01
gctgtgccatgtgatgccccccttcccatagagccccaggtcccttcaagaccccttggccagagcctatggcttcccattggcgtcggttggggcgcagctctttttggtgtgtgagacactggcctccactctaggtcttccatctcggagtcgaacccaagctcttctcaaaggctggtctgaccaggcgtgagtctccaactcctttgaaatatttggggtgggaagcgggggctttcttggctcccctactctggggcagtggtagggaagagcggagggtctcctggtgtgcctgggccccacagcagtgaggtgcgggatctcccagggctggctgctgcctctcaggccactgtgccctgctacggcagatgccccctgagatgccagcgaccaaaggctggccctccctgggtcctctgcgcctgccctctcattcaactgctgacatggctgtcacccacccacagcctcctgctggcttctcaggcccctggccaggcagcttcgtggggtgatgggga

SEQ ID NO: 10435 - DNA, 505 bp, Homo sapiens
  MAP TO AL121787.22; EXPRESSED IN HELA, SIGNAL = 1.1; EXPRESSED IN BRAIN, SIGNAL = 0.81; EST_HUMAN HIT: AA504587.1, EVALUE 2.00e-26; SWISSPROT HIT: P97303, EVALUE 3.00e-57; NT HIT: gi6671607, EVALUE 1.00e-107
agcaacagcctcaagccggggcttgccagggggcagattaaaagtgagccgcccagtgaagagaatgaggaagagagcatcacgctctgcctgtctggagatgagcctgacgccaaggacagagcgggggatgtcgagatggaccggaaacagcccagccctgcccctacccccacggccccagctggggccgcctgcctggagagatccaggagcgtggcctcgccctcctgcttaaggtctctgttcagcataacgaaaagtgtggagctgtctggcctgcccagtacatctcagcagcactttgccaggagtccagcctgcccttttgacaaggggatcactcagggtgaccttaaaactgactacacccctttcacagggaattatggacagccccacgtgggccagaaggaggtgtccaacttcaccatggggtcgcccctcagggggcctgggttggaggctctctgtaaacaggagggagagctggaccggaggagcg

SEQ ID NO: 10436 - DNA, 501 bp, Homo sapiens
  MAP TO AL133448.4; EXPRESSED IN LUNG, SIGNAL = 1.9; EXPRESSED IN FETAL LIVER, SIGNAL = 0.94; EXPRESSED IN BRAIN, SIGNAL = 1.1; EXPRESSED IN HELA, SIGNAL = 1.2; EST_HUMAN HIT: BI027678.1, EVALUE 0.00e+00; SWISSPROT HIT: P13290, EVALUE 2.70e-02; NT HIT: gi14751368, EVALUE 7.00e-68
tgggaaagccatggcacagctccagctggcctggcccgggtgtggaagtgggaggactgtccaggctgaggtggtctactctggccgagaactaccagtgactgagcagtcctcattccttctagcatctttgcccccctctcccggatggaggctgagattgtgcagcagcaggcacccccttcctacgggcagctcattgcccagggtgccatcccacctgtagaagactttcctacagagaatcctaatgatgtaagtcactccccacaaccctagcacctcctggtcccagttctgctgtggccccgcccctgtaccctccttcattcagcctttggccctctgactctgaggcctcctcatttccttgcagaactcagtgctgggcaacctgcgttctctgctacagatcttacgccaggatatgactccaggaggtggcccaggtgcccgccgtcgtcagcggggccgcttgatgcgacgcctggtacgccgtct

SEQ ID NO: 10437 - DNA, 514 bp, Homo sapiens
  MAP TO AC005954.1; EXPRESSED IN BRAIN, SIGNAL = 0.87; SWISSPROT HIT: O96018, EVALUE 4.20e-01; EST_HUMAN HIT: BI334679.1, EVALUE 0.00e+00; NT HIT: AB024411.1, EVALUE 0.00e+00
ggtctggcccgacgacgatgatttgccaagcccggttctagaacccagtgctgccaatggccggagctgccccacagtccccttctcactctaccccgttctcaaggctggctctcctctccctggccagccggaatctgctcgaaaccaccctcagaggctcccgagaacctcgtccttactggcaagctgttgccaggctggtgagcctgattctggctgtctaggggccttcagtgcctgaggctagggtgggcgggacactcaccctcctggggggcagggtaggaagccagggtctcggggctctggaagaagatagaggaggggcaggactgagtctccctgcttggttccaggcagtccaggatgcctggagggcggggcgggcactacctgggcaccagcgggtggctcttcaggtgtgactagaggcaccgtctccagccagggttccggggaactgcttgagctcctgctgccctcctgctcagcagaggccccctccacccat

SEQ ID NO: 10438 - DNA, 538 bp, Homo sapiens
  MAP TO Z97632.1; EXPRESSED IN HELA, SIGNAL = 0.76; EXPRESSED IN BRAIN, SIGNAL = 0.86; EST_HUMAN HIT: BG707051.1, EVALUE 0.00e+00; SWISSPROT HIT: P32247, EVALUE 2.00e-60; NT HIT: X76498.1, EVALUE 0.00e+00
cccgggaccgttcccatcacagccagggtggtaagagaggtgtcagcaacaggaggctcaggccgctccgccttgcaacagaacaactgagctttaaaatgcttctggaagcttttgctcagccagtagagagcaaaggggtttacgcaagaattgctgaaagccaaaacccgagagaaaatggtgaaaatgaaatgcatggcagaggggtctacataggtttgagaagtgaatgaatggtagaggtacaggaggtgatttggcaaccagcagagggcaaacagagccaccaacaccaataccgttctggcaattctctttcgggattcaatctatagggggaagaaacatagcaaaaaaaaaaaaaaaaaaaaaaaaaacacaaaaaacaacaacaacaaaaaaaacaaaacatttagctgtgagagattttaaaaagttatcctataaatttacatagaaatttacagttaattacagctgatttccctttgaacatgcatttgtatgctaactggctgggatgtgcaggaagtca

SEQ ID NO: 10439 - DNA, 505 bp, Homo sapiens
  MAP TO AC004144.1; EXPRESSED IN LUNG, SIGNAL = 1.2; EXPRESSED IN HELA, SIGNAL = 0.98; EXPRESSED IN BRAIN, SIGNAL = 1.2; EXPRESSED IN FETAL LIVER, SIGNAL = 1.4; SWISSPROT HIT: O94819, EVALUE 4.10e-01; EST_HUMAN HIT: AW403316.1, EVALUE 1.00e-60; NT HIT: gi14767158, EVALUE 1.00e-60
accttccctccccgggcaacccagtgccttgtgaagtctccagaggtcaagctcatggaccgaggcggaagccagcccagagcaggtactggctacgcctccccagacaggacccacgtgagtattgggcccacctccgtcagggcacggggctgggaaccctgaggccttgtcctcacctcagagctgtgcctgcaggtcctcgctgcagggaaggctgaagagaccctggaggcctggcgcccaccacgtgagtgccccagtcccagacggacagtcctgggtttctcggcgagtggccggatgtccagcctagctgtggggcgtgggggccctagccatcagttctgtgtggtggagtcagtgccatctgcttccgttacagctccctgccttacgagcctggcgtcctgtgtccctgcttcctccgtgctgcccacagacaggaatctcccaacgcccacatctgcacccaccccaggcctggctcagggtgtccatgccc

SEQ ID NO: 10440 - DNA, 598 bp, Homo sapiens
  MAP TO AP001754.1; EXPRESSED IN BRAIN, SIGNAL = 1.3; EXPRESSED IN HELA, SIGNAL = 1.1; EXPRESSED IN LUNG, SIGNAL = 1.1; EXPRESSED IN FETAL LIVER, SIGNAL = 1.1; EST_HUMAN HIT: BF951818.1, EVALUE 7.00e-57; SWISSPROT HIT: O94759, EVALUE 5.00e-18; NT HIT: gi13646881, EVALUE 8.00e-62
tgacagcgatggtgacagcaaggatagtgatgatagtgacagtgatagtgatgatagtgacagtgactgtgatgatagtggatagtgatatgacagtgatggtgacagcaagggtagtgatgatagtgacagtgatagtgatgatagtgacagtgactgtgatgatagtggatagtgatatgacagtgatggtgacagcaaggatagtgatgatagtgacagtgatagtgatgatagtgacagtgactgtgatgatagtggatagtgatatgacagtgatggtgacagcaagggtagtgatgatagtgacagtgatagtgatgatagtgacagtgactgtgatgatgatagtggatagtgatgtgacagtgacagtgaggatagtaagagtgacaacctgtctgccttcctaccgcccctcttcccagtagctcttctatgaccctgacgagtgcgggctgatgaagaaggcagccttgtacttcagtgacttctggaataagctggacgtcggcgcaatcttgctcttcgtggcagggctgacctgcaggtgagtggcctcaccccgatggcgggcccgtctgaggcagccagccct

SEQ ID NO: 10441 - DNA, 515 bp, Homo sapiens
  MAP TO AC007782.20; EXPRESSED IN BRAIN, SIGNAL = 0.9; EXPRESSED IN HELA, SIGNAL = 1.1; EST_HUMAN HIT: BG461175.1, EVALUE 0.00e+00; SWISSPROT HIT: P16884, EVALUE 8.20e+00; NT HIT: U60729.1, EVALUE 4.90e-01
tggcaaccatgaaaatggagatttggacccaacctcacctttggaaaacatggattacattaaagacaaggaagaggtgaatggcattgaagagatttgttttgatcctgaaggaagtaaagcagaatggaaggaaacaccctgtatcctaagtgttaatgtaaaaaacaagcaggatgatgatttaaattgtgaacctttgtctccccataatataactccagaaccagtctctaaactgcctgctgaaccagtttctggtgatccagcccctggtgatctggatgccggagatccagcctccggagtactggcctctggtgattccacctctggtgatcccacctctagcgagccctcctctagtgatgctgcctctggtgatgcaacctctggtgatgccccttctggtgatgtgtcccctggtgatgccacctctggtgatgccactgctgatgatctctcctctggtgatcccacctctagtgatcccatcccaggtgaaccggtccctg

SEQ ID NO: 10442 - DNA, 507 bp, Homo sapiens
  MAP TO AJ009612.1; EXPRESSED IN HEART, SIGNAL = 1.7; EXPRESSED IN LUNG, SIGNAL = 1.3; EXPRESSED IN HELA, SIGNAL = 3.3; EXPRESSED IN PLACENTA, SIGNAL = 1.6; EXPRESSED IN BRAIN, SIGNAL = 1.4; EST_HUMAN HIT: AL568291.1, EVALUE 3.00e-12; NT HIT: gi10190687, EVALUE 0.00e+00; SWISSPROT HIT: P52742, EVALUE 5.00e-72
tggctgaatgctttcccacacacactgcatttatatggtttctctccagtatgtgttctatgatgttgagtaagatttgcactctggctgaaggctttcccacatatattacatatataggatttctctccagtgtgagtggtttgatgttgaataagggttgaggaatgagcaaaggcttttccacattcattacatttataacacttctctccagaatgaattctctgatgtcgaataaggtaagtactctgactaaacactttccaacattcattgcatttatatggtttcttcccagtatgtattttttgatgctgaagaaggtgtgtactctgactgaaagtcttcccacattcattgcatatataaggtttttctccagtatgaactctctgatgattaatcagtgatgaactatgactgaaggttttaccacattccaagcatttatatggtttctctccagtatgtgtcctttgatggatggtaaggtgtgcacgctga

SEQ ID NO: 10443 - DNA, 512 bp, Homo sapiens
  MAP TO AL031777.2; EXPRESSED IN BRAIN, SIGNAL = 0.8; EXPRESSED IN HELA, SIGNAL = 1.1; NT HIT: Z80786.1, EVALUE 0.00e+00; SWISSPROT HIT: P06352, EVALUE 4.00e-23; EST_HUMAN HIT: BG327264.1, EVALUE 3.00e-28
ggaccaatcactctcaaacgcggtatttttgaatcgctccggaactgcagaacgttcatttccgtctgtcaaacataatcccaaacaaactgattaaaataaaatcaatgaaggtacgtaatacaggtaggcacataaaacataataaaatgtaaggaactaggggaaaaaagcatttagataggttaagattttctaaaatgagacctagtagctgatcacaagtcctatcacactacataattcagggcgcgaaactggaagattcggaccaatcagaaggactttgcctttataaataggagtaagaacaactgtttgttcagttgtgaccattgcttgaaacccattcctatggcacgcacgaagcaaacagctcgtaagtccactggcggcaaagccccgcgcaagcagctggccactaaggcggctcgcaaaagcgcgccagccaccggtggcgtgaagaagccccaccgctacaggcctggtactgtcgccctccgtgaaatccg

SEQ ID NO: 10444 - DNA, 571 bp, Homo sapiens
  MAP TO Z82188.2; EXPRESSED IN BRAIN, SIGNAL = 0.84; EXPRESSED IN HELA, SIGNAL = 0.47; NT HIT: gi14778678, EVALUE 7.00e-99; EST_HUMAN HIT: AA521232.1, EVALUE 7.00e-97
acgctttcgctggggttgccgcagttctgttccagcatggcatatggtccatgcctggccagtcagagcacagcactgcaccactctgacaaatatgattggttaaaagggggcccaggacctaagctggtccaatcacagtaaatcttagttagaactttgcctgggatagacatttgctctttttggctgaacttgaacttggaaggatgaggccctgaacttgaacttggaaggatgaaaccctgaacttgaacttgggaggatgaagccctaagtcgcctgcctgagaatgaaccagccagcagaaggcagagcccagagctaaacaagcctcgatgacatcatttgaataccttgatcaagctgcacctgaaatcacgatatctccaaacttgaatcaataaatttattttctgcttaagcaggttgagttgggttttctatttgcaatagcaaaagtcctgactggcaaggtttaaaagtttgaagactctcacaggtaagtgcagctcaggatcctgtgagtgcagcagaaagtcttaagaaatggcaggggctggttgaaccc

SEQ ID NO: 10445 - DNA, 522 bp, Homo sapiens
  MAP TO AC022423.2; EXPRESSED IN HELA, SIGNAL = 0.52; EXPRESSED IN BRAIN, SIGNAL =   1; NT HIT: gi16171325, EVALUE 0.00e+00; SWISSPROT HIT: Q09202, EVALUE 3.70e-02; EST_HUMAN HIT: AI365646.1, EVALUE 0.00e+00
acaccacagctgcccccaggtccccccagtgtgtgctggaaagcaagccacctcttgccacctctgggccactgaaaccctcagtgtctgacacgagcatcaggacatttgtctcgcccctgacctctcccaagcctgttcctgagcaaggcatgtggagcaggttccacatggctgtcctctctgaacccgacagaggttgcccaaccacccctaaatctcctaagtgtagagcagagggcagggcgccccgtgctgactccgggccggtgagtccggcagcgtctaggaacggcatgtccgtggcagggaacagacagagtgagccgcgcctggccagccatgtggcagcagacacagcccaacccaggccgactggcgaaaaaggaggcaacataatggccagcgatcgcctcgaaagaacaaaccagctgaaaatcgtggagatttctgctgaagcagtgtcagagactgtatgtggtaacaagccagctgaaagcgacagacggggagggtgcttgg

SEQ ID NO: 10446 - DNA, 503 bp, Homo sapiens
  MAP TO AL160313.1; EXPRESSED IN BRAIN, SIGNAL = 0.79; EXPRESSED IN HELA, SIGNAL = 0.43; EST_HUMAN HIT: BG989275.1, EVALUE 1.00e-05; NT HIT: gi15300951, EVALUE 1.00e-63; SWISSPROT HIT: O43497, EVALUE 1.80e-01
tgaccctccctccccgtgtgacccaacacttcacctttctaagcctccactttcttatctgtaaaatgggaaaaataatactagcctcagtgggttttaggagaatcaaatgaaatgaagcatctaaagtgcctgaaataagagttggtggagaaatgtcaggcctcacaggccagatggaggggtttggatatgatgcctgtgtgaggtctgttctgtaaaactgtccttctccaggccccaaagcatgaaattcagcacccccaccaggtgtgttaaatattcacaatatgtgagaacaggataccaactggtcctgtcacaccagtgcatatgggtgcctgcccccacccaggcccgggttccccaaggaagccacctctcagagctgtggtccacggcgttctcgtcatcctcggagactctgaactcgctgatgcggatccactcactgctgcggatacccactgagtagtagacgtagagcctgcggttgtgctgga

SEQ ID NO: 10447 - DNA, 534 bp, Homo sapiens
  MAP TO U82672.1; EXPRESSED IN HELA, SIGNAL = 0.9; EXPRESSED IN BRAIN, SIGNAL = 0.99; SWISSPROT HIT: O14628, EVALUE 6.00e-18; EST_HUMAN HIT: AL040805.1, EVALUE 0.00e+00; NT HIT: gi13648594, EVALUE 1.00e-105
aagcaccggcgcatccacagcggactgaaaccctatgagtgcgacaaatgcggcaaggccttccgccggagctccggcctcagtcgccaccggcggatccacagtggggcgcggcgctgcgaatgcagccagtgtggccgcgtgttcaagaggcgctcggcactgcagaagcatcagccaacccaccacgagtagaaacgccctgtggtcccgcgggacagggacggagtccccagaggggatggcagagtcaaaggagatgaacagttttgtagcgcttatatattttgtcttccaaaaggttgagaccgatttatactgccaccagcaatttataagtgttacgttatgcccatcaagagtagcttgtaccatttaacttagtttggctagtttaactggtaggaagtaccatcaaggtatttcagtccacatgccttgaatccaagaatgagagaggacaaatctggatgtggggtagggaggggcttagaggtcatcaactccaagctccccccgccccagagaaacaca

SEQ ID NO: 10448 - DNA, 530 bp, Homo sapiens
  MAP TO AL035462.17; EXPRESSED IN HELA, SIGNAL = 1.3; EXPRESSED IN BRAIN, SIGNAL = 1.3; EXPRESSED IN LUNG, SIGNAL = 1.4; EXPRESSED IN FETAL LIVER, SIGNAL = 1.1; EST_HUMAN HIT: BI559806.1, EVALUE 2.00e-66; NT HIT: gi10947009, EVALUE 7.00e-59; SWISSPROT HIT: O02491, EVALUE 9.80e-01
cgcgaggagggcaagtaccgccacaacgtgctggtcaaggacaccaagcgccgcatgctgcagctcaagagcaacaaggtccgccagaaagtggagcacagtgtggagggtgcccagcgcgccgctgctatcgcgcgccagaaggccgagattgccgcctccaggtaggacagcggtgggggtgggaaggggtcgcctcccctcggagaagggggtcctggggcagggcaacctaggaggccctgtctccaagcctgattctgcttcttttacccccatcaccttcaggggttaattggaggctcttcgggagctggtggctcctgttcactcacccatccatccatcactcagttacacccagcccttccactgacttaaccctaccactcacccaacctttctaatatccacctgaacagccatctctccagtcatccactccattcccctacccattccacttcctgtttacccacccagtcatccagtcatccatctatccacacaacctcgcagtcaaccaccca

SEQ ID NO: 10449 - DNA, 536 bp, Homo sapiens
  MAP TO AL049547.9; EXPRESSED IN HELA, SIGNAL = 1.1; EXPRESSED IN BRAIN, SIGNAL = 0.81; EXPRESSED IN FETAL LIVER, SIGNAL = 1.2; SWISSPROT HIT: P22105, EVALUE 1.00e-110; EST_HUMAN HIT: BI011300.1, EVALUE 1.00e-119; NT HIT: gi14719824, EVALUE 0.00e+00
gccctcgaggttgcagccagaggggacgctgtgagggtgggcgctgcgtgtgtgacccaggctacactggtgacgactgtggcatgaggagctgccctcgcggttgcagtcagagggggcgctgtgagaatgggcgctgcgtgtgtaaccccggctacgctggcgaggactgtggggtgaggagctgccctcggggctgcagccagcggggacgctgcaaggacgggcgctgcgtgtgtgaccccggctacactggcgaggactgtggtacgcggagctgcccctgggactgtggcgagggcgggcgctgcgtggacggccgctgcgtgtgctggcccgggtacacaggcgaggactgcagcacgcggacatgtccgagggactgccggggccgcgggcgctgcgaggacggcgaatgcatttgcgacacgggctacagcggggacgactgcggcgtgcgcagctgccctggcgactgcaaccaaaggggccgctgcgaggacggccgctgcgtgtgctggccggggtacactgga

SEQ ID NO: 10450 - DNA, 532 bp, Homo sapiens
  MAP TO AL031447.4; EXPRESSED IN BRAIN, SIGNAL = 1.2; EXPRESSED IN HELA, SIGNAL = 0.98; NT HIT: gi11421399, EVALUE 5.00e-78; EST_HUMAN HIT: AL524904.1, EVALUE 2.00e-72; SWISSPROT HIT: Q9UJP4, EVALUE 2.00e-25
cggctgcgaccaggactgtgacgagctggtcactgtcgactgctacaacccgcagacgggtcagtggcgctacctggccgagttcccagaccacctgggcggaggctacagcatcgtggcgctgggcaatgacatctacgtgacgggtgagtgggccaggggctgggcaggctctctggggttgaacctcgccggtacgggagcccagctattcgcgggggaagcgcacagagcctggaatcctaggggcgcacctgagtccaagctggggctctggtgactacatgtctctgggcgatacttttaaccttgaagaagggccccttgtgtgagccgggacaagtagctgcttgtgggtctctgtgccccgtgcggccggggctgccaggctgagccaactccgtgcccaggaggtgcctccccacttggttggaagatactggggcattcaccccgcacaatgggtgctttctttttctccttaaggaatccagggacgggcaggaggccgacgcccggtgaggcatctgtt

SEQ ID NO: 10451 - DNA, 500 bp, Homo sapiens
  MAP TO AC020663.1; EXPRESSED IN BRAIN, SIGNAL = 0.9; EXPRESSED IN HELA, SIGNAL = 1.4; EXPRESSED IN LUNG, SIGNAL = 0.97; NT HIT: gi14779660, EVALUE 0.00e+00; EST_HUMAN HIT: F11625.1, EVALUE 0.00e+00; SWISSPROT HIT: O54751, EVALUE 1.20e+00
ggagaggggttgggacgtggggatgaggctgtatgccagcagccactggatgctggaggcagctgatggaccctcccaggcccttcaggagccagccccacgaacaccttgagtgtcggcttctggcctcctgagtgtgtctctgtggctgaagcccctgctctgtgtcacctgttctggctgccactggacactcagagcctgtccttgcccttgttctgcacccagtgcccagcttcctctgcggcctgggcatcccaaatgtcccctgctggcctcatactgggccatgggaggaaacgggcagctggcaatgctttcggaccaggctgtctagcagtttcctgaattctgtgcccagggatgagagtcctggaaagggagtttcaggcctggtgatcaggctttggcaccggggcctccaggagccaccggctggagcgtcggcaaggagcctgcccccatgtgggtccgctggtgcttgtgcaggtcggtgcccc

SEQ ID NO: 10452 - DNA, 509 bp, Homo sapiens
  MAP TO AC007462.2; EXPRESSED IN BRAIN, SIGNAL = 1.1; EXPRESSED IN HELA, SIGNAL =   1; EXPRESSED IN LUNG, SIGNAL = 1.1; NT HIT: gi14777812, EVALUE 4.80e-01; EST_HUMAN HIT: AW615238.1, EVALUE 1.80e-01; SWISSPROT HIT: P15124, EVALUE 8.10e+00
tctgtgcagatgcgagggtcctaaccagactcatctagatctgtaatggacaaaggggcccaggctgacatctgggcaatgttacagttgtttactatattcccaaaagggaatgtcactatcattttcaggcaattgtctcatctagttggatttcagtaataacacagtccccgccagaagaaagccagcttccatcccgggtactgtacaattcctcttgagccatgggtcaacatggaaatagacttgaaagttgggtgggcttaaaacaaagttgctgctcccacggtagaaatgctcaaaagctaaatctgccatctttatccacacaggaaagtgcatttttaatgacatagcactgttgtggctctttattttcatgcactagagggtacttccagtgctccttaggaaccacattaggtcaatcagcgtcccccattgacatcacatgaatgtggttttctgtgtccattcttaaaagtggcccctttttggcctttgca

SEQ ID NO: 10453 - DNA, 514 bp, Homo sapiens
  MAP TO AC010615.5; EXPRESSED IN BRAIN, SIGNAL = 1.5; EXPRESSED IN HELA, SIGNAL = 2.8; EXPRESSED IN FETAL LIVER, SIGNAL = 1.5; NT HIT: gi14861847, EVALUE 5.00e-10; EST_HUMAN HIT: BG470039.1, EVALUE 7.00e-38; SWISSPROT HIT: P11930, EVALUE 1.00e-06
ggagctggagacgagcctgggtgtgcaacacagagagacaagacccccatctgtaccaaaaataaataaaaataggaagactggatcatattaagtctgttctccaagaaaaccaaattaaacggctgtggagatgtactatgtctacacatgtacaagtgcttacacagtggccacgctggaggaaccacgtggagagacaggctccaggccttgagaccccaaagcctaggaaagcagagagcacttcaccaagagcatggctttggtctacaggggtgagagtttccagcccgtctaagcgttccttgctgcttaatctctctgggcttggcctatgcgggggtcccttgggggcctgggccgctgggaggggtcctccctctcacgtcctggcggtccgcagcaaggccctgagcaggccttacctggtagcccaccacctccgccaagtcggggtagacgggcggcggctcgcgcaggcagcacaggaagaaggccgtgtcaaagcggc

SEQ ID NO: 10454 - DNA, 511 bp, Homo sapiens
  MAP TO AC006486.1; EXPRESSED IN BRAIN, SIGNAL = 0.95; EXPRESSED IN HELA, SIGNAL = 0.92; NT HIT: AF283669.1, EVALUE 8.00e-06; EST_HUMAN HIT: AW083036.1, EVALUE 1.00e-05; SWISSPROT HIT: Q9Y6R0, EVALUE 3.60e+00
gaggggctgggagcctggactcctgggtctgagggaggaggagctgggggtctggacccctgggtcctggaggaggagggtctgggggcctgagcccctgggtctgaaggaggagggggtgggggcctggacccctgggtctgaggggggagggggtgagggcctggacccctgggtctgagggggtagggggtgggggcctgggcccctgggtccttggggagcagggttgggggctggactccagattctcctagcaggtgagtcggggtagaaggtctggagtcctaagggaggaggcgggattcagactgcctggatggtagtgctagagaacagtgatgccccagagctgctttctatcctttcttatctgcccatcctcccctcagtcctgagcctcctatttttctgcatctactggggtcaatatgccaccgatggcattggcaacgagagtgtgaagatcttgggtgagaatgaagctgggtggggagagggtggagcccag

SEQ ID NO: 10455 - DNA, 518 bp, Homo sapiens
  MAP TO AL135841.9; EXPRESSED IN HELA, SIGNAL = 0.83; EXPRESSED IN BRAIN, SIGNAL = 0.88; NT HIT: gi11429041, EVALUE 4.00e-54; EST_HUMAN HIT: AW953343.1, EVALUE 1.80e-01; SWISSPROT HIT: Q9NQN1, EVALUE 3.00e-11
tgaggaccccattgcccagcaggatcacgaggtacatcagcaggatgagcacgaagaatgtcttttccagctctgggtgggcagagagcctcaggagaacgaaccccatcacaggggaggtctcattggctttttccatgtgatatcccctctgccatcagcaaagtactgagcagcgcatcaggctttttgggaagagtcctaggcatctaatatgtggtcaagttcccattgcataatagaagaacatatctgtgcaagagaaaaatgacggaaagagacagtagggggtgtcttagaagacagaaggtcagagctggacaggtagtgggtgagggcctcaaatgtccggttgtgcatgagggatttttctgaagttgctgcaccctctcagtgtccacaaaggtgatagaggcctggggaggagaagtgacctgtccaaatcttctgagcaagttggtgacagagacaagacttgaacccagcagagcatatccctggcccaaggagggcttttc

SEQ ID NO: 10456 - DNA, 510 bp, Homo sapiens
  MAP TO AL031003.1; EXPRESSED IN FETAL LIVER, SIGNAL =   1; EXPRESSED IN LUNG, SIGNAL = 1.1; EXPRESSED IN BRAIN, SIGNAL = 1.8; EST_HUMAN HIT: AA021371.1, EVALUE 0.00e+00; SWISSPROT HIT: O67417, EVALUE 1.20e+00; NT HIT: gi16172457, EVALUE 0.00e+00
gagacagggcggcagttcgcagggaccggtggcctaggcagtcccggggtgtctgctcttcatcggctagtgaacagttgtccgacccaatgtctgacacgtcggacctgcccgagtccttttctgctgccatagagtactgatcacaggaatcaaactctgtcctagaaaggtcttggtcatcaacgctaaaattgctctcactatacctagatccataggaccttgtcctgcagtctactgacaggaagttagttatgtcagggtaagggaccgtgtggcttctctgcacgacatctggctggtctaccgcctctgtttccaatactttgctcagcgtctccttaccctctgggatggctggcgacttgagactgttcttgtggtttcccgaatggtcctcgggtgtagtctgacccaactctccctcgagagtggtctggcctgtgtctgtggtgacactgatgctgatgtcaaggctcctctcgttccctgactcccacggcgtgt

SEQ ID NO: 10457 - DNA, 507 bp, Homo sapiens
  MAP TO AC026805.3; EXPRESSED IN BRAIN, SIGNAL = 0.8; SWISSPROT HIT: O22621, EVALUE 1.20e+00
cggggatgcaccatgcaaagagaaggcgcctctccccccactcccagaaacagactgtccctcatcaagcaaattctacagccaagagggtgggaagggggaaggcagtgaggtcgctgcaggaaacggatggcaaactcaaccaaaaggccgtttacagggagtaagcagggtttccaaggaatggtgtagcccccaggctagtggatgggagagggagtgctgttatggggacccagtcagagctggggccaaggaaaaagggctgccaccagccctgggaccttagagaacccagaaccatggcaaggcacagatggagtggccaataaatgtccccaccttctctcttcctctggcttcccgctggagcctccccttagccaaacgcagcatgttaagagctagcctccgtccagcctaagcctctccccaaggaccctattaagttaagattacatgtaacaggtacagggtcttcctctcagccctggggtctccctcagc

SEQ ID NO: 10458 - DNA, 516 bp, Homo sapiens
  MAP TO AL163301.2; EXPRESSED IN HELA, SIGNAL = 1.2; EXPRESSED IN BRAIN, SIGNAL = 1.7; EXPRESSED IN HEART, SIGNAL = 1.3; EXPRESSED IN LUNG, SIGNAL = 1.9; EST_HUMAN HIT: BG955496.1, EVALUE 0.00e+00; SWISSPROT HIT: P78563, EVALUE 4.00e-58; NT HIT: AL163301.2, EVALUE 0.00e+00
acctggccatggggaggaccctgtctgtcaacacggacttcacatctgaccaggccgacttccctgacacgctcttcaatggttttgaaactcctgacaaggcggagcctcccttttacgtgggctccaatggggatgactccttcagttccagcggggacctcagcttgtctgcttccccggtgcctgccagcctagcccagcctcctctccctgtcttaccaccattcccacccccgagtgggaagaatcccgtgatgatcttgaacgaactgcgcccaggactcaagtatgacttcctctccgagagcggggagagccatgccaagagcttcgtcatgtctgtggtcgtggatggtcagttctttgaaggctcggggagaaacaagaagcttgccaaggcccgggctgcgcagtctgccctggccgccatttttaacttgcacttggatcagacgccatctcgccagcctattcccagtgagggtcttcagctgcatttaccgcaggtgagga

SEQ ID NO: 10459 - DNA, 555 bp, Homo sapiens
  MAP TO AC003042.1; EXPRESSED IN HELA, SIGNAL =  19; EXPRESSED IN BRAIN, SIGNAL = 7.8; SWISSPROT HIT: P15880, EVALUE 1.00e-66; NT HIT: gi16185793, EVALUE 0.00e+00; EST_HUMAN HIT: BG760753.1, EVALUE 0.00e+00
gatgatgctggtggcagccggtggtggggatcgcctgggatggggaaatgcagtggcttccgtggaggtttcggcagtggcatccggggccggggctggggctgaggccgcggctgaggccgcagagctcatggaggcaaggccgaggataaagagtggatgcctatcaccaagctgggccgcctggtcaagcacatgaagatcaagtccctggaggagatgtatgtcttctccctgcccatgaaggaatctgagatcactaactttttcctgggggcctctctcaaggacgaggttttgaagattatgccagtgcagaagcagacccgtgccggccagcgcaccaggttcaagatgtttgttgccatcgtggactacaatggccacatcggtctgggtgttaagtgctccaaggaggtggccactgccatccacggggccatcatcctggccaagctctctattgtccctgtgcacagaggctactgggggaacaagatcagcaagccccacaccatcccttgcaagccgacaggccaccacggctctgtgctg

SEQ ID NO: 10460 - DNA, 503 bp, Homo sapiens
  MAP TO AF176815.1; EXPRESSED IN PLACENTA, SIGNAL = 1.8; EXPRESSED IN HELA, SIGNAL = 0.38; EXPRESSED IN BRAIN, SIGNAL = 1.5; EXPRESSED IN LUNG, SIGNAL = 1.4; EST_HUMAN HIT: BI461138.1, EVALUE 9.00e-59; SWISSPROT HIT: Q9UMN6, EVALUE 7.00e-01; NT HIT: AF176815.1, EVALUE 0.00e+00
acggtctccggagttggggctcccccttcccggcccgactttccccgccgacctccccaagtggggtcggagccccggcgggcgcccccggcgatgagcccggactcgaggtggccggtgagtgcgggcctgggaccagggcgggagtggccggcagggaaggggtaggctacgttcgtgggacgcgcactgagccgcgtggcccgggaacctctctggcaactccagttgggagaactgacagtgcattgcttcccagcaggcatcctggggcaacagtgtatctttcggggctgcccgggctagtggcaggcggggagccttgtttcacttgttacacttccacaaaggggaaacgccgccgcatccggagagtgggctgcgggcactgccggggcccagccctatccctccggcccccgccccttacttcctccagccccctgagcttcaggggcagatgcagccgccattctccttgggccctccccacgggctttctg

SEQ ID NO: 10461 - DNA, 551 bp, Homo sapiens
  MAP TO AL008715.1; EXPRESSED IN HELA, SIGNAL = 1.1; EXPRESSED IN BRAIN, SIGNAL = 0.98; EXPRESSED IN HEART, SIGNAL = 1.3; EST_HUMAN HIT: BE811922.1, EVALUE 5.00e-76; SWISSPROT HIT: P30432, EVALUE 2.30e+00; NT HIT: gi13648208, EVALUE 8.00e-68
cgccaggaggctttaggctttccagaaagcccaaataagggtggaaaaaaaccaacaccccacaaagatgaaaagcatactcattctgctctcctgtgcccttatctctctcaccacattgcacataaatctcccagccatccatgcccctgggaggtcctctcggcccacctcaccctacctccagggatgtccctgtgttgaccctacctttagatcagacacgtctctgtagcactgctcggagcgggtgtggtctgacagctgcacattccagaagcaggggagctggtacacaaggaaggggttttgtttgatgacggcattgaaaatatcctgggggatgaaagccaaagacacagtcaagacagtcggatggtccagctgcccattttggctctcaaggcactgcatcccctgtgatagggcttctcttgaacctcctgctctgaacacaggctggctcgcactgtgaggcatctctcttgcctgttatctctaggaaccaagcaataatgtttggatagagacgggggaatgtcccaggctga

SEQ ID NO: 10462 - DNA, 592 bp, Homo sapiens
  MAP TO AC006479.2; EXPRESSED IN HEART, SIGNAL = 1.5; EXPRESSED IN BRAIN, SIGNAL = 0.85; EXPRESSED IN HELA, SIGNAL = 1.2; EST_HUMAN HIT: AL570295.1, EVALUE 0.00e+00; SWISSPROT HIT: O60566, EVALUE 6.60e-01; NT HIT: gi11419972, EVALUE 0.00e+00
ttccatccccacctctgcggacttttactcacttctcagggacctgcatgggatctcaggcccattcctgaagcagttgttggcagacagagtggaatagtgtttacagcaggcaggcagccttggagtggaggcacacagctccaagtctatcaggaagaaggggaaatgggagctgcacagacagcaagcagcatgctccatagaccacgaggatctgagtctgaattggtgattattagaacaatgactccatggggtgatacattagaagtgctccagggtccagagatttaaatgtaatgaaagatgaacagaaaaataatgaaaaaaagtatgctgcacaacaatagaaaaacaaaaatctcataatgcaaaagcatcaagtgtttgactctgaggagcgccttgtatgcccagttactctcgttctccctcagctcttgcttgtgcttctccacctgccattccactttggcctggtactgcctgtagtcttcctggcaggccccagctccagttctttggagcagctgggcatccaagaagaggtcattgctgtggaaggagccctctcgctccctccccagcc

SEQ ID NO: 10463 - DNA, 519 bp, Homo sapiens
  MAP TO AC006128.1; EXPRESSED IN HELA, SIGNAL = 0.97; EXPRESSED IN BRAIN, SIGNAL = 0.88; SWISSPROT HIT: Q03164, EVALUE 1.20e-01; NT HIT: AB012266.1, EVALUE 3.00e-42; EST_HUMAN HIT: AI221400.1, EVALUE 1.00e-109
gcccctacccacaggcccagagaaagccaagagctgcccctcagtggcgagcatgaccctggcaggctcatcagccgcagtgaggctttcaggggaagatcagcaaagtaaagtgggaggcacgatccacatccaaggcggcccaaaaggagatgcagaggcttgaccaatactctggcctggctggcccaggacatgggagctgtagtccccaccgcccccacccaccctgggccctgtccctgggctacagcccaacctgaggtcccgaccctcccagcgccagaacctccctcggctcttgggacccacactcactgaggttcaagggcccctcatcctcagactgaggccactgtgcctttggggaggccggccgggggctcagggacagctgggggctcttgtcctcaggattcttaggggtaggggagcccgccagggccagtggtgtctttttgaggagtggagagctgggcgggtggcccaggcccttggccgagaagccgggaggcgact

SEQ ID NO: 10464 - DNA, 504 bp, Homo sapiens
  MAP TO AC007614.2; EXPRESSED IN BRAIN, SIGNAL = 1.8; EXPRESSED IN HELA, SIGNAL = 0.72; EST_HUMAN HIT: BG709519.1, EVALUE 2.00e-63; SWISSPROT HIT: Q9R171, EVALUE 9.00e-16; NT HIT: gi16164851, EVALUE 1.00e-63
gaggcccggaaggcagaagcagaaaattctgtctctcgggggatggggctggatcccaagagccagagacagggaaagcagaggacagttgaagccacagaactgagaggccccgctatctgtccctccaagcagcccgaagtacatgcagccgccacttctgcctaccacctccggacagcccgagcacccctgaggccagtaacccccctacggggccagggcccggcacgaggcgtcggctgacctgtatggtttgtctgttgtagacttttaccacgtggaagttaaaactgtagatccctttgcgcggggcgatgaaagtgctgcgttctgaatcaaagttgttcccaatgttcactagtacctataacgagacgggaacgaaggggagtgggcaggaatcggtcccggactgtcgtccccgcgcctccgcagagcccttggagaggaccgggcatcggtcttccatccatccctccttcaccagcccaatctgcacgc

SEQ ID NO: 10465 - DNA, 539 bp, Homo sapiens
  MAP TO AL078614.2; EXPRESSED IN BRAIN, SIGNAL = 1.1; EST_HUMAN HIT: BE867826.1, EVALUE 9.00e-53; SWISSPROT HIT: Q99439, EVALUE 4.00e-34; NT HIT: gi14765608, EVALUE 6.00e-53
caggtgggcatgacggctcccgggacccagcggcacatctatgacaccaatttgggaatcgacaagtgtgagaactcctccatgtccctgaagatgggctacacgcaggttgccaatcacagcggccaggtctttggcctaggccggcaaatatacgaacccaagtactagccgggtggcccagtggcccacggggctccctccgccggcaactgcccagggccaggggaggccccttactaccaggaggagaccggctactgaggctcccagcacgctctctccacacatggtctccccgtctgggtgttgggtttttctgtgttttcatcttttttttttttaacctgttcagtgctgccagtcaaccgagggtctgtgagtggcagcgtgggatcaggcagcagggttttttccccacctccccttgctttggttccttggcaggactgagacaccgggctgtgggggaagggatcaaggccgtatcctgatgcgtgtagggtgaaggtccccgctggcacttccaggctgtgggc

SEQ ID NO: 10466 - DNA, 560 bp, Homo sapiens
  MAP TO AC012313.5; EXPRESSED IN BRAIN, SIGNAL = 0.88; EXPRESSED IN HELA, SIGNAL = 0.62; EST_HUMAN HIT: AA877110.1, EVALUE 0.00e+00; SWISSPROT HIT: Q9Y2G7, EVALUE 3.00e-14; NT HIT: gi6756064, EVALUE 6.00e-04
accagctcagctcctccggccagaggtgggtcatgtccacagctaaaccagtcaagggtagggaatgaggcctgttttgggctccactattaacgattctctactgtttagagcaaggagcacaaggtctgctgtcccacttgctgtagggaccttatggggtggatagaggtggatggcggtggataaactcagtgatgtgacactgccaacagccccaggcaagtcagagtgcaatgtggctcccgaaagcgtcccacacaccaggcacacacgggaactctccctggggtgggtgttgggatgtgcaaggtttagcttctttcggatggcactctcacggccactctccttaacctcctttctggaataagacctttcctgatgaacacggtgctagcagctaacgaccttcccatgtgccctgtcctcctgacgcctttctggagtatggactttcttgtgctgaaggagggtggaactatgtttgaaggccttcccacactctgtacattcataagacctctcttcagtgtggaactgctggtgccgattgcggt

SEQ ID NO: 10467 - DNA, 562 bp, Homo sapiens
  MAP TO AC004909.2; EXPRESSED IN HELA, SIGNAL = 1.1; EXPRESSED IN BRAIN, SIGNAL = 0.78; SWISSPROT HIT: P35209, EVALUE 5.30e+00; EST_HUMAN HIT: AW613071.1, EVALUE 5.10e-02
gcacccaaattcttgacccacaggaactgggatatgtaaatgtttgttgtcttaagctgtaacattttgtagcaagttgttatgcagtcatagatgactaatatatgctacttaagatcttatagttcattttgataactttgcatctctctgaatatgatggaaaaccattggaagattttgggaagagaaatgatgacttgcattttaaaaggattactgttgctgttgcattgagtacgatttttggggaataaaggcagaagcatgaagaagagtttagaggctattttcctagttcaagtgagagatgatgaagacctgaactccaatggaagcaggggaagtgatgagaagtggtcagagtctgacacatttgcagaaagagccaaaagggtttgttgatgggatagaggtaagctgtaagaaagaagggaaaaagtcaagaaggtctccagagtatctgacaaggttaatatgctatatacagagatggggaaagctgtaagagaagcagatttaaagatgaaggatatgaaagcacagtttgaggtctgcccca

SEQ ID NO: 10468 - DNA, 525 bp, Homo sapiens
  MAP TO AC005924.2; EXPRESSED IN HEART, SIGNAL = 2.2; EXPRESSED IN LUNG, SIGNAL = 1.6; EXPRESSED IN BRAIN, SIGNAL = 4.2; EXPRESSED IN HELA, SIGNAL = 1.9; SWISSPROT HIT: Q37619, EVALUE 1.30e+00; EST_HUMAN HIT: BI916047.1, EVALUE 0.00e+00; NT HIT: gi14748522, EVALUE 0.00e+00
cactgtcatgccctctcccgctaaaaattcatttaatctgcttaaaaatgtattatctgggtcagggggcttaaagatcactctccagatacccccttttcccggtatctccttagggaccagggcgtgactagtctccgcagtaagccctactaaggctactttcctgttctcatccctcctgaacatccttccaagcagtctgtactcccccaagggagctaaaccagcctgcagagcctcctcgatttctgccacactgcagctctgggagatgccggcaatcaatagcgctttccgagggttcatgtccatccccctgcaccagtcttctaaaagcctcaaagtcatggtgcccgaaataatagacttaagttctaaatatgccagaccacaggcgaccaccgaaattcaaagtaatcctccgcggtaccccagagaaatcttgtcaacgtgccgaggtccagcagcctgcaagacagagcagacaggttagctaaaggtgccaacgtccagggcaagcgt

SEQ ID NO: 10469 - DNA, 516 bp, Homo sapiens
  MAP TO AC010508.5; EXPRESSED IN HELA, SIGNAL = 1.5; EXPRESSED IN BRAIN, SIGNAL = 1.2; EXPRESSED IN LUNG, SIGNAL = 0.96; SWISSPROT HIT: P10266, EVALUE 3.00e-75; EST_HUMAN HIT: AW013827.1, EVALUE 0.00e+00; NT HIT: X92887.1, EVALUE 0.00e+00
agttgtgcccaagtcggcggctctgctttcttggtggatggcaacttcatctgttcttctgacgtcaccattttgttcatcttgtgagtcaacggtgctcgattgcggtgtctccgtctccgcggaggtgcttttctttgcatctccgatgggttcattgtagaacttcaaatgtctagtgggtatccaaacaggaagctgattttctcctggtgaaacacaagcaaaacctctcccccacgttatcaccttccctatttcccatgtcttatttttattatctttccaccaaattagttttccttcatgtgggctgttctttttaccagtaagatgttgttctgcagaagtagtagtctgatttctataaatgtttaaaaaatttaaagtatagagtgctagattaagttgcatctgaggagtggtacactccttactgtctcccccttctttttgtttaactaattgagttttgagtgttctatttgttctttcaactatggcctgtccttggga

SEQ ID NO: 10470 - DNA, 505 bp, Homo sapiens
  MAP TO AC005736.1; EXPRESSED IN BRAIN, SIGNAL = 0.93; EST_HUMAN HIT: BE147954.1, EVALUE 0.00e+00; NT HIT: AY028949.1, EVALUE 0.00e+00; SWISSPROT HIT: O60503, EVALUE 1.00e-35
cgtcctttgcggcatcctgggcatgaggaggtttaaatttgacgtgtggtccaacgatgtgaacctggccaatctcatggagcagctgggagtggccggcaaagttcacatttctgaggccaccgcaaaatacttagatgaccggtacgaaatggaagatgggaaagttattgaacggctgggccagagcgtggttgctgaccagttgaaaggtatgtgcactgctttacctcggcatcccccctccctgatcctgattgtattaaattaaaaaaaaaagcttccagcctcagtgtctgcagacagctcaggtatctcagaatgccttaccatggggggatctcagggtcagtgtgacttttctttcagcgggtcaaatatcacagatctgttcacactgcagaaagggacgctgtgcagagatgacctagacgcgacctttagaaggaaggagaactttgaacgtgcataaccactggttggctgaaatgtgggggcacgtccg

SEQ ID NO: 10471 - DNA, 501 bp, Homo sapiens
  MAP TO AC020763.3; EXPRESSED IN LUNG, SIGNAL =   1; EXPRESSED IN BRAIN, SIGNAL = 3.3; EXPRESSED IN HELA, SIGNAL = 1.3; SWISSPROT HIT: O43312, EVALUE 4.00e-07; EST_HUMAN HIT: AW898348.1, EVALUE 2.00e-66; NT HIT: gi14740718, EVALUE 1.00e-26
aggcggcggtagttctgggcgatgttgctgttgcgcgggatggtggatgacttgtcaaactcgggcgggccctcgctgtccgcatccccattcacggagtagcagtcgtagtcggagcctgggggcacgggacacagtgaggcccagggcccaggtggccccttgcccccagcccaccagggtgagcacagagggggaaggacggggccctcctggatggctaagtcccagctgtccctggtcccaccccagccccgcgggcctgccttgggaggggatggtgtcctcagagcaggagggcgtggtggtctgcgtgctgtagccgctggagtactgcagcgagtcccggctgctcttctggtgctccaggctcaggccccgcgtcagcaccatggccaggtcactggcggcgggggacacctcctcaccgtgctgagggtgggaaagtgcaggctgaagccttgcgcccccaatcccctctgcccaaattccaggcagccc

SEQ ID NO: 10472 - DNA, 505 bp, Homo sapiens
  MAP TO AC002345.1; EXPRESSED IN BRAIN, SIGNAL = 0.88; EXPRESSED IN HELA, SIGNAL = 1.1; NT HIT: AJ278120.1, EVALUE 0.00e+00; SWISSPROT HIT: P16356, EVALUE 1.00e-06; EST_HUMAN HIT: BF985660.1, EVALUE 1.00e-130
  unsure 62
gcccttgctggggaactgccacagggagctgaggcatctggtagggccgctgggccattttnggataatggagatttgggtctgccaggaagctgactgacgcttgtttcctgctgatagcgcacgggtgaaccagactgggatctatagacactcatactttcagctggagggctggcccgatactgagggcctctccggagaggggaagggggagggcttgggtattctttgccctgtcctcccacaggaggggggctgaaacggtaagatcctccctgatgagccggggaagtgtgtggtgggctaggcctgtaatgtgagttctgatgagttggagaaagggcaggtgaggtggactgataggtctgtctagtgggagagcctacagaactactggaccggaagtcaaaaacctgatgagagccaagaggtgagctggagatgtaggctgagtcccgatgcgggggagaggagggtgggctctggatgaccgggagcccct

SEQ ID NO: 10473 - DNA, 556 bp, Homo sapiens
  MAP TO AC013620.2; EXPRESSED IN HELA, SIGNAL = 1.3; EXPRESSED IN FETAL LIVER, SIGNAL = 0.99; EXPRESSED IN BRAIN, SIGNAL = 1.2; EST_HUMAN HIT: BG493950.1, EVALUE 2.00e-63; NT HIT: gi5174734, EVALUE 3.00e-61; SWISSPROT HIT: P32882, EVALUE 6.00e-71
agcccctggggtgggatgtcacagacagctgttttcacatggttggggagccaataagcaaagtagcagctgtttttgttttgaacatcgagcatttgctcatccacttcccatgtggacatgtggcctctgaaaatggcaggaactgttaggtagcagccataatgaggtgaggtgtcacaagcagctgtgatattcttggtgtcaaacatctgctgagtgagttcagccacggtcagggcctggtactgctgactgccctggctggtcagtggggcaaagccaggcatgaagaagtgcaggtaggggaatgggatgatgttcatggtcagcttccacaggtcagcattcagctggcctgggaatcgcaggcaggtggcgaacccatttatggtggcagatactaggaggtttaggtcactctaggtgggcatgggcagctttagggttctgaagcagatgtcatagaaggcttcataatcaatgcaaaaagtctcatctgcatttgctatgagacttggagggtgacattgtggggctctagcatggtgcctga

SEQ ID NO: 10474 - DNA, 506 bp, Homo sapiens
  MAP TO AL008723.8; EXPRESSED IN BRAIN, SIGNAL = 1.3; EXPRESSED IN HELA, SIGNAL = 1.6; SWISSPROT HIT: P37954, EVALUE 9.30e-01; EST_HUMAN HIT: AV764638.1, EVALUE 4.00e-36; NT HIT: AL163206.2, EVALUE 8.00e-40
gactaggggtggcagcggggatggttaatgggtacaaaaaagagaaagaatgaataagacctactgtttgatagcacagcagggtaaccataatcagtaataacttaattgtacattttaaaatgacttaaagagtgtaattgaattgtttgtaactcaaaaaataaatgcttgaggggacagattaaagcaaaaagaattttagtcctaaacatgaacttagagatcatctactggaacctagttttagaagagaggaaacaacatcacaccatctttctttgggtagggactgttggcttcctgaagacttaagagaactggagaggaagaagtccagtaggcggttctgctaaataagtctttggaggggcaaagccaagagttttgagccatgatgggaacttcatcctccagttccctctgcccattagtaacggccctaagcctcctaggacagagtgtgtgtggatgggaagcatgtggtgtcatggttgtgggccatg

SEQ ID NO: 10475 - DNA, 527 bp, Homo sapiens
  MAP TO AL049781.4; EXPRESSED IN BRAIN, SIGNAL = 1.5; EXPRESSED IN HELA, SIGNAL = 0.87; SWISSPROT HIT: Q13023, EVALUE 6.00e-49; NT HIT: AB002309.1, EVALUE 0.00e+00; EST_HUMAN HIT: AV721840.1, EVALUE 0.00e+00
cccagcgaagctgcaatgccactacaagcaacagcatgttcttctgagttcagtgatagttctctttcagctgatgatgcagatacagtggctctttcaagtccttcctctcaggaaagagctgaggttggaaaggaagtgaatggtttgccccaaacttccagtggctgtgcagaaaacttagagtttactccttcaaagcttgacagtgaaaaggaaagttccggaaaaccaggtgaatctggaatgccagaagaacataatgctgcttcagccaaatctaaagttcaagacctctccttgaaggcaaatcagccaacagacaaggccgcattgcatcccagccccaaaactttaacctgtgaagaaaatcttctaaaccttcatgaaaaacgacatagaaatatgcataggtagaatgtaccccctccccaagcatgaaaatcatctcactgaaaggtacgtatagtcctcatgccgtatatgtatttaaaatattgagttcaggtcagcaaaaccatggcagg

SEQ ID NO: 10476 - DNA, 513 bp, Homo sapiens
  MAP TO AC022085.4; EXPRESSED IN PLACENTA, SIGNAL = 1.4; EXPRESSED IN BRAIN, SIGNAL = 1.3; EXPRESSED IN LUNG, SIGNAL = 1.1; NT HIT: gi11968022, EVALUE 3.00e-61; EST_HUMAN HIT: AA356602.1, EVALUE 2.00e-59; SWISSPROT HIT: P38920, EVALUE 3.60e+00
gaatccagcaatcatccatgccctacaagtgcaacagtagaacgcctttcttcagtagcagtgcagaacgcatctatgaaaacagattgggttacagctgaatatgtgacttatccttggtcaggtgatacaaagaatcattggcttggacactggttttagatatgacttcatattttcctggtactgtacattcatattagattacatttaatttagcagaattactcagtgtaagaaaccagtaggatgaaagtaagaacctcacaattcttctagaagttgagagaatcacaatcccagatacccaagaaaaacagttgaaccttttttcataagcaaccaacttgccacatgcgatgttctacaaaaagcagagggaattatactcactccagtggctcttcgtttctttctaatactttggccatcattttgttcagcaccagaggtacagctactatctgtggctgcatccgctaaactggagatcgcaagggctgaggatgcgct

SEQ ID NO: 10477 - DNA, 521 bp, Homo sapiens
  MAP TO AC006342.1; EXPRESSED IN HELA, SIGNAL = 1.3; EXPRESSED IN BRAIN, SIGNAL = 2.8; EXPRESSED IN HEART, SIGNAL = 3.9; EXPRESSED IN FETAL LIVER, SIGNAL = 2.5; NT HIT: AF171939.1, EVALUE 0.00e+00; EST_HUMAN HIT: BG750111.1, EVALUE 0.00e+00; SWISSPROT HIT: P49757, EVALUE 4.00e-89
gtcccagccctgcaaccagcctttgtccctgcccagtcctatcctgtggccaatggaatgccctatccagcccctaatgtgcctgtggtgggcatcactccctcccagatggtggccaacgtatttggcactgcaggccaccctcaggctgcccatccccatcagtcacccagcctggtcaggcagcagacattccctcactacgaggcaagcagtgctaccaccagtcccttctttaagcctcctgctcagcacctcaacggttctgcagctttcaatggtgtagatgatggcaggttggcctcagcagacaggcatacagaggttcctacaggcacctgcccagtggatccttttgaagcccagtgggctgcattagaaaataagtccaagcagcgtactaatccctcccctaccaaccctttctccagtgacttacagaagacgtttgaaattgaactttaagcaatcattatggctatgtatcttgtccataccagacagggagcagggggtagcgg

SEQ ID NO: 10478 - DNA, 511 bp, Homo sapiens
  MAP TO AL121829.12; EXPRESSED IN PLACENTA, SIGNAL = 2.3; EXPRESSED IN HELA, SIGNAL = 1.7; EXPRESSED IN BRAIN, SIGNAL = 1.7; EXPRESSED IN HEART, SIGNAL = 2.8; EXPRESSED IN FETAL LIVER, SIGNAL = 1.3; EST_HUMAN HIT: BF515946.1, EVALUE 8.00e-47; SWISSPROT HIT: O42469, EVALUE 9.00e-03; NT HIT: gi14769949, EVALUE 5.00e-72
gccggggatgagtgctggacgcagtgaggactcggccacccccgacaaggagagggcacccccaccaagctcggggatgagcgcaggacgcagtgaggactgggccacccccgacaaggagagggcacccccaccaagctcggggatgagcgcaggacgcagtgaggactgggccacccccgacaaggagacggcacccccaccaagctccagacacctcaggggccgagccccacctcagccctgggaggcaaatactgcagccccctcttacagatggggaaactgaggcgggggctcgtccatcagccggagagctccccctcccccagcaggggtgcggtcgggggctgtcccgggctggccgggctcacctgggcaccgtgggaaacgacacagatgcacctctgctcgcggccgccccagcagctgggccaggtgttgtaggcctcctgcaccttctcgacgacctgcgcaatctcagccagattcagccaggacgccatggaca

SEQ ID NO: 10479 - DNA, 534 bp, Homo sapiens
  MAP TO AL031667.17; EXPRESSED IN BRAIN, SIGNAL = 1.3; EXPRESSED IN HELA, SIGNAL = 1.3; EXPRESSED IN LUNG, SIGNAL = 1.1; NT HIT: AB037756.1, EVALUE 0.00e+00; SWISSPROT HIT: P07768, EVALUE 7.50e-01; EST_HUMAN HIT: AA668128.1, EVALUE 1.00e-112
ggtgctcagccaagaaccaagctcttttcaggagagcccaagtaccaatactgaatctagaaaagatgttattaccatctcaataagcaaagatgggaactgccagtctggtggccctgaggcagaaatagcttctggccctacttttatgggtagcttagaagcaggaggagtagctcaagcaaacatcaaaaatggaaaacatttgttgatgtctatttcaaaggaaggggagctctgctgcagtgaggcaggacagagacctgaaaacattggccagctggaagccaagtgtttagcttccccttccttgaatccaggaaatgaaagtgggtttgtagatatgtgcagtcttagtgtctgtgactccaaaagaaacctgtcatcagatcagcaattaattgatttattggaaaacaaaagcttagaaagtaaattgattttgagtcagaaccacagtgatgaggaggaagaagaggaggaaaacgaggaggaaaacttagccatggcagtaggcatgggggaaaggccaga

SEQ ID NO: 10480 - DNA, 598 bp, Homo sapiens
  MAP TO AL121673.27; EXPRESSED IN LUNG, SIGNAL = 0.98; EXPRESSED IN BRAIN, SIGNAL = 0.77; EXPRESSED IN HELA, SIGNAL = 1.6; NT HIT: AF250226.1, EVALUE 2.30e+00; SWISSPROT HIT: Q10940, EVALUE 1.20e-02
ccgtgtcctgtccgtgtccgtgtccatgtccatgtcctgtccatgtccgtgtcctgtccgtgtctgtgtccatgtccgtgtcctgtccatgtccgtgtcctgtttgtgtcctgtctgtgtccgtgtcctgtttgtgtcctgtctgtgttcgtgtcctgtccatgtccatgtcctgtccgtgtctgtgtccatgtccttgtcctgtccatgtctgtgtcctgtccatgtctgtgtcctgtctgtgttcgtgtcctgtccatgtccgtgtcctgtgttcgtgtcctgtccatgtccgtgtcctgtctgtgttcgtgtcctgtccatgtccgtgtcctgtctgtgtccatgtcctgtctatgtccgtgtcctgtccgtgttcttcttcaccctgatgtgggggagctctttcggcctttcctttactgcagcccgaaaaggaaaaaagagggaaaagcaggcacatttcttgaccagaaaaaataaacaaaaacaaaagccccttgtgctccatgggggagagcgtgaagcccccgagcgccactgcccccggtcccaggaggctcaaagtcctctctgctcagagagccgggggtgcttg

SEQ ID NO: 10481 - DNA, 589 bp, Homo sapiens
  MAP TO U85195.1; EXPRESSED IN BRAIN, SIGNAL = 1.8; EXPRESSED IN HELA, SIGNAL = 0.61; NT HIT: gi16189789, EVALUE 0.00e+00; EST_HUMAN HIT: T12547.1, EVALUE 1.00e-110; SWISSPROT HIT: P39770, EVALUE 6.00e-33
ggccttctctggtggcacggacataccataaggcaagccactgctggtaatgacatagtctaggtgctctggtactgggtgtgggttcatctgcacatgtgggtacttctcacgatgccggtggaaatgcactttgaggttgccacgggtggtaaaacggtttccacagacattgcacttatagggcctctcacccgtgtgggaacgaaggtggatctgcagggcactgtcactgccaaatactttggcacagaagcggcatttgtgccttccaccaggcttctccaagggacccatcacttctccgtagctcagctcaccacttccattctttggcttcaggagccctggggaggcagtggcctcaaggcctcgggctgccccaagacactgtgctgccagtagtcccgtggtgcttgggaatgccagatgaggcgaggcaatcagctgatctgtgctgcctggcaaggctggggaaggggcaggggtgggtttgtggcttcgcccaacccctccagcagagaaaggatgctgtgaccccagtgggtggtaaaggtggaagaaggcctgcttgggcgtttctgcccct

SEQ ID NO: 10482 - DNA, 547 bp, Homo sapiens
  MAP TO AC006354.2; EXPRESSED IN LUNG, SIGNAL = 0.93; EXPRESSED IN BRAIN, SIGNAL = 0.85; EXPRESSED IN HELA, SIGNAL =   1; EST_HUMAN HIT: BI828263.1, EVALUE 2.00e-91; NT HIT: AL163246.2, EVALUE 4.00e-97
ggcagcattttctccctgccctagagacctgtggaactttgaacttgagagagatgattcagggtatctggtggaagaaatttctaagcagcaaagtgttcaagatgtgacttgggtgttattaaaagcattcagttttatatattcacaaaggtatggtttggaatttgaacttatgtttaaaagggaagcagagcataaaagttcagaaaatgtgcagcctgatgatgtaatagaaaagaaaaacccattttctgaggagaaattcaaactggctgcagaaatttacataagtaacaaggggccaaatgttaatcaccaaggcaatgaggaaaatgtctccagggcatgttagaggtcttcatggcagcccctcccatcacaggcctggaggcctaggaggaaaaaaatgatttcatgggctgggcccaaggccttgctgctttgtgcattctcaggacttggtgccctgtgtcctaggtgtggctaaaatgggccaacataaagttcaggccattgcttcagaggatgcaagccccaagccttg

SEQ ID NO: 10483 - DNA, 501 bp, Homo sapiens
  MAP TO AC005895.1; EXPRESSED IN BRAIN, SIGNAL = 0.78; EST_HUMAN HIT: BF973268.1, EVALUE 3.00e-03; NT HIT: U16360.1, EVALUE 0.00e+00; SWISSPROT HIT: P47902, EVALUE 4.00e-08
cgctccctggcaagcgattcccactcgcagcgcggcctcgaccctcgcccaagacgcgccctccgcgcccccaccccctccaggccctggccagtccacctcccgcttggggcggcaatttgtctccttttgaaccccccgcccccgacgggtttccccctttgattcgcggcccggaggcttccccccgctttgaaatgcaaacccgcctcggctggggccgcgggcggcccggagctataaaaggcctgggtggggcgggcgcggcggcaggacagccgagttcaggtgagcggttgctcgtcgtcggggcggccggcagcggcggctccagggcccagcatgcgcgggggaccccgcggccaccatgtatgtgggctatgtgctggacaaggattcgcccgtgtaccccggcccagccaggccagccagcctcggcctgggcccgcaagcctacggccccccggccccgcccccggcgcccccgcagtaccccgactt

SEQ ID NO: 10484 - DNA, 515 bp, Homo sapiens
  MAP TO Z83843.1; EXPRESSED IN LUNG, SIGNAL = 1.1; EXPRESSED IN BRAIN, SIGNAL =   1; EXPRESSED IN HELA, SIGNAL = 0.61; SWISSPROT HIT: P51393, EVALUE 9.40e-01; EST_HUMAN HIT: BG006364.1, EVALUE 0.00e+00; NT HIT: gi14722811, EVALUE 1.00e-127
gtgccatgatgccgcttcccattacttttggacatatcctgctttgtgcgcctttggcgagaggacagtttctgtaagctgcgctgtttgactttttgctgctggctccccattatttcctcaaagggcacaagcccaaaaaggtcctcgttgctttcacttttacttgttgatgtgaggaagggctgaaatggagtgaagtcaaatatatctatgcttttgggatgtgtctcaggccccaccgcatggcattcttgtacattcaccttcttgctaaaaggcgcctttgtgaatacatcaaattcctcctgctggagtcccgtagcaggaaacctgtgttgagggaggctcttttcattcttttcttgctggggctgttgagcacacactgcaaagaaggggacggcgccaaatatatcgaactcctgtttaggagtctccactccaacatcagaggacaattgggctgaggtgaggagtattgtattaatatcttgggttggtccactgccaga

SEQ ID NO: 10485 - DNA, 504 bp, Homo sapiens
  MAP TO AP000548.1; EXPRESSED IN HELA, SIGNAL = 0.61; EXPRESSED IN PLACENTA, SIGNAL = 1.7; EXPRESSED IN BRAIN, SIGNAL = 0.88; EST_HUMAN HIT: AU140989.1, EVALUE 0.00e+00; NT HIT: M60676.1, EVALUE 0.00e+00; SWISSPROT HIT: P04275, EVALUE 1.00e-67
caggttgggcacctgctcccggtcaccctggctgaccaagaagctgtggtcggaggggtacagcagggccaccccagtgttggtcctgttgccaccctggtagcggatctctcgcacccgctgcaggatgtcccctttggactgtgcctcgctgaaggggtactccacggtcaccatgtaggagtactgcagcaccgtgacgtggatgctgtcctggcccacatccatccgctgaatcacctcctccatgaactccttgctcctgttgaagtcggcttcaccaattttgtccaatccttccgggacaaatgccacatccagaaccatggagttcctcttgggccccagggtcgaaagccccaagagccccgggcccacagtgacttgtgccatgtgggggggcagagtaggaggaggggcttcaggggcaaggtcacagaggtagctaacgatctcttccctttgctgctccagctcatccacaccgctcagcacgaaggcctt

SEQ ID NO: 10486 - DNA, 525 bp, Homo sapiens
  MAP TO AL121929.17; EXPRESSED IN HELA, SIGNAL = 1.6; EXPRESSED IN BRAIN, SIGNAL = 1.7; SWISSPROT HIT: O77774, EVALUE 2.00e-04; NT HIT: gi13630945, EVALUE 0.00e+00; EST_HUMAN HIT: AL555204.1, EVALUE 1.00e-123
tggaggcccccatgaccttgtcttttccagatctgtagcaaaggcacaactggggtctcccacatggcctgtcccagatggcatgtaatccattggtgaagtccctatggtgcacaggatatctcagctttcttggctctgggtcccaggcctgggactccctggtccattcccttcctcactcagtgtgggcacccccatcccctaccttccagctgtgggatggcttggacagggggcatctttgaggtcacccattctgcagtgttgaatgttgtccaccccccaccccccacccccattttttcctttcccttttgttcgtctcaccgctcatccagtgggcggccagagaggcacactgaggctggaagagcccaggccctctgctagttctttttctcaaggtagttggaaggcacccagcctttgaagggcttcacaccatccaggatctggcagtaccaccagccattagggttcctctccagaacctccatggacaccccctcctggaagcctgct

SEQ ID NO: 10487 - DNA, 515 bp, Homo sapiens
  MAP TO AC007363.3; EXPRESSED IN PLACENTA, SIGNAL = 1.6; EXPRESSED IN BRAIN, SIGNAL = 0.81; EXPRESSED IN HEART, SIGNAL = 1.6; SWISSPROT HIT: O43405, EVALUE 1.00e-17; NT HIT: AF069553.1, EVALUE 4.90e-01; EST_HUMAN HIT: BF727228.1, EVALUE 0.00e+00
tgcgcccagtcatccacaggccatgggtttgtaatgacacttaggagaccaccttgctgccccatccttgttccttctccctactcagaggggcttgcagtgtttctacccctaatgccctccctgcggctttgaacatttttattaagtcgcagaaaaaaccaatgcataaaaagacaataccttccttgtcccactggcccaccaagccccagaaagcagcctcagcaccaggctgcttggcaagcccagcttacccttcagatgggcagccatggctgggatccggacgtcgtcgtaggacctcccgtcggtgatgaggatcattaacttcctcttgttgggcttggacttcttgaagagctgctccagggcgaagttgatggcagcccccgtgctggtgccaccactccagtagcccaccctcttgatggcgttgaggatgtcaggcttgctgctgtacttgtcgaacccaaactccagccgctgttcgtaggtgtactgcacggccccga

SEQ ID NO: 10488 - DNA, 566 bp, Homo sapiens
  MAP TO AL121716.2; EXPRESSED IN HELA, SIGNAL = 0.81; EXPRESSED IN BRAIN, SIGNAL = 0.81; NT HIT: gi15299941, EVALUE 1.00e-100; EST_HUMAN HIT: BG676907.1, EVALUE 3.00e-99; SWISSPROT HIT: Q9UIY3, EVALUE 8.00e-31
ccagactggattctgtcccgctggttacacacttcaatggaaccctccacttttccatggtaatgcttttcacaattgaaattaaatacttgctatatgtaattatttgtttaatgtgtgtctccttcactaggccctggacttcatgaagggcaaaaatagtgtctggtttattcacttttttatcccagcacaagggcacctggcacacgtagttgttcaataaatattgaaataatgcataaaaggaagcaatcatgtatgtaaagtacctggtacatttaatagtagcaataacatttctcaaaatcatgcagttgctattgataaactagcttatgtgatgttatggtatttaaatctatttgattttcattttaaggtgaaaattgatttgcaagtgaccatgcctcacagctacccctatgtagcattgcagctgtttggacggtcatctgaacttgacagacatcagcagctacttctcaacaaaggtctcacttcttacatagggacttttgatccaggtgagctctgtgtatgtgcagcaatccagtggctacagg

SEQ ID NO: 10489 - DNA, 531 bp, Homo sapiens
  MAP TO AC022882.3; EXPRESSED IN BRAIN, SIGNAL = 0.86; EXPRESSED IN HELA, SIGNAL = 0.94; NT HIT: Z79016.1, EVALUE 4.00e-17; EST_HUMAN HIT: BI789069.1, EVALUE 6.00e-14; SWISSPROT HIT: Q95155, EVALUE 1.00e-12
ccaagttccagctatgcttcggaccatgacatgatagtgtcaatattttacaccattgtgattcccttgctgaatcccgtcatctacagtttgaggaacaaagatgtaaaagactcaatgaaaaaaatgtttgggaaaaatcaggttatcaataaagtatattttcatactaaaaaataaattataaaaggtgagggtgatactctgcacctcaataccaagaatgtgtcattgtggtgttatgatatatgttggtttccatccagggttcctggctcataattcccatagcctttgttacagtcttttgttataatgttgggtgttatacctcaggggcaggccttttaccttctcctgccctcctttcacttgcaccaaggctgggttccaatgtctgccttactgattgtgaatcttaagactctcccatgagagagtcccaccctataccttcggggagggaatgctgatgccttgaagcttccatagaacctaggaggatagggttcagtgagcttctggggagca

SEQ ID NO: 10490 - DNA, 506 bp, Homo sapiens
  MAP TO Z99716.4; EXPRESSED IN BRAIN, SIGNAL = 1.1; EXPRESSED IN HELA, SIGNAL =   1; EST_HUMAN HIT: AI763350.1, EVALUE 2.00e-16; SWISSPROT HIT: Q14934, EVALUE 1.90e-01; NT HIT: AF120103.1, EVALUE 1.90e+00
ggcaggggagaggcaggaggtggaagaggggagggaggagtggggagaagcaggagatgggcacccagagaaccaagcgccccttcctttcccgtgcccaagacgcccggtcacctccctggccagcggcgccccttaccctggacagtgacccggtgccctctgtgcaaggctacctgtccccctcccagcccgcccccacccccctgccctccagaggagactcgagcagggaaaggcggtgcggcgcccagcacgggcagaaggtcaaagggagtcagggcggtgtcaggtgtctccctgatgaagtgttgggggggcggcggggggagaaggagacaggaaaacccagagaaggggcctgctgggagaaccagcgcttcgagagcggcgggaaggatcagcgggcagggagagcagtccgaggagcaggcgggggtccctgggcggcgcgtgctcacctggtcactgtgcgccgcgcgcgcgggctgtgcgccctctccagt

SEQ ID NO: 10491 - DNA, 566 bp, Homo sapiens
  MAP TO AP000538.1; EXPRESSED IN FETAL LIVER, SIGNAL =   1; EXPRESSED IN HELA, SIGNAL = 0.49; EXPRESSED IN BRAIN, SIGNAL = 0.85; SWISSPROT HIT: Q9LI83, EVALUE 4.10e+00; NT HIT: AL163202.2, EVALUE 6.00e-81; EST_HUMAN HIT: BG009093.1, EVALUE 6.00e-48
tggaatcctgtgtgagcgaccaagattcagaaattcgtagcagtgttcacgaattccatgtcagggacaaacactcagaacccagctgcagtgttctggaatcctttgtgagggaaaaatattcagaacctcgtagcagtgttttggaatcctacgtgagtgacaaacactcagaagcctgcaacagcgttctagaatcttttgtgagggacaaacactcagaacctcatagcagtgttctgtaatcctatgtgagggacaaacactcaaaatccagccactgtgtactggaatcctgtgtgagatcaaacattcagaagctcgtagaattgttctgcaatgctatgtgagggccaaacactaagaaatctgctgcagtgctctggaatcctttgttagggaaaaacaaacagaacccagtagcagtgctctacagtcttttgtgagggaaaaacattcagaccctagtagcagtgttctggaatcctatgtgagggaaaaacattcagaccctcgtagcagtgtcctagaatcctatatgagggacaaacactcagaacccagca

SEQ ID NO: 10492 - DNA, 507 bp, Homo sapiens
  MAP TO AC006249.1; EXPRESSED IN BRAIN, SIGNAL = 1.8; EXPRESSED IN HELA, SIGNAL =   3; EXPRESSED IN HEART, SIGNAL = 2.6; EST_HUMAN HIT: H61785.1, EVALUE 4.50e-02; SWISSPROT HIT: P24937, EVALUE 7.10e-01; NT HIT: AE005050.1, EVALUE 1.20e-01
ggagggtccccctgcctgtcgccctcggggcaaggggagaggtgctctactgccagctggcagccccgaaaagtgcggacgcagctcggaagtgcctgctccgggggtggagacaggtggtgtggattaccccgctccgtggtcttcacgggtcagggcctggcgcgctccggcccgccggggggtgagtgctgctggggcgggggcaggggctggacggggctggcctccgcagtctctcgcgctttctcccgcaacccctagacggtcgtgggccgccgccgcgcggagccctgtccatggtgcgccatggtgcggcacgcctgtccctgcccggctccacgctctcctcccgggtcgtgctctctcactttgtctctccccacccctgcctcccaggccagggtcccagcgttccttttccctttcttggatttcttcttttgttctttagtctcctaccggtctttctcccttcccccactcgccatccgccactcggctctc

SEQ ID NO: 10493 - DNA, 513 bp, Homo sapiens
  MAP TO AP000556.2; EXPRESSED IN HELA, SIGNAL = 0.9; EXPRESSED IN BRAIN, SIGNAL = 0.97; EST_HUMAN HIT: AI684378.1, EVALUE 1.00e-70; SWISSPROT HIT: Q03172, EVALUE 2.00e-03; NT HIT: M26312.1, EVALUE 3.10e-02
gccgctgtccaattggtgccgtgtggaatgtgattacatactggttgacaccgtcctgagggccatcaccagctgcgtgtctcagccgccctgtgtccctgggttctgtgcccttgtgtgtggtttgacactattccagtgcgtggagaccctgcctcgtcactgagaccttgaaagaaaaagaacctgcagtcaccccaaggaagaggagtctcggctgttcccctggaggctgacccagccctggcccaaaggctgacccagacccaaggcccaaaggcccagctctaaggtccaaaggggctccaccctgttctctagccggactcagtctctcgcaaggaccccggctcccagccgcactccccagacgcacgtggcccaccctccgcccgtcccgcgcccaccccctccctccagtaccggagccctaactggcggcacccgggcacccttctgactcagagccacgctacacgagggggaccgatctgctcacttgccccgtcctgg

SEQ ID NO: 10494 - DNA, 500 bp, Homo sapiens
  MAP TO AL157689.1; EXPRESSED IN BRAIN, SIGNAL = 1.1; EXPRESSED IN HELA, SIGNAL = 0.93; NT HIT: gi14749779, EVALUE 0.00e+00; EST_HUMAN HIT: AI885047.1, EVALUE 0.00e+00
cgagtcggacctgcggctgcagaactgcgagtcactcacgtccgacagcgccaaggactcggacagcgcaggcgaggcgggcgcgcaggcctccagcaagcaccagaagcgcaagaaaaggcggaaacggcaaaagggcggcagcgccagccgccggcgcctgtccagcgcgtcgagcccaggcggcctggacgcgggcctggtggagcccccgcggctgctgtcctcccccaacagtgcctcggtgctcaagatcaagacggagatctcagaacccatcaatttcgacaatgacagcagcatctggaactacccgcccaaccgggagatctccaggaacgagtccccctacagcatgaccaagccccccagctctgagcacttcccgtccccgcagcggcggcggtgggggtggcggtggcggggggctgcacgtggccattcccgactcggtcctcaccccgcccggcgccgacggcggccgcccgcaagactcagtt

SEQ ID NO: 10495 - DNA, 535 bp, Homo sapiens
  MAP TO AC005609.1; EXPRESSED IN BRAIN, SIGNAL = 0.84; EXPRESSED IN HELA, SIGNAL = 0.55; EST_HUMAN HIT: BF931752.1, EVALUE 1.00e-88; SWISSPROT HIT: Q9UN73, EVALUE 6.00e-98; NT HIT: gi14861872, EVALUE 0.00e+00
cgggggctgcagctcatacgaaagccacgcgttgtagcctgagtcggcgtcaactgcgcgcaccttcgccaccacttggcctgcacccagtgaccgcggcaccagctcgctcactgcaccaccagtaccacccacccgaggcgccagcagcgccggcgcgttgtcgttctcgtccagcacgaacacctgcagcgtcacgttgctgcccagaggcggcacgcccgcgtcgcgcgcgctcacctgaaactgcagcagctctagctcctcgtggtccagcggctgcagcgcgtacaccttgccgctctccgcgtgcaccgaaatgtagctcgacaacgcgcgctcgcccacccgccgctccaccagcgagtaggacaccagcgcgttctcctgcgcgtccgcgtctcgcgcagacaccgtgaagatgtggcagcccggcgggttgttctccttcacgaacactgtgtactcgggctgcgcgaacgccggagcattgtcattcatgtcggccacctccacagacaagctggcggtggcc

SEQ ID NO: 10496 - DNA, 501 bp, Homo sapiens
  MAP TO AC004789.1; EXPRESSED IN LUNG, SIGNAL = 1.4; EXPRESSED IN BRAIN, SIGNAL = 1.2; EXPRESSED IN HEART, SIGNAL = 1.5; SWISSPROT HIT: P51532, EVALUE 9.10e-01; NT HIT: gi14211890, EVALUE 0.00e+00; EST_HUMAN HIT: BI257554.1, EVALUE 0.00e+00
gagggcagatgccaccccacccaccccctctgctgggagagggcaacttgccatgggtggtcactaggtgagggaggtgccagggtgggagagggaaacgggaggaggtcgggcaggggaaagcctctcagaagctgagggccaggtggtgggggacagacaggagcgaggcttcagcacccaggagcacagctctccctgcatgacaggccaggtccccacccgggggctgggaggccagccatgaatgacctagcaccatccttgctcccggcgggctgggctggggctgcccgggcagtaggacattattgctatttcacagaagagtttccgttcgtcgggggcagtgccgggagctgccgggggggcaccacaactgtccgcaggatgggctcagttcaccacagccggtttgagcagcaccgagcccggcgggatgaccacccagccaggggccaacgcctctgggctgctggcagctgagttgacgcccgtgga

SEQ ID NO: 10497 - DNA, 548 bp, Homo sapiens
  MAP TO AL163303.2; EXPRESSED IN BRAIN, SIGNAL = 0.84; EXPRESSED IN HELA, SIGNAL = 0.91; NT HIT: AL163303.2, EVALUE 0.00e+00; EST_HUMAN HIT: BE512633.1, EVALUE 5.00e-33; SWISSPROT HIT: P31626, EVALUE 6.00e-01
ttgcagcagcccctcccatcacaggcctggaggcctaggtgggaagaatggtttcatgggccaagtccaaggccccaacaccatgggacactgctccctgcatccctgccatttcagctccagctgtggctgaaaggggcccagttacagctcaggctgttgcttcagagaatgtaagccataatccttggtggcttccacgtggtgttaagcctgcagctgcacacagtgcaagagttaaggcttgggagcctctgcctagatttcagaggatgtatgaaaaagcctgcgtctccaggcagaagcctgctgcaagggtgaagccttgtggacaatctctattcgggcagtgtggaggggaaatgtggggctggagcccccacacagagtccccactggggcactgcctagtgaggctgtaagaagagggccaccattctccagaccccagaatggtagatccactgacagcttgcaccatatgcttggaaaagccacaagcacttaacaccagcccttgagagcagctgtgggggctgaatcctgca

SEQ ID NO: 10498 - DNA, 506 bp, Homo sapiens
  MAP TO AC018840.2; EXPRESSED IN HELA, SIGNAL = 1.5; EXPRESSED IN BRAIN, SIGNAL = 0.89; SWISSPROT HIT: Q14831, EVALUE 6.00e-05; NT HIT: X94552.1, EVALUE 0.00e+00; EST_HUMAN HIT: AL110366.2, EVALUE 7.00e-04
ccagcacgcagcaggggaacttcatcaaagtcaggacgcggagcagcttcctcagctggaccatgctgctccggctgctgcggtggcggcggcggcgctggagggaacggtggtgggctcgccgaggtccgggcccttcagggcgagctcctccgggaaagcccaggggctcctgcaggcacggagggtgggggaatccggggaggggcgaccagagagggtgaggggtcccgcggcgcctgccagcctggggcgcctcgcgctctcgggttagccggccggcgcgccgcgctcgcgctcaccggcttgctgctcgctctctccaacagcccagcactggggagagggcagggactgctatcgctttaaatggtcgttcggctccctctcctcctcctcccactccctccctccctcgctggctctccttctctccccacccttcccagcgccagccctccccactggtttgcatcatcacgcagggaggggctgcgtgctgaggt

SEQ ID NO: 10499 - DNA, 501 bp, Homo sapiens
  MAP TO AC035150.1; EXPRESSED IN HELA, SIGNAL = 0.42; EXPRESSED IN BRAIN, SIGNAL = 0.97; SWISSPROT HIT: Q9UK13, EVALUE 6.00e-93; NT HIT: gi7019584, EVALUE 0.00e+00; EST_HUMAN HIT: BF375078.1, EVALUE 3.00e-92
tcaccagagggtccacacgggtgagagaccctataattgtaaggaatgtggcaagagctttggctgggcctcctgtcttttgaaacatcagagactccacagtggggaaaaacctttcaaatgtgaagagtgtggaaagagatttactcagagtacacaacttcattcccatcagacatgccatactggagaaaagctatacaaatgtgagcagtgtgagaaggggtacaacagtaaatttaatcttgacatgcaccagagggtccacaggggagagcgaccctataattgtaaggaatgtggaaagagctttggctgggcttcatgtcttttgaaacatcagagactccacagtggagaaaagccattgaaatctggagtgtgggaagagatctactcagaattcacagcttcatttacatcagtaagtctatgtgggagaaaagccatataaatgtgagaagtgtgggaagggctttggctgggcctcaactcatctga

SEQ ID NO: 10500 - DNA, 513 bp, Homo sapiens
  MAP TO AF170801.1; EXPRESSED IN BRAIN, SIGNAL = 1.8; EXPRESSED IN HELA, SIGNAL = 0.5; SWISSPROT HIT: O94819, EVALUE 1.00e-18; NT HIT: gi7662259, EVALUE 0.00e+00; EST_HUMAN HIT: AW168269.1, EVALUE 1.00e-51
ggacggcgccatctactgcgtgagccgcgcgggcacctggcgcttccagcctgcccgggaaggcgaggccggcggcgacgcaggccagggcggcggcttcgaggcgctgggcgcccccttggacgtccggggtgtgctcatcccgttcgctctcagcctgcctgagaagccgccccgaggggagcagggcgccccgtaggccggcggggtcggcgggcgtctccctcggcaggggtttgcggggcccaggtccctttgggcccgcggaggaggacgtggtggggagtcggggccgctggccacgctggtggtttggacacttcgaaggagccccgaggacgctctcagggccgctttcgctttgctttccttttgcttgtctttgcttctgggggtggatgccttgagacccaggaggtgtgcggatgggtcccttgacagacaggacacagagaaggctgtgggatccaaagggtcagcctcagggtacagtgggggttcctgaggcagcct

SEQ ID NO: 10501 - DNA, 521 bp, Homo sapiens
  MAP TO AC022845.2; EXPRESSED IN BRAIN, SIGNAL = 0.83; EST_HUMAN HIT: AL038865.1, EVALUE 0.00e+00; SWISSPROT HIT: P42768, EVALUE 2.20e-02; NT HIT: gi13639828, EVALUE 0.00e+00
cccctcccggcttccaactctccttcgtcgccaaactgctgcttgcggccgggagatccggccgccgccgtctcctcctcccccgctgcagcccgggtcaggtcagagggcagcgaacaagttgcagccggctccgggctctcactgcgggttggggagttgctgcccgaggctgccagcagcttggtcaggctatgcctcatgagggccagcggcgggccgcggtaggccccggccgctaagagtgggcctcacgggccccaaggatcccaggccccagggcgggtagcccccggcactggccgaaacgaaatgcagggaaaggtccgagtcgcctcccgcctcacttggctagtcgaccccccgcgccaaggcgcggggagggacgggagaacgaagcggtgaggccctgcgatgactcgaccgcgccacccagacaacggcgtagccggaagtcagtggttttcgccccagtcccgcccaccgcgtttcgcgcgccaccaggccgtagtgtcgcgaga

SEQ ID NO: 10502 - DNA, 528 bp, Homo sapiens
  MAP TO AC021000.3; EXPRESSED IN BRAIN, SIGNAL =   3; NT HIT: Y00067.1, EVALUE 0.00e+00; EST_HUMAN HIT: BF944931.1, EVALUE 3.00e-68; SWISSPROT HIT: P07197, EVALUE 1.00e-16
gcttgggagcttccaccttggttttctgaatcttactggatattgtgattgggggtcggtgtgtatacagtggcccagtgatgcttcctgcaaatgtgctaaatctagtctcttcaccctccaggagttttctaaggagaaaatccaagaacataagacatagtaaaaatctcactaggccttctgagcctcattacattctgggtattgtggtagctacctttgaataaatagaattacataagtagaatattctatgaattcactataatacctgctatcacttactggcatattacattatactcagtgacagagaaagattctcctggactgccagacagttgccccctacaatgactaaccttgcccaatagtccactaaccacacccagctactaagtcttggccctgcagtagagatccattaggtacaacatgaatatgctgaaaaacttgttagtggccaaatagcaaaaaacaaaaacaaaaacaaaaaaacaaaaagccataaacaaaacgccccca

SEQ ID NO: 10503 - DNA, 509 bp, Homo sapiens
  MAP TO AL122010.2; EXPRESSED IN BRAIN, SIGNAL = 0.91; EST_HUMAN HIT: AL574266.1, EVALUE 0.00e+00; SWISSPROT HIT: P35212, EVALUE 3.00e-05; NT HIT: gi14730928, EVALUE 0.00e+00
gaggctggcgtcttccaggccccctctcttcctggacccaccccctcagaatggccaaaaatccccaagtcgtcccagcagctctgcttctaagaagcagtatgtatagaggcctgtggcttatgtcacccaacagaggggtcctgagaagtctggctgcctgggatgccccctgccccctcctggaaggctctgcagagatgactgggctggggaagcagatgcttgctggccatggagcctcattgcaagttgttcttgaacacctgaggccttcctggtgcccaccaggcactacggcttcctctccagaatgtggctttgcctgagcacagacagagtcagcatggaatgctcttggccaagggtactgggggccctctggccttttgcagctgatccagaggaacccagagccaacttaccccaacctcaccctatggaacagtcacctgtgcacaggttgtcctcaaaccctctcctcacaggaaaaggcggattgaggctgc

SEQ ID NO: 10504 - DNA, 542 bp, Homo sapiens
  MAP TO CHR14.3; EXPRESSED IN FETAL LIVER, SIGNAL =  11; EXPRESSED IN BRAIN, SIGNAL =  17; EXPRESSED IN HEART, SIGNAL =   8; EST_HUMAN HIT: BI770278.1, EVALUE 0.00e+00; NT HIT: gi14784869, EVALUE 0.00e+00; SWISSPROT HIT: P56212, EVALUE 4.00e-33
gttgaggaaggggaggagagggggtctcaggttaccccgcaagcttgctggtgacgagcgaggactttctctggggcagatcctgtggggtgggatgtgatcaccagtcaccaggttcttgtctggtcctgcacttggcagctgcttattcttcatcttggctttggccatgttgtagtctcctgagtcaaagtacttttgccctttctggagtctcttcatgaggaagtcggagcctccaggcttttgtcctaggcttgggtatttggcctttagctttgcctcttcagctctctcagggagaataccttctttctcctgcgtgtcctgcttctcctcgccggcctcctctgcagggttctcttcttcttgcttctgggacatggcgggaccgggactgtggagtgtaaggggcccgggaaggcaaccggagaagggaagggggagaggaaacggggacaacctgcgctgctgcttcggctcctatcactagggttgctcagttaaaatggcggcctttgcccctgttctggcttttcaac

SEQ ID NO: 10505 - DNA, 507 bp, Homo sapiens
  MAP TO CHR14.3; EXPRESSED IN PLACENTA, SIGNAL = 0.98; EXPRESSED IN BRAIN, SIGNAL = 1.2; NT HIT: X16536.1, EVALUE 1.20e-01; EST_HUMAN HIT: AW961287.1, EVALUE 7.10e-01; SWISSPROT HIT: O05960, EVALUE 1.60e+00
ctagatccacccaaagcaggccacctattgtgaagctatatcccacttttttccctgatgcctctaatccaccaccagctgttgctgtggcttcagcttttcctgcctgcatttattctcatccaaacaaggaatggagtgattggtgactgtgatactatgacacaagtattgacgtatcctacaaatgaaaaattgcacaaaatctacctcactggtgaattctttgtgctgacaatcttaaatggaaaactgatttatagcatcattgtgaaaactactgggacaatgcgctatatatatcaatggataagtccctttgccttctggagcatttacaatgaatcttgtctaagctcaaagacaattgaaagaccaaaatatgtttacacattacagacccaagaagaccacaatgaatgtgaccagaagcaccatgaccacatcaattcagaatgagtgcagagcccagccccaggggcagcctcaatgcacagaatgccaaac

SEQ ID NO: 10506 - DNA, 578 bp, Homo sapiens
  MAP TO CHR14.3; EXPRESSED IN BRAIN, SIGNAL =   4; EXPRESSED IN HELA, SIGNAL =  55; EXPRESSED IN LUNG, SIGNAL =  35; NT HIT: gi4504918, EVALUE 0.00e+00; EST_HUMAN HIT: BE745758.1, EVALUE 0.00e+00; SWISSPROT HIT: P05787, EVALUE 9.00e-26
gctgagagggtctgctatggttgttcacttggagcaggacgtcagaggactcggacactagcttcccatcgcgggtctccatcttcacaaccaaggccctggtggagctggtgcagctgaaggagctggagcccagccagagccaaagctggagcccgggcgtagctgaggccgggagttgtgaggtccccataggctgagatcagggcatctgcatagccgctagtggtcttcccatggatactcctgttctgcaatccagactccagcaggctctcctcgccctccagcagcttcctgtaggtggcgatctcgatgtccagggccagcttgatgttcatcagctcctggtactcgcccgcagctgctgctccaagtcctgcttggcccgctgtagggcagccaccagctcggacagcttggccttggcatctttaacagctagctccctgcgctgctcggcaactgtgatggaggcctccagggaagccctctggcatttgaggccctcagtctcagcctggagctggctgatgttccgattcatcttggagatctcagtctttgtgagctgcagg

SEQ ID NO: 10507 - DNA, 564 bp, Homo sapiens
  MAP TO CHR16.3; EXPRESSED IN HEART, SIGNAL = 1.8; EXPRESSED IN HELA, SIGNAL = 1.4; EXPRESSED IN PLACENTA, SIGNAL = 1.6; EXPRESSED IN BRAIN, SIGNAL = 1.5; SWISSPROT HIT: P49386, EVALUE 3.10e+00; NT HIT: gi15316047, EVALUE 9.00e-46; EST_HUMAN HIT: AW389301.1, EVALUE 1.00e-45
tcagtactgggacctgggagggtcaattgggtggagttccaggcagaggaggaccactgcatgggggtggtctccccagccctcggtcaccatggtgttgacctggaagcctggccctgaactgagacccctgtcacacaaacttctgcacagtaagaaacccattctggtccctgagactaaagaacgtgccccaccctgttatttcctcttcagtttaagaaccccctgatcctgctgctgctgggctctgccctggtgagtgtcctcaccaaggagtatgaggacgccgtcagcatcgccacggtgagttccctgacagcgctcggctcccgggcgggcagccacaggtctgctgagtctctgcttgttattgtatataaagaaaaaaaagagtttgctgtaggggggaaaaaggagcatacagaagaaagaaaggaaagcaaatccacatccttctttaccctaatatcaaggtgaccctggtttattcggccactgcttgcttgctggacacacaggtgcttctgggtctttgctagagcagtgttgcagggaattcct

SEQ ID NO: 10508 - DNA, 571 bp, Homo sapiens
  MAP TO CHR19.3; EXPRESSED IN BONE MARROW, SIGNAL = 1.9; EXPRESSED IN BRAIN, SIGNAL = 1.1; EXPRESSED IN PLACENTA, SIGNAL = 2.1; NT HIT: gi14760362, EVALUE 0.00e+00; EST_HUMAN HIT: BF797151.1, EVALUE 0.00e+00; SWISSPROT HIT: Q04225, EVALUE 2.00e-16
gtttccaagcaggaagcaagatcagagccagtgggacgcctcagacgctgatggtgcggaagatggtgaagcctgacagcgccgtgctgaccaggagccctgggcactgcgggtgccagtgcagctccttcagctcggtctcgccctggtgcacgaacagcagctgctgcgggaggtcggccagtccggggtcggcctccacgtcgcccgcctcagggtcccgctccactgccaggtcccactgtgtgatctggtggtctgcacccgaggctgcaaagaccccgctgtcctgggggtgccactcgacggaggtcacgggggccacgtgctgcttgaaggtggccactggggaaccagactagagggagaggatgggaggaacgggctctgaatgcctcagcctgactctggggaggacccaggcagaagccccaacccttctccagcctcagggttcagccagggccccaccccttaagccctcacaagcccagagtccaggaaagggacacagggtaattctggctgctaagaaggctgaccagcccaggggttgctgggaactgtgatt

SEQ ID NO: 10509 - DNA, 519 bp, Homo sapiens
  MAP TO CHR14.3; EXPRESSED IN HELA, SIGNAL = 1.8; EXPRESSED IN FETAL LIVER, SIGNAL = 1.7; EXPRESSED IN LUNG, SIGNAL = 1.5; EXPRESSED IN BRAIN, SIGNAL =   3; SWISSPROT HIT: Q92785, EVALUE 3.00e-12; NT HIT: AF362750.1, EVALUE 2.00e-46; EST_HUMAN HIT: BE463687.1, EVALUE 3.00e-71
ccagccctgctattgctaagcctagggttgggctgagctgcaggggcagctggctggctggctgaaagggccaacacactacagcacattgagaccactcaacggttgctaccagaagatgccagcagtgagaaaaaggaacaaggaacgctccccagcctgtctaacccacttcttcactgccccaacctaacaagtaggcactcacgcctgtggttctcatttctgtggttgggtggggaccgagtctcctggtcttgagcttcatccccctcctcgctggccaggtgagtgtgagcatagtggtagctgagccccggtcggttcttgtagcgcttgccacagactagagaggaaaagaggaaaaaagggagagatacaaatattagcaacctgtgcagccaccgctatcattctcccagacagtgatcccatccatccaccccagagccaggcttcccttaaaactgtctcccatcccaacatccctttcccccacccaacagaaccaacaccctt

SEQ ID NO: 10510 - DNA, 501 bp, Homo sapiens
  MAP TO CHR14.3; EXPRESSED IN FETAL LIVER, SIGNAL = 1.1; EXPRESSED IN LUNG, SIGNAL = 1.1; EXPRESSED IN BRAIN, SIGNAL = 1.3; SWISSPROT HIT: Q90691, EVALUE 4.10e-01; NT HIT: AJ003124.1, EVALUE 7.40e+00
cacagtgagcatttatagagcaccaagtatatacacacggacgtagccacttattgtttgagctgccctgccccttctccctttttttctgggaactgtgccttcttccttcctgcccgggcacatggttaccataggaacagccctctggccgttgaatggactagaggtgaacacctcactgaggcggaacaatcagagcctaggcctgaggagactggggaggtcggggcccagacggtgattgaggctgtcaatgcagggctgggcaagttgcacgttaactcaggatatgttggcagccaggttttcagtggaccaggaagcaatgaaagacacttctgcagaggtgttaatgaggcaggcagggagatgaggaaatgtgagagagcctggtacccagtcatcctagacgtggctgcatccctgccctggagctgcttgaaacaaagctcgcttgttgcttaaactgcatccagtgggtttctgtcagtttcctaa

SEQ ID NO: 10511 - DNA, 566 bp, Homo sapiens
  MAP TO CHR14.3; EXPRESSED IN HEART, SIGNAL = 5.3; EXPRESSED IN FETAL LIVER, SIGNAL = 5.8; EXPRESSED IN BRAIN, SIGNAL = 2.9; EXPRESSED IN PLACENTA, SIGNAL = 4.4; EXPRESSED IN HELA, SIGNAL =  10; SWISSPROT HIT: Q03760, EVALUE 5.40e+00; NT HIT: gi14753597, EVALUE 0.00e+00; EST_HUMAN HIT: AA954415.1, EVALUE 0.00e+00
tcttggttttgacacaggaggtaagtgattttgtttaaattcaaactattttttttacagactgaatacttgggaggaaataaataaatggccttaaatgtaaaaattatgtattgaagcagtgttcttttctcataaaacagatgcagttcttaatgaagctgctcaaattctgcgattgctgcacatagaggagctcagagagctacagacaaaaatcaacgaagccatagtagctgttcaggcaattattgctgatccaaagacagaccacagactgggaaaagttggaagatgaacacttgaggacttcagcttctcacctacttagtacagttgggaaccatacacttctggcatgtttggaaatcaaaatgtcacattctcgggggaggaagcccagaaaattgggtatgttctagagatttaccaccattgcttattgcttttttctttaataaagtttaggaaagtagaatttttattatgtactgtatgtttgcataaatcacctttctcctttgtggttaaggcatatatgccaacccccagctttgtcctagaga

SEQ ID NO: 10512 - DNA, 526 bp, Homo sapiens
  MAP TO CHR14.3; EXPRESSED IN PLACENTA, SIGNAL = 1.4; EXPRESSED IN HEART, SIGNAL = 1.8; EXPRESSED IN BRAIN, SIGNAL = 1.3; NT HIT: gi13812105, EVALUE 3.20e-02
tttccacctttctcattcctgtttatgacagaaagaaccttgattttcaggccagaaatggcataccagttttacatcccttttcctccccccaccccttgtttctgtccctgggtgacaacgagtcattcctccaagtgtctcaggtctgcctcctttgttaggatatgtccccatacaacctcactctcaagtgcgtgagctgactattgtcgcccaaacgtggcttacctgctgccgctggctatccctgtttattaaccgtggatcatctcgtactttcagatccaagaaaatttctatactaaaagtatttccaacctatgagaaaaaaaatgacaggttttcagaaaactatttcatgttgtctgtatcctgaaagttttcacttgtcttttcagttccaattacctggtagttccaccaaccccttcacttactgcccactgccttgtgcccacaatacagtggctgagccagtgccaagttacagaaagaccagtgtcacatgacctctgctctcaga

SEQ ID NO: 10513 - DNA, 500 bp, Homo sapiens
  MAP TO CHR18.3; EXPRESSED IN HEART, SIGNAL = 3.8; EXPRESSED IN HELA, SIGNAL = 4.1; EXPRESSED IN LUNG, SIGNAL =   5; EXPRESSED IN BONE MARROW, SIGNAL =   7; EXPRESSED IN BRAIN, SIGNAL = 5.1; EXPRESSED IN PLACENTA, SIGNAL = 5.1; SWISSPROT HIT: Q59001, EVALUE 4.60e+00
tcaggatactgaggatgggcaagaaacaaaaggacgatgctgaaaggaactcactatttaagacccatccactttccctccccggccaggtgtctgactcgctccagactcacaacctgaggacctggccccagtccacactctgccctgagctgctctcctccctctcctcttcccctgtcacagcttcccccaccatcccttcctccctggccttattaatgacatgtaaatatcactctgatgactttgctggtataatcggttaccagcatattctgcaaaggattcaattaaaatggaaccagagatcagagaggcctgggaagatggggggctattgccaaattcttctgactgggggaaagcagcactccccacctgtgccacccagaaatggtggccggcctggtgacagcagccagggcagcttaagcaggacacagcaaccaccctcagaaaccccccggggctgctgctggtgggagagtgtcctgaga

SEQ ID NO: 10514 - DNA, 521 bp, Homo sapiens
  MAP TO CHR16.3; EXPRESSED IN HELA, SIGNAL = 1.7; EXPRESSED IN LUNG, SIGNAL = 1.1; EXPRESSED IN FETAL LIVER, SIGNAL = 1.6; EXPRESSED IN BRAIN, SIGNAL = 1.4; SWISSPROT HIT: P18163, EVALUE 8.30e+00; NT HIT: gi14775465, EVALUE 3.00e-67; EST_HUMAN HIT: AA886982.1, EVALUE 0.00e+00
aacaatatggttcatcttttggtgaaacattacatttcttgttttttttatagaaaggagaggagactgaagagacaagttcaagtaaattgttggtaaaagcagaagagctagagaaacctaaagaaacagaaaaagttaaaatcaccaaggtgtttgattttgctggtgaagaagtaaggtaagagaaccttcaaaaactttgaaactagcattttcaaaaatgagcgtctctctctaactggtgttagccatctatcctcttttcaatccatcataatattttgggagagttatacttgaactcaaggaaaactggctctataaattaccagggagtatgagaaaggtcctttcacatatagcagtgtagtttttgagctttacgaagtgctcagctgaacagaagcaagggaatatgagttaagtattttgttccacttgatcattgccatgttttgtgacttttggtaagtcatgtctccctttattactctccttgactgcaatatgagccccat

SEQ ID NO: 10515 - DNA, 560 bp, Homo sapiens
  MAP TO CHR14.3; EXPRESSED IN BONE MARROW, SIGNAL = 3.3; EXPRESSED IN BRAIN, SIGNAL = 2.1; EXPRESSED IN PLACENTA, SIGNAL = 2.7; EXPRESSED IN HELA, SIGNAL = 2.3; EXPRESSED IN LUNG, SIGNAL = 2.9; EST_HUMAN HIT: BG678755.1, EVALUE 1.30e-02; NT HIT: AF111170.3, EVALUE 0.00e+00; SWISSPROT HIT: Q07849, EVALUE 1.10e+00
ctgcagttcctttttccgagaccccctgggtgccttcccagcaaagccctggccctgactcaggccaactcaatcagcaaacggaagccaccgcggggatttcaaacagcagaacttaatgcgaacagcttggaggggatgcaggaacgtagagaggagagtctggcaagccggaaatcaatttcctgctgcaagaggcagccggcaggtggggttggggggggtgctagccaggtcccactgctgccgtgtccccacagattgggccagtggttcaccccctcttgctgacgtccctgccgtcatcaccactgcctctttctgtccccatgtccgccaccaccatcatcacctgaagttgccactgacggacaaacatggcctgtccctcctccttctggacttccttggacagagcttccagggaagtcagcaagagagtgtgggagatgcggaggcagccttccctggtggagaggaggccccccaccctccagctcacgggcacggtgggccccaggtggggaggaggccccccaccctccagctcatgagtacag

SEQ ID NO: 10516 - DNA, 530 bp, Homo sapiens
  MAP TO CHR18.3; EXPRESSED IN BRAIN, SIGNAL = 1.8; EXPRESSED IN PLACENTA, SIGNAL = 0.91; EXPRESSED IN HELA, SIGNAL =   1; EST_HUMAN HIT: AI741976.1, EVALUE 1.90e-01; NT HIT: X75291.1, EVALUE 1.30e-01; SWISSPROT HIT: Q63262, EVALUE 3.80e+00
tttcgtgtgaccttcagcagtgttcctgggacaaggggagcaggaaatggggagggcattcatcaggcagttggcatttgaacgtagacactgttcatctttgggtgcggatgtgctctggttgcccaggcaaagccgtgttcattgatcagacatctatctgtgtactgtttagcactcaacagttgcgggtagaccgttgccagttgttttcgcatcacacgtggctcatctctcctggcaggggggaggaaggtgagagctgaggacgcagtgcctgggagccagggcgcagggcagccctcgggactgtcagaccacctcgggggctgaggtgagacgaggccggggagtgtttgatcttctgtgtttattcatgggcattagtaaagctttttttcataaatgagagaaacaaaatcactgctgaaaaatcctccatgtattgtttctgtaaactataggaaacattaaaatttgaagatgatatggtttttcacaagtgcctgtctgtatctgtgtcggcctca

SEQ ID NO: 10517 - DNA, 595 bp, Homo sapiens
  MAP TO CHR18.3; EXPRESSED IN BRAIN, SIGNAL = 4.4; EXPRESSED IN HEART, SIGNAL = 3.1; EXPRESSED IN BONE MARROW, SIGNAL = 0.94; EXPRESSED IN FETAL LIVER, SIGNAL = 1.2; SWISSPROT HIT: P02461, EVALUE 5.90e-02; NT HIT: gi9845300, EVALUE 9.00e-03; EST_HUMAN HIT: BI818938.1, EVALUE 0.00e+00
actccctggagtcatggaactctcctttctcctttgcagtgaatcacatgaaggtcacccccatggatgcggccacagcctcactgctcaacgtcttcaacgggaatgagtgcggggccgagggctcctggcaggtgggcatccagcaggatgtgacccacaccaatggctgcgtggccctgggcatcaaactacctcacacggagtacgagatcttcaaaatggaacaggatgcccgggggcgctatctgctgttcaacggtcagaggcccagcgacgggtccagcccagacaggccagagaagagagccacgtcctaccagatgcccttggtccagtgtgcctcctcttcgccgagggcagaggacctcgcagaagacagtggaagcagcctgtatggccgggcccctgggaggcacacctggtccctgctgctggctgcacttgcctgccttgtccctctgctgcattggaacatccgcagatagaagttttagaaagttctatttttccaaaccaggattccttactattgacagatttgctttaccaaaagaaaagacatttattcttttgatgcacttgaatgccagag

SEQ ID NO: 10518 - DNA, 570 bp, Homo sapiens
  MAP TO CHR16.3; EXPRESSED IN BRAIN, SIGNAL = 3.1; EXPRESSED IN HEART, SIGNAL = 1.8; EXPRESSED IN HELA, SIGNAL = 2.1; EXPRESSED IN PLACENTA, SIGNAL = 2.1; EXPRESSED IN LUNG, SIGNAL =   2; EXPRESSED IN FETAL LIVER, SIGNAL =   4; EXPRESSED IN BONE MARROW, SIGNAL = 3.3; SWISSPROT HIT: Q9MUM1, EVALUE 1.10e+00; NT HIT: AF210842.1, EVALUE 5.40e-01
cactcacattgtgcctcctgggttgcaggtgataaatgaattatgccaaggaaaacaaaatattgatttcagctttaaagttggaagaggaatggttttcacattttcccaaggcaaaccgtccaagagcaaaataagcctcattcccgtaaaagtttctgttaaatctcactcaactaggagatcatcaaatccaataaatgaacctgtttgcttggttctcatgtagtttaatgcctgtacatttagtttactttactttttttttatttgctgatagtcaatcatttgctgattttcaagatgttagagtacataacatgaaatttgagttccgacatctcttgaacaatataaaaatgtggctgttattcccacataggaaaagccgtaacattggagttaaggatttaccacttcagttggtgcctcaccagttcctcttggtcattgttaatgtgcctgtgtgagaagacatttgagtttcaagactgtataaacctaccaagtccctgtacagcagagtttcaagtctgtataaacctaccaagtccctgtacgaagtccctg

SEQ ID NO: 10519 - DNA, 510 bp, Homo sapiens
  MAP TO CHR18.3; EXPRESSED IN BRAIN, SIGNAL = 3.5; EXPRESSED IN PLACENTA, SIGNAL = 2.4; EXPRESSED IN HEART, SIGNAL = 2.1; EXPRESSED IN FETAL LIVER, SIGNAL = 2.2; EXPRESSED IN LUNG, SIGNAL = 3.4; EST_HUMAN HIT: BF851704.1, EVALUE 0.00e+00; SWISSPROT HIT: P55200, EVALUE 1.00e-06; NT HIT: AF120981.1, EVALUE 0.00e+00
gaggaccagtgcttctggagcaggcccgtgatctcgtccctaccattcctggcagcgtgtgggctgtggggagtgtgcagcctgccaggtaacagaagactgtggggcctgctccacctgcctcctgcagctgccccatgatgtggcatcggggctgttctgcaagtgtgaacggagacgctgcctccggattgtggaaagggtgagttgggcaagtggaaagagcccaaggctcacctcggcccctggcccccatgggcttggccccatgcttcatgcctctgctcccacctgccccccgccaacagagccgagggtgtggagtatgccggggctgtcagacccaagaggattgtggccattgccccatctgccttcgccctccccgccctggtctcaggcgccagtggaaatgtgtccagcgacgttgcctacgggtgagttgggctggagggagcagagctcattctgctgttaaaatcgtcgctgcctctgcttcctttcacctgg

SEQ ID NO: 10520 - DNA, 559 bp, Homo sapiens
  MAP TO CHR18.3; EXPRESSED IN HELA, SIGNAL = 1.4; EXPRESSED IN PLACENTA, SIGNAL = 1.4; EXPRESSED IN LUNG, SIGNAL = 1.5; EXPRESSED IN BONE MARROW, SIGNAL = 2.2; EXPRESSED IN BRAIN, SIGNAL = 1.6; EST_HUMAN HIT: T19073.1, EVALUE 0.00e+00; NT HIT: AJ277587.1, EVALUE 9.00e-43
gctgggcttcatcttcagagtaaaaagctcagaggaaaaaccacctaggaaagctgagttctagagatgacaccctagagtagaataattcattatgatatctccaatctagagaactatgtcgaattacatactggatttaaaggaggtctggatctgatgaagtcgaggatgatttcatgagcactcttttttaaccgagggggaatatcaccattcacctaaaaggagacaaaaagcagaagattcatgtgactatataagactatcatgaatttctgggtatagctgttatctcaaatatgccataaaattagtgaagtgtaattaccaaggatacatttcaaatcaataaagtggggagtaaatggctgagtgattcagaggaaagactgtgaaattgaagaaaatccaagtttactttaattctatcactttgtgaaatttcaacaaaaagtttctaaaattatgaatgtaaatggaataaataatacttgaacttattcagtattttatgatttaaaaaactttttacctcttattttcctccttgtaaaaa

SEQ ID NO: 10521 - DNA, 530 bp, Homo sapiens
  MAP TO CHR16.3; EXPRESSED IN HEART, SIGNAL = 5.8; EXPRESSED IN BRAIN, SIGNAL = 8.2; SWISSPROT HIT: P18301, EVALUE 2.90e+00
attattgggagtgggatggggagtagaatactgggcctgtaagattcttctcagaaaggtttttgtgctcaaataagtttttaaaatactgtatcttatactgtccctcttggagattcaagagggacacatgagcagatttgagacttttacaagtcctcccattttttaaagtgtgtttgtttaacctaaaattcattgaaacacagagccctttcttttctacctattaacctcctgtgaaaagcacttttcgaaaacgaaacagtacctgcattaccagacttgctgttctgtttcaccgttccatgcctttttctgtagtatttcctgggcctgaaatgtctttcccctcacattgaactcctggttgcaagttaaaagcttctccatgacctcaacaacaccctgatggagtgaagcacagccctcctccaagccatctctaggacatgggtatgattccatggttgcattcctcatactttactaaaacacatattaacatgcctgcctcacttcaaagcctc

SEQ ID NO: 10522 - DNA, 553 bp, Homo sapiens
  MAP TO CHR16.3; EXPRESSED IN BRAIN, SIGNAL = 1.2; EXPRESSED IN PLACENTA, SIGNAL = 1.6; EST_HUMAN HIT: AI147197.1, EVALUE 0.00e+00; SWISSPROT HIT: P23246, EVALUE 4.00e-02; NT HIT: AB060553.1, EVALUE 1.00e-41
ttgccacactcaaatgcttcctggttagcacactggatgacaatgaacagaaggtacatgaatgctgacagtatacatccaacaggtgacagaggctcatcacactatgagacatccactggcttccggtttccagcaccaaagcagtgtggcaaagaatgcaaaccaatgttgctttctttggaaaacataaaaagaagcgagccattcatagtctttttttccatcttttgccaaccagaggagtgaaagtaaatctgttcactccatgctggagcagttctttgggcatggatgccgtgctcaaaggccaccacctgcaagaaggctggggcgtccagcctccactgccagcagaagtcagcctccttacctgccgtcgcctgggctcggcccctgctccagtatgcccgcggaagaggggacagtcccacccccagagctgctttcagccctagagctctggggagggggctctgggccagcgggcaccacggtgctgccatctgtgggcggaagtggcggctggaaagcgggggatatgtgctttcta

SEQ ID NO: 10523 - DNA, 593 bp, Homo sapiens
  MAP TO CHR18.3; EXPRESSED IN BRAIN, SIGNAL = 1.2; EXPRESSED IN PLACENTA, SIGNAL =   1; EXPRESSED IN BONE MARROW, SIGNAL = 1.4; NT HIT: gi13384915, EVALUE 8.80e+00; EST_HUMAN HIT: R05648.1, EVALUE 3.30e+00
ttaggtagacacccttgctgcaggctgaccaggagccagcattccacaaaatcaaactccagcttgaattcattgttttcagctaagttgctgccttcaggtttttgtggtttaacccaaggattttctgaatcagccagcccccggactgagtacttgctgtgtatggtgtactcttctaggtctttgggaaatgaagtaatatttccaacagctataaaaaaataaacagggtcaagcaggtactagttaagaaagagaattttattttttttttccttaggtcttaaggaatgtagaaattgaggtttttcgtttgtcatagtgaagaaagatgacttttataatatagaagcaggttaagaactaagcagaatgtatcttaaagtattccccaaatgaaaatgatttgtatctagttatacattcatctctgggtctctccattttcttatcaataggctttaaataaaagtcttatttaaatatgtagcctcttttcaattttgctacaaaaagatatactggatgataaagaagaaatgtccccacaggccaggaaagtgttaatggcaggaaaaatgaggggtcct

SEQ ID NO: 10524 - DNA, 577 bp, Homo sapiens
  MAP TO CHR19.3; EXPRESSED IN FETAL LIVER, SIGNAL = 0.81; EXPRESSED IN BRAIN, SIGNAL = 4.9; NT HIT: gi10257436, EVALUE 1.00e-48; EST_HUMAN HIT: BE901775.1, EVALUE 9.00e-47; SWISSPROT HIT: P56945, EVALUE 2.50e+00
tgttagggctgcctgttttcaggtctgtccccgcctccctcctgggctgctctgactctcttttcttcgtgtgtacccggccgtgaaggaccacggtcctccgtgtaggagagttgtaagactgaggtcctgcctgccaggagagtgccaggcaagcactgggtccccctactgcctgcacttacacgatcaccagccacttgctctgcttcgccaggcccaggagggtgaagaggcagaccagcagctccaggagcagcaggaggacgtaggccagccacctgggaggggagagggtagggctgaaaccacaaacctgcctccaggcaccccggcggaacagcaaccctccaccagcattcaccctgccccccagctcagcctcacattcaccaccctccaagctcagcctcctgctgtttactgtgtctgggccacagcccaggtcctctgtgaaatagtgttatcatgagacaggacactggagcggtttagaatacaggtcctgagcacctgggactatcccctggccgggccacacacatgtgccctgtgaccagggacacgtgatgtgttc

SEQ ID NO: 10525 - DNA, 532 bp, Homo sapiens
  MAP TO CHR18.3; EXPRESSED IN BRAIN, SIGNAL = 1.7; EXPRESSED IN PLACENTA, SIGNAL = 1.6; EXPRESSED IN HELA, SIGNAL = 1.6; EXPRESSED IN BONE MARROW, SIGNAL = 2.1; EST_HUMAN HIT: BE328272.1, EVALUE 2.90e+00; SWISSPROT HIT: P47386, EVALUE 3.80e+00; NT HIT: AF037352.1, EVALUE 2.00e+00
tgtctcagcatcactcccagatattcttctcctgcatttgttccaatttatccagtttgtttcaaagggtagagatattattattagtaatccataaaccacctgatgcatcatagtacagaaagattctcttgcacctcaggcatgtcacactcctacagtatgttcctgtacttgccagaaacagcatcactggaataaggtcactcagatcacattcagatgacatgctggacataatggacctagaatctccttttcttaccttaaaggctgggctgtagggtagaaacacttggatcaggttctgccctttgatgaattcagctaagagaatgtattttttaatttccaagccagtgcaagcccctagacgcattttgttggtggtctgtataatgctgagactttcagaggaatgccctataaatacagctgcttaaaaatgtttaatattccttgggtacctgagaagagaaaagggatgagtgttccactgtgatcatctacttctgaagcaccaagggatgtt

SEQ ID NO: 10526 - DNA, 572 bp, Homo sapiens
  MAP TO CHR19.3; EXPRESSED IN HELA, SIGNAL = 1.7; EXPRESSED IN LUNG, SIGNAL = 2.3; EXPRESSED IN FETAL LIVER, SIGNAL = 0.91; EXPRESSED IN BRAIN, SIGNAL = 1.1; SWISSPROT HIT: P01233, EVALUE 6.00e-23; NT HIT: X00265.1, EVALUE 0.00e+00; EST_HUMAN HIT: AI149559.1, EVALUE 2.00e-78
gcacattgacagctgagagccacggcgtaggagaccacggggttcacgccgcgcgggcagccagggagccggatggactcgaagcgcacatcgcggtagttgcacaccacctgaggcagggccggcaggaccccctgcagcacgcgggtctggaagccgtgtgagtgggggaatgagcatgtgcctggggccagcgcctcagctgagctccccagctgcccccacaggtctcagactcaggggtccaggaagccctctgttcctgccctcccacaccccattccgcagcccctgaccagagaggcagaccacccttcctcccccgctgcctctgtgggtctggccctgaggtggcagcacctgccccggccccgggcagctcaccatggtggggcagtagccggcacagatggtggtgttgacggtgatgcacacggggcagccctccttctccacagccagggtggcattgatggggcggcaccgtggccgaagcggctccttggatgcccatgtcccgcccatgctcagcagcagcaacagcagcagcccctgggacaaggacactgctt

SEQ ID NO: 10527 - DNA, 546 bp, Homo sapiens
  MAP TO CHR19.3; EXPRESSED IN HEART, SIGNAL = 2.6; EXPRESSED IN FETAL LIVER, SIGNAL = 1.2; EXPRESSED IN LUNG, SIGNAL = 2.4; EXPRESSED IN BRAIN, SIGNAL = 8.7; NT HIT: U48213.1, EVALUE 0.00e+00; EST_HUMAN HIT: AI684518.1, EVALUE 0.00e+00; SWISSPROT HIT: Q10586, EVALUE 4.00e-34
ctgccctcttcttccacaacagctggctctggggttctcaagatttattcaggatcgtgttaacggaggcggtgggaggatagggtccctgacgtgccggggacacacacagagaaccctccccgcccccgcaagggaggggggaggctcgctttttcttaaaaatataaatgtatttatctgcattatcacgtccctggggcacccagctggccggcccgtgggccacagggcaggaagggaacagggcgtaagtctcagcaaggcggaggagagctccgccaggtggggatgtggggcagcctcacagggccccgtgctgggcctggtatcgggacagcacggcgcggtagtgggacagctcctggcgcacggccacaacttcctgccgcagcagggcgttctccttctccaggaaggccgcccgcaccgatatctggttctccttgagccgccgggcgtcacgggaccgcttggctgcctcgttgttcttgtaccgccggctccagtatttctcatcctgcaggagaagagggggagagcact

SEQ ID NO: 10528 - DNA, 585 bp, Homo sapiens
  MAP TO CHR16.3; EXPRESSED IN HELA, SIGNAL =  47; EXPRESSED IN PLACENTA, SIGNAL = 7.7; EXPRESSED IN HEART, SIGNAL =  16; EXPRESSED IN LUNG, SIGNAL =  31; EXPRESSED IN FETAL LIVER, SIGNAL =  33; EXPRESSED IN BRAIN, SIGNAL =  15; NT HIT: gi14110427, EVALUE 0.00e+00; EST_HUMAN HIT: BG113596.1, EVALUE 0.00e+00; SWISSPROT HIT: P07910, EVALUE 5.00e-35
agtggagacgtacgggtcagaaacagaacacccttctccattcctctactcagctcctcttttgacttggactatgactttcaacgggattatgataggatgtacagttacccagcacgtgtacctcctcctcctcctattgctcgggctgtagtgcccttgaaacatcagcgtgtatcaggaaacacctcacaaaggggcaaaagtggcttcaattctaagagtggacagcggggatcttccaagtctggaaagttgaaaggagatgaccttcaggccattaagcaggagttgacccagataaaacaaaaagtggattctctcctggaagacccggaaaaaatggaaaagaaacagagcaaacaagcagtagagatgaagaatggtaagtcagaagagaagcagagcagcagctcacgtgagactcatgtgaagatagagtctgaaggtggtgcagatgactctgctgaggagagggacctactggatgatgaggataatgaagattgggggatgaccagctggagttgatcaaggatgatgaaaaagaggctgaggaaggagaggatgacagagacagcacca

SEQ ID NO: 10529 - DNA, 594 bp, Homo sapiens
  MAP TO CHR19.3; EXPRESSED IN PLACENTA, SIGNAL = 1.3; EXPRESSED IN HEART, SIGNAL = 3.7; EXPRESSED IN HELA, SIGNAL = 9.5; EXPRESSED IN LUNG, SIGNAL = 8.5; EXPRESSED IN FETAL LIVER, SIGNAL = 3.8; EXPRESSED IN BRAIN, SIGNAL = 1.4; EST_HUMAN HIT: AA631311.1, EVALUE 7.00e-91; NT HIT: U52101.1, EVALUE 2.00e-74; SWISSPROT HIT: P54852, EVALUE 1.00e-12
gtgatgtccccctctgtgtcctccttactgcaggctggctgaaggcggtgcaggtcctcatggtgctctccctcattctctgctgtctctccttcatcctgttcatgttccagctctacaccatgcgacgaggaggtctcttctatgccaccggcctctgccagctttgcaccagtgagcactgcccctccccaaccctaatcccccaagaattgagcagaagggagtggggtgtgtcaagatgctgggggccctgagaatgggcctctcgtagaaaaaaacaactttcaacaccccacgagccacaagaggtgcctccgtgggctacatctctgcccccagggattgctgggacttgtagttttcagtggctaatgatagttatggcttgtgcgtatgagtcatcagggaactcagagtttcagggagccggggctggggaaggaggtataggtaaatagttttggtcccagggatcggccgtgacgtggggggataaactaattagtacctcagtagagagctctaaatcataataataatggtatttatatcagccaaccgctgtttcttgcgtgcctattgtgcatcaga

SEQ ID NO: 10530 - DNA, 593 bp, Homo sapiens
  MAP TO CHR14.3; EXPRESSED IN FETAL LIVER, SIGNAL = 0.79; EXPRESSED IN BONE MARROW, SIGNAL = 1.2; EXPRESSED IN BRAIN, SIGNAL = 1.4; SWISSPROT HIT: P43687, EVALUE 1.20e-02; EST_HUMAN HIT: BF979346.1, EVALUE 1.00e-82; NT HIT: gi14749040, EVALUE 4.00e-91
aggctctccctcttcctttgcgcaggcctgggcagctccaggcaacactggcgactcagccaggggtaggaagcgccccaaggggcggccttgcactcagctgcccggacccgaggctgggagcgccgcctggagcgaggggcgaggcggcggtagcccctgacagctgccctttacctctccggctgccatccatgcttagtcctcttgcagccgccgcagggacacgctgtatccccttcggtccttcccgcggccgggcccagccccggcagtggaggactggaaaagaggagccgacgggggctgcagcagcagggaaaccgttgccaggccgttgctaagggctgggtccagtgagtcgctattgtgacgtcacggcgcaggggacgtgcgttccgcagccccgcctgcgggatacccggtactaggaggacagttgcggacggagagacctggcggggaaggggcatcgagccccagtctgttgctctgggatcctgccagtcttccgcagagcgacctcctgtcaggatccgagtcaccagcacctggcaggctctgtccctgcgggaagagcagggagaggaggt

SEQ ID NO: 10531 - DNA, 560 bp, Homo sapiens
  MAP TO CHR18.3; EXPRESSED IN FETAL LIVER, SIGNAL = 1.4; EXPRESSED IN BRAIN, SIGNAL = 0.99; NT HIT: Y11484.1, EVALUE 5.30e-01; SWISSPROT HIT: P54212, EVALUE 1.40e+00; EST_HUMAN HIT: H42146.1, EVALUE 1.30e-02
tgccctgcagtttatgaagctcttacctgtttatcatcttaccaaatcattaagttctgaaggcaggtgtaagtagatctgaaccttgtaccatctctgcatgatgggatacccgaagcttttcatctctagccctccttagaatgagagacttttggtgcactcaacagctgatggcaagtgtgatgagaatgcacctttatatcatggacagtttccagtagaccctgaagaggcatctgtggttgacctcggctgggctgatgcagtgcgaatcccatcccattttcctatctggcttcctctgccgtgggtctggctgggattgccttctctgcaaggcctatgtgtggtgccaggtcccggtgaaccaggctatgtagcagaatcctgcacacacgtactgcaccaagctctcctgtgtattggcgtcctgtcctcctatggtaagaccacctcatgattcagcatggccaaggggcgtgagctctgtgctggagagcatgggaggggaggcttctcaggggtggaacgatctgagcaaagacgaccctaacagc

SEQ ID NO: 10532 - DNA, 506 bp, Homo sapiens
  MAP TO CHR16.3; EXPRESSED IN PLACENTA, SIGNAL = 1.7; EXPRESSED IN HELA, SIGNAL = 1.4; EXPRESSED IN FETAL LIVER, SIGNAL = 1.4; EXPRESSED IN LUNG, SIGNAL = 1.8; EXPRESSED IN BONE MARROW, SIGNAL = 2.1; EXPRESSED IN BRAIN, SIGNAL = 1.9; NT HIT: X15332.1, EVALUE 1.90e+00; SWISSPROT HIT: Q62799, EVALUE 1.20e+00
gaggaagtgggtgtcctgtctgcatctgtgaaagctgggggtttctagaacatactccctgcaagggctgtggttgtgctggggacgctgccagatcagctggactggggaaggattttccgagcacccagggacctggccctgcagttgcagtatggagtcccagcctcttgcttccagcaggtcttctggctggagaacctggacccagccagccagtatttgataaggagaccacagtcctgccttagttgcagggaagggataagggagtgtgtgtggggttgctcagcaggcttcctggaggaggaggccctcctggagttcgctggcctgaacttgctcctgcaaggcagagggaagtaattcgatggggtcccctgagctccccacctcttggtcatagctctgtcctgggccttgtttgtagggaagaggttggtgttttgggatattatgggatttctggatgccagccccatgagggtgatagggaccccggatat

SEQ ID NO: 10533 - DNA, 573 bp, Homo sapiens
  MAP TO CHR16.3; EXPRESSED IN PLACENTA, SIGNAL = 2.9; EXPRESSED IN LUNG, SIGNAL = 3.7; EXPRESSED IN BRAIN, SIGNAL = 2.5; SWISSPROT HIT: O00555, EVALUE 3.20e+00; EST_HUMAN HIT: AI939444.1, EVALUE 0.00e+00; NT HIT: AY013812.1, EVALUE 2.20e+00
cttccttgccgaaccagtagcagaagcagatgcagcgacctgagtcacctggggtaacatttgagaaagagccacatccacacagcctctgacccagactccttttattgatgccaaccggatccaggttttccgtgttcttgagatgctctatggagccgaggcggggaggagggtgccccccactttccgtgaaccccctcttgccaggacacaaaagaccaacgcaggtggcttggtcaacaatcagttccatgagcaggaaactcttccctcgcatgaaaacgtgggagaaaatattgtggggaagaaaaaagcccaataaactcccaagagggcaggttctgtactgctgtactttggaaataaaacccaccaggggatagattattaggagggaaccgaagccttctattaggaacccagcccgtaaacaggctcccattcagagtcacccaacaaaacaaggggactaataatacctgcctggagggacaggggactcaggggagctgcacttcagaatgcaaatgggccccgtcagtctgtttgtgagcagagaattgggtgagc

SEQ ID NO: 10534 - DNA, 510 bp, Homo sapiens
  MAP TO CHR19.3; EXPRESSED IN BONE MARROW, SIGNAL = 0.86; EXPRESSED IN BRAIN, SIGNAL = 1.8; EXPRESSED IN PLACENTA, SIGNAL = 0.87; NT HIT: gi14760838, EVALUE 2.00e-49; SWISSPROT HIT: P53042, EVALUE 2.00e-14; EST_HUMAN HIT: BG740398.1, EVALUE 1.00e-104
ttgtgttccctgcttgtgtctcttgcatgattcttcttggtctactgtgaactcttacccttcccctcacctctgccccctccccacgtctctctctcggcccgtccctctccggtggcctcttttctttcagacagagaagattacagtatgtggggacacccatggccagttctatgacctcctcaacatattcgagctcaacggtttaccctcggagaccaacccctatgtatccttctcagcagagccaccctctccccacctccacccccagccgcagcctcaggtctgcacagagtgggaggagcccttgccaggaaaagacgtgaccttggaaaggagaggcctggccatgctggggcaccaaggtgtgggtggagctgcaggctggccatgcaccccaggctccaggctcggacaggcctgggccagcacccacctgctgtgtgacctaagctggtagctcagtctctctgggtcttggcttgtcttcgtctgcctcaggat

SEQ ID NO: 10535 - DNA, 566 bp, Homo sapiens
  MAP TO CHR18.3; EXPRESSED IN LUNG, SIGNAL = 8.2; EXPRESSED IN BRAIN, SIGNAL = 3.2; SWISSPROT HIT: P19105, EVALUE 1.00e-27; EST_HUMAN HIT: AA652667.1, EVALUE 0.00e+00; NT HIT: gi15809015, EVALUE 0.00e+00
tgatcccttgttctttattctccaggcaccatacaggaagattacttgagagagctgctgacaaccatgggggatcggtttacagatgaggaagtggatgagctgtacagagaagcacctattgataaaaaggggaatttcaattacatcgagttcacacgcatcctgaaacatggagccaaagacaaagatgactgaaataacttcaaattccagccaaacgttccttgttgccactttgggtattctgagattttctcttgcatgcccttagctttacagcttttgcatttcctgttgtatttattctcagccattttgggcatatgtatctttataatcagactggaaacgggactttctattaatatcattttcagaataaaaaatagggtaatttaacctaccagcccttctcccccaataactgtggtctatacagagtcaatatattttttcagagaaagttattcgctcgattttttctgaatcataattaaactttatgataaaatacttacttgtttaaacttcttatttaccaaacttggcttttgttggtttca

SEQ ID NO: 10536 - DNA, 552 bp, Homo sapiens
  MAP TO CHR14.3; EXPRESSED IN PLACENTA, SIGNAL = 1.1; EXPRESSED IN HEART, SIGNAL = 1.9; EXPRESSED IN LUNG, SIGNAL = 2.1; EXPRESSED IN FETAL LIVER, SIGNAL = 1.2; EXPRESSED IN BRAIN, SIGNAL = 1.1; SWISSPROT HIT: Q10357, EVALUE 1.40e+00; NT HIT: gi14775258, EVALUE 2.10e+00; EST_HUMAN HIT: BF370848.1, EVALUE 1.00e-115
tcagcagtgtggaggagatgctggagatgcccagactttacagggaggatggttctggccagcaggtgcactacgaggtagggcacttctcacgagcccatgtgttggccattacagcagccccgtgagttaagcccacgtggaagcctcttgaggtcagagctcattcattgtcttccttcctctccactccagacgctggctcttgagttgaagaaactttatttagcgctaagtgacaagaagggtgatcttttgaaagccatgacttggcctggcgagaacaccaacttgctccttgaatgttttgacaaccttcaagtctgcctggagcacactcaggctgcagctgtctgtagaagcaagtccctgaaagctggcctcgattacaaccgcagttaccaggtatgattccgagcacacagcctattttggcactgttttaagttacagcatgaacccctaatgcctattcctattcctggtgacatttgttaataagaattgctaagggaaatgatgagactcttctgtttgttgctcatggttgga

SEQ ID NO: 10537 - DNA, 511 bp, Homo sapiens
  MAP TO CHR18.3; EXPRESSED IN PLACENTA, SIGNAL =   1; EXPRESSED IN HELA, SIGNAL = 0.9; EXPRESSED IN BONE MARROW, SIGNAL = 0.97; EXPRESSED IN BRAIN, SIGNAL = 1.3; EST_HUMAN HIT: BF825196.1, EVALUE 7.10e-01; SWISSPROT HIT: P49270, EVALUE 1.20e+00; NT HIT: X12846.1, EVALUE 7.60e+00
agtgtgtgcgtgaggatgagcgtggcttatgataaataacttactgtaaagggcaagtttcagttaggaattaacgattcgtcctcaggaggcctttatttactattaaaaacctgagtgccttttgctgttagcaggctgatacagggaaattgattctcttcacagaatttcccgacggtcccaataagccattaagcgctcctggccttaccttccttggtttagtagctgctctgccgtggtcagcatcgttctctctgcagcaattagtggcaataagtgggagctcgcacaattgatggtgtaaaatgcctggacagtgtgcaagcagcagttctgaaatgcttcaccgagcagagctcttgtactcaatgcctccctcccatcagttttccaggtagcagagcctaatgaaggcacacagcaggtggtgcagggaccggaggatctccggtgcggagctttctgtcctggtcagaaggaccagactttgcttaacaggcctgct

SEQ ID NO: 10538 - DNA, 513 bp, Homo sapiens
  MAP TO CHR16.3; EXPRESSED IN PLACENTA, SIGNAL = 2.4; EXPRESSED IN HELA, SIGNAL = 2.6; EXPRESSED IN LUNG, SIGNAL = 3.5; EXPRESSED IN BONE MARROW, SIGNAL = 1.7; EXPRESSED IN BRAIN, SIGNAL = 2.6; EST_HUMAN HIT: AA593425.1, EVALUE 0.00e+00; SWISSPROT HIT: O09175, EVALUE 4.80e+00; NT HIT: gi15310972, EVALUE 8.00e-03
aggcagagctggaacagaaccccagcatgggaagtccgtgttcacggggggccatttcaccctgggacattgtagggcagctcgaggctctgactagggaggcccagcgcctggggctggcgcttggtccgagctctgcaggctttcctgggtggagaggagcctcttcctgccatgcacaccaggccttccttaagtgactcaaacaccaatcttccttgggcttcctgaactgtgaggattccacagtctggcagggctggtggcctcagccgtacactctgcagccaagagggctctagctcctgattccaccctgtccctcagcggctccccagtgctcttccaggccttaggcctgcaccatccccacctctccctcctcaccaacctgccacctcctgcctcaggtggacacactcaggaggaagtcaagcctgtccctatacaaaagccatattcccaggcacttgcctgagtagagacgaagtctcagctccttctacgtgagcc

SEQ ID NO: 10539 - DNA, 562 bp, Homo sapiens
  MAP TO CHR18.3; EXPRESSED IN BRAIN, SIGNAL = 1.1; EXPRESSED IN FETAL LIVER, SIGNAL = 0.95; NT HIT: AE001803.1, EVALUE 8.40e+00; SWISSPROT HIT: P22591, EVALUE 1.80e+00
agcagtgctgttcagtgggcccaggggagccaagtgtcagtttttccagatgacaagctgccagtctatagcacactgctcaaagtcacagacagactgcatttctttgcagaaccaaagaacatcatttactttatgcacacctttgtacatgatcagctcacagtagttgatgaaatagccctgaaaaagacacagattgagagcgagacacaatgaccgagacaggaaaggaagagagagataaggagatgcaaagagacacaggaggatgctattttagtgaattcagcccattttctgggctattattgaacgacatacttattttgtaaaaggaaagtttttaaacattattgccaatttacaggaacttctctcctaatagctggaacaaaattctcaatttgctctaattaaaatactagttttggggaatgaatttttcccctttgatatttaaactgaacattaaaaaaagctaaatcactttaaatggtctttaaattgcattctctctatcagaattgttaactctttttgcctaaggagaaaacccacc

SEQ ID NO: 10540 - DNA, 564 bp, Homo sapiens
  MAP TO CHR18.3; EXPRESSED IN HELA, SIGNAL = 1.2; EXPRESSED IN BONE MARROW, SIGNAL = 0.8; EXPRESSED IN FETAL LIVER, SIGNAL = 0.92; EXPRESSED IN BRAIN, SIGNAL = 1.1; NT HIT: gi6678655, EVALUE 3.00e-18; SWISSPROT HIT: P25391, EVALUE 2.00e-38; EST_HUMAN HIT: AI797355.1, EVALUE 1.00e-123
tgctgcaattttatctactccaagagcttatacaaatggactgtgttccttaaatacacaaaaactcaccaagatatttgcttttaggtcttgttccatgtcaacaatggtgctggcaggataacagctgcatatgagcccaaaaccgccactgtgctctgtgatggaaaatggcacactcttcaagctaacaaaagcaaacaccgtatcactctgattgttgacgggaacgcagttggcgctgaaagtccacacacccagtctacctcagtggacaccaacaatcccatttatgttggtggctatcctggtatgtacgggtacctgctcttccactcaaaaggggcactgtccctggaggaagtcttggttcaggtggatgtagaatagggattgagaaaggtacatggtttgggtgacaaatcctttaccattttagaaaggctatttcaaatatctaagaattcttggataacttaaaataatctacatacacaagttaatcattgggtaagactgtgagaacattgggtctgatataaaggcagccgtatgactctaccg

SEQ ID NO: 10541 - DNA, 588 bp, Homo sapiens
  MAP TO CHR18.3; EXPRESSED IN PLACENTA, SIGNAL = 0.98; EXPRESSED IN FETAL LIVER, SIGNAL = 1.7; EXPRESSED IN BRAIN, SIGNAL = 1.3; NT HIT: AF031196.1, EVALUE 5.60e-01; SWISSPROT HIT: Q10424, EVALUE 8.60e-01; EST_HUMAN HIT: BF982685.1, EVALUE 5.30e-02
tcggggaaagcacattttacgatggactctccacagagcagaatatttaatatttcaacgtagcaataatacagtcaagggcaatcaataacaactgccacttttctacctgccttgatgaatgaaggtgggctctggcctctctccagttggtgcatttctgcctggcctgtgcttgtcagccagggaagcattcgtggcccctggatcctgctccaggctgacttcccagcacccacctctgagttggcctgtcttgtctgtcactaccagagagaggccccctcaggctgcagggctgagcagaaagatacagcgaggccagcttaaactccaccatccccaaacactggatcaggctcccattggcacaggttaattccagccatagcgtcctgcacaggtggctcaggagggagagccacaaagccgaatgtgacaagcgtttcattttacaggacgcttgctgaagactgggctggaagaagaggagatttcaaaacacaacacaattagccccacgtcacaggtgtgtactaagcaaaaccacagccccagagcagtcttggctctgagttgcaccacaaa

SEQ ID NO: 10542 - DNA, 527 bp, Homo sapiens
  MAP TO CHR18.3; EXPRESSED IN HEART, SIGNAL = 4.2; EXPRESSED IN BRAIN, SIGNAL = 1.5; SWISSPROT HIT: P50772, EVALUE 2.50e-01; NT HIT: gi14760932, EVALUE 0.00e+00; EST_HUMAN HIT: BF116064.1, EVALUE 1.00e-127
tgcagtttgcgaagacagagttaaaaatccctattagggcaatcctgaaatgcagtcacacctgaggtctgtgaaaggatgccaagcctgaccttgcactgggcgtgctctgcttttccaggtggcgctcaggcacgaggatggcgatgagaccacggagccaccccccagtgggtgccgggaccggaggagggccagcgtgtgttccagtggcggaggcgagcaccggggcctggaccgcagaaggagccgcaggcactcggtgcagagcatcaagagcaccctgtcggcccccaccagtccctgctcccagtcagctcccagcttcaagcccaaccaagtgcgagatctgcgtgaaaagtaagcattaacttggcagtggagaggggtgcaaggatgccatccaaaagagagcccacaggtgcctgccactctcccctccctgctggccactttgtcccccacccagcattgctccctacctcttcttgaccattaaaccaccagccaaacatctcggtggattt

SEQ ID NO: 10543 - DNA, 513 bp, Homo sapiens
  MAP TO CHR14.3; EXPRESSED IN PLACENTA, SIGNAL = 0.82; EXPRESSED IN BONE MARROW, SIGNAL = 1.1; EXPRESSED IN BRAIN, SIGNAL = 1.1; SWISSPROT HIT: P03332, EVALUE 2.40e-01; NT HIT: gi11465620, EVALUE 3.10e-02
aaccctagacagatgcagcgactgtaagtttgtcctctagcaccaagttcttctttataaaaaacgttcccatttgagagcctctcctatcctgctccaccgtggctaccctttatccatcccctggccccacctaccatacatacatactttccaaaatgtccgcaagtctttctgccttcctcacttccattctctaacatccagtcatcaacagcctcagactaaataaaaatataaaaaatcaacactccttcacccaaatgtttagcctctctaattagaaaataaaaggtttcttttctcttactaaaggaatttcccttattacttttgcttctgttagaacatggaactttttcttgaccctagaaagaatcctccttccttcctttaccttttaaccagactaggttcccctctgtcacacctgacattcctaaagatagtatatatacattttatagtctactacctggtatttaatgctttctccaaaatctcagaagtggg

SEQ ID NO: 10544 - DNA, 540 bp, Homo sapiens
  MAP TO CHR16.3; EXPRESSED IN HELA, SIGNAL = 2.1; EXPRESSED IN FETAL LIVER, SIGNAL = 1.8; EXPRESSED IN BONE MARROW, SIGNAL = 0.89; EXPRESSED IN BRAIN, SIGNAL = 1.2; EXPRESSED IN PLACENTA, SIGNAL =   1; NT HIT: gi7019320, EVALUE 0.00e+00; EST_HUMAN HIT: AA883995.1, EVALUE 0.00e+00; SWISSPROT HIT: Q9UHM2, EVALUE 4.00e-40
tgacaattgttttagatgtactttggtatattctataaaaaatatttttgtttctgtagcctccatcttccaagaagagcgatggttctgggacatatactaagttgcagaatacccaggtgagggtcatgtctgagaagaagcagagaaaaaaggtggaatcagaaagcaagcaagaaaaggctaatcgtataatatcagaggccatagcaaaagcaaaggagcgtggggaacgcaatattccacgagtaatgagccctgaaaactttcctactgcttcagttgaaggaaaagaggaaaagaaaggtagaaggatgaaatccaagccaaaggacaaagacagcaaaaaaacaaaaacatgttctaagttaaaagagaagacaaaaattgggtaagttggttaagaattaaatttaattcctttcaatgttctgttaaagttcaaactgtccaaccatctacttttgatttgagtatatttactcccatatttgagttttaaattgttggctactatgtgtgctttatttcattgccgaa

SEQ ID NO: 10545 - DNA, 501 bp, Homo sapiens
  MAP TO CHR18.3; EXPRESSED IN BRAIN, SIGNAL = 1.3; SWISSPROT HIT: O88516, EVALUE 4.60e+00; NT HIT: X87298.1, EVALUE 1.90e+00; EST_HUMAN HIT: W32026.1, EVALUE 2.80e+00
tttgtcatcttcatggcaccgcttccaattacaactttgttccagctgagcaagagatgttctaggtgggaacagttactggagaggctccataaaatccacgtggaagctagagtgtgactctcaacagattcaactactttaatttaacctacatgaatattgcctccggggggatcctgttttggggacccatctatgttatgctggatattgtattggggcctttcggaggtttgtgtgtgtgtgcgcacacatgggtcaattttgttcttttattattatgtagtctcataatctgttatttggatgtagtcaaagaaaaaatgaatgtaatagacttcctgttctttcaaaagcaaatattttttagaagcatgctcttcattttgttcattatttataattttctctgatagtaataatttaatgtaatacatgtagattaagaaagaaagtcctcagatgaatcggccttagtgtgtggatgaaggggatgtc

SEQ ID NO: 10546 - DNA, 538 bp, Homo sapiens
  MAP TO CHR14.3; EXPRESSED IN BONE MARROW, SIGNAL = 1.2; EXPRESSED IN BRAIN, SIGNAL = 0.99; SWISSPROT HIT: P40749, EVALUE 7.00e-08; EST_HUMAN HIT: BF987904.1, EVALUE 1.00e-48
ctggcagttagaaagcagggattctgaaggagcacaaaggggcaccaactggccaaaatgtaattgggtatcatcatttccatttctaattgtttcctctgcctgcaacaggaacaggacaggaccaatttgcaggtgccatccggggtctcagagcccatctcaaagtgtggtgacctagatgtcatctttgaatatagagccgccagccagaagctcacagtgaccattgtgagggcacagggcctcccagataaggaccgaagtggtgtcaactcctggcaagttcatgtagtgctgctgcctggtaagaaacacaggggcaggacgaacatacagagagggcccaaccccgtcttcagggagaaggtcacctttgccaagctggagcccagagatgtggctgcctgtgctgtccgcttccgcctgtacgctgcccggaagatgacccgagagagaatgatgggagagaaactattctatctcagccacctgcacccagaaggggaaatgaaagtgactctggttctggagccaa

SEQ ID NO: 10547 - DNA, 567 bp, Homo sapiens
  MAP TO CHR14.3; EXPRESSED IN BRAIN, SIGNAL = 1.3; EXPRESSED IN PLACENTA, SIGNAL = 1.6; EXPRESSED IN HELA, SIGNAL = 1.8; EXPRESSED IN LUNG, SIGNAL =   2; EST_HUMAN HIT: BI826713.1, EVALUE 3.00e-56; SWISSPROT HIT: Q9Z615, EVALUE 4.10e+00; NT HIT: gi14149937, EVALUE 4.00e-05
gaagaaaaaggcacagccaccacatcaaggcagggagagcccagaggaggacttactctgcagcagctcactggtcaggttcaagatttcctttggtgacacagttgctgtagcaccagtgccagatttctgagtttttactcgactcttcttacccatttttctgactacagagaagagaaagaaaagagaaaaaaattacattaccaaagaacaaaatcaagtaataaaacatgtccaacacatggcagtgtcttagtcttcagaggctaagatcttaccttacatgaagttttcttccagaaaaagaaatgtgtagtattagtatctagaggttctcaaatgggaaaaaaaaaaatctgctttgtagtctctggaagaaaagttcgttctttttcacctacaaaaactatagtagagcaaattttactctagatttttttttaattacatagatttcactgtgcagactaacatattccaggatactagagagataaaacccatgcatacatcatacacatatgggcataaagacctatatattctctccccactttgccttaa

SEQ ID NO: 10548 - DNA, 558 bp, Homo sapiens
  MAP TO CHR18.3; EXPRESSED IN PLACENTA, SIGNAL = 0.95; EXPRESSED IN BRAIN, SIGNAL = 1.4; NT HIT: AB020681.1, EVALUE 0.00e+00; SWISSPROT HIT: Q48806, EVALUE 3.60e-01; EST_HUMAN HIT: BI820824.1, EVALUE 0.00e+00
tgctttttatgctcctgatgtgtccattttagttcctaaagaaactggatgagattaatttttaaacaaagcaaagttaacagaataatcaagtaactcttctcttcttttaaatagacctgtcttttaatgaggcaacaacatgaagctgcggctttaaatgctgtccagaggttagaatggcagctcaaactccaggaacttgatcctgccacctataaatctatcagcatttacgaaatccaggagttttatgttccccttgttgatgttaacgacgactttgaattgactcctatatagcagtcagtacttcctgatggtattgtcctaaactggtgatgctcaagcattatactgtggaatactgccttttgacaaaaatactcatgcctttacaattgttagtaaagttcgattatagttggttatgtagtaaacactgtcattttataaaaaatgagaattattttggatcttagatccaaacacagtttctaatagaaaactattatttatattgggaaaggtaactattgcattagagcatgttggcag

SEQ ID NO: 10549 - DNA, 578 bp, Homo sapiens
  MAP TO CHR14.3; EXPRESSED IN HELA, SIGNAL = 4.2; EXPRESSED IN HEART, SIGNAL = 3.3; EXPRESSED IN FETAL LIVER, SIGNAL = 2.9; EXPRESSED IN LUNG, SIGNAL = 2.8; EXPRESSED IN BONE MARROW, SIGNAL = 3.2; EXPRESSED IN BRAIN, SIGNAL = 5.2; EST_HUMAN HIT: AL157542.1, EVALUE 0.00e+00; NT HIT: gi14751151, EVALUE 0.00e+00; SWISSPROT HIT: Q92843, EVALUE 2.00e-72
ctcctcctcatctcactgggttggtcaaaccagaagtgctccttctgattctctcttcatatattcatgccagtctttcatccttgcctcttatagccgcccggatggcgaccccagcctcggccccagacacacgggctctggtggcagactttgtaggttataagctgaggcagaagggttatgtctgtggagctggccccggggagggcccagcagctgacccgctgcaccaagccatgcgggcagctggagatgagttcgagacccgcttccggcgcaccttctctgatctggcggctcagctgcatgtgaccccaggctcagcccaacaacgcttcacccaggtctccgatgaactttttcaagggggccccaactggggccgccttgtagccttctttgtctttggggctgcactgtgtgctgagagtgtcaacaaggagatggaaccactggtgggacaagtgcaggagtggatggtggcctacctggagacgcagctggctgactggatccacagcagtgggggctgggtaagaagcttctcaattgccgctctgcacatccttctgcaa

SEQ ID NO: 10550 - DNA, 531 bp, Homo sapiens
  MAP TO CHR16.3; EXPRESSED IN FETAL LIVER, SIGNAL = 1.8; EXPRESSED IN BONE MARROW, SIGNAL = 2.3; EXPRESSED IN BRAIN, SIGNAL = 2.2; EXPRESSED IN HELA, SIGNAL = 2.4; EXPRESSED IN PLACENTA, SIGNAL = 1.5; EXPRESSED IN LUNG, SIGNAL =   2; NT HIT: gi14778274, EVALUE 0.00e+00; SWISSPROT HIT: Q9UI17, EVALUE 2.00e-07; EST_HUMAN HIT: AL539382.1, EVALUE 0.00e+00
tctgagtgtcgctggatgactcggcgtttcctttctttcttagggcatggatttcattggtcgcgacgccctcctgcagcagaagcagaatggagtgtataaacgcctcaccatgttcatcctggacgaccatgattcagacctagacctttggccttggtggggagagcccatttaccggaatgggcagtatgttggcaagaccaccagcagtgcctacagctacagcctggagcgccacgtttgcctgggctttgtgcacaatttttctgaggacacgggggaagagcaagtggtgacagcagatttcatcaaccggggagagtatgagattgacatcgcgggataccgcttccaggccaaggccaagctctaccctgtcgcctccctcttcacccagaagcgccgaaaggatgacatggagctgagtgacttacatgggaagtgatgccaccagggcagcctcacctcctccccatcatcttgtcctagagtgggcgtcaccttggagcttctcttccttccgcctct

SEQ ID NO: 10551 - DNA, 594 bp, Homo sapiens
  MAP TO CHR18.3; EXPRESSED IN BONE MARROW, SIGNAL = 0.86; EXPRESSED IN FETAL LIVER, SIGNAL = 1.2; EXPRESSED IN BRAIN, SIGNAL =   1; EXPRESSED IN HEART, SIGNAL = 1.7; NT HIT: AF138891.1, EVALUE 2.20e+00; EST_HUMAN HIT: BI260563.1, EVALUE 8.40e-01
tgattctttcctgccattccataaaggtaggaaacttgactctcaatttctttgcctacctaaactttgagcagaggaactcatacacagatatttaataattacttattgaataatgaatgataactagcagtaagatccaaaaatgctttaagcttaatcatgggaaaacctattattacaagttaacatttcatctctgagtattggggataaaggtaacagagaaagggtcacagttactcacataattgacatcagctccgtagatcggggaactaaacctgggatgcttcacttatttctcagactctgatgctattaaaggtctttagatgctttgtttcattctctgtgatagctgtactggggtgatgacatttcatcttgaatgtctagaggcttgttagcagagaccgtgtcaccaccagggatcacagcatttttgtgctcagtccttagggcactgatcttggctgtacagctggactcagcagcagacgccacatggtctaacatgacaagcagctggatctccagccaacaggccgttattttcctaaaatgaatggcagtttgcagagcagagagggt

SEQ ID NO: 10552 - DNA, 514 bp, Homo sapiens
  MAP TO CHR18.3; EXPRESSED IN LUNG, SIGNAL = 2.4; EXPRESSED IN FETAL LIVER, SIGNAL = 2.6; EXPRESSED IN BONE MARROW, SIGNAL =   2; EXPRESSED IN BRAIN, SIGNAL =   2; EXPRESSED IN HEART, SIGNAL = 2.5; EST_HUMAN HIT: BG109224.1, EVALUE 0.00e+00; NT HIT: gi15304430, EVALUE 0.00e+00
ctttgctccaaacacttccccatgtatggagggactactttaatccatgcagttgatattagcaaaatacgaataacatgttcttttctgtaaagatcatgattaaatgtctaaattcaataaatagactcttcaataatttgaagtcctaacaaatattttatagtcatcaagtctcaatctttcttcttttctaatacatccttgggctcctgcactgtaggcactacagatcctccactgctgggctcctgctgttctttgctctcttctatctgttcttggttttcattttcacttttagacacttcatatcgttcttctatataacctccatctgtgtcggctgtgtagattccatagcacatgatactgatgacacccagtggcaggccaaagagaaagcagcccatcagtggtgagctcttgaatatagactgtggaaagagaattaaaactcagttcccttcacatgtaattctgatatatatagcatgaaatgaacttgaaacca

SEQ ID NO: 10553 - DNA, 594 bp, Homo sapiens
  MAP TO CHR19.3; EXPRESSED IN BRAIN, SIGNAL =   1; EST_HUMAN HIT: W94322.1, EVALUE 1.00e-126; SWISSPROT HIT: Q16674, EVALUE 1.00e-40; NT HIT: X84707.1, EVALUE 0.00e+00
gggaatttccttgggcttacagcctttaccctatccttgaaatggttctggtttcatagcaacttctaggtggtgtgggcgaagtttgggactggtttagggcggggacaagaccaagaacacaagtttccttgtactacgggagagagggaggggaggaaattggagaccccagcacccccttgctcactctcttgctcacagtccacgatggcccggtccctggtgtgccttggtgtcatcatcttgctgtctgccttctccggacctggtgtcaggggtggtcctatgcccaagctggctgaccggaagctgtgtgcggaccaggagtgcagccgtaagaatggggaggggagaattgggggcttgggcgttagcctgtgtggagggtgctgcattcccttctattccttccctagaccctatctccatggctgtggcccttcaggactacatggcccccgactgccgattcctgaccattcaccggggccaagtggtgtatgtcttctccaagctgaagggccgtgggcggctcttctggggaggcagcgtgagtcttgggagagtgaaagagggaagggtacagtgctg

SEQ ID NO: 10554 - DNA, 587 bp, Homo sapiens
  MAP TO CHR14.3; EXPRESSED IN BRAIN, SIGNAL = 0.99; EST_HUMAN HIT: AI671233.1, EVALUE 3.00e-71; SWISSPROT HIT: P30124, EVALUE 1.50e+00; NT HIT: gi14784704, EVALUE 4.00e-45
tataccagctttgatccggcgcttgaaccagagcaaacttcaaacctaaaataaccccaatattatattcttaagtcttgaaactaatgaatatttaaaatttaaaatagtcagtgaattaacctatgtttttctgaagttattaaagaagcataaaattggaacatcagcatacactctgaatgaggaatgctgttaagtcccaggagggaaggaatggctgggctggggccctggcaagagtcttcgaatgagtggggtgccaagaaaggaagctcaagtgggagggaggggaggctgtgcctccccagggtggggcgcctctggggccagtcctaggtgtttggtggactggaagctccaaggtgagcctcttcttgtgaccggagctctttctctgtccccagatccccataccgagtgtgcctacgttccagccgtctacacctgtccctgagcgcctggaagctgtgcagcgctacatcagagagctgcagtatcctctctggtcaagggtcatggccaccttctggccggtgtggtgggccttgtttccaggcagagctggagaggtatcagcagagccg

SEQ ID NO: 10555 - DNA, 599 bp, Homo sapiens
  MAP TO CHR18.3; EXPRESSED IN BONE MARROW, SIGNAL = 0.85; EXPRESSED IN BRAIN, SIGNAL =   1; SWISSPROT HIT: P07869, EVALUE 7.70e+00
caaagaggagcaaggcagaggtagaccaagaaagaccctggaaccaggaggaaaaccagctgccaccagctgcctgtggctgagagtggagccacattatatgccctttaagagggaatatgcaaattaaacccattttgacctgcagagagtgagaaaagaccacgtcacagcacctgccacctacctcttgcacccagtgggcctgtgccttggcacaagcagggagtggagctagggctctgctgtcctcaaggacagtctcagcatctagggcagcccacctggtgagcatcttgccatcctgaaggtgattttgttgatacaggttcaaatttttcatataaaatggcctctaaacacaagtcaaccgctgcatccaatgctcaactcaagggggaaaaaaacagcagttgccacgcaggtggggaaactggtggtgattgactcactgagcggcgtcactcagtgtaattttggggtgatttaagggttctgagggtaatattgacagtgagcaatttttaccacatgtactggccagacaacctaaatcctgtgaaagtctactctgtatttggtccatatgaatgcaggct

SEQ ID NO: 10556 - DNA, 511 bp, Homo sapiens
  MAP TO CHR14.3; EXPRESSED IN BONE MARROW, SIGNAL = 1.8; EXPRESSED IN BRAIN, SIGNAL = 1.4; EXPRESSED IN PLACENTA, SIGNAL = 1.1; EST_HUMAN HIT: AI479592.1, EVALUE 0.00e+00
tcactgaagctttgcatctctctgtaaaaatgacgatttggttcagtgaagacactgagtgattcgatgtccatgactgcatgccaaggttgacccaggcccagggatacctgctcaataaggttatgcactggatctacatcctggtcggccagttcaccttggtcaaaatcaatgctttcttcggtgacttcaagcactttcagatcagagccccgaagacgagcaatggcaatgaggttgtgtgcccacaccgtgtaacctgaaaaataaacaaaagacaacactgtaatttccttgcatttccttttctctttggtaagtctgtcttttcctcattcaaagcttctagagaagcttcaaatttgtatctcacttaccgttttggtctttttcctttagaaatatattgaaattggaaaaggaaacatggttgtatagcccagaaaaaaaaaggctagaagttgtgttcaagagttaccgctataggtggtgaattggcaggtgatct

SEQ ID NO: 10557 - DNA, 553 bp, Homo sapiens
  MAP TO CHR18.3; EXPRESSED IN FETAL LIVER, SIGNAL =   7; EXPRESSED IN BONE MARROW, SIGNAL = 7.8; EXPRESSED IN BRAIN, SIGNAL =   7; EXPRESSED IN PLACENTA, SIGNAL = 7.7; EXPRESSED IN HELA, SIGNAL = 5.5; EXPRESSED IN HEART, SIGNAL = 5.2; EST_HUMAN HIT: BE906304.1, EVALUE 7.80e-01; NT HIT: AJ235272.1, EVALUE 8.20e+00; SWISSPROT HIT: Q27218, EVALUE 6.80e+00
agtagtcacaggccagccctgtgatgtcaagtgcttctaaatgctgtttaattttgcaaataaacattctttgagggtatctaagtaggatgtaatactttaaggcagactaaccaatactttcttgaatgacaaaagagactacataaaatactaaactaataaaggcattggagagctatgaaagaaataagaactagaaagtataagattacctaaaagcaaaaaaaaaaggagaaactcagagagataatctgtcaatatatgacattttcctggttatatttacacaggtaaaggaccatggcagagtttacgtgatcttcggaggccagaggatcgaaattggagacttgaagaccctcaaacacatgaagagtgttactctaatatttagcaaggtaagcaaaaaagctaagccataaacattataatgcaaagtagagtttttctaccagtcacatagtactatgaagactaaagatcaacaatgaaaactcaacaaggagaagaggtgaacacaacagaattctcagtaaattcgtggagggga

SEQ ID NO: 10558 - DNA, 500 bp, Homo sapiens
  MAP TO CHR16.3; EXPRESSED IN BONE MARROW, SIGNAL = 1.3; EXPRESSED IN BRAIN, SIGNAL = 1.1; SWISSPROT HIT: P14953, EVALUE 1.60e+00; EST_HUMAN HIT: AI697028.1, EVALUE 7.00e-01; NT HIT: AF002681.1, EVALUE 3.00e-02
tgactgggtgaggaaaggacagaacccatgattctggttcctccccagaagtggccaaggaaagggagaccaggatccttcagtgttccccatgtgcaggcatggatggcagggaacaggacacagaccaggagttacaaacagaaaaaaaaaaagaaagaaaagaggttgtttaccaatgagacagcagggggatggtcatgtgcaacattttctagatagtcaaagctaccccaaaaccaaaagttagttatctagatggacttattcaccacttacatgtataaacttcccaggggtacagttggagaagaaatgcctcttctgaaggtgtgaatttcccgggcatttctgtccttccctttcgacagtgaaccggggtttcctgaatgcaggtctgagctccgtttggatctgcacctcctctcccacctctccctgacaccagcttcacatcctgaagtttaaacaaggagacagcattacacgcactccagcag

SEQ ID NO: 10559 - DNA, 539 bp, Homo sapiens
  MAP TO CHR16.3; EXPRESSED IN BRAIN, SIGNAL = 2.7; EXPRESSED IN PLACENTA, SIGNAL = 1.5; EXPRESSED IN HELA, SIGNAL = 3.1; EXPRESSED IN FETAL LIVER, SIGNAL = 2.3; EXPRESSED IN BONE MARROW, SIGNAL = 2.5; SWISSPROT HIT: O00570, EVALUE 5.80e-01; EST_HUMAN HIT: AL110425.1, EVALUE 0.00e+00; NT HIT: gi14775217, EVALUE 1.00e-124
tccaaatgctagggatggagaatgtgcttgggcttgcataagacggggctatgcccctggctctcctcagctgtagtcagtattgctagctgcccacaactcacgccagtgggtgaagatgctggtctcagagaaccagagcttggcaggccccctcatacacctcttggagaggtagatgctggtcaactatgcaccattacctgtgagcagagcttactcctctgccattctctctccaggccctcagcatcctcatgctccctcacaacatcccgtccagcctgagcctgctcaccagcatggtggatgacatgtggcattacgctggggaccagtccactgatgtgagtgctttctgcaggcccacaggaggctgggaaaggcttgtgttaagcatttcttcaagaagcttgtgaaattgctttgatcataagcccctgcaggggggctgcagtgtcattcccatctaaggtatgaggaaggtccgtcaagaagccaaagtgggatctaggtcatcttcattcagggaccagcat

SEQ ID NO: 10560 - DNA, 584 bp, Homo sapiens
  MAP TO CHR16.3; EXPRESSED IN BRAIN, SIGNAL = 1.5; EXPRESSED IN PLACENTA, SIGNAL = 1.1; NT HIT: gi14778002, EVALUE 1.00e-119; SWISSPROT HIT: P20676, EVALUE 4.30e+00; EST_HUMAN HIT: BF966660.1, EVALUE 1.00e-119
agtgaaggtgcggttctcactttcccttcttctctgcagtatgacaatctcctgagccagtttggctgcatgcaggtgtcttcgtcctcctcctcacactccctgtcagcctccgacacgggcctgccccagaggtcaggcagcaacatagagcagtacattcacgatctggactcgaactcctttgaactggacttacagttttccgaagatgagaagaggttgttgttggagaagcaggctggcggaaacccttggtaagaacttatggacataagcaatgctttttgcagaattgcagcgtgaacacgtgggggcttatggtgggtgcctttgccttgtcactgcctccctcagcagccttggacgcttggccaaggagcacatcgtaagtgcacagttggaaacaggtgcttaggaggcagccggcccaggggctgagtgggttgtgaccgccgggcgctcccctcctctgccgggcatttggacctgctggttgtggccatggagtcactgtggtatggacagacgcggcctggacctggccacttgggagtttatgaggtttgctgttgtagcccctc

SEQ ID NO: 10561 - DNA, 543 bp, Homo sapiens
  MAP TO CHR16.3; EXPRESSED IN LUNG, SIGNAL = 6.1; EXPRESSED IN FETAL LIVER, SIGNAL = 5.8; EXPRESSED IN BONE MARROW, SIGNAL = 5.6; EXPRESSED IN BRAIN, SIGNAL = 5.3; EXPRESSED IN HELA, SIGNAL = 5.9; EXPRESSED IN PLACENTA, SIGNAL = 6.3; NT HIT: M60951.1, EVALUE 1.30e-01; SWISSPROT HIT: Q9Z207, EVALUE 2.60e-01
cttgtgcactctctccctcccaactgtgccttgcattagagatgtcaaagggaagaaaaatcatgtctggatgaaaagcaagaaagaaagatgctggggaaagagctatttttaaatgagcttacttttaatgtaaacacatttaaatcagagacagggagggccaaagagtggacctcaagcccagaaaacccgatttcagaggagaagatattaagattaccagttctctctctccttcacatttccaccagctcatcacccctcagaggcaagccaccaagcactccgggccacaaatcagaagtgccacagaagacagaccccagggaattgtaatgccacagcagggctgtgttggggagcagcagctctaattaaccagagctggcttgcaaaggtgccagggctgactggccactcagcccaaagagacagagagtggcaggagggttatttagaattgagcaaagcccccttcaatcaggctttcaacgtaattaggaagcagaagaacaattcagcagtggcctaagtggatgt

SEQ ID NO: 10562 - DNA, 518 bp, Homo sapiens
  MAP TO CHR16.3; EXPRESSED IN FETAL LIVER, SIGNAL = 1.3; EXPRESSED IN BRAIN, SIGNAL =   1; EST_HUMAN HIT: BF869745.1, EVALUE 5.00e-76; NT HIT: gi4557472, EVALUE 1.20e-01; SWISSPROT HIT: Q95116, EVALUE 3.70e+00
ttttgagcaaacctgatcccaaagcactttgtaggtgtgttggcccaccatcaccatcctgtaactggaatgctcaactccaattagaagtcttcctggtttgggtcatttggggctttggggaacctttgacccttttttctcccttccctttgggcagctgccctgggacattggccccattcacaattctccagtttcccagacaatgtggcttcttgtgctctttgctcgggcccctctattaaccctacagagaggtttcaggttactgaaacagacgccttgctttctgctgtgcataatgtcctttttccagcgagaaactgcagcccatcaggatctggttttcattaaaggcactttgggtcacttttttagcagattggtcaaaaggactgaaaggactgggcagggcgatgatgatttggaggtcaatagctttctctatgggccataccccttccccactgaaagattcccccactgcagactggaggaaatcagtcaggcaagga

SEQ ID NO: 10563 - DNA, 587 bp, Homo sapiens
  MAP TO CHR16.3; EXPRESSED IN BONE MARROW, SIGNAL = 1.5; EXPRESSED IN FETAL LIVER, SIGNAL = 1.4; EXPRESSED IN BRAIN, SIGNAL = 1.1; NT HIT: AL161585.2, EVALUE 3.60e-02; EST_HUMAN HIT: BF516502.1, EVALUE 3.00e-03; SWISSPROT HIT: Q28295, EVALUE 5.00e-01
tctggaatttcaccattcccaattcttctgcactgctcttatgttcaggtggctacactttcacttttttccccgaatgcacacacatgtataaatgtgtgactgtgttaacacattcataaaaagcttccgcacgcctacgcctgccaggcactgactgcattattcatcatttataataatcataaacctgacgatcagctgttgttggagtgagaataggttcccactccttgtgttccgaggtggaagtctctgcaatggggcagcattcctattctctctgccttggagagctcttccctgcagttggccccatccatggagctggtgttgagggaggcgcgctttcccaatcctccgtaccacaggtcgtacagggacagacagaggaggctgtggttttgctgctctgctggactgtggggaggtctgtgtaatttggggagaagtgttagctactcatcaaccagctgacctagaggtatgtcccccaattagccttatcagtaataaacgtgatccgtccttctccatctccctgtccctgcactcatctctctcgctgctctctgcttgtggtgtga

SEQ ID NO: 10564 - DNA, 576 bp, Homo sapiens
  MAP TO CHR18.3; EXPRESSED IN BRAIN, SIGNAL = 1.1; EXPRESSED IN FETAL LIVER, SIGNAL = 1.1; EST_HUMAN HIT: AI904584.1, EVALUE 1.00e-116; SWISSPROT HIT: P18490, EVALUE 4.20e+00; NT HIT: gi15828471, EVALUE 8.60e+00
tcaatttttgagtctgtttggcttttttctttttttaaaaaaagctttctagttctaaaattttatacttatagggaattctcaagaccttttaaaactagatggtacctgaaactaaaatatctacatgttatttaaagataatgcagctgcctgttgttgtgaggtttttttctccctttattcaattgcctctgaaattacaggtgagcagaatggcaacaggaatcctggtggattgcagattggtgacctggtaaatatagatctcgacctcgaaattgtacagtctttgcagcatggtcatggaggatggactgatggaatgtttgagactttaactacaactggaactgtttgtggcattgatgaagatcatgacattgtagtacagtatccaagtggcaataggtgggtgatatctctcaatttttgacaatgacaaataaaactaatatagagaaaagtcttagagaaagcaaataaagtgatacaaccaaatactcattaaagctagcttttagatggtaagtaaaaatccagaatatatattggtaaggtggagagaaacaaatg

SEQ ID NO: 10565 - DNA, 586 bp, Homo sapiens
  MAP TO CHR19.3; EXPRESSED IN HELA, SIGNAL = 3.4; EXPRESSED IN LUNG, SIGNAL = 3.1; EXPRESSED IN BRAIN, SIGNAL = 2.3; NT HIT: gi14762582, EVALUE 2.00e-87; EST_HUMAN HIT: BF981649.1, EVALUE 2.00e-87; SWISSPROT HIT: O00555, EVALUE 6.50e-01
acacagggaggcctgattcccaagggctgcccttcctgcttcccccgcctccccgaggaccagaacccacacccctgaccttgggaggctccagcaggagctggtggaagcagctgagccgcgggcgtagggcgtgcaaggcgcccacactggacacagtgctttccagggccccctgggccaggagctccagctgcccatccacactgctgaagaagctgttcacggtcacggactcggacctgcagcagggcagggtcgaaggcggagtgagcctagatggcctgtgcgcccacacaggagtaggcacaaggaccacgtctgcagggtctggaggaaaacgaggagccacatgcccccagcgccgctctcttctgaggcccttcagacaacacctggctggggtggggagcccgccaggcggcagcattggcagtccactgtgagagcacgggtgaggggtggaggcgggaaggcaaacccaacaggctagcggcctgtgtggtaaggcaggggcacgggggcctggggtccctcccaacacaagctgcagcagtggcctcagcctcagtgccctcacttgtca

SEQ ID NO: 10566 - DNA, 581 bp, Homo sapiens
  MAP TO CHR18.3; EXPRESSED IN HELA, SIGNAL =   1; EXPRESSED IN BONE MARROW, SIGNAL = 0.96; EXPRESSED IN BRAIN, SIGNAL = 1.5; EXPRESSED IN PLACENTA, SIGNAL = 0.92; NT HIT: gi13646818, EVALUE 0.00e+00; EST_HUMAN HIT: BG995842.1, EVALUE 1.00e-122; SWISSPROT HIT: P48743, EVALUE 1.50e+00
tttttattccatttctgtcccctactctactccacagattgaacggtttttcaggaagatatatcaatttctatttcctttccatgaagataatgaaaaagatctccccatcagtgaaaagctcattgaggaagatgcacaattgacccaaatggaggatgtgttcagccagttgactgtggatgtgaattctctctttaacaggagttttaacgtcttcagacagatgcagcaagagtttgaccagacttttcaatcacatttcatatcagatacagacctaactgagccttacttttttccagctttctctaaagagccgatgacaaaagcagatcttgagcaatgttgggacattcccaacttcttccagctgttttgtaatttcagtgtctctatttatgaaagtgtcagtgaaacaattactaagatgctgaaggcaatagaagatttaccaaaacaagacaaaggcaagtattaaaagattacttttacttagaggtttacactaaagtcaagttttgtttagcttcagaaatggtagacatttctgagtcacattgtatagcgtttcttgaaga

SEQ ID NO: 10567 - DNA, 557 bp, Homo sapiens
  MAP TO CHR18.3; EXPRESSED IN FETAL LIVER, SIGNAL = 3.7; EXPRESSED IN BRAIN, SIGNAL = 2.4; EXPRESSED IN HEART, SIGNAL =   2; EXPRESSED IN PLACENTA, SIGNAL = 1.5; SWISSPROT HIT: Q01484, EVALUE 3.00e-05; NT HIT: gi4826881, EVALUE 0.00e+00; EST_HUMAN HIT: AW467484.1, EVALUE 0.00e+00
tatctcaacccaacctccccaaactctggtttgagccaatatgtgttctattgttctcagagcaccagccgactgtacaacaattgttgttataaaaatgtttattgtttaccaaaaccagtggacctcttatcaaatgctgcttggtaacaaaatctatcacagttttaataaaaagaaaaaaaaaagaagctaactatttgtctcattgtcattagttagactttctgcaaggtcacttaatccagacttattcagtgcattaatcagattctcaggtgttgcatgaactccctcttgatcttgccaggcaaccaggagctgcttagctctcatcttcatgtcttcactgtcacactcaatctgcctaatttctgagtctttcatttccaagtagggagccagaatcttccattgttcacccagcttgttggcaaatacctctatttgttctcctgttacaggtttgtctcgccgaacatcaggacctagaaaatgaagagaatataaattatgcgcaattctgagtatacaacagaaatggaaagctatggggc

SEQ ID NO: 10568 - DNA, 518 bp, Homo sapiens
  MAP TO CHR19.3; EXPRESSED IN HELA, SIGNAL =   2; EXPRESSED IN LUNG, SIGNAL = 1.9; EXPRESSED IN BONE MARROW, SIGNAL = 1.5; EXPRESSED IN FETAL LIVER, SIGNAL = 2.2; EXPRESSED IN BRAIN, SIGNAL = 1.5; EXPRESSED IN PLACENTA, SIGNAL = 2.4; EST_HUMAN HIT: AW081820.1, EVALUE 1.00e-112; NT HIT: D10667.1, EVALUE 8.00e-06; SWISSPROT HIT: P10587, EVALUE 1.00e-07
tgatggctgtgagaggtgagggagggcatccccaggattctgacttagtgattagggggatgtgggctcatcctgagatggggacctgagggggaggaggtggggacaccgtgtcctcctgcccctcagtcctgccctggagaacttaaaggccaaagcaagttacaaggcagtaggcacccagtgcaggttgccctgggagcactgcctgctgaccactaacctcccacacactccccagctggaagaggagcgcgcccgcctggcagagcaattgcgagcagaggcagaactgtgtgcagaggccgaggagacgcgggggaggctggcagcccgcaagcaggagctggagctggtggtgtcagagctggaggctcgcgtgggcgaggaggaggagtgcagccgtcaaatgcaaaccgagaagaagaggctgcagcagcacatacaggtctggccccctgcatgcccaccaggccacccttcagacccctctgtctacaccatccacctttgcttct

SEQ ID NO: 10569 - DNA, 588 bp, Homo sapiens
  MAP TO CHR16.3; EXPRESSED IN BRAIN, SIGNAL = 1.5
tgttccttcaaggtgcaaacatattaccctaaaactccatggttccctagggactcaattcaaaagttacagggccatttttaggacatctctttgctataggaaaacaggacattttctgcaagatcaatgcttgaccaacatcagattcaatttttgcatccttcaaatcatatcaggctggaaaattaaaagtttcctctcatttttatcataattactataacaaccactaccatcttgtgtttgtccagtaatttcagcttttcaaagaaatttcaaatccattaacttagtctctaccaaggcctccgagttcgaggcattaaaggctccccaagtggaattaccagcgtgttataaacgaaagaatctgagtcaccaaaacagcccagcctctgtctgacctccgaccctcctcatctgacactacagcttttcccaaggcagctgcaggtgagatattcattcaaaccagcaggaagagaaatgctgaatctgcacaatcagaaccttctgctgacttagcaccatgtctacagagatgctgctcttgtccttcgtcctgagaaggagacacagtgtgcc

SEQ ID NO: 10570 - DNA, 577 bp, Homo sapiens
  MAP TO CHR18.3; EXPRESSED IN BONE MARROW, SIGNAL = 1.2; EXPRESSED IN LUNG, SIGNAL =   1; EXPRESSED IN BRAIN, SIGNAL = 1.1; EXPRESSED IN PLACENTA, SIGNAL = 1.2; EST_HUMAN HIT: AV726630.1, EVALUE 2.00e-04; NT HIT: AL161507.2, EVALUE 2.20e+00; SWISSPROT HIT: P48324, EVALUE 5.50e+00
atcacctgatgaggctggtgatagataagttatgtgatatgagccattttacattatgtaataatgtttcacaaacttatttgaccatagattcattttcatttttggtaagtacatttttagggccattccatgatacaatctttagaacaagttgcttttgaaaagagtgattttttgtctttccttaatgctgttagtgtctccatctttcaaacttcaagaccatggacgcccaaatgtacctttactgcctttccctgagactgtctctactattaaagtcactagccaatcctaaataaaattaagaaacatttctatcacttactctccactttattattattgtttttggtgtgtttttaggttgaccccttcatgtcggacttagctctgatgtgttcctcaacgcactggctcttcataatcatggcatcatttcaaaattttctaggatgtctaaaagtgcttttattcatattagcccaaatgagaaaggaagttggagagattttattctggtataaaacaggagatttgcctcccaaattgatgcatcacctctatcccctca

SEQ ID NO: 10571 - DNA, 535 bp, Homo sapiens
  MAP TO CHR18.3; EXPRESSED IN BRAIN, SIGNAL = 1.3; NT HIT: U96166.2, EVALUE 5.10e-01; SWISSPROT HIT: P21725, EVALUE 1.30e+00
ccttgcttaatgaagtgtcgcatttatttacaagatgacatgatgcatcacattacagtgaccataaatcagcttataaaagtggacaaatgggtcaataaagtgatgcatttacagacttaagatgaagatatttgcactcattctaatacttcccactttttaaaacatgctattctgagaccagctgaagaattaaactcgatgatttgcttcttcatatttttcatgctcttccatcactgtggccctgaattctatcgtggcctcaatttgcatcttacagtgcctggaaatctccttcccttcaaccttctcagcatctgtatctgcaagcacagctccatcgttatacatgcaaacccactccccaggctgcaggcttccaccgagaacgcacaaaatcactgtgatgtctgacaacaggacagaattgccgagggcactggctactcctgtctcggtgtttttttttaatctgcctggtggaaaaccatgagtaaccccttagatcacagggtgaatgcctacacct

SEQ ID NO: 10572 - DNA, 588 bp, Homo sapiens
  MAP TO CHR16.3; EXPRESSED IN FETAL LIVER, SIGNAL = 1.4; EXPRESSED IN BRAIN, SIGNAL = 1.9; SWISSPROT HIT: P19181, EVALUE 7.50e+00; EST_HUMAN HIT: BF948461.1, EVALUE 2.10e-01; NT HIT: AL163213.2, EVALUE 1.40e-01
aagctctggctcctaaagggaaatgtgagttagtcaatgcagacaccgtagatgatttattggttattgtgtgtgtttttatgtgtgatattgggctctgtgctgtgtgcctctcagctgtttgagggacagatgtcaggaggagtagtccaggcactcacgggttaactcaagccctgatcccaagggacccaggcattttaagagcagagcctcctccagtcatggcctgcccttacttctaaaaccttgaatgtgaaaaaagactgtcccccttccatctgatgcgggtggctgaatgttttcttcagccaagtcccaaaatgaggcacacgttagctgtttccaccccctcacctttcagcagcctgcgtccactgaaacggcttttggggagctcactggagtcctctccacatccagattccctagcctctttcccggtgtcctgtggggtcaggaccctgtctgagctgcggtccttgctgagctcctgagacgtggcttctgctcaagtctcctctcctcctcggctcttcctcgagcccttccagccaatcccctgaaagtgttgatgccctttctggt

SEQ ID NO: 10573 - DNA, 568 bp, Homo sapiens
  MAP TO CHR16.3; EXPRESSED IN PLACENTA, SIGNAL = 1.9; EXPRESSED IN LUNG, SIGNAL = 2.7; EXPRESSED IN BRAIN, SIGNAL =   2; EST_HUMAN HIT: BE902996.1, EVALUE 8.00e-01; NT HIT: U66060.1, EVALUE 8.50e+00; SWISSPROT HIT: O44960, EVALUE 2.40e+00
ggcacaaaacatgagccttcttggatttctctctacagcctccttccctggaaaattaccacccacattctggaccacttggctgccatctttgctggtgcccttgctagtttccctgagttggctggggtcaaggttgaagccctgggcctggatgatcctcacttccagtacgctgaaccatgttgagtcagccctccacttctgatcttgaatggactacaacactgtgaggtatgggatccaactacctgagagaagttcaagggcagatgatataaccttgaagtgtggaagatcggtccttcatggagtgaaacttgaccaaagggaaataggagatagaaggagctagaggaatagattcctcctcttttctcttttatagacccttctcctaagtgtacatcttttttgcaacactctctgtgaacatcctttctgctgggccaccagacttgctcagcatacctgatttgcctctgtgcagcacttataaagtagtgctcagcactgaaatgcaatgcatagcattacctcttatctttccctgtcttccctccatttt

SEQ ID NO: 10574 - DNA, 520 bp, Homo sapiens
  MAP TO CHR18.3; EXPRESSED IN FETAL LIVER, SIGNAL = 1.4; EXPRESSED IN BONE MARROW, SIGNAL = 2.6; EXPRESSED IN BRAIN, SIGNAL = 1.7; EXPRESSED IN PLACENTA, SIGNAL = 1.5; SWISSPROT HIT: P31361, EVALUE 3.20e-01; NT HIT: AB041009.1, EVALUE 2.00e+00
aggagccacaaccctgtatgtggggagggaagtttagtttacgtgaaatgtcaacagtctaccacaaaatgatgtaagagatgtgctagatccatgcaccttggtgttattggaacacataaggagcacctagtccaggcagaatggggtgcagagaagcttcatagaggaactgatggatggtgcactgaatcttcaggctgcagagagaagcctaggctggcatagtgaactgcaggagcacagcaggctcgaagagctcggcctgcggctgaaccacaagtgctcctctttccagggcatgaaggcgcatatgggggtggctggagatgaggccaacagctagtcagacagcaggttatgaagagcctcagatcccatcttatgctgacgtgggtgacgggcacccgtgaagctttttgtctctcactggggtctgttggttggggagcaggtgggagctggcaaggccacttatggagtctggttgaagaggctctgggactccagggagaattgt

SEQ ID NO: 10575 - DNA, 585 bp, Homo sapiens
  MAP TO CHR16.3; EXPRESSED IN PLACENTA, SIGNAL = 2.1; EXPRESSED IN FETAL LIVER, SIGNAL = 2.2; EXPRESSED IN BRAIN, SIGNAL = 1.5; NT HIT: gi13195643, EVALUE 3.00e-21; EST_HUMAN HIT: AL557248.1, EVALUE 1.00e-127; SWISSPROT HIT: P56677, EVALUE 5.00e-01
aagtactcggatggggcttccaaagccgctggggtgagcagccgccccacccctctggaaactgcagatgcccctctagcccctcatttagggtgggacctggggcagagcctttccctgctggggcccccctggggtctcatgtgggtcccgatgatgattccaaagtcctctcattaaagactgactctacccggggttttgaaaggctgtttgtcaaaccaagttcacagctcattttcccacttccgttactcacaggggtctgtgcctgacactcgggctgtttgtccaagcagatctgaaatgggccgtgaggctggggcagcagcctcccggagcagggagtcagccctgtgatgcatcccatccaccctgtccacaggtgtttggcttctttgctaccatcgtgtttgcaactgatttctacctgatctttaacgacgtggccaaattcctcaaacaaggggactctgcagatgagaccacagcccacaagacagaaggtaagcggctgccctgatcaccccagcagtgctgcaacaggggcctgccctccctcggggatgccagctagtttgaggc

SEQ ID NO: 10576 - DNA, 541 bp, Homo sapiens
  MAP TO CHR14.3; EXPRESSED IN FETAL LIVER, SIGNAL = 3.1; EXPRESSED IN BRAIN, SIGNAL = 1.2; EXPRESSED IN PLACENTA, SIGNAL = 2.1; EST_HUMAN HIT: BG721837.1, EVALUE 3.00e-62; SWISSPROT HIT: Q14259, EVALUE 4.00e-18; NT HIT: D85758.1, EVALUE 2.00e-62
caaagaagaggcacatggaacttctgaattaggatcctttctggatactaactatatcaattagcaaagttatttttttctgtgcctttggctttatgttgccaatctcttatttctgtaagagaaatattaattactatacactatgcaaatgcaaagatcagtataaggaacataattcgctcccaataccataaatcacctcaaacagacagaaaagcaatagaaaatacaagataaaagacatgttggctaatacttacaccaggcagctgaggtctgccagatcatcgatgaaatcaaacaactgactgatgtcatatgtgatagagggactgttgggattcattcttttcagatgttcttcatacattttacaaacacctaagaaaggataggaaaaaaagcaaaatcttacaatcgcatacacttctagatatgagcagtgcttatgagctgtgctatatgttgatatcatatttactttaataaagttgggctggggaaaagatgatagattgatggcttttgattattgcca

SEQ ID NO: 10577 - DNA, 508 bp, Homo sapiens
  MAP TO CHR14.3; EXPRESSED IN BRAIN, SIGNAL = 2.7; EXPRESSED IN HELA, SIGNAL = 1.8; EXPRESSED IN PLACENTA, SIGNAL = 1.8; EXPRESSED IN LUNG, SIGNAL = 1.6; EXPRESSED IN BONE MARROW, SIGNAL = 3.1; EST_HUMAN HIT: R25359.1, EVALUE 7.10e-01; SWISSPROT HIT: P50319, EVALUE 1.20e+00; NT HIT: AJ271741.1, EVALUE 7.50e+00
tcagagcaaggtgactggtgtggccttctcaccagggatgacagcactccctcagcagaagcagggagccacagggcacacagtctgcttgctcctccattctgcagtaatggcagcagtatccatctttggagtgtgcaaaagtgcccagcccccctgcttcctccctggtatagaggtggcagcaacggtggcagtgcaagggcaggacacaggcttctggggactgggagctaagaatagcatcagcctgcagctgctcagggttcaaaagcctgtggaattccacacgagttcaagcaatgattcagcacaatctcaaggcagttccttgttagtctgaaagcccagggatatccaaggactctactgtagttaggactgtaaaagtccatggcaggagtgtggagccccagaggtctcactcacctgttccccatgtcaggtagcttctcccagcttcacactgatcccagctcagcaggctacctggcttcactctcctttg

SEQ ID NO: 10578 - DNA, 539 bp, Homo sapiens
  MAP TO CHR19.3; EXPRESSED IN FETAL LIVER, SIGNAL = 1.7; EXPRESSED IN BRAIN, SIGNAL = 1.6; EXPRESSED IN HELA, SIGNAL = 1.4; EXPRESSED IN PLACENTA, SIGNAL = 1.6; SWISSPROT HIT: Q95209, EVALUE 5.80e-01
gaattgtgtcccctactggcacagttgagtgactcgggtggggactgcaggctctggtcctggtcccctcctgtctggccacccctcaggggacactgggagggtatcgcggctaccaggctgcctgtcgcatttatggagggccagtccaccaccaccttgtactcagctgacatctggaagcacatccaggaggacactgaaggctcagaaagtgcctgggcccctgtgttcaggtgtgaaatcaaatctctgaggccccagaccagagccatcatccttctgcccccactggactgagactcacatgcccagaactgcacttgtggatgatggtggtacatccagggcagaatacacggcagacaggtcagctgatgacagtgtctgctggccagggtcagtccctgactctcttgtataatgtgtaacccaacagcgcgtgcccagggggctggggcactccagacaccggcccaggccctggcttgactcaggcctgaccctaaaggaacccgagtaagtgtctcagagccggg

SEQ ID NO: 10579 - DNA, 549 bp, Homo sapiens
  MAP TO CHR16.3; EXPRESSED IN BRAIN, SIGNAL =   1; EXPRESSED IN FETAL LIVER, SIGNAL = 1.1; SWISSPROT HIT: P11371, EVALUE 3.00e+00; NT HIT: gi8923644, EVALUE 7.00e-96; EST_HUMAN HIT: BE926892.1, EVALUE 1.00e-95
tgcatcttgacatcatggagaaatcctttttgagagaggtagaggggaaaatttagtgatttccaaaatcatacatcatttatggattttaattcactttatttatgaatataaactataatatgtttaatttatcttgcttatacttggtatgtttataagtatttaagtctaatctcttgaagttttaatttttccctggcatttgtatataaaatagtatgcatgagttattgccacattcaaagttggtacttgttttggagactggtgttagtcatactaaatgtgttttgttgtttccagaacattgggtgctttctgcttgaagttaccaccaaagatccttcccttgtggtagcaggagaagctttggatgccctctttgatgtttttgcagatggtaaagaagccgaaagagcctcgattcaaattaaattattatctgctctgaaagaattccagccggtctttaaaatgaaggtttgtagccatttaacttataaatacataagtctgaacattctgtggggacaagggtgtgtgtag

SEQ ID NO: 10580 - DNA, 511 bp, Homo sapiens
  MAP TO CHR18.3; EXPRESSED IN HEART, SIGNAL =  72; EXPRESSED IN HELA, SIGNAL = 1.5e+02; EXPRESSED IN FETAL LIVER, SIGNAL = 1.2e+02; EXPRESSED IN BRAIN, SIGNAL =  21; SWISSPROT HIT: P97351, EVALUE 3.00e-87; NT HIT: gi15304757, EVALUE 0.00e+00; EST_HUMAN HIT: BG775327.1, EVALUE 0.00e+00
atgttcagggcaaaaactgcctaacttccatggcatggatcttacccatgacaaaatgtgttccatggtcaaaaaatggcagacaatgattgaagctcatgttgatgtcaagactaccgatggttacttgcttcgtcttttctgtgttggttttactaaaaaacgcagcaatcagatacggaagacctcttatgctcagcaacaacaggtccgccaaatccggaagaagatgatggaaatcatgactcgagaggtgcagacaaatgacgtgaaagaagtggtcaataaattgattccagacagcattggaaaagacatagaaaagacttgccaatctatttatcctctctatgatgtcttcgttagaaaagtaaaaatgttgaagaagcccaagtttgaactgggaaagctcatggagcttcatggtgaaggcagtagttctggaaaagctgctggggacgagacaggtgctaaagttgaatgagctgatggatatgaaccaccagtccaa

SEQ ID NO: 10581 - DNA, 551 bp, Homo sapiens
  MAP TO CHR16.3; EXPRESSED IN PLACENTA, SIGNAL = 1.7; EXPRESSED IN HEART, SIGNAL = 2.4; EXPRESSED IN LUNG, SIGNAL = 4.2; EXPRESSED IN FETAL LIVER, SIGNAL = 3.5; EXPRESSED IN BRAIN, SIGNAL = 3.6; NT HIT: gi14779225, EVALUE 1.00e-111; EST_HUMAN HIT: AL553612.1, EVALUE 0.00e+00; SWISSPROT HIT: O76071, EVALUE 3.00e-36
ctgacctgtcctttgcttcctgggccacacagacacatgttgggtttcctttcactcttcccccagctcttagcttctgccagctatgatgacacagtgaagctgtaccgggaggaagaggatgactgggtatgctgtgccacccttgagggccatgaatccactgtgtggagcttggcctttgacccgagtggccagcgcctggcgtcttgtagtgatgaccgtactgtgcgtatctggcgtcagtatctaccaggcaatgaacaaggtgaggtccattagtagagctaaagaagacccatctctcaaggggttcacagtctgctaagacacgtacatgagtcagagcaaatgggggtaaaaggtaagatgtgctacaagagggctctggatagagtgctggaagaatcaggaaagttttgtagaatgggttgtttcatctgaatttaaaagggtatgtaggattttaacatgagaatttcacgtgagaattcaagtgaaaactcaacagtgtgagtaaagataacaatggcgggaatgcttagactgag

SEQ ID NO: 10582 - DNA, 518 bp, Homo sapiens
  MAP TO CHR19.3; EXPRESSED IN FETAL LIVER, SIGNAL =   3; EXPRESSED IN BONE MARROW, SIGNAL = 2.4; EXPRESSED IN BRAIN, SIGNAL = 2.5; EXPRESSED IN HELA, SIGNAL = 1.6; EXPRESSED IN PLACENTA, SIGNAL = 1.6; SWISSPROT HIT: O75346, EVALUE 5.00e-18; NT HIT: gi16163579, EVALUE 2.00e-56; EST_HUMAN HIT: BE673426.1, EVALUE 1.00e-112
tgtacctgttcatgttcatgcccttaaatttatactttattatctagaaaaatatatgaactgatgttgtggatcttatgcttctcttttttctcagagttagagaatattttggagagtatttctgtgttgaaaattattttattggataattttcatcagtactataagtcagaaccaggtgtctttactctctcatttcaccttaagtcaaattaaaaatttcattcatggtcacttggtgaaaatgtgtgtgtgtatttttcagaggacattacaattcagagatgtggccatagaattctctctggaggagtggcattgcctggacacagcacagcggaatttatatagggatgtgatgttagagaactacagaaacttggtcttccttggtgaggacaacttgaatatataattcataatatacacaaaaggtttatttctcttttttgtagaatgtgttttagtaatttgttctttttataaatgagtttcagatccagtttttcaagaaa

SEQ ID NO: 10583 - DNA, 542 bp, Homo sapiens
  MAP TO CHR18.3; EXPRESSED IN PLACENTA, SIGNAL = 1.3; EXPRESSED IN HELA, SIGNAL = 0.99; EXPRESSED IN FETAL LIVER, SIGNAL = 0.99; EXPRESSED IN BONE MARROW, SIGNAL = 1.9; EXPRESSED IN BRAIN, SIGNAL = 1.8; NT HIT: AF318300.1, EVALUE 3.30e-02; SWISSPROT HIT: O96433, EVALUE 5.90e-01
cctggtcctaaggcagacagaacccaggcgcaaacagtccagcctggtccacacgacaggaatagccctcctgaaggtggacgtgaaagcttggacaaagctgtttgtgtccaaggagaggaaaggctaaaggtaagtcgaccacaggccagcgaggggcacacctggatcccaccagcccctgtggggggtgcttcaggattctgaccacaggattctgaccgcaggagcacccatcccgaggcactcaccactttccaccatgaccgccacaaacctggcacagcagcactcggcttcagcgaaggtgctctgaagtccaagtctgctccgcgcatccgggctgctctctgtcccagcctgcgctgcagcggcatcacccccacgctgcggggcaatcccaactttcccggcgattttcagagagctggaaagatgtgaatggggacacacatgttatgggatgtaacggacctcaactcacaggacaggaaaactacaagtgtccccgagcacacagaagaattgcaggggagatgaga

SEQ ID NO: 10584 - DNA, 512 bp, Homo sapiens
  MAP TO CHR14.3; EXPRESSED IN PLACENTA, SIGNAL =   3; EXPRESSED IN HELA, SIGNAL = 3.4; EXPRESSED IN LUNG, SIGNAL = 2.7; EXPRESSED IN BRAIN, SIGNAL = 3.8; NT HIT: X66127.1, EVALUE 7.60e+00; SWISSPROT HIT: Q01049, EVALUE 8.20e+00
tggaagggttagaggagcagactataggctgggtttccaggagtgaccctcaaattaacactgcagaaccagctcaccaagggatcactgcctctgccatgatcaggaagccagaaaagaaggaaggtgccaccacaattcttagctctaggtccatactgcctctgccgagatccatgtcagcatagtgtctaggaagccaggggccaaacactggcaccactgtcactgaagaatcaaaaacctccacagccatgcatgtcagtctaaacaatggcagaagtaatagatggtctctccctcatggtagccacacacatgttccacgtctttcagtctttgcttctgtttggcagaggctaggtccatgaggggaaatggagctgcaaggaaactgtgaagtgtagtctttagttttccagtcccaaagaagcagaaaggcatgctagaaggaggttggaataaagtacagggagccagtacatgtatctgcctcccacttctttatgctc

SEQ ID NO: 10585 - DNA, 599 bp, Homo sapiens
  MAP TO CHR16.3; EXPRESSED IN LUNG, SIGNAL = 2.4; EXPRESSED IN BRAIN, SIGNAL = 2.2; EXPRESSED IN HELA, SIGNAL = 3.4; EXPRESSED IN PLACENTA, SIGNAL =   2; EST_HUMAN HIT: AL523156.1, EVALUE 0.00e+00; NT HIT: gi16166422, EVALUE 0.00e+00
tccttcctggtttgtgtgtgttaattctctctctctctctcagacacagaagtctcatgttgcattttccaaattttatgagtgatgatactttttccattactgctgcgtccctgttttacaatgcaaaatttaagtacggtcgttgcccatggtgattaaagtgtggttatgggcaggaagacagactgtgtaaaaaaggaatgacatcctggctcctcatcttcttcatcagcaactaccataaccagtttgcgagtcaaatggcatttcctaacggcaggcatggcggcccctgaaagacaacagctccctttctgcttcggacaccactcaaacatttagacgcagctctatcccttttcctagctagagaaggtgatgccttcttccattactcagagatgttgagacgttttcagaatttcttgttgaaatgaaaaacatcaagataaaggacgcctttcaggcattagctaaacttccacttcataactttcggcgagacatggtgagcctcctggtgtagagttcttttgtctttgtatggaatgactttttgctgtgatggttttgaatgttgggtttctgctgtctgc

SEQ ID NO: 10586 - DNA, 501 bp, Homo sapiens
  MAP TO CHR19.3; EXPRESSED IN PLACENTA, SIGNAL = 1.2; EXPRESSED IN BRAIN, SIGNAL =   1; SWISSPROT HIT: Q99742, EVALUE 1.00e-08; EST_HUMAN HIT: AI916513.1, EVALUE 0.00e+00; NT HIT: U51628.1, EVALUE 3.00e-45
acctgggaggtcacatcttgcaggtgagtgaggccccttccctgcctgccgctccttgctaccacctagcggccgcctctggagaacagcagcctcttcagcatccatctattgtggggggtacctggactgggaaggcgaatgctcaagatccctccactccctgccccttccgaggaccactgaagccccctccccaccaaaacagtccacctcaggtggagacccaggtttcagaacctcttaccacttggcggctggacagagggacaccgggtcctctccttccccctccctgtctctcccggctctagtccctggatggctttgtgttcgccttgaaccaggaaggaaaattcctctacatctcagagacagtctccatctatctgggtctctcacaggtaagggacccccagtggacctggattggctcagccaccatctcccttgccaggcctatgcatatccttcctctctcctggtctcaccatagcagca

SEQ ID NO: 10587 - DNA, 591 bp, Homo sapiens
  MAP TO CHR19.3; EXPRESSED IN PLACENTA, SIGNAL = 2.7; EXPRESSED IN FETAL LIVER, SIGNAL = 4.1; EXPRESSED IN BRAIN, SIGNAL = 2.3; SWISSPROT HIT: Q05310, EVALUE 1.50e-02; EST_HUMAN HIT: BG532487.1, EVALUE 5.00e-67; NT HIT: gi13631057, EVALUE 3.00e-52
actacccttgtgggatgctgtctctttaactctgtgccacgttgtatcccgtgagttcttgcgtttttccgccccgctgtatcccatggttccctgtgccttccggctacgactgctcacagtcccgcctcttccgctgcgtgccggaccatggcgcaggggcagcgcaagtttcaggcgcacaaacccgcaaagagtaagacggcagcggcagcctctgaaaagaatcggggcccaagaaaaggcggtaaggagcggcccggggacttgggggcgaggtggacccccggcttcccggcctcacgtgagcacatctttccccaggtcgtgttatcgctcccaagaaggcgcgcgtcgtgcagcagcaaaagctcaagaaggtgtgcgggggcgagagatggagcccggagggcggcgagtagcgaggggtggaacccggaggacggcgaggggggatgggtggagcccggggatcagtgaggggagagggtggatcctggggacgagctaggagcgaggggatagagccaggggccgcgttaggagcgaaggatggagcccggggcgcagagaggggtaagaggtggaagc

SEQ ID NO: 10588 - DNA, 501 bp, Homo sapiens
  MAP TO CHR19.3; EXPRESSED IN PLACENTA, SIGNAL = 1.7; EXPRESSED IN HELA, SIGNAL =   2; EXPRESSED IN FETAL LIVER, SIGNAL = 2.7; EXPRESSED IN BRAIN, SIGNAL =   2; SWISSPROT HIT: P04485, EVALUE 1.20e+00; EST_HUMAN HIT: BF841711.1, EVALUE 1.80e-01
ctacagagccaggtgagcagggctgggagggcaggggtgggcctgactccccctctcacctgcagctgcctcaggtcccaggtcctggggaagaggcgggagcggcacttgcagtccttcagcagaagcgactcttcctagacagcaaaggcacaggttagccccagcaggaggggtggaggttagaccactctgatgggattggaggatggctgacaacaggataggggaggttaactgctgggaggatggtagaggaccctcttcttcaggaaaacatgagtcagtccctgcagtaggagcatgagatagcccactgcagggagggtggaggctagcccagtgaaggaagctgggagtgggaaagcatggtgacccttggagtgcgggtggaggctagtccatggcaggagggcagggggagactcactaaggcatctttggccctcttaaaggcctgcagctcctgtggagacagggacttgaactgggctatgtggc

SEQ ID NO: 10589 - DNA, 587 bp, Homo sapiens
  MAP TO CHR14.3; EXPRESSED IN BRAIN, SIGNAL = 1.5; EXPRESSED IN PLACENTA, SIGNAL =   1; EXPRESSED IN HELA, SIGNAL = 1.3; EST_HUMAN HIT: BF792854.1, EVALUE 5.00e-76; NT HIT: X89398.1, EVALUE 4.00e-76; SWISSPROT HIT: P57704, EVALUE 1.90e+00
cttcaaagatcaagggccagcggacctggcagagactggcatgcctgccctgcagggctgggacaaggggacttttctcagcaaaagcaccccaacacctgtcactgaaagtctaacgaggctaaaccatggagcagcaggcaccaaactagggctgtgcctaaaaggtgcacatctcccctctttagccataaacgcaagggagataaagagaatcaagtgagtatttgacctcattgttatttttaattctataaatctgagggcattcctaagaaagtattccttgctgagaaggctctcaaagaatccgattctctacatcacaaatgtggaatctggaatattcgtgtgcctggtgaagttagcaaatacccaatcctccctaccaatgttctctcacatagattagaaaaagcaagatttcagttctttgagctaccttgaatttttttgtcttgtggaagccgactgtgactgtgagaatgttctgagtcatccctaatccacgcatcatgggaagatatttttcttgttcttttaagcatttttttcctaaaaaatatgctttcttgtttctgcgctcc

SEQ ID NO: 10590 - DNA, 541 bp, Homo sapiens
  MAP TO CHR18.3; EXPRESSED IN PLACENTA, SIGNAL = 1.3; EXPRESSED IN BRAIN, SIGNAL = 1.4; SWISSPROT HIT: Q92889, EVALUE 1.70e+00; NT HIT: AF197462.1, EVALUE 3.30e-02
ggtttcctgctggtttttaggatgatgtcttttggttacattctttcaacttgtaaaatattaacttccaattcccatgggggaggacccctgagtggtgctatttcagtgggacagaatcacagcattctttcccacctccttagctgccctgtgctccacttggaagcacctgtggccaaagctcataggcacttgtgtggcaggaagaacagatgtgaagttctgtggaaaagaaatacaacacaaattggcagaacacagtaacttaaaaaataaatctgaaagtcagtcctggagagcccatctttgggtcctggctttgattggaaagagttatggttttgttggggtaatagcagctgatctttcgtcctcccacagaatcctgccagagccaacacttggaagcacacagctaatgagaggatttcttccaaggttcttaaccaaatgctctttgatagtggtggttgtgaggcggaggaagatgcttctgctgaagagggggttcctagaagcagcaaccaaagcccttaaa

SEQ ID NO: 10591 - DNA, 556 bp, Homo sapiens
  MAP TO CHR16.3; EXPRESSED IN BRAIN, SIGNAL = 2.7; EXPRESSED IN HELA, SIGNAL = 2.2; EXPRESSED IN PLACENTA, SIGNAL = 2.6; EXPRESSED IN HEART, SIGNAL = 2.7; EXPRESSED IN LUNG, SIGNAL =   2; EXPRESSED IN BONE MARROW, SIGNAL = 3.2; SWISSPROT HIT: Q14774, EVALUE 1.00e+00; NT HIT: AJ303140.1, EVALUE 0.00e+00; EST_HUMAN HIT: AI762326.1, EVALUE 5.00e-82
cttgctctttggccattttctccagaagaaagctgtgagttagtgtgttgacccatttcatagttgggaaacctgaggctctacaagacttattcagggccaggaaggaagcagagtgaaagaggctccaccatttcccaatctctgcttaccacaaacttagagacttttctctcctcgatgcgagctgaagcgatctcaaagagcagtttgacgtgcttccagcggcatttctggttctgccagtactgctgaagctcccgcgtggtcatgctggagttggagctcaggccactgtgtgtgtctggaaggacaacacccttaaggatctgcaccctgtcagtgcacttccgaggcatgggcttggggagatggctgggtctatctgagatggcatatcagaactcctgaagagtattgaatatccctctctcccaccccgccatttataggcccaattggggcatcagacagacctctgtgcccagcctggcagaatccaccctaccaccgacaatcccaaatagcccatcacccccaagtggtttcacagctt

SEQ ID NO: 10592 - DNA, 523 bp, Homo sapiens
  MAP TO CHR19.3; EXPRESSED IN LUNG, SIGNAL = 1.1; EXPRESSED IN BRAIN, SIGNAL = 4.5; EXPRESSED IN HELA, SIGNAL = 1.1; EXPRESSED IN PLACENTA, SIGNAL = 1.1; SWISSPROT HIT: Q16478, EVALUE 3.00e-15; NT HIT: gi14756303, EVALUE 6.00e-56; EST_HUMAN HIT: AA977136.1, EVALUE 2.00e-53
tggggatcagcatcctctaccgagtgcacatggtatggttcccctggagaccatgggctgcttgcctggcatggaggctcagggcctgcgagtgggagccagacagccccaggacctcagatgggccggtcaggctcccaggtccctggtagggcaggggctgggtgtgaggctcaggccaggggtgtctccgggtctcactccctctccccacagggccgcaagcctggctacttctccttcctggaccccttctcccctgctgtgtggctcttcatgcttcttgcctacctggctgtcagctgcgtcctgtttctggctgccaggtgagtccactgcctactgggaaggaaggggctggaggaggcacgagccgaggcctctgggaccgacctgcctcttctctctcggaactgtccttggcctcccctttggggcctcggattccctgtgccctcctttctcagttttgtgccctgtgtctgagtctcattcttccccttgtggctctgactgtgctctg

SEQ ID NO: 10593 - DNA, 519 bp, Homo sapiens
  MAP TO CHR14.3; EXPRESSED IN BRAIN, SIGNAL = 2.7; EXPRESSED IN PLACENTA, SIGNAL = 0.91; EST_HUMAN HIT: AV753395.1, EVALUE 0.00e+00; NT HIT: gi15300984, EVALUE 1.00e-106; SWISSPROT HIT: Q9JHU4, EVALUE 5.00e-30
tggggataaagaaattaggacttgtgagacattttaaaggtaatatcctgctttttaaggaatgctagcattttgtaagatcttcataatcatttaagagatcagctacttaccctattccagagggtttaatacagaaaagtctctcatttcttagctcttctaagcagctagctgtcctttctctcattggagttggagctcctggctgttttggttcattctcaccatgctttgctctatcttctcccacccatcgaccctcatccactcctgctgccactcagctgtgaagtcgatcaagaagcagcacctggtggaggtgaggtccatggccaaccctcctgctgctgtgaagctggcgctggagtccatctgcctgctgctgggggaaagcaccacagactggaagcagatccgctccatcatcatgcgggagaacttcatccccaccatcgtcaacttctctgcagaggagatcaggtgagaaagtggaagtgccaaggtattgccagaaat

SEQ ID NO: 10594 - DNA, 588 bp, Homo sapiens
  MAP TO CHR14.3; EXPRESSED IN FETAL LIVER, SIGNAL = 1.1; EXPRESSED IN BONE MARROW, SIGNAL = 0.69; EXPRESSED IN BRAIN, SIGNAL = 1.4; EXPRESSED IN PLACENTA, SIGNAL = 0.9; SWISSPROT HIT: Q13201, EVALUE 7.50e+00; NT HIT: U10927.1, EVALUE 1.40e-01; EST_HUMAN HIT: AA776743.1, EVALUE 0.00e+00
agggcattggaataagagggaagatgggtagagagcggtcttgatgaatttgaaatagctgtggggaaaggaagagtttatcaaacatgcagaagagggctgttggctcacctgatagtccgctgacattagaggacatggatttacggtggtaccacttcacagtatccatggtagaatgatggtacttcaggagctttggtctctgtaagtcctaggaatgaagacaatgagtctggttttaaagatttttttaaagttattctcctgttattgcctgctctcatgctgagctccaagaaaaagaataatatgacacaggttggtgtagcttatcagtcctttccacaacattatatctttgattagttcttcccattttcaatcctcccatccacaacaactgtcactccatagtaagtagaaaacatatcaagagagatatagagagcaaatctggcagttagaatttcatcccaattcagagatctttgttcttggaagttttgcctatgaactttgcttttctcttccatgctacttgcaccttgtggaataaggtgcctaacttgcagcagtgaaaactgc

SEQ ID NO: 10595 - DNA, 590 bp, Homo sapiens
  MAP TO CHR14.3; EXPRESSED IN FETAL LIVER, SIGNAL =   1; EXPRESSED IN BRAIN, SIGNAL = 1.1; EXPRESSED IN PLACENTA, SIGNAL =   1; EXPRESSED IN HELA, SIGNAL = 1.4; EST_HUMAN HIT: AW847612.1, EVALUE 1.00e-95; SWISSPROT HIT: P02549, EVALUE 1.10e+00
aggaaaaaggggtgtgtgtgtgtgtgtgtatacacattcgtatatttactatgtttatttgttgactctagccagttattccgactcttactttctgctatatttaaattttaagtttctaaattttaaaactctcctttaggagttttcaaaagaagttgatgaaaaatcctccttgaagactgccgttatcagtatcgggaaccagcttcttcacctgaaagaaactgatacagctacactgagagcttctttagcacagtttgaacaaaaatggacaatgctcataactcaacttccagatattcaagaaaaacttcaccaggtaagtctttagagcctcagcatttgaattagcattcacttgttagctcataactcttttaaaattatttctctgactcaataattttcattgacactacctatttttctctggcaccactgaatataagtcttaattactggaccctcctccaatgggatttttcttaagagagaaatcaggcttaattactttatttctcagtttatctttgccactgtgttagtttatgtgaaggtcattgtcattgttttggggtcgctta

SEQ ID NO: 10596 - DNA, 594 bp, Homo sapiens
  MAP TO CHR18.3; EXPRESSED IN BONE MARROW, SIGNAL = 1.3; EXPRESSED IN FETAL LIVER, SIGNAL = 1.1; EXPRESSED IN BRAIN, SIGNAL = 1.1; EXPRESSED IN PLACENTA, SIGNAL = 0.98; SWISSPROT HIT: P19550, EVALUE 1.50e+00; NT HIT: AF228731.1, EVALUE 1.40e-01; EST_HUMAN HIT: BE963521.2, EVALUE 2.10e-01
tggggtggtatcagacatgagtcctctagtgtttttggaagaagagaataccaaatagagattagcactaaaagtttctattccatggaggccttccatgtctccttaaatgataataataaagccatttgtgaatatgtttcctactaatagcaaggcaataccttttaactgcatttgaattaatctcaagtaggcatattcaggatcattagaaaaccttcactttttctcagacctgaccagatatgcggtaacagcccgagagatgggagtccttgtttccaaactctcttttaacacctattacctggagatgctcatggccttagaaactgataagggaaatctgatcaagactgggtattccaggaactctcaaaaatattctgttaataaggaaacacagtttctcccatgagaacaagaatatggttttcccaatttttgccttgattatagattataaaaaagactagctctctactatatgagggaaagacagcctttttaaaagtagaattccaaatattccctgaaatgtcacagaaaatgggaaaggtaccagaaataacactcccgagaacagcatct

SEQ ID NO: 10597 - DNA, 599 bp, Homo sapiens
  MAP TO CHR19.3; EXPRESSED IN BONE MARROW, SIGNAL =  16; EXPRESSED IN BRAIN, SIGNAL = 1.1; EXPRESSED IN PLACENTA, SIGNAL = 1.5; EST_HUMAN HIT: AI936473.1, EVALUE 1.00e-126; SWISSPROT HIT: Q16617, EVALUE 6.00e-23; NT HIT: AF305941.1, EVALUE 0.00e+00
gctgcaggtaaggactctggactggactggggcatcgcgagccagcgaattcctgccgaggagctgagccatctctcttgtccttgtccccagccatctccatggtggtggccatggcggtgtacaccagcgagcggtgggaccagcctccacacccccagatccagaccttcttctcctggtccttctacctgggctgggtctcagctatcctcttgctctgtacaggtgactatcctgcccactgccctggggagctttgggagggtccagttggggtccctgaggacagagggcaggggcaagtgcttaaactctttctggctccccaggtgccctgagcctgggtgctcactgtggcggtccccgtcctggctatgaaaccttgtgagcagaaggcaagagcggcaagatgagttttgagcgttgtattccaaaggcctcatctggagcctcgggaaagtctggtcccacatctgcccgcccttccagcccttccccagcccctcctcttgtttcttcattcattcaacaaaatttggctggaatctggttattttgagattaattctgccaagacataagccaactgtctgcca

SEQ ID NO: 10598 - DNA, 522 bp, Homo sapiens
  MAP TO CHR19.3; EXPRESSED IN FETAL LIVER, SIGNAL = 2.1; EXPRESSED IN BONE MARROW, SIGNAL = 1.8; EXPRESSED IN BRAIN, SIGNAL = 1.4; SWISSPROT HIT: Q9MUM8, EVALUE 2.50e-01; NT HIT: AF424561.1, EVALUE 7.70e+00; EST_HUMAN HIT: AA702248.1, EVALUE 0.00e+00
gtggcgatgagtttttaggccaaggaaggaataatgttttatgtaccaaagccttttgtccccattttccatcatacgaatagtattccctgttgctaagccgatgatacattacccttttcccataggtgtgagtggcggtctgaatggagaagttcaatagttctgattgcagatcctatgcagaagagataataaggaaaataatctttgtctcctggattaagctgaggctggcaaagagtgaaatgtcccaagccctctaacaacaaacaacatactttgtgttgtcctggatgctggtctggttgccaaatatgtggaactggccccatatgcgtgtactgttgtccatttcatgagagtaggcttgaggacaccatgggcaaggatctgatggttgccagcctaagcgttttagacttttgacccagagattttttgttttgggtgtggaaaaaattttagaggatagggtctcaagatataatcctttttataggcggcaggtcttaagagatg

SEQ ID NO: 10599 - DNA, 521 bp, Homo sapiens
  MAP TO CHR18.3; EXPRESSED IN FETAL LIVER, SIGNAL = 0.92; EXPRESSED IN LUNG, SIGNAL = 1.2; EXPRESSED IN BRAIN, SIGNAL = 1.1; EXPRESSED IN HELA, SIGNAL =   1; EST_HUMAN HIT: AW381394.1, EVALUE 1.00e-58; SWISSPROT HIT: P01014, EVALUE 6.00e-07; NT HIT: D88575.1, EVALUE 3.00e-61
agggagactggttaggaggctattgagttatttaatatgagaacgcagtggtaaaagggtgggctttatccattctctattagcctcctcaaatccatttcagataaacttaagtttaaacagagtatttgctgaacaaattcaacttcagatacaccagatccccttccagtcccatttccatatatccctatatttacatactcatttttgaggcagagttgaacctttgaataaagcagtcgaaattaaaagttcaaaaatacatttcttatatacttagttggtgatgatttgtaaatacgagaactatattcttctttataggactacattgagtgtgccgaaaaattatacgatgccaaagtggagcgagttgactttacgaatcatttagaagacactagacgtaatattaataagtgggttgaaaatgaaacacatggtgagtattgaaataccctatttttctacaagatttgtcagttatatgtgaatactgggaacaaaagctgggagtc

SEQ ID NO: 10600 - DNA, 565 bp, Homo sapiens
  MAP TO CHR14.3; EXPRESSED IN BONE MARROW, SIGNAL = 1.1; EXPRESSED IN BRAIN, SIGNAL = 1.3; EXPRESSED IN PLACENTA, SIGNAL = 0.87; NT HIT: AF209773.1, EVALUE 2.10e+00; EST_HUMAN HIT: BF949456.1, EVALUE 7.00e-60
gaaaagctggccctaaaaggcagtctcgctcaatccccagcatctacttggatctgggcaggcagccacagaaacagaagaagctacagaggatgcaggcactgggttttggtgtctggacatggaagaattgcaggccaatatccacaaatgtatccgtgaggctctggtcttgaaacaaggatgtgaggaccccaggatggctggtgagggacactaagtggctcaaagaactgagaaaaaaataaaaacatagcagcaatagagaccagagtccgagccaggacaaggcctgtccctcagccacctggctgaaggcatcatcatgacctcaaggaggtaactggtgagtcatacagaaccacactgtgcactcttcaccatggtttatatgctcacagttcaggcaattgcttagaaaactgcatatcgttcatgcccctatgaatcactttcctccttttgttgtctttgtgaagtcatcacaaagttctgagtggaagaattcttccagggactgccaaggagtgacactgtagccaggtgggttcagctctcactttgc

SEQ ID NO: 10601 - DNA, 581 bp, Homo sapiens
  MAP TO CHR19.3; EXPRESSED IN LUNG, SIGNAL = 2.1; EXPRESSED IN BRAIN, SIGNAL = 1.8; SWISSPROT HIT: Q10586, EVALUE 3.80e-01; EST_HUMAN HIT: BF128007.1, EVALUE 5.20e-02
ctctcctacccctcactcccagcacactgctcccctccaggctggaggccatccacacaggcctcagggtttggaaacggggcagggcaggccaggcggcccctgcttccaactccagcccaggctcctatctttgggcccgcaggccctgtggtccgggtcctgggtcccaggccctgctgctacacagatgcctctgggtggagtgcaagtggcttttctctcctggggatgacagctccccttctgttcctccattcactctggcttcctcacaggcctctgtcggccatcacccgcccccaaactgaacccgtaccttttcggtgccccaactctgggtcccagaagtagtgcccgttggggctctgggcatccttggcgaagtggactttgtaatgtttgtgcatggcagccgggcagctgggtgctgggggcctgctcctgaggcaggagggagcacacaggcttggcgtagcctctggggcacgaacagcagagagctgaggtcagggtccctgccctgcccgacagcttggacaggggaaaggccaagtcccagatgctgggttcctaggtca

SEQ ID NO: 10602 - DNA, 560 bp, Homo sapiens
  MAP TO CHR14.3; EXPRESSED IN BRAIN, SIGNAL = 1.1; EXPRESSED IN BONE MARROW, SIGNAL =   1; SWISSPROT HIT: Q05907, EVALUE 1.60e-01
tgccagcttcacagtttgtctaagtttagcctgaggcccccctaacagttttctcaccattagcactgaattccagcccctagatgctctgagagccccaatttcaccacgctttctgtgggagtttcctggttcaggagtgcaccaccatatgtcactctggcctgaagaagtttgccaagtttgtagacaaatacggagacacccacgagaagtgcttagataagatttggcccagagtcttgtctgggggcagagctgagaagaaagcgatgtctaaaacgcgcttcactaacaggaggactttggaaaggagggatggagagaaaggactgaggagagttaggagagaggacgtgagggaacagtcatgctctgatcaaggacactgtgttcagccatggataactccatgccgcaaagagataagtgggagagagtccaggaaagagcaggataaatgattaaggaacagagaagctgatgtatgaagctgatttaatagaactcaccgaagctttttcatttaacaaaatgtaacaggagcaaaatttccatcc

SEQ ID NO: 10603 - DNA, 531 bp, Homo sapiens
  MAP TO CHR16.3; EXPRESSED IN FETAL LIVER, SIGNAL = 6.6; EXPRESSED IN BRAIN, SIGNAL = 1.3; EXPRESSED IN BONE MARROW, SIGNAL = 2.7; NT HIT: AB017334.1, EVALUE 0.00e+00; SWISSPROT HIT: Q14807, EVALUE 2.00e-36; EST_HUMAN HIT: BF975048.1, EVALUE 1.00e-126
cctgagctaagcacgagacctttgttcttacccccaggtggaccagcgggaacgtttggccccatttcgccagcgagagggaaaactctacctgattgacttggctgggtcagaggacaaccggcgcacaggcaacaagagccttcggctaaaagagagtggagccatcaacacctccctgtttgtcctgggcaaagtggtagatgcgctgaatcagggcctccctcgtgtaccttatcgggacagcaagctcactcgcctattgcaggtcaggcccacctgtctcagggaagaaggggctgcagaaggaggttctcaggcctgctgtggggtggggaatagcagttgaggcataggaaggctgggcttctgacccacccactgcctggtctcaccctcaggactctctgggtggctcagcccacagtatccttattgccaacattgcccctgagagacgcttctacctagacacagtctccgcactcaactttgctgccaggtccaaggaggtgatcaatcggcctttta

SEQ ID NO: 10604 - DNA, 509 bp, Homo sapiens
  MAP TO CHR18.3; EXPRESSED IN BRAIN, SIGNAL = 1.3; EXPRESSED IN FETAL LIVER, SIGNAL = 1.2; SWISSPROT HIT: P54816, EVALUE 3.60e+00; NT HIT: gi6680330, EVALUE 1.90e+00
tgtcaatgcaatccatgtccaggtctcatttcctcattcaacagacacccaacctgtggtccatcagagaggggaggaggaagaaacaccacaacctcactttgcttcccctgtcctatttctgtagggtcctgtgtgctgcatctgccccatgtcctgtggggatccccgttgactgaactgagctggctggtggaccccaagctgcttgcagatgtggttcaggaggctcagcttcctaaggcacagagtggaacatggatctcaaaggacacaggaaagacatccaacatcatattcgttaaaaagaacatttcattttgctttgtcaacatctatcactctttcctctcacaggttaggttttcccagtcctaggaaatccttggtgtacaggctttctgggattgctgcacatcagtttttcagtgatttggggcttaattacacttttgcttggatagttgtgttatctttcattccaaactagaaaagggagtctccaggct

SEQ ID NO: 10605 - DNA, 550 bp, Homo sapiens
  MAP TO CHR16.3; EXPRESSED IN HELA, SIGNAL = 5.5; EXPRESSED IN BONE MARROW, SIGNAL = 7.4; EXPRESSED IN LUNG, SIGNAL = 4.7; EXPRESSED IN BRAIN, SIGNAL = 5.1; EXPRESSED IN PLACENTA, SIGNAL = 7.2; NT HIT: Z96071.1, EVALUE 3.40e-02; EST_HUMAN HIT: BE872965.1, EVALUE 1.00e-58; SWISSPROT HIT: P20849, EVALUE 1.50e-01
tgatagtgaagggagggtggcgcccgcggttcccggcggccactgatgcctgtctctctgtcgtgtgtacgtgcgtgtgtgctccacgcctggcttctcaggctttcaaatgtgtgtcagcagcagcagcagcagccacgacgaggcccccgtcctgaacgacaagcacctggacgtgcccgacatcatcatcacgccccccacccccacgggcatgatgctgccgagggacttggggagcacaggtgaggccgtcccctccaccgccaagccgggtcggctgtgggggcccggtggagacagctctcaggggcgtccttcctggccacggggcctagcttgcgtccccacctcccactgggttcgttaaacatttatggtcagacctgtgtacactgcaccgtgagccccctgccacggcgccagcctcagcacgacgcggcgtgttaagtaattagtagacagcccctgccagcagccaggacgcttgatggatggggccgggctggcccgccacgccgcggctccggccagccaaggtaattgatgg

SEQ ID NO: 10606 - DNA, 584 bp, Homo sapiens
  MAP TO CHR16.3; EXPRESSED IN PLACENTA, SIGNAL = 3.3; EXPRESSED IN HEART, SIGNAL = 2.6; EXPRESSED IN LUNG, SIGNAL = 4.6; EXPRESSED IN BONE MARROW, SIGNAL = 6.8; EXPRESSED IN BRAIN, SIGNAL = 2.7; EST_HUMAN HIT: BI603475.1, EVALUE 2.00e-94; SWISSPROT HIT: Q16775, EVALUE 1.00e-13; NT HIT: gi14779975, EVALUE 5.00e-94
tgctcagcctgacactcttgcaaccacctacgaccgctccaagcccctccagctctgagggcaccacccccagaggcagcatgcaggggcagaaagcccccaagaagactcaagtgcccaggattgtactgcacagcgctttctgtgtcactgcctctcgcctccacccttcttggggccctgttaacagagtggccggagactaatttccatttagcttaggcaaagttgcaaggacactgcggttaggaaacccatcgggggtgaggactccgagctgggtgaccagggcagggagagccaggcacagccatgcgcaccttctggggctgcaccggatccacaatggcagcctccttggtctcatcatcaatgaccaggtacatgtagttgtcggtcagggcaggcagcacctctaccttcatggtgccctcgtccacggtcaggttcttccgcaaatctgtgtggcagaaaactcccagcagggctggacctgcagacacagagcacaactcagcgggcagccgcgccaggccctccaagacaggacgcgcaagctgcagtgcttcccagcctttctaggt

SEQ ID NO: 10607 - DNA, 578 bp, Homo sapiens
  MAP TO CHR14.3; EXPRESSED IN BONE MARROW, SIGNAL = 1.8; EXPRESSED IN LUNG, SIGNAL = 1.2; EXPRESSED IN BRAIN, SIGNAL = 3.3; EXPRESSED IN HELA, SIGNAL = 1.6; NT HIT: AJ278658.1, EVALUE 8.60e+00; EST_HUMAN HIT: BG703353.1, EVALUE 3.00e-43; SWISSPROT HIT: P35289, EVALUE 2.00e-10
ctagggctctggaattggtggtgggctggaggcagtgcagactctgtagggaaaattgggggggcaggcagcactcactggctgttctgcccatcctttgtccctagtacgcaccagaaggcgtccagaagatccttattgggaataaggctgatgaggagcagaaacggcaggtgggaagagagcaagggcagcaggtaagtggagggaaaaggcaagtccaccccaggtcctctgctgggcctccagggccagtcctgagcgtggggacctaggggtgtgttccccagtggcaggtcctcccacacgtccccagcaccccaaggccctgggggagtggccatcctcggaaggcttgttgtctgggtttcaggacagaagcccagagattcggggtccatccagaaacaaagacgtcataggcagcaactctcccaagtccaggtccccaaatgcaggattgccctctgcttaagagatcatccccgtgttagtaatgaaggacttcaagttgtcaacctcttctctgacagcatccaggcctagctgccatgttacggtcgagaaatgatctccca

SEQ ID NO: 10608 - DNA, 558 bp, Homo sapiens
  MAP TO CHR19.3; EXPRESSED IN HELA, SIGNAL = 3.5; EXPRESSED IN PLACENTA, SIGNAL = 3.3; EXPRESSED IN HEART, SIGNAL = 3.4; EXPRESSED IN LUNG, SIGNAL = 2.6; EXPRESSED IN BRAIN, SIGNAL = 4.1; SWISSPROT HIT: Q92777, EVALUE 1.40e+00; NT HIT: U67591.1, EVALUE 9.00e-03; EST_HUMAN HIT: AL537054.1, EVALUE 2.00e-01
agaagtcccctctcagctccagccttctggggtctggcactttgggggaatatgtgagtctctggggtaagccagccctctgatgttgaggaagccaaggtggcaccatgaatcagtggggacgggggcaggctgccttgactacaggcttggagtgaaaaggagggctgggatttggggtgatggggccagcgttggggtgctcttccatcaggctcctggctggtcccagcccctgcagttcaagaagaggcatgtatctcgtacctggcgtcggcctgggtccgtgccctccactccttcttgggagcccacacaccttgtataacaagtcctcagtgggtgaacggctgggccaacctgacaaaccagcgcgacctgggcgtgggccgggacacggagccagtcgctggctttcaccaccaccagataatgcgggccctggcagggcagggccacctctaccaaggcgggcctgctggatgagatcgggggccggtgtagatagggagtggacatgccagccgcccacaacattctgagggtgtcacctttgaa

SEQ ID NO: 10609 - DNA, 579 bp, Homo sapiens
  MAP TO CHR19.3; EXPRESSED IN LUNG, SIGNAL = 2.4; EXPRESSED IN BRAIN, SIGNAL = 1.7; EXPRESSED IN HELA, SIGNAL = 3.7; EXPRESSED IN PLACENTA, SIGNAL = 1.8; SWISSPROT HIT: Q07886, EVALUE 4.00e-06; EST_HUMAN HIT: BG282076.1, EVALUE 1.00e-92; NT HIT: gi14766926, EVALUE 7.00e-93
atgataaggatgcggtcgaggctgggaataggctgagggagctggagagggtgggaccacgcaggaggcagatccaataaacaggaagatttttctcgtgacgtcgtcggcgcgcgccggaagcgcggatcacacgggcccctacaaggggcccctacaagcggccacaaggatggcaggcttcgcggagctcgggctgtcatcgtggctcgtggaacaatgtcggcagctgggtttgaagcagcccacgcccgtgcagctcggctgcatccccgccatcctggagggtgagtatggcccagggccttccccaagaggcctctccgctcctctcgactcctttcccttctcgcaacctttgcttattccggtcccacgaggcgaggggcaacctcgggcgttacaggagatccggggttccggaggacgactggacagtgttggcatttaggttgcatgactgactcgctttgtgttcgtacgcaagtgatgtaatctctgaaattttcatagtctcagcacagggagggtttgatggatgactagtccgatagtatcgcaaaatcctgcagacctggt

SEQ ID NO: 10610 - DNA, 568 bp, Homo sapiens
  MAP TO CHR16.3; EXPRESSED IN BRAIN, SIGNAL = 3.4; EXPRESSED IN PLACENTA, SIGNAL =   2; EXPRESSED IN HELA, SIGNAL =   5; EXPRESSED IN BONE MARROW, SIGNAL =   3; EXPRESSED IN FETAL LIVER, SIGNAL = 2.7; NT HIT: gi14778244, EVALUE 0.00e+00; SWISSPROT HIT: Q9UMR2, EVALUE 5.00e-43; EST_HUMAN HIT: AA489997.1, EVALUE 0.00e+00
gccactgccactgctactcacatggcagaagatcatggcttgagcaatggtgatggccccgtagaggttacacaaggcctggaacttctcgtctctgctgctgcacaggacatagtactgcttgatggtgtccagggtctcttcctcacgcttcagtttgataacgtttgggtctgggaccactttctgggcaaacttccacacagagtcttcaaaggtggcggagaaaagcagcatctggcagttcctgggcagcatcctgcaagggaaggccctggtaggtggccccaggtggccccgggaagcgacagaagcacagccttcccagctgggagggtctagatgcccaggaaggctgatgggagaggagcgtcttggggaggaggagcagcaggcctgggatggggacaggggttgggggagagtccctaggtctcctttctcaacccaggctgggagggactgtggccagcgctgacacggaagtggcccgtcaaacaaatgctgctgagagtacgagagccaagacccaggcagaagccagaggaggcatctgaagtgaagggag

SEQ ID NO: 10611 - DNA, 511 bp, Homo sapiens
  MAP TO CHR19.3; EXPRESSED IN BRAIN, SIGNAL = 2.5; NT HIT: gi14769406, EVALUE 8.00e-43; SWISSPROT HIT: P05129, EVALUE 1.00e-10; EST_HUMAN HIT: AL133962.1, EVALUE 5.00e-39
tccaatgtctttgcctctcccatgggtgccccatccccgctgcccgcctctggtctccgtctgtatgtcaggtacaagttactgaaccaggaggagggcgagtattacaatgtgccggtggccgatgctgacaactgcagcctcctccagaagtttgaggtacccagaccctggcttcctcaagggagcccagcccagcctcccacggttcagagctggcctttccttccacccctgagtgcccgctggtcctgggactacagttcccagaagaccctaggactccctcctctgctcttctaggggactcgagccccagggtctgatgggaattatagttcctatctatcgccatggcttgagggtactaggggccaccagcccctgttctagggcgatcccctgcatctcttgggaccctgactctctctttcttttctcccaggcttgtaactaccccctggaattgtatgaggtgagtagaaccagggcgttgaatggaggcagtttt

SEQ ID NO: 10612 - DNA, 551 bp, Homo sapiens
  MAP TO CHR19.3; EXPRESSED IN LUNG, SIGNAL = 1.6; EXPRESSED IN BONE MARROW, SIGNAL =   1; EXPRESSED IN BRAIN, SIGNAL = 4.6; EXPRESSED IN HEART, SIGNAL =  25; EST_HUMAN HIT: BG617080.1, EVALUE 2.00e-29; SWISSPROT HIT: Q03923, EVALUE 5.00e-29; NT HIT: gi16163770, EVALUE 1.00e-44
tgtgaagaatgtggcaaagcttttaactggtccttaaaccttactgaacataagataattaatactaaaggaaaccctaaacatataaaaaatgtgacaaagcttttaactggttttgagaccttactcaaaataagatagtttatactgaagacaaactctataaatgtgaagaatgtgacaatgcttttaatcaattctcagactttactagacgtaagaaaattcgtactggagaaaaaccctacaaatgtgaagaaagtgggaacacttttagccagtcctcaactcttactaaacaagataattcaatgggagagaaaccctacaaatgtgaataatgttataaccattctatttatgtgtttacatgtttagtgttgaaataatgtttatttttcatattgatattacaatttggagacatttttcactcacaatttttgaagtgggtgaatttcagtctacagtttttatttttagtcacttcactgtaggcaactctggtaattttctctggaaaaattttggagacgaagttgtaatggctt

SEQ ID NO: 10613 - DNA, 535 bp, Homo sapiens
  MAP TO CHR16.3; EXPRESSED IN PLACENTA, SIGNAL =   1; EXPRESSED IN HELA, SIGNAL = 1.9; EXPRESSED IN BONE MARROW, SIGNAL = 1.9; EXPRESSED IN BRAIN, SIGNAL = 1.3; NT HIT: gi14779150, EVALUE 1.00e-101; EST_HUMAN HIT: BG502871.1, EVALUE 1.00e-100; SWISSPROT HIT: P48322, EVALUE 8.00e-03
caaggaaaatccagtccagcactcccacaacactgaccttctttcaggtttccgctcaaaagctgcttgtgtctaaaaacaaaggtgtagaacacagcttggcaggctgagtaaaatggtccatggagagcaacatcgcagaatgcctttgttcccgaatcctggttattaaggtatatgtgcagccagttaaccaaaagatctaggcatgattttacagtactagaggaaagaaaaattcaaatcaactttacacttcataaaaaaaccagaataacataaaaacacacaactgcctttcattacaaaccatgctaagtaagttcataggtttctttaaataatacccatgggtacagaggaaaagcaaagaaaggaaggataaggatgagtgcgtaggaagacaaccttccaattacaaggcagagtagctctgaccttctaggaacaggtgagcccctaagaaagtcccaagggatggaaagcaggttctcctaaccatctcaaaggcacccctcttagggtgattggccaa

SEQ ID NO: 10614 - DNA, 508 bp, Homo sapiens
  MAP TO CHR14.3; EXPRESSED IN PLACENTA, SIGNAL = 1.1; EXPRESSED IN HELA, SIGNAL = 0.88; EXPRESSED IN FETAL LIVER, SIGNAL = 0.92; EXPRESSED IN BRAIN, SIGNAL =   1; EST_HUMAN HIT: BG679965.1, EVALUE 1.80e-01; SWISSPROT HIT: P02461, EVALUE 2.70e+00; NT HIT: AF259674.1, EVALUE 4.80e-01
agctccttctcccctagcaggcgccctctcccatgctttgggtcaataagccatcaatatcctgcactgaggagaaacagcagctccttgcacgcctgattcaccaagagccactctcccgccctgcttctctgggcctcccgcaccctccttccatcctctgcggccacatttcctcctccagagatgctgccatccatcagctctctgcctcactggtcacatttactttctctggctgtcttcagcttggttgtttatattcttcctctccctgcttcctattccctttttatccacttgttcctggacgcaggatttctgtaggtgcttctcaggattatcctatagaaggggggcagcaaagaggcccaaagccatacgctccatttcccctcccaggggactcttgcctctctccaaagcttattaggatcattgaaaaggggtctgctgtttcccacagaggcaggtgatgcaatttaaagggctcgagatttggaatcag

SEQ ID NO: 10615 - DNA, 563 bp, Homo sapiens
  MAP TO CHR19.3; EXPRESSED IN BRAIN, SIGNAL = 1.2; EXPRESSED IN HELA, SIGNAL = 4.1; EXPRESSED IN HEART, SIGNAL = 3.3; EXPRESSED IN BONE MARROW, SIGNAL = 1.4; EST_HUMAN HIT: AA514608.1, EVALUE 0.00e+00; SWISSPROT HIT: O15382, EVALUE 2.10e-01; NT HIT: AF268047.1, EVALUE 0.00e+00
taaagccccagagtcacgtcactgaagaagcccgacaatgtgtgttctttggcattttatttcaaaattgcagcaaagacagagaaaaaaaaatcaacggcagcaccaggggtctggcctgagaacggagagatccggaatcggggccaaggtgtatccttgaccgcacgacaaggagtaatgggcggacctgaacccgcgacgaggggctgggggccaagatgcctgggtcggcccttacggctttgggagtgtcgcaaccacatgggggcgccagagacccagacgccgcccgctggccttttatttcgtattgcacttcaggtgagtcattggtagggaggcgagtgctggcgtgacgagatgctacgggtcggtggatctggagcacagcctgcagcttcacaccgggaacatccactcgtgggctctgattccgtactgcggaacaacggaggcagtgcgtgaggtggaagctgcactacaactcccagtaggccctggggtgttccaggccgagtgcctacggagctgtgccccagcggctcacgggaaatgtagtc

SEQ ID NO: 10616 - DNA, 572 bp, Homo sapiens
  MAP TO CHR16.3; EXPRESSED IN FETAL LIVER, SIGNAL = 1.3; EXPRESSED IN BONE MARROW, SIGNAL = 0.99; EXPRESSED IN BRAIN, SIGNAL = 1.1; SWISSPROT HIT: Q64303, EVALUE 1.10e+00; NT HIT: AF130844.1, EVALUE 5.50e-01; EST_HUMAN HIT: AU138404.1, EVALUE 8.00e-01
gcttgccactataccaacggagcagctgaatgtcctgaagaagctgttgaatatttgcatatctttaaatcttgctctaaatggtatcatttcttttaaatagactaagcggctatgaataattagcagttaataattattatgcctcattaacttaataaaggattatgtcttgatagaaaatgcagagataattggaaaagaaagttaacccatgcttcctcggcttccgagggaaagagctgtccagttggaggagtagcccagagtctggaagactctactcccctggggccagttcccaagctgctaacctatgaccaagtgggacctagagagccggcttcgaaagagcacagtcactcaccaaacagaaatcccagaaaacaaaacatagtgagcacggttagcagcagcttaccagggtcgcacacctgtgacccagaacacagcgagcctgggaaggtgggtagtgctgaaatctcactcagagagctacaatttacggaaccgctactctggaaagataaatataggttagatagcccttttggctggggagaagaaggatg

SEQ ID NO: 10617 - DNA, 507 bp, Homo sapiens
  MAP TO CHR19.3; EXPRESSED IN FETAL LIVER, SIGNAL = 1.2; EXPRESSED IN BONE MARROW, SIGNAL = 1.4; EXPRESSED IN BRAIN, SIGNAL = 1.6; EXPRESSED IN PLACENTA, SIGNAL = 1.1; EST_HUMAN HIT: AL043054.2, EVALUE 1.00e-109; SWISSPROT HIT: P24789, EVALUE 1.60e+00; NT HIT: AF296636.1, EVALUE 1.20e-01
gccctttcatctctctgtgctttgtcattcttcatgtttatcgtggtctccctgttctagtcccccactctctctaggtctctttcccacttcctcagtcttttaggttaaaactgggtctctgtgcccacaccaggtctccttctcctcttttctctctgggtctctgtcctcccctctctctgggtctctgtccctgcctaccacctgggatctctctgttgctagtgtctctcagaatggatctgtctctgtgcttctctgccttcctccctctcgtatggctcatctgcccccacccgcattcagcacccagcaggccctgcagtttgccaaggccatggatgaggagctggaggacctgaagactctggccaggagcctggaggaacagaatcgcagccttctggcccaagcccggcaggcggtgggtctggcccaggggaaggaaggtgccctctctcttctttgtttcctggagtcagggcggcagagtgtgactatgga

SEQ ID NO: 10618 - DNA, 599 bp, Homo sapiens
  MAP TO CHR19.3; EXPRESSED IN FETAL LIVER, SIGNAL = 1.4; EXPRESSED IN BONE MARROW, SIGNAL =   1; EXPRESSED IN BRAIN, SIGNAL = 1.7; EST_HUMAN HIT: BI917297.1, EVALUE 0.00e+00; SWISSPROT HIT: Q15102, EVALUE 7.00e-09; NT HIT: gi14756113, EVALUE 1.00e-103
cccactctcgactcttcaggtagttcgcccctccccgtgaccggtgggtggtttctccctcctccccgcctcgggagctggatggtctcgcctctccctccccccaccccgtgccgggtgcgcggcctgggagtcagcggcccgagcgggaagcgccgggcgagcccactgtgcggccgtcgtgggggaagcgaaggttcctgattccacctacctcctaagtgaaggcttccgtccctggagaggaggcggcgccctgtatcggccttcgtcctccgcgggtgtgctagcgttgggacggtcctttgttgccgcgaggggtaggagtgggcgtggcggagccagctccgttcggaacactcccgggccgacccgactcgctcatcctgcaggagctgcggcgccaagatgagtggagaggagaacccagccagcaagcccacgccggtgcaggacgtacagggcgacgggcgctggatgtccctggtgagcgttcccacctgggatattgaggagtccgggggcgcggggggtggctcaggagaacggctggttcgtgccactctcactacctgattgggaaactgagggcagttgag

SEQ ID NO: 10619 - DNA, 578 bp, Homo sapiens
  MAP TO CHR18.3; EXPRESSED IN HEART, SIGNAL =  32; EXPRESSED IN FETAL LIVER, SIGNAL = 6.1; EXPRESSED IN BRAIN, SIGNAL = 5.5; SWISSPROT HIT: P19105, EVALUE 2.00e-24; NT HIT: gi14765845, EVALUE 0.00e+00; EST_HUMAN HIT: BF736015.1, EVALUE 0.00e+00
gtttatgcccagcctcattccacactatataaagtacttccatgaaatagaaggggttttctttttttacctttagaaaatatttgcttaagaataattttgtaagcatatgatctgtttctgagcttttaaatgatttgatctaatattaacacagaactctaagaataattggaaaacataatgatatagttcatatagccttagttcactaacttactttgtttatagatatggatattctgaaatattttatacgattgactagctttaggaatgaaccatcaaagtgccaggaagtattgatgactgctttcttctttctattgtcttccaggcaccattcaggaagattacctaagagagctgctgacaaccatgggggatcggtttacagatgaggaagtggatgagctgtacagagaagcacctattgacaaaaaggggaatttcaattacatcgagttcacacgcatcctgaaacatggagccaaagacaaagatgactgaaagaactttagctaaaatcttccagttacattgtcttactctcttttacttctcagacacttccccca

SEQ ID NO: 10620 - DNA, 548 bp, Homo sapiens
  MAP TO CHR18.3; EXPRESSED IN FETAL LIVER, SIGNAL = 1.2; EXPRESSED IN BRAIN, SIGNAL =   1; EXPRESSED IN HELA, SIGNAL = 0.89; NT HIT: AL161542.2, EVALUE 1.30e-01; EST_HUMAN HIT: AW665198.1, EVALUE 1.90e-01; SWISSPROT HIT: P36317, EVALUE 3.00e+00
gcttttaacatcccattggccaatcccattgcacaaagcaagtaatcccattgttcaagctcaaaatctaaggacagggatgtacatgcattgttttgtgggggaaattgtaaaattacatggaagaaggtgttaattgaggaaaaagtaaaatctgcttcactataaaagcacttcagtgaaaaggacaatgaatttggtgcattttatattcaaaaattcccacaagcatgcagcatctgtccaagaggcaactgaggtcaaagtttcatcgatgttagagttaggaaaatagatttgggcagcactggtatataactatgtactgattttgcagtgcaaacatttatgacaagggcaaaaggaataacatctttgattaaatacaaaagcatggaagtagatagcagaaaattcatcagaggaggctaagtataatatcgagcacaagtggcttgtgttgtagaagcagaaaaaaaaatctagaggaggaaagaagtaataaaatatgcagaaaggtcaataaagccaaaagctggaaaagcatc

SEQ ID NO: 10621 - DNA, 519 bp, Homo sapiens
  MAP TO CHR18.3; EXPRESSED IN FETAL LIVER, SIGNAL = 0.79; EXPRESSED IN BRAIN, SIGNAL =   1; SWISSPROT HIT: Q48656, EVALUE 4.20e-01; NT HIT: gi14721002, EVALUE 4.90e-01
gcacctttgaggcaggttactcaaagtatagtgggaatgtcttttgttatttgttgaacttcatacaaaggtcctccttcatcatacccaatgtgctgtttgcaaaatgcactgcaaataaccatccatcactttacatcattgtcacattttaccactttgtttcttctcctccaggtaagtgaaaatgattatctggctgagatcataatcattgctgatcggtacttggcctcctgcaaagttccgtgcaagcacagagactttttgtaagatgccactgggcagatgtcaaatggagtgccctcccccatcaccatcttggtcctgaaaaacttaataacttggtattgttcagtgagtcattcaagcgagtagtgtggaattctacctgttcctcaaggcagagtatctgctaagctgctgcaaagagtgttagccattcatggctctttctgtgcataaagagctcatggttgggagacaaggtgaatgcaaacccggagtgaaagctttgta

SEQ ID NO: 10622 - DNA, 570 bp, Homo sapiens
  MAP TO CHR14.3; EXPRESSED IN BRAIN, SIGNAL = 2.6; EXPRESSED IN PLACENTA, SIGNAL = 1.9; EXPRESSED IN HEART, SIGNAL = 1.8; EXPRESSED IN LUNG, SIGNAL = 7.5; EXPRESSED IN FETAL LIVER, SIGNAL = 2.9; NT HIT: gi14753597, EVALUE 1.00e-124; EST_HUMAN HIT: BG720187.1, EVALUE 1.00e-100; SWISSPROT HIT: P20908, EVALUE 6.30e-01
cggtggttttctgcctattgtacaaccaggaagctgacaataaagtttatttgagcgtcgacgtgcgccgacgtggccccgcctccccagccggagccgcgattggtgggcatttgccggcggccaccgcttttaagccacgattggcgaaggccgccgtcatttcggagcgactcagcgcctgcccgccctctcgccgcgtcgccggtgcctgcgcctcccgctccacctcgcttcttctctcccggccgaggcccgggggaccagagcgagaagcggggaccatgttccgacgcaagttgacggctctcgactaccacaaccccgccggcttcaactgcaaaggtgaggcggcggcctcagcccggccgcgtgtccctgacctgggcggaggtcccagcctcagtgcccgcaccccacctccccgtcgggaccctcggcggcctggtttccgccggcagcctccgggcccctctcctctgggtcgccacgtacctcggctcttcgccgccccttcccgcctttaaagccctctcacctactcctgtctcggcatgttactttctgcac

SEQ ID NO: 10623 - DNA, 569 bp, Homo sapiens
  MAP TO CHR16.3; EXPRESSED IN BRAIN, SIGNAL = 1.2; EXPRESSED IN HELA, SIGNAL = 1.3; EXPRESSED IN LUNG, SIGNAL = 1.8; SWISSPROT HIT: O95867, EVALUE 7.10e+00; EST_HUMAN HIT: BF379722.1, EVALUE 5.10e-02
ttaaccagacccagcaaaggggaagaaatgcaggagcaacgcaaggagccagcagggcctttcttgggacattttaactcaagacacagagaggctggtggccgtgaggccactgcacggagggcgcttcctgacatgcaggtgttcaaaatgtaatgaggcagaaaaagctgtgtcacctggcagctggcacagattgcctcctatgggtcgcaggtgaaacagcctttattggaaaagatgctttgacaatgaaaggggcagagatgcacccttcacccaggatccatgtgttccctgcaaccagggcttctggggaagaggtggtcctggaagcttcccagaggaagcgcattcagggtgggatctccagaggcaagaggtaacagccaaagtggggtgagtgggagttgtggggacagggagggggctggggaggactggaagctactggggctgtgtctgaagagcagacccagcaagacgtggctgcacaatggctgacaccatcaaagaaacccttttcctctcctctcctttcctcttcttgtcgccccttcatttagaca

SEQ ID NO: 10624 - DNA, 502 bp, Homo sapiens
  MAP TO CHR18.3; EXPRESSED IN BRAIN, SIGNAL = 1.7; EXPRESSED IN HELA, SIGNAL =  26; EXPRESSED IN HEART, SIGNAL = 6.7; EST_HUMAN HIT: BG028896.1, EVALUE 0.00e+00; NT HIT: gi14782916, EVALUE 0.00e+00; SWISSPROT HIT: P46783, EVALUE 1.00e-63
gcccctaaactcaaattcggttgctgacccagccccagccttggctttcttgtcggcaaccagggggcacagcactctgtctgtaggtaactctattgacttcccctcttgtgagtcttgcaggttcctcagcctccaggcctttaggccgagacctgccagtctctggacggctgcggcataggatggcaggcacagtctccaggggaagatgaaggtaatcacagagatactggatactgtcattggtaagttaccaatagaaatgtctccaggcaaactgttccttcacgtagcctttggacttgagagactgcatggccttcatgacatgaaggttggacacattcttgtctgcgagctctgggtgcctaggcatgtggacatccttcttggtcaccatgactccctccttaaaaaggagttcataaatggcaatctggttcttcttaggcatcaacatctcggtggctgtagggtctggagttgaggctggaaagag

SEQ ID NO: 10625 - DNA, 580 bp, Homo sapiens
  MAP TO CHR14.3; EXPRESSED IN HELA, SIGNAL = 2.2; EXPRESSED IN FETAL LIVER, SIGNAL = 2.6; EXPRESSED IN BONE MARROW, SIGNAL =  86; EXPRESSED IN BRAIN, SIGNAL = 2.5; EXPRESSED IN PLACENTA, SIGNAL = 2.5; NT HIT: X70197.1, EVALUE 0.00e+00; SWISSPROT HIT: P01764, EVALUE 1.00e-41; EST_HUMAN HIT: BE933942.1, EVALUE 0.00e+00
gagctgggttttccttgttgctattttaaaaggtgattcatggggaactagagatactgagtgtgagtggacatgagtgagagaaacagtggacgtgtgtggcactttctgaccagggtgtctctgtgtttgcaggtgtccagtgtgaggtgcagctggtggagtccgggggaggcttggtccagcctggggggtccctgaaactctcctgtgcagcctctgggttcaccttcagtggctctgctatgcactgggtccgccaggcttccgggaaagggctggagtgggttggccgtattagaagcaaagctaacagttacgcgacagcatatgctgcgtcggtgaaaggcaggttcaccatctccagagatgattcaaagaacacggcgtatctgcaaatgaacagcctgaaaaccgaggacacggccgtgtattactgtactagacacacagtgaggggaggtcagtgtgagcccggacacaaacctccctgcaggggcgcgcggggctaccagggggcgctcgggactcactgagggcgggacaggtcccaggaacaggtgcagcggtaggttttctt

SEQ ID NO: 10626 - DNA, 531 bp, Homo sapiens
  MAP TO CHR19.3; EXPRESSED IN BRAIN, SIGNAL = 1.2; EXPRESSED IN LUNG, SIGNAL = 1.9; EST_HUMAN HIT: AA584763.1, EVALUE 1.00e-116; NT HIT: gi15307190, EVALUE 1.00e-111; SWISSPROT HIT: P41233, EVALUE 3.00e-03
agagactggacaccgacagggagaactgggggcttgtgagccccccacccctcctacaccatgggtcccccaggccttcccaagggacatctgagccaccagagctcctcatgtgccatgcctcctccctgaatgtccttgctgctcataaacacgctattcatccttcaaaacaccacctcctccaggaagccctcctcctggccccacctcaccaccacccaggcctcacacctcctcgaggctggtgtcggagatcccgtagccagtgagcctcagctccgccagccgcgtgtctagctctcggaagagtgtggcgaagctgccgtcatgggcacccgtgtagggcagcaccagcaccagctcgtgtggcagctcctccaccagccgtgccccgggcacccagtgctgtaccagggccagcagctgaggagtgcctgtgtggacaaaggggtgcttcagggagccccggctcacgccccaccccagtctccctggggaagaggcattggtgacctgtgaggggactgt

SEQ ID NO: 10627 - DNA, 578 bp, Homo sapiens
  MAP TO CHR16.3; EXPRESSED IN FETAL LIVER, SIGNAL =  66; EXPRESSED IN BRAIN, SIGNAL =  23; SWISSPROT HIT: P41051, EVALUE 3.00e-87; EST_HUMAN HIT: BI460040.1, EVALUE 1.00e-118; NT HIT: gi15431292, EVALUE 1.00e-117
agtgtggtggaacttacggccctttccaaggccatggctcttttggcctgcacatgccagcccacgcatctccttgtgcttgtggactggtttggtgatccactgggtgtcaggatttcttccaatagctttatggaatggatcaatgaggataacctcaaaaaatttgtgtgtggaatcttcacccatccagtaagaattcaggactcttagagccccacagtggcgtccaactcactcctctgcaatcaactgtaggcttcagttaataccatgatggacaggcttgccgtaagttgcacccttaggaactgagcattttcggccatcacggagaatacgaatcccgtagataacataaccttgcttgatcttgtagcccagttggtgcactttatcgggccgggtggggcggggagccctgtggagagcagagagctggcggtactgccagcagcggaccctcagaagaaagctcatgacatcagactgcttcttcctccacagctcgtggatgtacttgtatgcacccatcttggcttacctgattgctgccgccagacagaagggccaaaaat

SEQ ID NO: 10628 - DNA, 539 bp, Homo sapiens
  MAP TO CHR16.3; EXPRESSED IN LUNG, SIGNAL =   6; EXPRESSED IN BRAIN, SIGNAL =  12; EXPRESSED IN PLACENTA, SIGNAL = 5.6; SWISSPROT HIT: P31146, EVALUE 8.00e-13; EST_HUMAN HIT: AI819571.1, EVALUE 0.00e+00; NT HIT: U35342.1, EVALUE 0.00e+00
tctagggctggttggttcagcaaactgcgtgtctaggggaccagtcatcagagtctgggaggtaccagaaaataaagccattttattatgatttttttctctgccatgtggctgggaatgggaggtgagtggatgggtgtgaatggctgaccctgctggaggccctgcggggctctacttggcctggactgtctcctccagcctgtccaagcgcttctggagctcctgcaccgtggcctggagcttccgcatctcctcctccagccgagacacggcatcctggggacccggtgctgcattaggcccagctcctccctggctccccttaccccagcctctgctgagccccatccctagagccctggccttgggccctttagtcgctcagctggttgctgcctggagacctgcaggcctatcaatctgaaacctgtgttctgaggcctcaggattaccattcccggacccacaaagattcccaatgttgtgagtttgaggtgccccaaacaccagccccaccccaccctcccagttttatt

SEQ ID NO: 10629 - DNA, 551 bp, Homo sapiens
  MAP TO CHR19.3; EXPRESSED IN FETAL LIVER, SIGNAL = 3.2; EXPRESSED IN LUNG, SIGNAL = 1.9; EXPRESSED IN BRAIN, SIGNAL = 3.4; EXPRESSED IN PLACENTA, SIGNAL = 1.4; EST_HUMAN HIT: AA831948.1, EVALUE 0.00e+00; SWISSPROT HIT: Q92793, EVALUE 2.30e+00; NT HIT: AF287270.1, EVALUE 0.00e+00
gagccagagaaaactgacgcccctcttccctgcttccttcctccagggacccctcggaggagcattcgctgctggtgaattgattcgacctgactgccgttggaccgtaggccctggactgcagagacccccgcccccgaccccgcttatttatttgtagggtttgcttttaaggatcggctccctgtcgcgcccgaggagggcctggacctttcgtgtcggacccttgggggcggggagactgggtggggagggtgttgaataaaagggaaaataaatgtgtcgttttcatttttagcgggaggagcagtccttgcgttaagcggtgtgaggccctttaaggcgcggccacactcagcatggcggcctcagtcggccttccaagcatggcgcggggaggaggggtgggagggtcgggagggactgcggtgcgactaggagtgaataatttaaaggggccgcgcctgcggagccgggcggaacgctagcggtgttggcgcggagtggaccccggctgcggcccctgggtgagtctgggtttccgttagcct

SEQ ID NO: 10630 - DNA, 504 bp, Homo sapiens
  MAP TO CHR14.3; EXPRESSED IN PLACENTA, SIGNAL = 1.5; EXPRESSED IN HELA, SIGNAL = 2.1; EXPRESSED IN BONE MARROW, SIGNAL = 2.2; EXPRESSED IN BRAIN, SIGNAL = 2.7; EST_HUMAN HIT: AI522133.1, EVALUE 0.00e+00; SWISSPROT HIT: P31226, EVALUE 2.70e+00
tagcatgaaaacccagcaccaacactgaaagactccattcaggttgaagtagcctcaaacagtaatttactttttgataataggctgttgtttttcttaaataagcttaaaacaattctatctgaaattggtagcatgggttcacttggctacaactgagcaaaatagatgcaactttcttttaatggggtgctgcctctttaggactgactgtactatccactgacactggtttggcagttggtactgctgaacatttttatacatgctaccatgaagctatatatgttagtattgaagaagctaacgggtatactatcatttttgatgtgtgggctgattataatttcctgtatttcctgtacattgggatgaaactactttagcaaagtccacagatcagaaaccagacggtagtttttgaagttgaaaccagcaaaataagaaaaaataaaaaatcgattttaatattttctgcctctttcccaaattacccttcccact

SEQ ID NO: 10631 - DNA, 539 bp, Homo sapiens
  MAP TO CHR18.3; EXPRESSED IN LUNG, SIGNAL = 1.2; EXPRESSED IN BONE MARROW, SIGNAL = 1.9; EXPRESSED IN BRAIN, SIGNAL = 1.5; EXPRESSED IN PLACENTA, SIGNAL = 1.5; NT HIT: Y16945.1, EVALUE 1.30e-01; EST_HUMAN HIT: BF380658.1, EVALUE 0.00e+00; SWISSPROT HIT: Q14746, EVALUE 2.30e+00
aaaacctccacgcaactgacatcctggaaagtggatggtgccttttgtcctgcgggagtgtttcctagcacagccgcgaggtgagtattgggcactaatgcaggttttagaaatccagctacaagactgtggcccagctccatggcaaacatgtcgatggatgtgacatttgttttctggaagacaccaggagggagagcttcattcatgtaatattatatgaactagaaactgaatatataacatacttaataatctagatattcaaattgctggatcaaactttgtctattaactacagacatgaatgttggtatttatgtagctgttaaaatgttgcatagttttactccttggtaacattaaaacctatagagacttcacgtcctgagagtgtcagagatgttggctagatgaggctattactctgcctattctagaacattctcaggcacggaagcttactcccgcattagcaagatacccagttttgtcagatatttgtgctttagaaccctggcccacttttcttcccactt

SEQ ID NO: 10632 - DNA, 530 bp, Homo sapiens
  MAP TO CHR19.3; EXPRESSED IN BRAIN, SIGNAL = 1.1; NT HIT: gi13652336, EVALUE 1.00e-47; EST_HUMAN HIT: BE673426.1, EVALUE 1.00e-54; SWISSPROT HIT: Q9Y2Q1, EVALUE 2.00e-17
catgtttgttatcatgccattagttttatactttattatccagaaaggtatcttatctacactggtgttgcggatcttatgccattcttttttctcagaatttgagactacattagataatatttctgtgttgaaaattattttattggatatgttcggtcatccctataagttagaatctgttctctttattctctcatttcaccttgagtcaaattaaaaatttctgcccatggccacttgggaaatgtatatgtgtctttcgttgtgtttttcagggaccattgacatttagagatgtgaccatagaattctctctggaggagtggcaatgcctggacacggttcagcagaatttatatagggatgtgatgttagagaactacagaaacctggtcttcctgggtgaggataattttaattaagcaattcctattatattctataggtttaatttctcttttctgtagaatgtgttttggtgatttatgcttactataaatgagtttcacatccctgttttctggaaa

SEQ ID NO: 10633 - DNA, 539 bp, Homo sapiens
  MAP TO CHR19.3; EXPRESSED IN PLACENTA, SIGNAL = 1.1; EXPRESSED IN FETAL LIVER, SIGNAL = 1.5; EXPRESSED IN BRAIN, SIGNAL = 1.1; SWISSPROT HIT: P15498, EVALUE 1.00e-04; EST_HUMAN HIT: AW105491.1, EVALUE 0.00e+00; NT HIT: AF030227.1, EVALUE 0.00e+00
aggggctttgtctgtgattggtgagggggctttgtctgtggattgttgagggggctttgtctgtggattgttgagggggctttgtctgtggttggtaagggggctttgtctgtggattggtgagggggctttgtcagtgtggcacactctctccccatctctctcctagcaggtccttctgaacgacaccagtccttctatccatcttcatccttttattaaatgtaacccccttgagccccgtctgcttgaggggacccaagaggaaatcggggtgttataaattaaccatgtcagggcacatcccgggagcaccgccagctggacgctggcctcctccagtccatcccaaagtctccacccgccgggagctgtcacagcccctggctccgctgcctgcccacgccgggctcagagcctggagtttctcgtctctctgccaaggcaccagggctcagcagtattcagaataatcttcctccacgtagttggcagggaaccagccaacctggaaacagacgaggagttcatcagtgcaa

SEQ ID NO: 10634 - DNA, 550 bp, Homo sapiens
  MAP TO CHR19.3; EXPRESSED IN PLACENTA, SIGNAL = 1.1; EXPRESSED IN BONE MARROW, SIGNAL = 1.5; EXPRESSED IN BRAIN, SIGNAL = 1.4; SWISSPROT HIT: P98187, EVALUE 5.00e-06; EST_HUMAN HIT: BG697996.1, EVALUE 7.00e-69; NT HIT: AB002459.1, EVALUE 6.00e-50
tgggtattaagccttgcctgtcatcctctactcctactcccactaagcaatagtagcagaatagacaaaaacaactcctcctcccatccccacctggggagcagagccatcggcattgccaacatgagtcatggagctcaggaacagccaccagcacctgtactcaccattcaatctctttaggctcccagaccttcagaaactcttgcctttcctgcccgcagcgctcctggcattctgggtgcattgcaaggttgtactggacccaggagagaccactggtcctggtgtcatagcctgaggggcagccaggcagtcttgggtctctgggctgcttcagcacaacagggtggacagcacccatggattgagggcctcagagaggatgggggaagggggatgggaagggtgaagccatccagggtccacccaccacgtccctgggatgagacatcttggtcctcactgggatcctctccctcaaacatgaaggtgtcagcctacactcttatgtcctcatcagacaactccttcccatcttcatcctgga

SEQ ID NO: 10635 - DNA, 556 bp, Homo sapiens
  MAP TO CHR18.3; EXPRESSED IN BRAIN, SIGNAL = 3.1; SWISSPROT HIT: Q14596, EVALUE 1.80e+00; EST_HUMAN HIT: BF057291.1, EVALUE 0.00e+00; NT HIT: gi15304446, EVALUE 0.00e+00
tttgtgcttctgaatctgtttctcagtagagctctcctttcttcctctctaggtcatgggtttggttcgtcaaagatgtctcgtgcacagacatttcccagctacgccccagaacagagtgaagaggcccagcagccgttgtcgcggtccagcagctatggattcagctacagctccagcctcatccaatgacacacagagagccgctgttgactagagagacagtctgtcctggacccgtctgtggggtcattaccctctgcctcctggaagaccaattgcagtacaaattgaaatgggtcggctctagccccagtcccattggaaggttaaaaactggagttctgcttccttgattcagtggctaagtcctttatttattgaatttctttgggggaatctatgttttacataaatagaatccaaatcgtatgaacagttatttaaataaacaaaattctttgggtctgacagtaacagaaacctcagcactgggaaaagttgcccacactggggtatgcctgggtgatgggcacctctcactgacctcacagcg

SEQ ID NO: 10636 - DNA, 523 bp, Homo sapiens
  MAP TO CHR18.3; EXPRESSED IN PLACENTA, SIGNAL = 1.9; EXPRESSED IN HELA, SIGNAL = 1.6; EXPRESSED IN BRAIN, SIGNAL = 2.3; SWISSPROT HIT: P11909, EVALUE 3.70e+00; EST_HUMAN HIT: BF371258.1, EVALUE 1.00e-76
ccactgtgtgaagtcagtcccaaagttttaacggccacgcaatctagccttatccagtggtgctccccagaaggtcctcagctgagagagtggggtggtgttagtggcctcctcttgatggcccagctgattgcaggggatctctgggatgctgctgatggagtacctgggaagatggctccaggactctgaagggctgcgtgtttttgatcttgctccccgagccccagcctctttgaccacatcattgagctgcgcacgttcagggcagacgcctggaactggagaactctagggaagcaaaggggactcctcggggactctgatctttatgtccaagttatatatcaacgaatccttttggcaacaccaaaatgtatggtgagcccttagttaaagtgtgggaaaacatgaaaatgatcaaatatgaagtttgcagattaagaccaattcaatggccctccattgaccagcgagagaatcatcctgtgtcatcttgtcttgtcctgctgggatccactaa

SEQ ID NO: 10637 - DNA, 593 bp, Homo sapiens
  MAP TO CHR14.3; EXPRESSED IN HELA, SIGNAL = 1.3; EXPRESSED IN LUNG, SIGNAL = 1.8; EXPRESSED IN BRAIN, SIGNAL = 1.1; EXPRESSED IN PLACENTA, SIGNAL = 1.7; SWISSPROT HIT: P15754, EVALUE 1.10e+00; EST_HUMAN HIT: BG682718.1, EVALUE 3.00e-03; NT HIT: D87715.1, EVALUE 2.20e+00
ctgtgagtgtgcaggaggtgcccgtgagcatcctgggagcaagatctgctgctgggggagaggggacaggcctggtaatgccccctgcgagcctgcccagaggcgaggccgagcttcctttattaggacaggctccagtaagtaggcctcagtcattttcttaggtgaaagttctctcatgcctccaggaagtccaccaccagctcaataggagcaggtgccaccagacaacacaatgctcccaggtccctgtcaggaaactgtcagcccagttgaaaagctgaggctccacacctcccctgccacccaccactcctgggctgtgctgactgcgtgcagggatggggtgtgatccacccgctgcccagttggtgggactcctttccattgccctgacctcctgcctcccctcgcttccaggtacaatgtgaagatgcaagcctttttcacagtcaaacaaaagagcattgcaaacggtaacccggtcaacagtgagctggaggctggtaatgatttctatgacggtagctatgatgacccttccgtgccattgctggggcaaggtaaggctgagcagacaggagtgggcagaa

SEQ ID NO: 10638 - DNA, 517 bp, Homo sapiens
  MAP TO CHR18.3; EXPRESSED IN BRAIN, SIGNAL = 1.1; EXPRESSED IN PLACENTA, SIGNAL = 0.9; SWISSPROT HIT: P49260, EVALUE 1.60e+00; EST_HUMAN HIT: AA768180.1, EVALUE 7.20e-01; NT HIT: AJ310084.1, EVALUE 4.90e-01
gcaatgctggctctatttccttcacccgcatttggtaggcctgacaggactcagaagccagcagccatcctggaggtgaaggtgtagctcttttgactgccctctcccaaaccaagaaccagtaccttggggccctgcagctctccctgctctgggctgctcttgattccctctgccacatcccaggtaaggatcataagcagaggtgtgagcctgcagtgatttaaggtgggaggagctcccatgagggacaagagatgcttgtccagggctccagcatgtaggcaccaagtcagctggcccacaatcacactctaaatgacaggtaccccagccctggtcccatggggaactgaagtgttttcactaactgccatgtccgttgtaaaatcaaggaggggaaaaaagtttctaacatgatgaacatatgctttttatttgtcaggaaaaactcttagttataaaaaggttttctgcccactggccccaccctgctggccaggtgactttgataccc

SEQ ID NO: 10639 - DNA, 528 bp, Homo sapiens
  MAP TO CHR18.3; EXPRESSED IN BONE MARROW, SIGNAL =   1; EXPRESSED IN BRAIN, SIGNAL = 1.1; EST_HUMAN HIT: BG677045.1, EVALUE 1.00e-27; NT HIT: gi16163746, EVALUE 1.00e-91; SWISSPROT HIT: P48594, EVALUE 1.00e-10
tgccagacatgaagttgaggagcaccctaaagaaggtacaagtttaagtgagactttaagaatggtaggatcgaagaggaagtaagatggagaaaatacaaataaagactcagagacagggatgggttctgaccaagcccagggtgcaataagccccttggcttgcctaagtgggattagggtctgactttgagtgtggacccagagtttaggaccctgtgtagcaccctagtggacacgtacctcatcaatctgatgtgcactgtcacttctagcacccaagcgtaccataccaagggcagctgagaggctcaggggagagaaaaatatgtttttatgacgatcatctttgcctatctcttgaaaaagatcaaagcaaaatttggtgtttgctgtaacaagagagtccattgtaaaacttataacgatctaaaaccaaaaaaaaaggagaaagagaaaatggtgattggaagaaaataagtgaacaaacaattttattttacatacctgaaatacaatcatgcacaa

SEQ ID NO: 10640 - DNA, 578 bp, Homo sapiens
  MAP TO CHR16.3; EXPRESSED IN HELA, SIGNAL = 2.4; EXPRESSED IN LUNG, SIGNAL = 2.7; EXPRESSED IN FETAL LIVER, SIGNAL = 2.9; EXPRESSED IN BONE MARROW, SIGNAL = 1.7; EXPRESSED IN BRAIN, SIGNAL = 1.5; SWISSPROT HIT: P37826, EVALUE 1.40e+00; EST_HUMAN HIT: BG104265.1, EVALUE 2.00e-60; NT HIT: AB023224.1, EVALUE 1.00e-60
aaatcacccacacccatgtcaatttttctttaatcccctgtatgtcatacttaattggacacaaagaatacctacaactcaaaaactataggtgttttttcccctgtaaattattctcccaggaagcaagtcaaaaacatatattaaatgtcaaaaacatttaaattaattggcaaaacactcaatttaatctaaaacacatttaccttcatgggctgggctaaaaatcccgtgggctgacttaagtcatttgtaggtaagaagccaggaacattgcgtgcaaactcttcgtaaacagccaactgctttgggtccacaccaccaaccttgaaagaagaaaacctattttgacagaattcactcaataatcaaaataaactgttttgaaagtggaaagtctgcatgtgggtaagctcagggacacaagagtcattacaacatataacagcatgattaagcatgcacgcacacacaaatgcagttcagaagagggcttctcatttccctgaatcctgctaagagtcacctcatttataaattaactgagagtttctcttggaaaatgcctcacatgggac

SEQ ID NO: 10641 - DNA, 539 bp, Homo sapiens
  MAP TO CHR19.3; EXPRESSED IN BRAIN, SIGNAL = 1.8; EXPRESSED IN HELA, SIGNAL = 5.9; SWISSPROT HIT: P50548, EVALUE 2.00e-41; EST_HUMAN HIT: BI522658.1, EVALUE 1.00e-117; NT HIT: gi13630098, EVALUE 1.00e-117
ttttgtggcctacgttcctcagttggcctttgggaaccacacctaagtgcgtgttaaggtgtggagtctagacctgggtcccacgtacctgaccttcccaatggcatttctgtacccacagctattactataacaagcgcattctgcacaagaccaaggggaaacggttcacctacaagttcaatttcaacaaactggtgctggtcaattacccattcattgatgtggggttggctggtgagtaccagggatggttggtgtggagagggtctacatgccccttcaggctaggccaggggccttgacactgtctcccttctgccagggggtgcagtgccccagagtgccccgccagtgccgtcgggtggtagccacttccgcttccctccctcaacgccctccgaggtgctgtcccccaccgaggacccccgctcaccaccagcctgctcttcatcttcatcttccctcttctcggctgtggtggcccgccgcctgggccgaggctcagtcagtgactgtagtgatggcacgtcagagct

SEQ ID NO: 10642 - DNA, 546 bp, Homo sapiens
  MAP TO CHR16.3; EXPRESSED IN FETAL LIVER, SIGNAL = 1.2; EXPRESSED IN LUNG, SIGNAL =   2; EXPRESSED IN BONE MARROW, SIGNAL = 1.3; EXPRESSED IN BRAIN, SIGNAL = 1.1; SWISSPROT HIT: P02461, EVALUE 1.70e+00; EST_HUMAN HIT: BF841754.1, EVALUE 1.00e-61; NT HIT: gi14776207, EVALUE 7.00e-62
ctatatgaccgggtggatggattgctgcaccaactgaccctgcagagcaaccagcgaatacaggccctagagttggtccaaacactggaggcccgggaaagcggactgcaccaggtcggaactacttgcccagagtgggccctgccccgatctcagacgtgagcccccagtccatagcagctctcttcacttttccctgcttgtgctcctccagattgaagtgtggctgcagcaggtgggctggccagcactggaggaggctggggagccctcgctggacatgctgctccaggcccaaggctcttttcaggagctgtaccaggttgcccaggtatatgtggtcacttgttcatgccacgggtattgggatgcaatgccaggaactaggaatgcagaactgtgtgaaagcaattcaatcctttgctttcttagaccttatagtcccatagaagatatcagttgtaattaatcacagtcatatatgtgcctgtaaacccaggcaagatctctggagagaatcagtgcaggtgattctgcctgagggta

SEQ ID NO: 10643 - DNA, 507 bp, Homo sapiens
  MAP TO CHR16.3; EXPRESSED IN FETAL LIVER, SIGNAL = 7.8; EXPRESSED IN BONE MARROW, SIGNAL = 3.2; EXPRESSED IN BRAIN, SIGNAL = 2.8; EXPRESSED IN HEART, SIGNAL = 3.2; SWISSPROT HIT: O60356, EVALUE 4.00e-06; EST_HUMAN HIT: BI835529.1, EVALUE 0.00e+00; NT HIT: AF069074.1, EVALUE 0.00e+00
tcccaacgagtgttttagcccagatcctgcctcttccctgctttctgccgagaagcgggacctcctctatggaaaatatccagctgggtgagcctgggagggaggaggtgagttgggctggactcagggaccgactcttcccgtctcatgactgtgtttactgggctggattttgggaaggggccagattgcatcagacagggcctgatgggctggagccagactgtggtctgaggaggagacacagccttataagctgagggagtggagaggcccggggccaggaaagcagagacagacaaagcgttaggagaagaagagaggcagggaagacaagccaggcacgatggccaccttcccaccagcaaccagcgccccccagcagcccccaggcccggaggacgaggactccagcctggatgaatctgacctctatagcctggcccattcctacctcggtaaggcccactcagccatctccacggtccttcctcctctcccgaaatc

SEQ ID NO: 10644 - DNA, 581 bp, Homo sapiens
  MAP TO CHR14.3; EXPRESSED IN BRAIN, SIGNAL = 0.99; EST_HUMAN HIT: AA332819.1, EVALUE 4.00e-95; NT HIT: gi14753486, EVALUE 0.00e+00; SWISSPROT HIT: P55526, EVALUE 8.50e-01
tgaaaatcaacagtctccagcttgattaggcatgctatatagtaatctttgtatcttgaacaatgcattatttctttatcatgaaattcttagttttctcgtaagaggtccagtaattccataaagacatttaaaaatttttcaaaagatgaggatattttaccgtcgtttagttatatagagttcatcaagaagatgtcgttcttcatagctcatccatcgttcatcaggcaactcttcttccttttgcagcaactgttcatacagccgaactggattccagccagtcattatgtcataagtaattacacatcccaaggaatgtgatactattgagactttaccccctttttcttcaaagtctggattccgagaacagaaaagggaatacaatcgattcagctcttgctgaaggcctttaactagctgtttgaaataagaaaacattatcatattagacttgtcactgactactatacacttattctaaactcaaatacattaaggtagaaaaacatacattaccgatcaaatatacctaggttattaaaattaacttaggtctttcaaaatcttgcagg

SEQ ID NO: 10645 - DNA, 513 bp, Homo sapiens
  MAP TO CHR19.3; EXPRESSED IN BONE MARROW, SIGNAL = 1.8; EXPRESSED IN BRAIN, SIGNAL = 1.2; NT HIT: gi16163043, EVALUE 1.00e-35; EST_HUMAN HIT: AL133769.1, EVALUE 2.00e-35
cccatttcaggtcctcagtctattcctcatattagatgaaaaacagtcttcttatggtaaaggaggcctcttatctttttctctgatttggagcttttattctgcaccagtaaatctcaccagcaaattattttggttcataaaaacaggagtttctttttgaaggggaaattcatgtttctgtttttttttttctttctttcttaaagaaagggttttatgtgtgtttagatctctgcacaaccaatcacctcaacaagtgtttggatttctgttccaggagcagctgacagacgaagaaaagtgctggacaggaagggagaattctgacgccaacatgcagcgaagtatcatgtgagcaccctcccttgcccctgagtctttccttctccaagtcctctgtttctttctctaaatctgtacttaaaaaaacaaacaaacaaacaaaaactcttacgttagattttgagttggaatttccaggagtcaagtagtatggaaaatgagccgtgg

SEQ ID NO: 10646 - DNA, 523 bp, Homo sapiens
  MAP TO CHR18.3; EXPRESSED IN BRAIN, SIGNAL =   1; EXPRESSED IN PLACENTA, SIGNAL = 0.84; EXPRESSED IN BONE MARROW, SIGNAL =   1; SWISSPROT HIT: P48415, EVALUE 3.70e+00; NT HIT: gi15294460, EVALUE 2.00e+00; EST_HUMAN HIT: BF887923.1, EVALUE 1.90e-01
aatgcaaactgaaggcaagctgactaaaattccagtttcttgttgttgcttttagccttagcaaaagcgaaagtaagttctgaagttgcgtttcatcctctctggctgtcaaaagaaacctcaaccataggaacttggacactataacttttggtgagccagctaagcctgaggttataacctgctacaactaagaagataattcaagtggggcaagtacatgatacaagggaggaaacaaccgaagtaagggattgttctgtgaagtaagagagtattttgtacagggttacaagccttgccctgatgaagctttattcaaatggcttctgagaattttagatccgtagtattgtctctggctttgaacgctgttgagggaggggaatgtttgcactcatcccgcatccttttttggctgctatctttgcggggattgttcaaggagaaatccatcctgactggaatgtagtaaagaaaggacagtcattcccagagaagggcaatttccccactcttccct

SEQ ID NO: 10647 - DNA, 564 bp, Homo sapiens
  MAP TO CHR19.3; EXPRESSED IN BONE MARROW, SIGNAL = 1.5; EXPRESSED IN BRAIN, SIGNAL = 1.3; EXPRESSED IN PLACENTA, SIGNAL = 0.99; NT HIT: gi16163130, EVALUE 2.00e-43; SWISSPROT HIT: P47929, EVALUE 7.00e-11; EST_HUMAN HIT: AI659838.1, EVALUE 1.00e-67
gaaggcccgaagttccttagccaggaagtcaaaggatggcttggcaaggactcccagggtccagggtgtctccaggacttggagtatttccagagttccctgggactcagacatggaagtcataggactatatctaggaaccctgagattacccagggacctcaaatgcttagggaaacttagggaccccagccacaaaggcacgggggcaaatacgaatacatcagatttgaggtcagaaatggcctcggactcctagcctggtggatacaggtggcctcgggcccctacttctggactgcaaaaattgggagtcagctgatcctgagacctgtaccctttacccctagggcctggggcctcacctgctggcattgggaggaaccaagccgcgaattctcagcaccgtgccagggcggatgccctcgggcagtgaggacttgtgggggacgttctgcaagagtggggtgcaggggccactgtgagccggtgagaccgaaggagggaggcagaaggtgggtcacccctcagaggagccgaccagggctgagactggcagaaatc

SEQ ID NO: 10648 - DNA, 587 bp, Homo sapiens
  MAP TO CHR16.3; EXPRESSED IN HELA, SIGNAL = 3.5; EXPRESSED IN LUNG, SIGNAL =   3; EXPRESSED IN FETAL LIVER, SIGNAL = 2.3; EXPRESSED IN BRAIN, SIGNAL =   2; EXPRESSED IN PLACENTA, SIGNAL = 2.6; EST_HUMAN HIT: BE827235.1, EVALUE 1.00e-76; SWISSPROT HIT: Q9NY46, EVALUE 3.30e+00; NT HIT: gi16164527, EVALUE 9.00e-77
ttagaatccagcaagcacccgaaaaatgctacctatgcaaatattacagtgaaaattttcatctttaggtctttccaatactgtgctttctggagcacttttctgaaatttaaaaaccacatgtaattcattcacggtccataattgggccatcacgtggttactcttctatacatcaaaaacagctgctcaccccaacaactgtagtttggaaattattttaagagggacagatggcttaacttttgcctctcatgactccatacctgtttttgaaggactacttcccaaaaggtatcagttgtcacttcagtgattaaatgctgagacgggaactgggcagagccacttccaatgagatgccttttcaagggactatagagaacgctgaagttttgaataaaagactctaaaaataaagagaaaatgagatcaactctcctctagatacaaagagaatagctggcctacttttaaactccacattttaaaaactcaaatgacttcataggctcacatttttaacatttcacctatcagcaaaaccccaaacaaagctgcccgggtggcatcaggtttagctctgg

SEQ ID NO: 10649 - DNA, 527 bp, Homo sapiens
  MAP TO CHR16.3; EXPRESSED IN PLACENTA, SIGNAL = 0.97; EXPRESSED IN HELA, SIGNAL =  24; EXPRESSED IN FETAL LIVER, SIGNAL = 1.8; EXPRESSED IN LUNG, SIGNAL =  21; EXPRESSED IN BRAIN, SIGNAL = 1.3; NT HIT: M80244.1, EVALUE 1.00e-81; EST_HUMAN HIT: BI818903.1, EVALUE 0.00e+00; SWISSPROT HIT: Q01650, EVALUE 3.00e-17
ccttgcatgttgctcagatgaggtttctcctttaaaacaaaattccctggtgctcagctgggcccagccaggctggacagtccccggtggccaccacggccgtccacagccctggtcgtgggccccagggctcagccagccgcctctctcttccagtgtgtgatgacgctgctctacgccttctccaaggacatcttctccgtcatcaacttcttcagcttcttcaactggctctgcgtggccctggccatcatcggcatgatctggctgcgccacagaaagcctgagcttgagcggcccatcaaggtgagcccggggcctcccgctcacccaggcacccttcacagaggcagggtccgtgggtcctaaggaccctgagttgggagccagcatcccagctcagcctctggacctgcccctgcctgcatgcacctgggtcgactaattccggtgatgacttgaccaccagctacgagggtgccaagtgtgactgcaggagccggggttcctcaaaggacagcagatgg

SEQ ID NO: 10650 - DNA, 594 bp, Homo sapiens
  MAP TO CHR16.3; EXPRESSED IN BONE MARROW, SIGNAL = 0.99; EXPRESSED IN BRAIN, SIGNAL = 1.1; EST_HUMAN HIT: BI462383.1, EVALUE 3.30e+00; SWISSPROT HIT: P98161, EVALUE 2.00e-05; NT HIT: gi16164462, EVALUE 3.00e-98
ttattttccgagcgttttgcacttgaaaccctgcttttataaagaacagttctcacccgaggggatgaataaatggcacatgtaattttgctttgcccaattcatgattatcacaaatcatcagctccttcttggctggtgggtgatgcaggaacccactgagcaaggccttcctaatgctgtccttctcttcaggtgaaggtcacagtgctggaagacaatgatccctttgctcagtaccactacctggtgacagtctacacaggacaccgacgaggggcagccacgtcctcaaaggtacctgcctatgcaagatccactgattaatcagcacatcccacccagccctgctatgccactgtggagttggccacttctggtctctggatttcaggtgactgtcaccctgtatggcctggatggagagagagagccccaccacctggctgatcccgacactccggtttttgagcgaggagcagtggatgccttcctcctctccaccctgttccccctgggagaactgcggagcctccggctgtggcatgacaactcaggggaccggccatcgtggtgagttgggggcagacaaac

SEQ ID NO: 10651 - DNA, 585 bp, Homo sapiens
  MAP TO CHR14.3; EXPRESSED IN BRAIN, SIGNAL = 1.3; EXPRESSED IN LUNG, SIGNAL = 1.3; SWISSPROT HIT: Q47112, EVALUE 1.50e+00; NT HIT: gi14747576, EVALUE 2.00e-77; EST_HUMAN HIT: BF217418.1, EVALUE 3.00e-71
cgcgcgcttttctataaatctcaggcctactgaccaaccaattcccataaagagtaagttggaggaaaaaggaccctgaacgctaagcgcctcctaaactcgcagtgaagcttttccacattcattctctccaagcctgcctctctcggagccgggttttcacttaggccaacctcacccactcttggggaggacagctgcaaggtaaacgactctgcaaccggtaccgccgtcctcctcactccgaccgaggaggctgggcccgggctccttccacacctcggcttcgggaccgcatcccacacctctgcaggcctagctgcccccggcctctgctagagaaaaagaatggcgaggagggaccggatggtttccatattcccagtccctcaggccacctctcacctgtccaaccagggtgtgtagggagcgaaagatttcgtagagcacctctcgggagaggttgggtctgcatcttcgctccaggttcctgtcaccgctgctcgggcgattaagctccgtggcagcagccatgatatcttctcaggccgccccaccaccaccaccaccaagatttgctcacaa

SEQ ID NO: 10652 - DNA, 571 bp, Homo sapiens
  MAP TO CHR18.3; EXPRESSED IN BRAIN, SIGNAL = 6.3; EXPRESSED IN HELA, SIGNAL = 8.3; EXPRESSED IN HEART, SIGNAL =  35; EXPRESSED IN FETAL LIVER, SIGNAL =  12; NT HIT: D28126.1, EVALUE 0.00e+00; SWISSPROT HIT: P08428, EVALUE 1.00e-14; EST_HUMAN HIT: AA169282.1, EVALUE 0.00e+00
tcagccttgaattatctagcccagttgactgtaccaatattcaagtaaaatagatcaagaagcatttgcttaccaatttctcaatttgatcttggttttaaagaataacacaaatgacagaaaacaactatgcattatggaacctttatttttcatgtgatttctgtacataaggagtatgagagtaacccttttacaaatggaactaatttactagaacaatgacaaaactgaactggtatttgatgtgaatccacaggagtttaagcttcaaatccagccaagaaatttgttacaatctctttcagctttgcatctgattgttctgagatctttccatcagccctatttggaaataaaagcaggtcgtaagttctgacctggaaaaagttttaatgactagcctaactacagatttgaaaataattttaacttcatatcttaaacataactttaaaaaaagatgccaacaattgcattcatacctgatagtgcccaacaaggcttggtgctggctgacgacatgagacaagaaagcattctcaaactttgtaatcttgctgggctccag

SEQ ID NO: 10653 - DNA, 565 bp, Homo sapiens
  MAP TO CHR16.3; EXPRESSED IN BONE MARROW, SIGNAL = 1.1; EXPRESSED IN LUNG, SIGNAL = 1.3; EXPRESSED IN BRAIN, SIGNAL = 1.1; EXPRESSED IN HELA, SIGNAL = 1.7; NT HIT: gi13124880, EVALUE 1.00e-60; SWISSPROT HIT: Q08024, EVALUE 1.00e-16; EST_HUMAN HIT: BG757021.1, EVALUE 2.00e-60
aatgcagagatggatagtggcttctggttagacattagcagtgtgagatcctaacgtcagcaaaaaatgacctgaaagaaagtattgattccatgtctgattttatacttaagcagccaatggcaaatgtcctcaaaatggaatcagatgtttgtaacttaatacttaagaaaaatgatgagtgcatgtttttttttacttttaagtattctctgtgctgcctggcttaagacataaactgatgtaaaaataaatgactgcttgcataatttatgtaatgtcctgctcctgatcctgtttgtattgatttttctaaaaggcttttgtggccacaggaaccaatctgtctctccagttttttccggccagctggcagggagaacagcgacaaacacctagccgagagtatgtcgacttagaaagagaagcaggcaaggtaggaaacatttctttgcaatttaaaatactgtgggttgttttgttagagattatctggtaatttacattttaataaagatcacagatctgattataccagcatatgctcagatttgttttcattcca

SEQ ID NO: 10654 - DNA, 540 bp, Homo sapiens
  MAP TO CHR19.3; EXPRESSED IN FETAL LIVER, SIGNAL = 1.9; EXPRESSED IN BRAIN, SIGNAL = 1.3; EXPRESSED IN PLACENTA, SIGNAL = 1.5; NT HIT: AF361486.1, EVALUE 1.00e-101; SWISSPROT HIT: Q26474, EVALUE 2.30e+00; EST_HUMAN HIT: AI276341.1, EVALUE 1.00e-101
gcgaaaccacaacacacaactgagagttgcctttgggacttcacgaaggtggaagactgttctcttagtccaacatgaaccagtcaggggtcacgtcaaggaaggctcagagactgtgtccgaccaatatggtttatttctgccccagccaagcttctttggaccctggctgggggaaaggcaccccaggcaccggcaagttccagtcattgcagatcctccaggtctaggtgtgactggtagtagcctgggcactgttgctggacgttgtattctccttccttcttccgccggcgggtggtcacctatgagggtgaggaggaggcgtgagaatggactggtcagccgtccagggagaggagaccacaggggtgagaatatggccaaagccagaggccttatgcttcctctgtctcccttcattgtttcatttaatttctccctcagttcttttcctcttttcaccactttcttttcttctgtctccttgtttcactctcggtttaaaaaaatttttccccctccgatatccccttcatt

SEQ ID NO: 10655 - DNA, 516 bp, Homo sapiens
  MAP TO CHR16.3; EXPRESSED IN BRAIN, SIGNAL = 1.6; NT HIT: gi13648926, EVALUE 4.00e-60; EST_HUMAN HIT: AI138923.1, EVALUE 6.00e-60; SWISSPROT HIT: P57737, EVALUE 2.00e-15
aggcatggtggtcctaagtgaggggtgccggcaccctggggagactacgtgcccagccatgagctctaggtcccagcggcagctccgactcccttgctcccccagggcctcgtcctcctgcctaagacggagtgcgacgtgcgggaagtggagctgatgcggtgcctgcggctgcgtcagtcctccctggagcctgtggccttccggctgccccgagtccgggtgagggtggggacctgggactcccatgcccaccgccttctcggtgcctagaggggagtttgggtcccgtctgacccagcttccaaacttccctacccattgttcatggggacacctacccccttctgctgagatgctgaaactcatggaagccccaggctggtgggagggtcccaggtcttgccctgtccctccccaacagatgcccgtgtgccctgggcacctggtcaatgtctcaggacagcccgtttctccctctgcagaaagagttcttccaggatgacgtgttcccag

SEQ ID NO: 10656 - DNA, 594 bp, Homo sapiens
  MAP TO CHR18.3; EXPRESSED IN FETAL LIVER, SIGNAL = 1.7; EXPRESSED IN BONE MARROW, SIGNAL = 1.6; EXPRESSED IN BRAIN, SIGNAL = 1.4; EXPRESSED IN PLACENTA, SIGNAL = 1.1; NT HIT: gi14765948, EVALUE 2.00e-84
taaaatggctgggcacaaagccttaacaaatttctagacaattaatacatatctgttaatacaactgtcaactagaataatttcacacacacatgcaaaaaagtgcttcctaaaagttagaatattgtgtgtattggtatactgtttgggactaatcaaattttgatttcagatatgctagttgctatttaatacatcaaaactgtgaagcagtctcctgaatttcaaaatcattacacatgagtatgtagagtaaaacattttctcttagtccttctaaaagtaaaaattaagccctgaagagaagcacaaaaagatagggagagctggacgccgactgctcggcggggctgtaccttggagctgctgcttgcactgggcgggctgcagggaggaggagagctgctgcaggttctcgctctccacctggtgcatgaggtagaagagcttccacagcatttgcacagacagagtcccaaagggcatctcggacataaacagccaaatgccaagtctgcatgtaagcaggaatcattttatttattaatcagcttcattacactaagaaagtagacaaaccattggctctcaagg

SEQ ID NO: 10657 - DNA, 595 bp, Homo sapiens
  MAP TO CHR18.3; EXPRESSED IN FETAL LIVER, SIGNAL = 1.1; EXPRESSED IN BRAIN, SIGNAL = 1.2; EXPRESSED IN PLACENTA, SIGNAL =   1; SWISSPROT HIT: P11284, EVALUE 2.00e+00; NT HIT: AY050455.1, EVALUE 1.40e-01
catcaccctcactgtcatgcacagccctgcctgtgggaaggtcctttctgaaagcagaggtgcaagtcagaccccagttctcaccactctggactctaggggagagggagcttggagctcttctaggattctgaaagaaaataaaaattctctgtgagggcatcaaagatctgcatgggagaaaaattcaaatacctgaaacattggatagtctcacaccataaatgggtttcatcacagacccagtggaaggaaaacctcaaactgtctctgttcacatccccttgctccagcaaaatcactggggactttctgtccacagcacctgcatcccctccagatgtcccgggcctcaagctttgctttgtgaggtttgcagatgtcctgaccattaactacaggcttttccacatgggaatttggctgggctgtccctgacctggggtcatgacagctgcaagaccaacaagggatgggcagatgggtgttgaggggataagaaagcacattaatcttttaaggccttcctccatatcatcgagaaagatgagtccgcacagagctgagtagggggtggattggaggtaggagaggc

SEQ ID NO: 10658 - DNA, 596 bp, Homo sapiens
  MAP TO CHR16.3; EXPRESSED IN BRAIN, SIGNAL = 2.2; EXPRESSED IN HELA, SIGNAL = 1.6; SWISSPROT HIT: P17990, EVALUE 1.50e+00; NT HIT: AB067517.1, EVALUE 6.00e-47; EST_HUMAN HIT: AW298765.1, EVALUE 0.00e+00
agtgtccaggatgttttccgtggctcacccagccgccaaggtgccgcagcccgagcggctggacctggtgtacacggcgctgaagcggggcctgacgtgagcagctcctctgttcccagccctgtcccgggatccctccccaagcccgcatcctgctagcaggaaccttctccagccccatgccctctccctgctgtctgcaccctgggcagcatgaggctggagagccgagttcattcttgtggtcgcccctttcctcagggcctacttggaagtgcaccagcaggagcaagagaaactccaggggcagataagggagtccaagaggaattcccgcttggtgagtggcgggaggtacggatgccctttgcctctttggtgtggagggctgggcaagggcagccctgggtgatatctgggctattttctgaagtgatctggttcaggtgtgagtagaaaaggggatatcaggaaaggctgaggggcttttctatccccaaactttgctgtgcatactttctgcttgggactcagtacctgctccaggagcttccagtggggtaggtgggacccctacagacatggacagcaggaga

SEQ ID NO: 10659 - DNA, 500 bp, Homo sapiens
  MAP TO CHR18.3; EXPRESSED IN BRAIN, SIGNAL = 1.2; EXPRESSED IN PLACENTA, SIGNAL = 0.94; EXPRESSED IN BONE MARROW, SIGNAL = 1.4; NT HIT: AF144301.1, EVALUE 1.20e-01
ctccatgtttctgctgcttgtttcaagtggaagctgttgttcaggaatccagagtggataagctgaccattctgctgtttgttgtctgattagaaagcactgctgagttgctctcaaaagcataggtggaatatgatttaagaatactctatttttttatctgcttctgatgagtacaaagttgttatagtgcatagaaaggctactcgctgtgctgagatccaaatgtcctgagctatagttcttacttccttgtttgctacctgtgggcttggggaaacttgcataattgttctaagctcagttgttttcacctgtgatctttgacaatcttttctttaatagccttctatgaccacattttaagtcacatgactatagaagagaattatggagagaatattagtgatggagagaagaccagactcagagttatgcagagggatatagcacgtggataggatttccaaatatctttttgaactcatttgccttgctcc

SEQ ID NO: 10660 - DNA, 504 bp, Homo sapiens
  MAP TO CHR14.3; EXPRESSED IN LUNG, SIGNAL = 1.2; EXPRESSED IN FETAL LIVER, SIGNAL = 2.2; EXPRESSED IN BRAIN, SIGNAL = 1.1; SWISSPROT HIT: P16289, EVALUE 8.00e+00; NT HIT: AF161445.1, EVALUE 0.00e+00; EST_HUMAN HIT: AL573352.1, EVALUE 0.00e+00
gcctgataatctgtatttctcttttctttcttttacaaaattatatagaactgctatgatcttctggtcagaaagaaaagacttattgttctcttcagccactggttacttcatgcctatggaataatctccatttccagagtggataaacttgagcaagatttgccccttttggctttggtacctacaccagcccttttttacttgttcactgcaaaatttaccgaaccttcaaggatactctcagaaggagccaatggacactgagtgtagacatgtgaaatgccaaaaacctgagaagtgctcctaataaaaaagtaaatcaatcttaacagtgtatgagaactattctatcatatatgggaacaagattgtcagtatatcttaatgtttgggtttgtctttgttttgtttatggttagacttacagacttggaaaatgcaaaactctgtaatactctgttacacagggtaatattatctgctacactggaaggccgctag

SEQ ID NO: 10661 - DNA, 559 bp, Homo sapiens
  MAP TO CHR19.3; EXPRESSED IN FETAL LIVER, SIGNAL = 2.5; EXPRESSED IN BRAIN, SIGNAL = 1.7; SWISSPROT HIT: P20853, EVALUE 8.00e-31; NT HIT: gi14277708, EVALUE 0.00e+00; EST_HUMAN HIT: AW601674.1, EVALUE 0.00e+00
aaaaggcctaatggaaagggggcttctgtttcttaagataggaagttttggaacttgagtttgattctcccgacacaaagagtctggggagatgcaggactcaggagtgtctaagtggaaaggtggaatggatgtggtggttggggaagtcctttttgactgattgagggagtgggacagtgagtagaaagcttctaatgggggcaggattctggggacacagagaagggctggaagtccccgtagtctagggggtggggaggatagcaccttagggaggaaaaaatcccgaaacttggtgtcctttttaaccctgcgggccaaactcatggggatcacgtctccaaatctttggatctcgtggatcactgcctccatgtagggcatcttggtccggtcctcaaacttgggctgccggttcttgccgatcactctgtcaatctcctcatggaccttggctgggggaggagggggaatgtgtttaggtatctgggagtctcagagcaggaaatgatagtctgaataggtaaaacggggtggatgatacggctccccctat

SEQ ID NO: 10662 - DNA, 548 bp, Homo sapiens
  MAP TO CHR16.3; EXPRESSED IN BRAIN, SIGNAL = 1.9; EXPRESSED IN HEART, SIGNAL = 1.7; EXPRESSED IN BONE MARROW, SIGNAL = 1.7; EXPRESSED IN FETAL LIVER, SIGNAL = 1.4; NT HIT: AL163300.2, EVALUE 8.00e-03; SWISSPROT HIT: P75555, EVALUE 2.30e+00
ctttttacccatgcaccctgctttactatgcttacataataaacctctacacattgttcaatttaactttgagctattctaaagaaaatagtctaagtgtctcaaacaggagtcaaagtcttgatttagctgatgtgctttggggaccacctgaaccagatctttttttcagacagagcagggctggaatttccagggcaagaacaagagaaggaacaatagagcagcacacgtcctttaggtaccatttgactcctggaacagttctcatcaggtcaatggtgtctttggagtatgggattgtgggtgatggggagtaagcatttgactcatgaaacaggtaacctctaacttccaggaaacttgtagttgtaatggttaggagatggttccagttttttatgcctctggctcaagatcctcagcaaacccatcctgataactgtcctgacagtgctttagacagctttcaagcttcttacggtcatgtctacaaggcctctccaagatatttgcgtagtatttctggggaaggaaggtcagacaga

SEQ ID NO: 10663 - DNA, 500 bp, Homo sapiens
  MAP TO CHR18.3; EXPRESSED IN HELA, SIGNAL = 1.1; EXPRESSED IN BRAIN, SIGNAL = 1.3; NT HIT: U22184.1, EVALUE 4.70e-01; EST_HUMAN HIT: AW268999.1, EVALUE 1.80e-01; SWISSPROT HIT: Q9UGU5, EVALUE 3.50e+00
agtcatgcactgtgaacctagctctcagcatcttggccctgaaaagtcttcttgccctttctctagaagcatttctgagtttagcagatattccttcatctctcctgaggaaataactttttttcctgttcttaccttttccagctgcagtatatttccaaaagagccctcacgctaccgttttgattcccttcccactgtggagtaaggttttttgttccataagaaaaaaataagccagaaaattctggatggagttttggtggtgactgccgtttctctcctccagctgcaactgattttcactggtgcctacaatatacacattttattgctctttcacttacctttaaggcttttcgtttctcaaacagatgggggagtaagtcccagtgaatgttggtggtggctgctctttcccgtctccagctagcatcatgaaaaagcttttccaagagccttcctgatatttcctgtgaagaaaataaactcagcatgaa

SEQ ID NO: 10664 - DNA, 600 bp, Homo sapiens
  MAP TO CHR18.3; EXPRESSED IN BRAIN, SIGNAL = 3.3; EXPRESSED IN HELA, SIGNAL = 4.9; EXPRESSED IN PLACENTA, SIGNAL = 2.2; EXPRESSED IN HEART, SIGNAL = 3.7; EXPRESSED IN LUNG, SIGNAL = 3.4; SWISSPROT HIT: P09132, EVALUE 7.00e-55; NT HIT: gi4507212, EVALUE 1.00e-130; EST_HUMAN HIT: BE440142.1, EVALUE 1.00e-129
tcttgtgaaggtggcttgcactgccgtgaggttcccggccaagcaggacaggtttatttgtatctatcctgcttttttaaataataagaagaccatcgcagagggaaggcgaatccccataagtaaggctgttgaaaatcctacagctacagagattcaagatgtatgttcagaagttggacttaacgtatttcttgagaaaaattaaatgtactctagagaatggaatcgtgatgtccaatacagaggcagctcaaacaggtccagctcaaacaggaccagctcaaacggctccagctcaaacaggaagatggcggcctctgccttgtacagttcccatcatgtaagtcagtaatgttgtatgcagcagaaataatacctaaactaaaacgaaggacacaaaaaacaggaggaggtgaccaaagtcttcaacaaggagagggaagtaaaaaagggaaagggaagaaaaagaagtaacctagtgtcagcatcaagtttgtggtactactgtcagagacatgaatggaggcttcgaatttgtattggaggaaaacagaagctttttgtttgcgtcatttaactgagctgtgaacccttgtg

SEQ ID NO: 10665 - DNA, 533 bp, Homo sapiens
  MAP TO CHR18.3; EXPRESSED IN LUNG, SIGNAL = 1.7; EXPRESSED IN BONE MARROW, SIGNAL = 1.5; EXPRESSED IN BRAIN, SIGNAL = 1.1; EXPRESSED IN PLACENTA, SIGNAL = 1.1; EXPRESSED IN HELA, SIGNAL = 0.94; SWISSPROT HIT: Q18473, EVALUE 8.60e+00; NT HIT: AE002143.1, EVALUE 3.20e-02; EST_HUMAN HIT: AI792240.1, EVALUE 7.50e-01
aggggatggggtatgtcttctacccactcctcagtaaggattgccctcagctatcagaaagcatctaacaattctggctttaaaggggagcagggccagagtctcaccctcctcttcctaggacatgtggcctatttgaaaagttgcctccttggccccaaagactacacggattcaggaagggcaggctgcatcagccggaaaaggtccttccatagacttaccccaggcaagggcatttattcacccctacctgcacctgcttgaggcagtcaacagtggttccgaaaaccaaagagtgtgctgagggaaccagctctttcatccactggagaaagaagaagacagctcattttataaaataaacagataaaccaatatacatataaatactttaaattcttcctaacctgctggcacactccatgtaaagttgtgccctttgtcttatgtttgtattttgtgttcgtctctggaccctccaacttgaatatgtgttccttgatgtgaagactgcctcgttcaccactgta

SEQ ID NO: 10666 - DNA, 570 bp, Homo sapiens
  MAP TO CHR16.3; EXPRESSED IN BONE MARROW, SIGNAL = 1.6; EXPRESSED IN FETAL LIVER, SIGNAL = 1.6; EXPRESSED IN BRAIN, SIGNAL = 1.1; EXPRESSED IN LUNG, SIGNAL = 1.8; EST_HUMAN HIT: BE297745.1, EVALUE 5.10e-02; SWISSPROT HIT: Q07085, EVALUE 1.60e-01; NT HIT: AJ243297.1, EVALUE 5.40e-01
ccactccctccctcctactctgcctgtgctcacgcccctttcagaatgtgcctttggcccagcgatctggccttcccagtcttctgggtgctgctgggcactgctggaggaataggaagaggacttgggcaggcgccagccccatgcagtatgcgcgaatgtgactctaaggcacacagcatgtgcccccgacagcccagacgggtgtgggcagccccgggccacacgggccatggcggagagttgctgcccctccctacccagcaattaagccgaggctgtgacagcgacgtgggccgggtgctgtctggggtttccttcccgggccggttgtgtgtccaggcccccggggaatctgggataagacactgggggcgctgccgtgggaaaggccaagggacaccgtctggacgggttccccgagaccacgtgctctaagccccgagtctgatcccaggcagggtgccccgcctctcccagctccgtctctgctccccacgggacctgctgtctccagcagacctggaggtgagcccagcccctggccgcggaactgggagagaaaggcct

SEQ ID NO: 10667 - DNA, 599 bp, Homo sapiens
  MAP TO CHR14.3; EXPRESSED IN FETAL LIVER, SIGNAL = 7.9; EXPRESSED IN LUNG, SIGNAL = 3.3; EXPRESSED IN BRAIN, SIGNAL =   4; EXPRESSED IN HELA, SIGNAL = 5.2; EXPRESSED IN PLACENTA, SIGNAL =   3; EXPRESSED IN HEART, SIGNAL = 3.4; SWISSPROT HIT: Q09749, EVALUE 1.00e-18; NT HIT: gi16166605, EVALUE 0.00e+00; EST_HUMAN HIT: BG701039.1, EVALUE 0.00e+00
cgtccgcactgtctactgtcattcagagaaagtctctcggactttttccaaactgtactattcagggattgctccactgctcataaggagcttcgtcccctggctctgttactccttctactgctcgccacagccacggctcatctacttctccatcatctatgtcctgggcatctctgccatcattgtgacagtgggaccggtttgtcactcctaagcaccggcagacaagggcaggggtgttgctgggacttggcttgagcggtattgtgcccaccatgcactttcctattgctgagggtttcgtcaaggccaccacagtgggccagatgggctggttcttcctcgtggctgtgatgtacatcaccagagctggcctttatgctgcttaaattcctgagcgcttctttcctggaaaattagacatatggttccagtctcagcagattttccatgtcctcatggtgacggtggcctttgtccacttctgtggggtctccaaccttcaggaattccattacagccgagaaggtgactgcactgatgactcccttctctgagccttcccatctgaggggtggaggaggaacttcccaagt

SEQ ID NO: 10668 - DNA, 557 bp, Homo sapiens
  MAP TO CHR18.3; EXPRESSED IN HELA, SIGNAL =   1; EXPRESSED IN BRAIN, SIGNAL = 1.2; EST_HUMAN HIT: BF746915.1, EVALUE 2.00e-01
agctccagatccaaaagagcttataatttctttcagcatatttggcatagccacacgaaaagatgacaatatgagattacaaatcattttctgccaagatgagtaaacgggggagggcacacagtgtgaatgagggcagcgagagtcctaacctgagtgacttttataacatcaagatgacgttccaactgtgtaatgtgaagcacaaaggaagcagaagctctggtaagcaattcccaaccatgcaaagcaaacatgacctcccttggggtcctgcccttgacggaggctgaggtcgaaactcctttcattcttgcctgtaaccagcacctttagctatgatggggagtatatgcttgtcaatcatgtgttccaatcagagaagacactaaaacccatgtagtccaagagaatcttttcagtgatagataaaactcagaaagatcaaagatcatccatgcctgaaacagatggaattaagaaaaatgccattaacctcacctctattctcctcttgttgacagagttgatagtccaggacctgagcttgcttttga

SEQ ID NO: 10669 - DNA, 532 bp, Homo sapiens
  MAP TO CHR14.3; EXPRESSED IN BRAIN, SIGNAL =   1; EXPRESSED IN LUNG, SIGNAL = 1.1; SWISSPROT HIT: P10476, EVALUE 5.70e-01; NT HIT: AJ277661.1, EVALUE 5.10e-01; EST_HUMAN HIT: AW842384.1, EVALUE 3.00e-03
agatgcagatggggaaactgaggctcaagccagtatagactggaggctaactcccaagacggggacatttcctggctcctcctgctcctgctagaatagccaactgggccaaagtgtgaaggtgcccacggcccctggctccacactgggcagcaccctggccctctgctccacgagcacctgagtgtccctgagtgagaaggggcagtgtcccagacaacgctcagagcctaggaggcactctcacctcagcagactttcttccagcagcctcaaggcccgccacgactctgccagctccctgagctcctcctgcaccacggcagcaccctccggagaagacttctccatcaccagccagccctgcgcttccaccagggacagctgggcctccttctccgggaattctgccaccagcctctaaaggacacacggacacacagacacacacacggtgagggtggagggaggtttctgctccttggtgtgggaacgttggcctgtcaaggctgcttctttgggaagtgggtga

SEQ ID NO: 10670 - DNA, 549 bp, Homo sapiens
  MAP TO CHR18.3; EXPRESSED IN BRAIN, SIGNAL = 1.7; EXPRESSED IN HELA, SIGNAL = 1.4; EXPRESSED IN BONE MARROW, SIGNAL = 1.8; SWISSPROT HIT: P37094, EVALUE 6.80e+00; NT HIT: U14914.1, EVALUE 3.30e-02
aaatggcaccagtatctgcccagctgccgaaacctgaaaacaaaggtcatactgaattattcactctcttttattaatacttccattcatccaatcatctctaggccaggttacctacctctgaattcctccagtcctcatctttcccttcccctgtcactgtcactataccagggcaggttatctttatatctatatcgatatcaatatcaatatctatatcttctatatctatattgagagaaagtgcaacaacccctttgttgacttgctagcaatcaagtctttgatttgccaacaaagtattcctttcaatgcgcagatttaattcatatagcattttcctattcacatttcttccactgcttgctgtcactggataaaatgtaaagtttccttgcattgcaaaggggcctcatgatctggcccttttcacttcagcatctgcttcttcctattctctgtcccatcaccagctgagcagaacatctcatgtttcagccttcctccaagaagctctcttacccacctccccatccaggaaacata

SEQ ID NO: 10671 - DNA, 510 bp, Homo sapiens
  MAP TO CHR19.3; EXPRESSED IN FETAL LIVER, SIGNAL = 3.1; EXPRESSED IN BRAIN, SIGNAL = 1.8; EXPRESSED IN PLACENTA, SIGNAL = 1.4; EXPRESSED IN LUNG, SIGNAL = 1.4; EXPRESSED IN HELA, SIGNAL = 1.4; SWISSPROT HIT: P78329, EVALUE 4.00e-14; EST_HUMAN HIT: BG488791.1, EVALUE 2.00e-75; NT HIT: AF221943.1, EVALUE 3.00e-79
ggggctttctggaatttagctctcagtccttgtttattcatcccagagccctccctttcctgcctccacccaccccttccctgcttctctccactgtccctggagctccctgagactttccctgggcctcaggatctcaccctccatcctgtctgccctgcaggatgccgcagctgagcctgtcctggctgggcctcgggcaggtggcagcattcccgtggctgctcctgctgctggctggggcctcccggctcctggccggcttcctggcctggacctatgccttctatgacaactgccgccgccttcagtactttccacaacccccaaaacagaaatggttttggggtcaaccaggacctcgtgagtgtggcagcaggatgactctgggatctcagggtggatggaattcccaaagggcaggaagggggatcaaggagctgggtttagagggtggctgaggtgtgggccggcagagaagcgagggaggcggctcattcactcactcct

SEQ ID NO: 10672 - DNA, 533 bp, Homo sapiens
  MAP TO CHR16.3; EXPRESSED IN PLACENTA, SIGNAL = 3.1; EXPRESSED IN HELA, SIGNAL = 2.4; EXPRESSED IN LUNG, SIGNAL = 2.1; EXPRESSED IN BRAIN, SIGNAL = 4.4; EST_HUMAN HIT: BG709519.1, EVALUE 2.00e-63; SWISSPROT HIT: Q9R171, EVALUE 2.00e-24; NT HIT: gi16164851, EVALUE 1.00e-63
gggaaagcagaggacagttgaagccacagaactgagaggccccgctatctgtccctccaagcagcccgaagtacatgcagccgccacttctgcctaccacctccggacagcccgagcacccctgaggccagtaacccccctacggggccagggcccggcacgaggcgtcggctgacctgtatggtttgtctgttgtagacttttaccacgtggaagttaaaactgtagatccctttgcgcggggcgatgaaagtgctgcgttctgaatcaaagttgttcccaatgttcactagtacctataacgagacgggaacgaaggggagtgggcaggaatcggtcccggactgtcgtccccgcgcctccgcagagcccttggagaggaccgggcatcggtcttccatccatccctccttcaccagcccaatctgcacgccgcgggaggaaggaacactcacctggtcgaagtagatgatcatggtgcgattactcatctcggacggctcgtggttggtgctcctgatggcagagaaagc

SEQ ID NO: 10673 - DNA, 587 bp, Homo sapiens
  MAP TO CHR18.3; EXPRESSED IN BONE MARROW, SIGNAL = 1.4; EXPRESSED IN BRAIN, SIGNAL = 1.1; EXPRESSED IN HELA, SIGNAL = 0.88; NT HIT: AF412834.1, EVALUE 5.60e-01; SWISSPROT HIT: Q55512, EVALUE 4.30e+00
attgaatgaatgcctgggagaggagtccccagagccatgccatggctgtgttgatcttgttgagtgttttatgggtgattccgggtaagcacaaagtttataccaagaaatgtgtgtgcatgatcaggagatgtgaaatgagaagacagcaattatatgacacatgttcaagtgtgatgtggagggcttttacttgatttgattttcagtatcctcactatttcaacctcattatcttgtcgtctttgctttctttaccctgcctcttctatccctagctgcttaaaactggacctttccaaaaccactcacatgggagtttggcctgacttgtttctggagccagttcccacaggcagctagtactccctagccccccaaccacactggagtcgtgtctgccatcagtgctgtctgggccccagcgttccttgaaacaactgctggggctgatgttcctagaattacagccctcttttctccttccaggtaacgttggccttgagctgggcttgagtctgcaaggcttaagtgagggaagaggttaaatgtcattggataaataaggggttgcttttagaggaggg

SEQ ID NO: 10674 - DNA, 594 bp, Homo sapiens
  MAP TO CHR14.3; EXPRESSED IN BRAIN, SIGNAL = 1.1; EXPRESSED IN FETAL LIVER, SIGNAL = 0.82; EXPRESSED IN BONE MARROW, SIGNAL = 0.89; SWISSPROT HIT: P17625, EVALUE 4.40e+00; EST_HUMAN HIT: T19615.1, EVALUE 2.00e-81
acagggagaaaacgtggatgaaaaccctagactatggccaccaacagacccaagctagccaggtgtagacctctgtgacacctagaggtcaagtccaagaggtcagctgaagttacgaaaggcaggcaggaactcaatcagctacctacttgtccacgagctagccctccccaggcctggcatctatgcttacctcctggcccactcctgctggcctctccacaggcacaggtgaggccctaaacaccaggaatcttctaatgtgtgctgccttctcccacgtctgtcccatttcctaggagttaatcatggtgcccattgcaacatggcacccaatgccactttccagagtagtgtgacgtccaattccaagacctggaggataaaaggtattaaagctcctgggaccacagaagagacagggcagaaagctggtggaaaaccatctccaacatctgtttctttttctgttaaaatctatccactgtgtgaattgccaaggaaagttaagattcctgttctgaaacgagaagggttctcttttcacatgacacctgcagaagatgggaaacatgataccccctgcagatcaga

SEQ ID NO: 10675 - DNA, 541 bp, Homo sapiens
  MAP TO CHR14.3; EXPRESSED IN BONE MARROW, SIGNAL = 1.4; EXPRESSED IN BRAIN, SIGNAL =   1; SWISSPROT HIT: P23545, EVALUE 1.20e-01; EST_HUMAN HIT: BG940659.1, EVALUE 1.90e-01
cctcacatttcaaccaagggttttaggaatgatcaagtctgtttagttctaagttcggctggtgaactattaaccttttcagaaaaactggtgaatgctacatgtcacataatcttctttgagaaagctaagagggtggataatgttgtttaactgattagacataaatgtgagaagataatatttgcaaaattattaagtgtgctctctgaaagaaactactggagtgagactccctacctcttacgtttccacagccctttacataattctctttcataaattccacgtggctcatcatgcacacttgaaatggcccatttttatttggaagtttaaacttaccttttccagggagctgatcttcccctaggtcagcatggttgtgaccctgttttcccagtggattctgcctaataaagaagaaagctactgtggagtagcccgtgaaatacccactatgacacttttgcaaagatatgctttgggaaaagggagcaaggggaatgctgaagtttgttgagcccatcagcatcagttt

SEQ ID NO: 10676 - DNA, 557 bp, Homo sapiens
  MAP TO CHR14.3; EXPRESSED IN FETAL LIVER, SIGNAL = 1.4; EXPRESSED IN BRAIN, SIGNAL = 1.7; EXPRESSED IN PLACENTA, SIGNAL = 1.4; EXPRESSED IN HELA, SIGNAL = 1.3; NT HIT: L47124.1, EVALUE 2.10e+00; EST_HUMAN HIT: BE792837.1, EVALUE 3.10e+00
gatgggtgatgggaaacaagaaacacagtttttgaaggaaaagcaaaaacttcattccttgggtgggatggtagagggtggggttgaagggagtcttcaaccacgccaagtctaaatagactgggaggcttttatttggaactctcctttggcaacgttttatcacagcatgttttccattcttggcggagaaaaggacctggaggctatagaactggctcagtcttcactctgacaatacgttcacaataatggaagacatcttttccctataactttgaaaaacatgaaagcagatattggctctgagtatgtctgatagtctaactttatttcctgtcaacagaaataactatgatttatatgtggtcatcaacttcgcatactcacatacaattcagattgagagagtacagcgagatgtaatgctcggagccttgatgtatgcctatctagcaaagcttcccggttcaaggagacctcagggactgagaaagactctttaatattctcactcttctgacactctagccccaagtgcatccttccagtgaggt

SEQ ID NO: 10677 - DNA, 512 bp, Homo sapiens
  MAP TO CHR18.3; EXPRESSED IN FETAL LIVER, SIGNAL =   2; EXPRESSED IN LUNG, SIGNAL = 2.1; EXPRESSED IN BRAIN, SIGNAL = 2.6; EXPRESSED IN PLACENTA, SIGNAL =   3; EXPRESSED IN HELA, SIGNAL = 2.8; NT HIT: gi6715608, EVALUE 1.00e-119; EST_HUMAN HIT: AV705393.1, EVALUE 0.00e+00; SWISSPROT HIT: P31152, EVALUE 5.00e-38
aagcacagacaccagcacagaatgtcaccgtgctgaggaatctccttctgagctcaacaagggcaacaaatgaccttcatgtccggctttgctccctgcagccatcgactttctggagaagatcctgacctttaaccccatggatcgcctaacagctgagatggggctgcaacacccctacatgagcccatactcgtgccctgaggacgagcccacctcacaacaccccttccgcattgaggatgagatcgacgacatcgtgctgatggccgctaaccagagccagctgtccaactgggacacgtgcagttccaggtgctcgcagccctgggttccagagcccacatttccctgtcctcccatctctattttgcctctaatcctccgtgaccttcccctctgtctcccaagttgcatagctcattggacgacttctccagcttagcttcctgcctttctcttgtgcccagacactaccagtaaatgaccagtgtgagttgcatgtgtgggtc

SEQ ID NO: 10678 - DNA, 524 bp, Homo sapiens
  MAP TO CHR14.3; EXPRESSED IN HELA, SIGNAL =   2; EXPRESSED IN FETAL LIVER, SIGNAL = 6.5; EXPRESSED IN BRAIN, SIGNAL = 1.5; EXPRESSED IN PLACENTA, SIGNAL = 0.93; NT HIT: X02344.1, EVALUE 1.00e-78; EST_HUMAN HIT: BE613179.1, EVALUE 1.00e-73; SWISSPROT HIT: Q43695, EVALUE 8.00e-42
tgcttgtgacacctcacctcattatggctgctacctaacagttcctgccattttcagaggccacatgtccacatgggaagtggatgagcaaatgctcgatgttcaaaacaaaaacagctgctactttgcttattggctccccaaccatgtgaaaacagctgtctgtgacatcccaccccaggggctaaaaatgtctgacacctttatcagcaacaacacggccagccaggagctgttcaggccacatctcggagcagttcacagccatgttcaggtgcaaggtcttcctgcactgctatatgagtgagggcatggatgagatggagttcactgaggccaagagcagcatgaacaatcttgtgtccaagtaccaacagtactaccagcatgccacagctgaggaggaggtagagtttgaggagtgtgctgaggaggaggtggcctagatccttctgttactgggtaatagtagaaggagtatggggattctctatttactcacagtgtgttctgggatagccatg

SEQ ID NO: 10679 - DNA, 503 bp, Homo sapiens
  MAP TO CHR18.3; EXPRESSED IN BONE MARROW, SIGNAL = 0.89; EXPRESSED IN BRAIN, SIGNAL =   1; EST_HUMAN HIT: BG722014.1, EVALUE 2.00e-19; NT HIT: AL163203.2, EVALUE 0.00e+00; SWISSPROT HIT: P43363, EVALUE 5.40e-01
tgtttgccatcctcttttccctttgccgctaaccaccctctttatccctccatctacccaaaaactatttaccccctcctaccagtccagccgagctgccgtctctgccgccagcgcccaccacagcgaggcgagccgtggtgccacacgctccagcctccagctgtggcaagtgactaccccttctcctggtcctccaagcctggcacggagcagctgcgcaagcagccacacacgagtctggaatggcctgacgccccttctgcatcctttagatgtgaggttatgcaaatgaggttcctggactacatattctgattggatgagagaaaacttctaggcctattctgattggactttattttcatgctgtgattggttgtcctaagacttgctctcatccaatcagaatcgaagctgggagctcagcttagagaacaggaagtgggagccatgtaccccgagctggaggcttgatcctgtggcatctaggctcacctcac

SEQ ID NO: 10680 - DNA, 509 bp, Homo sapiens
  MAP TO CHR14.3; EXPRESSED IN LUNG, SIGNAL = 1.7; EXPRESSED IN FETAL LIVER, SIGNAL = 2.3; EXPRESSED IN BONE MARROW, SIGNAL = 1.4; EXPRESSED IN BRAIN, SIGNAL = 1.2; EXPRESSED IN PLACENTA, SIGNAL = 1.2; EXPRESSED IN HELA, SIGNAL = 1.4; NT HIT: AB009372.1, EVALUE 3.10e-02; SWISSPROT HIT: P51532, EVALUE 2.00e-03; EST_HUMAN HIT: AW779738.1, EVALUE 3.00e-43
cagacctcagctgccctaagaaggagtactggacaaatggaggtggtgggatcccgggatgatgtcacatgggcctaggcagaggatggggggatgggcccttgtctgaggctagggctgtggggtcttgggccggccggtccccgtccctgtgcacaggacatgagctctgctggctcctgagtgaggtgcagcggggctgggctggccagggcagaaggtcagcatgctcattctcacacaggcatccgggtgtcattgggttgctgcgggaagccggggcctccctgtccacccaggagctggaggaagcagggacggagctgtgcaggtgagtgcagctagagcacctgctcttccagggatgtgggggacacagcttggggaagcgaagccagacctgctgggagggacaagtgagtcagggtgtgggggctttcagaggcgaggcccgctgacctcagtgtgcaccaacctggctgatgggaagaggtgtctaccctggacca

SEQ ID NO: 10681 - DNA, 502 bp, Homo sapiens
  MAP TO CHR14.3; EXPRESSED IN BRAIN, SIGNAL = 1.3; EXPRESSED IN PLACENTA, SIGNAL =   2; EXPRESSED IN LUNG, SIGNAL = 1.4; EXPRESSED IN BONE MARROW, SIGNAL = 1.9; EST_HUMAN HIT: R56687.1, EVALUE 2.80e+00; NT HIT: gi14751240, EVALUE 7.40e+00; SWISSPROT HIT: P51021, EVALUE 1.60e+00
aaaggtgattcccaaaaccctttacagatactaagttctatttaaagattcacaataacaatgacaacattttagggctctcttccaacaccatcacttcctccttctcctgggaagttaagcttggggtggaggaggtgcagtggtattcctggactagcacgcccatgctgttgcctgcgtttgtggaaacagagacctttatgggacactgagcaaggggattggtgatgtagaaatatgttgttggagactaacagaatagaaaaaaaaaatgaagtgagtaacacttgtcaacctcagccagtcatggggggaaataccttcacatattaaacaataacaaataaaatgtttgaaatgccgatatttatagtaaattgctttttctgtcttttggcacgaatcttaagaggtacatttgagggacaacagtgtatgggccgaagggaggcgtcactgcccaggtggaagagcctgctcttgccctctgcagttcttc

SEQ ID NO: 10682 - DNA, 518 bp, Homo sapiens
  MAP TO CHR14.3; EXPRESSED IN FETAL LIVER, SIGNAL = 2.6; EXPRESSED IN BRAIN, SIGNAL =  23; EXPRESSED IN HEART, SIGNAL = 7.6; EST_HUMAN HIT: BF892019.1, EVALUE 0.00e+00; NT HIT: U12022.1, EVALUE 0.00e+00; SWISSPROT HIT: P02593, EVALUE 7.00e-20
gcctgagcctctgatctcactttcaaaaatcctccttatggtaaccgtatcaggggagggtaggcataataaataggaattttggaccatgtttcttgactgttactttgaattgttgtgagcttttgcaaatcctgttttctgcattagctgtttgcatgtatttagtaggttagaggtgggaactagagatcagagaattgtttatggcagcagagttagcagtaacttgagagggcatagctaagtcaaagacctacttccccacactacatcattagcaataacaattgctgaatgttcacaggatggcaatggttatatcagtgcagcagaactacgtcacgtcatgacaaacttaggagaaaaactaacagatgaagaagtagatgaaatgatcagagaagcagatattgatggagacggacaagtcaactatgaaggtaaaactaaattctctgagctcagtgtttcatagtcttacctttagatctgtaagcaagccaactgcttcacta

SEQ ID NO: 10683 - DNA, 559 bp, Homo sapiens
  MAP TO CHR18.3; EXPRESSED IN HELA, SIGNAL = 3.7; EXPRESSED IN BONE MARROW, SIGNAL = 8.2; EXPRESSED IN FETAL LIVER, SIGNAL = 4.9; EXPRESSED IN LUNG, SIGNAL =   3; EXPRESSED IN BRAIN, SIGNAL = 4.6; EXPRESSED IN PLACENTA, SIGNAL = 3.4; NT HIT: gi14760762, EVALUE 9.00e-80; SWISSPROT HIT: P13679, EVALUE 3.00e-25; EST_HUMAN HIT: AI879047.1, EVALUE 1.00e-79
tgaagggattgccctagatgattaactagctgtcagcctgcagttctggaggaaaacactactatatttgtagatgcaggactttttttaaagctaaaaattggtagcttttacttcagagttgacaattatcctggtttcttttctacctgatacaaactgcagagggtcctgtcagtgctcatgacatgttaatctcagtagaagtcatttcctttcgcacatgttaccaccttgagcagttaagaaggaagccacattggctcgttttatagctcctgagacctacttgactattgagtttcacctctgacatgtctattctgatcgccttttggacacagggtaatgctgatactgactttgtgcttctttccagtggcagtatggagccggcctttcacagaggagacctcctgttcctcacaaatttccgggaagacccaatcagagctggtgaaatagttgtttttaaagttgaaggacgagacattccaatagttcacagagtaatcaaagttcatgaaaagtaaagaggctttatttccttttggttttg

SEQ ID NO: 10684 - DNA, 553 bp, Homo sapiens
  MAP TO CHR14.3; EXPRESSED IN BRAIN, SIGNAL = 0.99; NT HIT: X99060.1, EVALUE 1.30e-01; SWISSPROT HIT: P92660, EVALUE 4.00e+00
cgccatcagagtagacatggagactgtttagaagtaacgtagtatcacacagatactctgtaaatactcagtgctggattaattgacttccacgtttagtgaatgtatattgtttttctttaataactgtagtgattttggtctgttatgacagtcagaattaaacaaaaaaagacaaatctctaattgtcctctatctttcagcaagattgtcttgaccatttactggtcaacttaagaatggaagcgctctttgtgaaggagaattttaatattcgatgggctgcccaaacaggatttgtggaaaatatcaacactatcctcaaggagtacaagcaaagcagaggattgatggtaactatcactgtttcccactgaaacttctgattcaagcaaaatgaatcaaacttctagtgtgatgatgccaacggaagtatttgctttttcagacgttcaaatttctaatttcaagtttttcaaatttgacaaatttgtccaggtctaacaaatttacatgtatatcaaattaatacctgtgaaccaaacatgaaca

SEQ ID NO: 10685 - DNA, 550 bp, Homo sapiens
  MAP TO CHR19.3; EXPRESSED IN FETAL LIVER, SIGNAL = 2.4; EXPRESSED IN BRAIN, SIGNAL = 2.7; EXPRESSED IN PLACENTA, SIGNAL = 2.5; EXPRESSED IN HELA, SIGNAL = 8.5; EXPRESSED IN BONE MARROW, SIGNAL = 2.7; SWISSPROT HIT: P03327, EVALUE 2.70e-01; EST_HUMAN HIT: BI760903.1, EVALUE 0.00e+00; NT HIT: gi14756631, EVALUE 2.00e-80
ctccagtggccttgacctcccgcggcgtgggaggctgcgcggcgatgctgcagttcgtccgggccggggcgcgggcctggcttcggcctaccggcagccaggtgaggccaggggctggaggcgtggtcgaaggatgaaatttgggggtgtccaggggtcgtctctcactttcgcccaacccttgcagggcctgagttccctggcggaagaggcagcgcgtgcgaccgagaacccggagcaggtggcgagcgagggtaaggcaaccggggtggctccaggaggggcggcgacagagaggtctgacccttgaccctaacctctgacccccgcaatcgctccaggtctcccggagcccgtgctgcgcaaagtcgagctcccggtacccactcatcgacgcccagtgcaggcctgggtcgagtccttgcggggcttcgagcaggagcgcgtgggcctggccgacctgcaccccgatgttttcgccaccgcgcccaggtgagcgagggctgtaatggtgaactgagtggcagagggatgaagagcgggatttcag

SEQ ID NO: 10686 - DNA, 518 bp, Homo sapiens
  MAP TO CHR16.3; EXPRESSED IN BRAIN, SIGNAL = 1.4; EXPRESSED IN PLACENTA, SIGNAL =   1; EXPRESSED IN HELA, SIGNAL =   1; EXPRESSED IN LUNG, SIGNAL = 1.2; EST_HUMAN HIT: BG777667.1, EVALUE 1.20e-02; NT HIT: Z97395.1, EVALUE 7.70e+00; SWISSPROT HIT: P08123, EVALUE 2.80e+00
ctcctgactccaagcgtttcagtctttggtgacaatttcctccaactgctaatgacaattcagcggcaggtgaccatccttgctgggacacggggctcctggagcaagtcctgtgcagctgaagaggggagcgaatgggaactttggaaggaggaggaaacaggaagtccaagcgagctccacgaagcctccgggcaggaacgcaaacaggaaagcggttctcagccagtggtggcctctcgctagctaggtctggtgtccccaaggcccccctggtgcgtgttatttttggaccatgccacgtggtgagtaagtgcctgttggattagatagagtcaaggccagcttccaggctggtgtctcccaagcaacaggggtcagtggccccagggacatggcctatggcggagtttcaaatcacactacccccagccaccccccagacatctctgaggcccttggataacaaaaggaagcagggaaagaaagagggaactgctcttccttcccctccaatc

SEQ ID NO: 10687 - DNA, 559 bp, Homo sapiens
  MAP TO CHR16.3; EXPRESSED IN FETAL LIVER, SIGNAL = 2.4; EXPRESSED IN BRAIN, SIGNAL = 3.6; EXPRESSED IN HELA, SIGNAL = 2.6; EXPRESSED IN PLACENTA, SIGNAL = 2.1; EST_HUMAN HIT: BI835478.1, EVALUE 0.00e+00; NT HIT: gi5803162, EVALUE 1.00e-23; SWISSPROT HIT: P35289, EVALUE 1.00e-07
aaggagcgagcacacactgcccacaccagcaatgccagggacccacaggcatggcagagtgcagcggccacggcggcaccctgagggggggtcatcagctgctcctgtgccccccagtgctgccgcctctcccccgaggctgctcttaccaagtcactgacctgccgccggccgagcccctactgcgcgttgccaagggacctgcctgaacctccctcactggcccctggcccccctcagcctccatgtgatcagggcagcccaggttcggggacctcagggctggccggcgcccgcccacccacctcggttgggcctccagatcttctccatgccgtgccgcatgagcacgatgcgggatagctccgtgaaggactcgatgacgttgaagttgcacagggggctgacctcaaagaaggtcatgcagttcttctctgcgtacgcgcgggcctgctccgtcgggacctgccgcttgaaggccaggtgcagccggtttccaaccaagatccgggggactccgggtgcatgctgggggcacagaactcagcagacgcacaaa

SEQ ID NO: 10688 - DNA, 536 bp, Homo sapiens
  MAP TO CHR19.3; EXPRESSED IN HELA, SIGNAL = 7.1; EXPRESSED IN BONE MARROW, SIGNAL = 6.8; EXPRESSED IN HEART, SIGNAL =  10; EXPRESSED IN FETAL LIVER, SIGNAL = 5.1; EXPRESSED IN LUNG, SIGNAL = 6.3; EXPRESSED IN BRAIN, SIGNAL =  12; EXPRESSED IN PLACENTA, SIGNAL = 7.7; SWISSPROT HIT: O15532, EVALUE 7.00e-10; NT HIT: AF247455.1, EVALUE 0.00e+00; EST_HUMAN HIT: BG983564.1, EVALUE 0.00e+00
gaggacatcttagcccctccaacatctcccctaccccctttcctcagtgcggcgagggaactccccaggccaccgggttctttgaagtgatggtagccgggaagttgattcactctaagaaggtatgtctgtctgtccgtcctgcctggttttggggctagcatggggttggggctgaggttggtgtctcggtcccagctcaccccttccctcttcctcccctccctagaaaggcgatggctacgtggacacagaaagcaagtttctgaagttggtggccgccatcaaagccgccttggctcagggctaatgcgccctgaaggcagaggtgagggggcccactagacagggacaccaccctttggatcttctccctgccccatgctctgactccttggcccagggtggagagcctgggagatgggggggacatcacgtgtgtccccagagcgagcgggataaagttagacccggttggtggaggacaacaactgagatggggtcagaggtgtgcagggtgacagctgagatggtga

SEQ ID NO: 10689 - DNA, 578 bp, Homo sapiens
  MAP TO CHR19.3; EXPRESSED IN BRAIN, SIGNAL = 1.8; EXPRESSED IN PLACENTA, SIGNAL = 1.4; EST_HUMAN HIT: BF745101.1, EVALUE 0.00e+00; SWISSPROT HIT: P22579, EVALUE 5.00e-08; NT HIT: gi15302718, EVALUE 1.00e-82
gatcagaggcagacgaggacatgcttaaatacaagggcaagcctgcctggtatgctcgctgggaaagcctcaagccaagacctcagcaactgctgaggtggttatttagacttcacacaaaattctgcgttaggaggatacctccctgacatccactcttgatttaaatcttccaaacagatcaatttgggaggcagaggctgcttgtgtaggtgtttccatatctattttgatttgtgctagaagcaatgagcacgtctagaaaaagaacagatcttaagtggctttctagcaatgatacaggagagacacgtggcccaacctgagtagcaagacatactcggtgaaggctgagatcacccgaaccactgtagtggcatacctggcttgtcagaggcgactgtatgtttaacttgccattcttgggaatgtctattctatatccgaggggaagaaaagcgttgaatccaacaatgaggtcagggtgctcgtggaagagctgcgagacacgtctgatgactccaggagtatcgatgctagaagaaacaacggaagtgggcaaaagggtcttgggaaat

SEQ ID NO: 10690 - DNA, 582 bp, Homo sapiens
  MAP TO CHR19.3; EXPRESSED IN BRAIN, SIGNAL = 2.4; EXPRESSED IN PLACENTA, SIGNAL =   2; EXPRESSED IN HELA, SIGNAL = 1.6; EXPRESSED IN LUNG, SIGNAL = 2.1; EXPRESSED IN FETAL LIVER, SIGNAL = 4.6; EST_HUMAN HIT: AI909504.1, EVALUE 2.00e-51; SWISSPROT HIT: O76100, EVALUE 2.00e-76; NT HIT: AF127896.1, EVALUE 0.00e+00
agacggacaggtggaaaatgccttatacttcccttgagctgatgagattgcacatatggaggaaactatcttagagtaagagtaaaggatcccagcgagacatccccccacccagcagcacagctgccagatacatcaccatgtcattaagaaaggtgtcagaacaggcaaggtggatgacctgattaagttcacagaaaaagtgggggatttccaactctctgcataaggacaactgcagcaccattaagctatgtaataaggaatgcaagacacttgtgatccaggataccagaaccagcaatccacagagttgagggttcatgatgaccgtgtagtacagggggtgacagatggccacaaaccggtcataggccatcacagtcaggaggaagctgtccaatcctacaaaatgtatgaaaaagtacatctgggtgatgcagcctgcagaggtgatgactttgctctgtgcctggatattcaccagcatctttgggaccctggtggaggcaaaacagatgtctacaaaggacaggttggagagaaagaagtacatggaggtgtggaggtgggagcataaaa

SEQ ID NO: 10691 - DNA, 567 bp, Homo sapiens
  MAP TO CHR18.3; EXPRESSED IN HELA, SIGNAL = 1.2; EXPRESSED IN BONE MARROW, SIGNAL = 1.6; EXPRESSED IN BRAIN, SIGNAL = 1.2; EXPRESSED IN PLACENTA, SIGNAL = 1.2; NT HIT: AB037749.1, EVALUE 7.00e-99; EST_HUMAN HIT: AI015609.1, EVALUE 2.00e-81
aatgtgttacctgtggccttgcaggcacacttcagtgtgtaaacatttaacttttgctcagcattgtaggaaatcatctgaaattcattggctagcaactaccttcccctaccagtttctcattttgccactacagttgttaaacttacctctttggggtctacatgtatctttcttttgacatgaccactgggcatcatctttcatatgcgaatgaaacccaactgtcttcctctccttcctattctctccactgtttggggggtcttggtgctttttaatagatgatgatgttccaagcagccagccatcacagtttgacttcaataaactgaaagaacaacgatgaatgaactgttgaaggcacagaagggaacacagagcacatagatatttaaattcagtatgggttgaaatgcaattcattaagaactctctttatcttaccttttattgaggtataatttaaataatttactcaacgtctattttgtgtcctgtcacaacaattttggaaaagaaatggcctttattctcaaaaagcttacactgggagttggggaaata

SEQ ID NO: 10692 - DNA, 502 bp, Homo sapiens
  MAP TO CHR19.3; EXPRESSED IN FETAL LIVER, SIGNAL = 1.8; EXPRESSED IN BRAIN, SIGNAL = 1.3; EXPRESSED IN PLACENTA, SIGNAL = 1.6; EXPRESSED IN BONE MARROW, SIGNAL = 1.6; NT HIT: AB070940.1, EVALUE 1.20e-01; EST_HUMAN HIT: BI824739.1, EVALUE 0.00e+00; SWISSPROT HIT: P46526, EVALUE 1.20e+00
aaaggcaatgagtgtctggggtgacccctggaacccctgccacccagggccttctagtaccttccaggcagccccggcgactggagaagccaccctgaaactggatctgcagctgggagacacggatgagctggggaaactccagcgtcacccactgggaggggccctggaagcagacagggaaactgaggcgcaagctcactgcaggcacagagccctgctatgcctgtctcattcacatagttcttggaatggaggggaagaaggaaattcggcacatgttcctttcctggccacccatgagggccccctgacgttctcaaggcatgagatctgaatctgaatcaccctagagatggagggtcgagggaggcgcctcacctggtctgagttccaacatgtctcctcatcctggtcgaaaagatgtttttttccaaactgccgagtgttgcgattcagcactgaactcaccctggaggcaccaggatcaaggcgaagagag

SEQ ID NO: 10693 - DNA, 517 bp, Homo sapiens
  MAP TO CHR18.3; EXPRESSED IN BONE MARROW, SIGNAL = 2.2; EXPRESSED IN BRAIN, SIGNAL = 2.2; EST_HUMAN HIT: BI026844.1, EVALUE 8.00e-47; SWISSPROT HIT: P51399, EVALUE 3.20e-01; NT HIT: X87102.1, EVALUE 4.90e-01
cttctcaaagctcaggggtgggggagaaccataatccctctaaggtggctcttcaactccctgctgtacagtcccaggagtccaacaggtgtccatgcatattagtgaatcagggcgggccagatactcaggaaccaaatacactaggcattgctgtgccctcccagtggctctgctgggattccccagttccccgcccccttacccagagtgaggctcctgatggctgaggccccaggaccagcatcagctcaactttaacagggcagggaagacgagggaacatgggaagggaactgggaggaaggggatgagtggggcacattgctgtaacttacattgcccttttcaaacaggtctgtgttattcctgcagttgtagagcagccgttcccccgtgtcccccacatcaccaaaaaggcagagatagacgttggcatcggtcccagcaccttcaagttcacctgtgcacacagtcacatggtaccgggccactggcaggcagagagagggacatc

SEQ ID NO: 10694 - DNA, 567 bp, Homo sapiens
  MAP TO CHR18.3; EXPRESSED IN BRAIN, SIGNAL =   1; EXPRESSED IN PLACENTA, SIGNAL = 1.2; EXPRESSED IN LUNG, SIGNAL = 1.7; EXPRESSED IN BONE MARROW, SIGNAL = 1.1; SWISSPROT HIT: P87145, EVALUE 5.40e+00; NT HIT: U21091.1, EVALUE 1.40e-01
tgtctttgactttcccctcgggaaggaggaagaggaagcttttatttactttatgtttgtccagttaggttatagtctgtaaattaatcccctccagaggaagatagtctcaaatgactccagttaccttagaggaaggtaacttatctcctattatggatacgacttggctgtcaaaccctgaatctaataaacacaaattgataatgatggaagctttaagcagatttcgactgcaggctccagtggtaagtctaaacagtacagatggggagtggggactagggaccacaacctcatctgcccccttaaccactaagccttcaaataattcaacttgcttcttcactaggactccacaggcggtctcacatatacattcctcctttccaacatgacctttctgccttccacattttacattttttcatcttgaagtctccagcttcagttcctaagacagaatgcgcctccaaaagaaatgaatcaattgaaaatcaaattgttagtgttaaaattagggccacaaatagtgcaataagtattagaactgaggttggggtcaca

SEQ ID NO: 10695 - DNA, 512 bp, Homo sapiens
  MAP TO CHR19.3; EXPRESSED IN HEART, SIGNAL =  13; EXPRESSED IN FETAL LIVER, SIGNAL =  15; EXPRESSED IN BRAIN, SIGNAL =   8; EXPRESSED IN HELA, SIGNAL =  33; SWISSPROT HIT: P41115, EVALUE 2.00e-20; EST_HUMAN HIT: BF344240.1, EVALUE 0.00e+00; NT HIT: AB007152.1, EVALUE 7.00e-99
ctctctggtaagtgcgggagttactggtgtctggggcctgaaatactgaaagaagggtcttggggcccagactcctgggtcctgggtgagaggggtggttaggaatgcaaacttgtaggtccaggtacattggcagatgatgtttgttttcacgatggtcttcagatgcccacgtgggcactgctgagaaagccacttggtaaaactgatgccggaaatggggctttttgggatccctgctcagctgcttctgagtcccagcatgccctgggttacctatggccctctttcccatgggacctgacctatgatcggcccccgctcctaggcgtggtgaccaagatgaagatgcagaggaccattgtcatccgccgagactatctgcactacatccgcaagtacaaccgcttcgagaagcgccacaagaacatgtctgtacacctgtccccctgcttcaggtgagcgcagtggcccatcaggttgctcaggccacgctctctcagccttcagat

SEQ ID NO: 10696 - DNA, 517 bp, Homo sapiens
  MAP TO CHR18.3; EXPRESSED IN LUNG, SIGNAL = 1.7; EXPRESSED IN BONE MARROW, SIGNAL = 1.5; EXPRESSED IN BRAIN, SIGNAL = 1.4; EXPRESSED IN PLACENTA, SIGNAL = 1.5; EXPRESSED IN HELA, SIGNAL = 1.4; EST_HUMAN HIT: AW264675.1, EVALUE 7.20e-01; SWISSPROT HIT: P51691, EVALUE 3.60e+00
tcaacatactcatggtgggctaagaaatcagagaagactgcagaaaatttgtatttgagccataaaaagaaaggtatctgaaatctgaaagttaaatagagacctgttagcaaggtgggggttggagacaaatttgaaaacttctcaaatgaaaaaaaaatacggccaaacaataatgtcaaggttctggacacataccaatgctgaagaaggatcagtctgctaacctgcaggctttgagcatctgccattttgtggatgggatattgctgccatgcagccaacttagcaggagctgaagcagagataatgttaacagttccagtcagcagagctgataatgcactaggtatgagaaaatgaataaagattccctcagaactagggaagatgaagtgagcattaagtactcaaagagtaggcaggaaggctatagtaggaagacagattatttttatacccaaaacctctggattgcttgcaagtaagagaaaatagaaaatgatgtccccaaagg

SEQ ID NO: 10697 - DNA, 566 bp, Homo sapiens
  MAP TO CHR14.3; EXPRESSED IN HEART, SIGNAL = 1.7; EXPRESSED IN HELA, SIGNAL = 1.8; EXPRESSED IN BRAIN, SIGNAL = 1.3; NT HIT: gi15300836, EVALUE 1.00e-44; EST_HUMAN HIT: BE813997.1, EVALUE 9.00e-44
tgccgtataattttgcatggacactgatcacttgagttcggaagatctgaaatctggttttgacatagctagctttaacaaattaacctcttttatctcgagttttaaaacagggttatgtattttaaggagttatagtaatgtgtgtgacagttgttagtaaactgaaaggggctatagaaatggaaggtatatgagaactactgaagtaaggatgatgctttttaaggctttaaatccttttgatttgtgacttctgaatgtttattgaatgtacaaatgtctttccttctaaaggattgcagaaaaggataagcagataaaacagactgaagattctttagcaagtgaacgtgatcgtttaacaagtaaagaagaggaacttaaggtatagtaatttgtataaatggctgcaatattttacagaactgaaatttaaattactttgatgcacataatcagtaagtgtatatgaaaaatggaaaatagtctagaattcatttgaaataactgtttttctaaactacaaaattctctagctctctacgaggaaaaattcaaagggc

SEQ ID NO: 10698 - DNA, 580 bp, Homo sapiens
  MAP TO CHR16.3; EXPRESSED IN BONE MARROW, SIGNAL = 1e+03; EXPRESSED IN FETAL LIVER, SIGNAL = 1e+03; EXPRESSED IN BRAIN, SIGNAL = 6.8; EXPRESSED IN HEART, SIGNAL =  75; EXPRESSED IN HELA, SIGNAL = 2.7; EXPRESSED IN LUNG, SIGNAL = 3.2; SWISSPROT HIT: P01925, EVALUE 7.00e-17; EST_HUMAN HIT: BF901761.1, EVALUE 0.00e+00; NT HIT: gi14523048, EVALUE 0.00e+00
tgagtagaaccctggatgcctctctcctccccagcttctgagccactgcctgcaggcctggcacctctcaggacaggggatggttcagcaccttctcttgagcaggcccacctcagcttcccctcccatactccctgcagttctccctccccagccccatgcagctgcagagaggtccttggtctgagacaggtaaacacctccattgttggcacattccgggatagagagaacccaggcacacacaggctgctgcccactcagactttattcaaagaccaggaagggccggtgcaaggaggggaggagggcccgttgggaggcccagcgggcaggaggaacggctaccgaggctccagcttaacggtatttggaggtcagcacggtgctcacagaagccaggaacttgtccagggaggcgtgcaccgcaggggtgaactcggcggggaggtgggcggccagggtcaccagcaggcagtggcttaggagctgtgcagagaagagggtcagtgcggcccaggcccgcagccgccgcctgcgctacacctcccgcaacccgcgtgatcctctgccctgagag

SEQ ID NO: 10699 - DNA, 599 bp, Homo sapiens
  MAP TO CHR16.3; EXPRESSED IN BONE MARROW, SIGNAL = 1.2; EXPRESSED IN FETAL LIVER, SIGNAL = 0.84; EXPRESSED IN BRAIN, SIGNAL = 1.2; EST_HUMAN HIT: AL045898.2, EVALUE 1.00e-73; NT HIT: U90653.2, EVALUE 4.00e-85; SWISSPROT HIT: Q62266, EVALUE 5.00e-03
gactcgagctccctgtgaacccccttggcctcctgtggtgggcggtgctgcacgatgtactcataggtggtgagcttgtgccacactggtggggggaggagagggctcagtgcggtggaagggggactctggagctcagaacaggagggaggacaaccagccccaggctgaaaccagtgtccccaaatacacgaagccatcaggtgagacctggccaccatagtgagcccatactaggcaggggcatggtttcagggtccaccgtccaactgggcaccttcctgcaatctgaggacccctgcgttccagaaggcaggtgcaggaggcacttactgagataaatgtggaagcagagcaggtgccccaggagggctgtggacaggaggcccagaaggatgagcagggcggccagggccaggatggcaggggcctgggtctccacgggggcggcaggcaggaacacgaaccacacatccgtgtgattcttcaggactgcaaggcacaggcagtgtgtgctcagccggggacgtgacgggtgaccagggttgggggtgagaataggcccggagcctaaactgaccttcaaagtgtcggttggt

SEQ ID NO: 10700 - DNA, 520 bp, Homo sapiens
  MAP TO CHR18.3; EXPRESSED IN BRAIN, SIGNAL = 1.1; EST_HUMAN HIT: BE795051.1, EVALUE 2.00e-87; NT HIT: M74718.1, EVALUE 1.00e-87; SWISSPROT HIT: P22955, EVALUE 4.80e+00
gggtccagattcataaatgccaaaacagtttaggctccaatagagtacaggtatctgaaacgatacttttagtacttctagagtaggcctttaattttcttttcagctgtaaatttacctgccaggaaaaaactgaatagtttcttcccgttctgttcacttcatcaaagtccaataaaggaattaaatgaagcgacagtattatatactgttacctagatcttgacctagtaattgatttgatatccttcttgtcgtcatctaatttcttgtcctccgaagatttcgtgtcttgcaggttctcatcaccctcgtcatcggatttgatctcagagctgccagaggagacactctgcccctgtagtcctggtggcatgcctgccgaaaaagagaaatcaggtgacatgtacaccacaatctcactgcctgcacaccagattgcaaggctgccagcagacaattcatactgctgaactgtgatccttctgtcacttttttttccccctgctatctgttgaag

SEQ ID NO: 10701 - DNA, 502 bp, Homo sapiens
  MAP TO CHR18.3; EXPRESSED IN FETAL LIVER, SIGNAL = 0.78; EXPRESSED IN BRAIN, SIGNAL =   1; NT HIT: U20608.1, EVALUE 1.20e-01; SWISSPROT HIT: Q9KV17, EVALUE 6.00e+00
agcaatcaatcaggggtttgaaacattaaactggaatatataatttcaacagggataattttagcaaaattcatcctgagctaaaacagctttagttagcccagcttcaacaagggggccattgcctggcttttcttggcactggcagcccctccctgcactcaccccacctcctctacagccagaggaaaggacacagcaggccatgggtttataataagatttggaggggctgagcttggctgatttaccaggaggtaggttgatgcccaagacggtgcccactgggaagctgcaagttgtgagtagggggataacagcttgagaagtaccattaaatgtcttcccatacatttgcccacagtagaatttttcttccacagaaaacactttgacattctattggaatggaaagcaagagtttataagcattttacaatgtcaggatttttactagtcaatctacaaataggtagcattttgcctctttgctcttccctct

SEQ ID NO: 10702 - DNA, 529 bp, Homo sapiens
  MAP TO CHR14.3; EXPRESSED IN FETAL LIVER, SIGNAL = 1.1; EXPRESSED IN BRAIN, SIGNAL = 1.2; SWISSPROT HIT: Q35648, EVALUE 3.70e+00; NT HIT: gi10863904, EVALUE 8.00e-43; EST_HUMAN HIT: BG567202.1, EVALUE 5.00e-42
ttctgaagcacacaagcagcatatacagttattacagtatgctactccagacctcctgacctacctgtgtatgttcctgctgtcaggacatcatcagaaaccaaaacaggacctccacctatcttttctgcttgattctgtgtgcctactagcttatttctaaatacgaactcaagccagccacttatactctgaactttacccaggtacttccacctagcctgaaaagcatcagtgagatcagctttattctaaggacttgagctcaattactcaacattccatttggatatcaactggcccttggctgtgacctgttacacataccattttaattctgcccccatttttacagcacccaccttttcttgactcagtaatgacttctctttttctaaaacttcgatacgcattttaagtttcagattgtcttcagcaagactgttatcctacaaaaatgttaaagcagtgttttcaggtaacaagaaatttccagtttataaaaaagctggcaatctatacaattgtg

SEQ ID NO: 10703 - DNA, 509 bp, Homo sapiens
  MAP TO CHR18.3; EXPRESSED IN LUNG, SIGNAL = 1.3; EXPRESSED IN BRAIN, SIGNAL = 0.99; EXPRESSED IN PLACENTA, SIGNAL = 0.88; EXPRESSED IN HELA, SIGNAL = 2.7; EST_HUMAN HIT: BF954655.1, EVALUE 7.10e-01; SWISSPROT HIT: P25391, EVALUE 2.00e-25; NT HIT: X58531.1, EVALUE 2.00e-71
caaagctattcaacagattaaagtccagaaaatatatagaagaacaggcctgaaacttgctacagcaaagcaactctcagttaagcaagagcgtggatgacagtgctcacctggcaccccacctccgcatcgtagccccagtgcccatcctcacattcttcacacttcacaccctgtgtgtgaggggggcagacacactctccagtttctgggtcgcaggtattctgagtgtgtgggcagtcacaggctgaaataaagatgaatgctgggttacagatctgggtgatgtcattaaagggctaagagctgatgctgttatttcccttttattaagagtccaagccactcttctcactcctaaaagacgcctcacaattcccaagacccctccatgtctcatggaggtagccggccctccatctcaggagatgctgagggaagcggggaaatggggacaggacaggggaaatagagaaaagagtgaaaaagccctcactaggtgatcacag

SEQ ID NO: 10704 - DNA, 596 bp, Homo sapiens
  MAP TO CHR14.3; EXPRESSED IN BRAIN, SIGNAL = 1.7; EXPRESSED IN HELA, SIGNAL = 1.9; EST_HUMAN HIT: AW969078.1, EVALUE 0.00e+00; SWISSPROT HIT: Q13114, EVALUE 2.00e-42; NT HIT: gi14754084, EVALUE 0.00e+00
ctcaggcacttttgctttcccaaagctgtgtttgtttccttgcatgagaggatatgatggcactctactgttttttcccgacagaactcctctttcctaaaatggagtcgagtaaaaagatggactctcctggcgcgctgcagactaacccgccgctaaagctgcacactgaccgcagtgctgggacgccagtttttgtccctgaacaaggaggttacaaggaaaagtttgtgaagaccgtggaggacaagtacaagtgtgagaagtgccacctggtgctgtgcagcccgaagcagaccgagtgtgggcaccgcttctgcgagagctgcatggcggccctgctgaggtaggcgccctcgcccggcccgtcgcccggccccttctcagccctcggcctcaccctctccttcattcgtttctctaaaaataaacctctagaggtttaaagccctaaagaagtccataaaagcctccgggcccagcttgtgaatcctttagggaggtgcagtgggatcccacgtgtgggtttactgaggcctctgcgtgtctctgacctgccccgcccgtgtcttcccactccgtctgtagagccttgg

SEQ ID NO: 10705 - DNA, 501 bp, Homo sapiens
  MAP TO CHR18.3; EXPRESSED IN BRAIN, SIGNAL = 1.1; EST_HUMAN HIT: BF527751.1, EVALUE 1.80e-01; NT HIT: gi15307404, EVALUE 2.00e-92; SWISSPROT HIT: P30775, EVALUE 7.90e+00
ttaggcctatgctgtgaccccaccacttccaggcagccaacctagaatgacaacactcctaacttcagccacaaaagcaaaaccagtcatagctattttttctcttttagcatttttaaatttcattcttgttgtaccagaaggaggtgttcaaatcatttgaccatttcctcagatcatgtccaggttacatgttgtctatcttcctgttcccttaaagtgactgaaagctttggggttgttattttttagggatgccaagtccccacttaaaagtggaccagacagcagtgcatagtaagaacgaaggctcagtgcccaccatgatgaccaggaagaagccagccgcagttgacagtgttacaattccaccagccccagtgttatctctccttgctgcatctgcagcaacgtcggatgcaggtgagcacttttcagatgctttgggttcaccccaagcaagatgaatgtggagaaagcccactgagaatggcctgttga

SEQ ID NO: 10706 - DNA, 508 bp, Homo sapiens
  MAP TO CHR16.3; EXPRESSED IN BONE MARROW, SIGNAL = 0.62; EXPRESSED IN BRAIN, SIGNAL = 3.4; EXPRESSED IN LUNG, SIGNAL = 1.3; SWISSPROT HIT: Q27957, EVALUE 3.00e-30; EST_HUMAN HIT: BI909179.1, EVALUE 1.00e-106; NT HIT: gi14776201, EVALUE 1.00e-106
ccaagcctcacttcttcaccttggcatcgtaggtgcctgcattcttgtaggcgctcacgtagccactgtcgtccaggatgtcctgccgtcccgcaatgcccttgcccttgccgctctcatcgaagcgctccttgtgggagcccgtgtatctgctggtgtccgtcagccggtctacagcaccccctgtttttgctttctgtttggacagagtttccccaggggcacctgatgagggagcccagcccttcccacccacagccacgattccccacaccccattccgtggccacccgagaccagcagggcacttacagtgacgcccacattggctggctctttgcctgccaccagctggcagatggcatcgaaggcctcctccttgctcttccccttgaatctcttggtcgccagctcttccagggccttcttgaactcctcatagttgatgacccgagcagacttccccctgacaggcatgtgggcaccatgagggttcccctttcttttt

SEQ ID NO: 10707 - DNA, 585 bp, Homo sapiens
  MAP TO CHR14.3; EXPRESSED IN BRAIN, SIGNAL = 1.4; EXPRESSED IN HELA, SIGNAL = 2.3; EXPRESSED IN FETAL LIVER, SIGNAL = 1.9; EXPRESSED IN BONE MARROW, SIGNAL = 1.4; EST_HUMAN HIT: BF971451.1, EVALUE 0.00e+00; NT HIT: gi10863978, EVALUE 0.00e+00
cccacaaatgccataaatcacatgctcaagagaaactagactaagcactaacctgatatgtccagaaggccagcgctcgggagctaatgtccaacacgatctctggtcgcagtcctgccaataccatagctttatattcctctgatggactgagttctgtgcggacaatatctagctttccagaaagggtactgttgcaggcaggacagatagctggtgagcgactaaactcaccactgccatgctgatcacagaagatgtgagagcaggcagtgacccatgcatagccagagagtttgatgcgacactttcgataattacaaagcagcatgtcttcacacaaagacataataggatagtgaggtctccagaagctgaagagagtcctaagaaggggtaaataaaaaggccaagtaagttaaattgcaatgaaaataaaagtaaaaaagaaatataacatgcacgtttttatcataaaatactgcacattttattatattccttgtatttattataattgatatattgatttcagttactcaataatattaattgtgctcgtttgtccggttttctaaaaacgct

SEQ ID NO: 10708 - DNA, 584 bp, Homo sapiens
  MAP TO CHR19.3; EXPRESSED IN PLACENTA, SIGNAL = 5.4; EXPRESSED IN HELA, SIGNAL = 2.5; EXPRESSED IN HEART, SIGNAL = 3.9; EXPRESSED IN LUNG, SIGNAL = 3.5; EXPRESSED IN FETAL LIVER, SIGNAL = 6.9; EXPRESSED IN BRAIN, SIGNAL = 2.4; EST_HUMAN HIT: BG774361.1, EVALUE 1.00e-70; NT HIT: gi14762629, EVALUE 8.00e-71; SWISSPROT HIT: Q13625, EVALUE 2.00e-06
ctaccccacacacagcacaccagagcccacctcggcgggcgatctccgccttcagcagcccctccatggcgtccgactcggccaggtccaggggcaggtccccgtcactgttgacggcggcgatgttggccccgtggctcaggaggtacctgggggtgggggctggtcagggctgagggtccaggcccccaccccgaccaggtcctgcccggccctcccttgcctcacctggcgatatctaggtagccacaggaggcggccacgtgcagtggcgtccagccctcgttgtctgcctggttcacagtggcgccctgctccaccaagaagcgcaccacctccaggttctcatcaatgcaggcctgggggtgggaaacagccgtcagccgcacctaccccagccacggtgtcccagcaagtcgggactccagagggagccacgaaaacagatccagggacacggtgctaggacagtggggaaaatgacccaacagcctctggccactggctgtttaagatacgcctggttgcccagtggtcaggccggccaggccttcagtgctcagtggaaaccacgaaaggactcc

SEQ ID NO: 10709 - DNA, 598 bp, Homo sapiens
  MAP TO CHR19.3; EXPRESSED IN HELA, SIGNAL = 4.5; EXPRESSED IN LUNG, SIGNAL = 2.2; EXPRESSED IN BONE MARROW, SIGNAL = 1.6; EXPRESSED IN BRAIN, SIGNAL =  12; EST_HUMAN HIT: AU143734.1, EVALUE 1.00e-121; NT HIT: gi16163579, EVALUE 0.00e+00; SWISSPROT HIT: Q03923, EVALUE 1.00e-70
tccccattcatcacattcacatggtttctctccagtatgaattatcttatgtgcagtaaggtgtgaggataggtgaaaagctttaccacattattcacatctgtagggtttctctccagtatgaaatctcttatgtgtagtaagtttagaggagtgcttaaaggctttgccacattcttcacatctgtagggtttttttccagtatgaattttcttatgtgtagtaaggttagagaaatgcttaaaagctttgtcacattcttcacatttgtagaatttctctccagtatgaattatcttatgtgtagtaaggtgtgaggaccgcttgaaggctttgccacattcttcacatttgtagaatttctctccagtatgattctctcatgtgtagtaaggattgaggactggttgaaggctttgccacattcttcacatttgtagggtctctctccagtatgaattttcttatgtgtagtaaggttagaggagcacttaaaagctttgccacattcttcacatttgtagaatttctctccagtatgaattctcctatgtgtagtaaggattgaggactggttgaaggctttgccacattctt

SEQ ID NO: 10710 - DNA, 585 bp, Homo sapiens
  MAP TO CHR19.3; EXPRESSED IN BRAIN, SIGNAL = 1.6; EXPRESSED IN LUNG, SIGNAL = 1.7; EXPRESSED IN HEART, SIGNAL =   2; NT HIT: AP000006.1, EVALUE 5.60e-01; SWISSPROT HIT: O13725, EVALUE 1.00e-03; EST_HUMAN HIT: BG748038.1, EVALUE 8.00e-35
atgcaagatggatgtccaggacacacctgctgggagccacagtggcttaactccactgtctgtggggacttggaggtcatggcaagcacagcagtgaaattcctgcaccaggagggggcccgggccatggatgaggagttgtttcatgagtaccagcatggcccaacttacagaactggctggactcagctgttccactgtcattgccaaggcatatcctcccatatccatgtcccgatcatccatggcccagggaataatggagaaggtagcctgctctgtgcttgacacctcaaacattttggtcaccagccaatcatctttgaccccaaaagacccaacaagccactctacactatgcttggtgacccactgtcaggaaaggggcattcttttgcttggtgaagtgcccccagagcccacgctgatcaatgagctgtatgggctgggggtggatgccatctttggcttcagcttcaagggcaatgtttgaaagccattctgtaacattctgagtgtcctgaatagactcactgtgccactgccaatgctgacattcccttgggatgggacatggagaaggaa

SEQ ID NO: 10711 - DNA, 560 bp, Homo sapiens
  MAP TO CHR19.3; EXPRESSED IN HEART, SIGNAL =   2; EXPRESSED IN BONE MARROW, SIGNAL = 1.6; EXPRESSED IN BRAIN, SIGNAL = 2.1; EXPRESSED IN PLACENTA, SIGNAL = 1.7; EXPRESSED IN HELA, SIGNAL = 1.8; SWISSPROT HIT: Q62986, EVALUE 7.00e+00; EST_HUMAN HIT: AA724281.1, EVALUE 4.00e-49; NT HIT: M11841.1, EVALUE 1.40e-01
ccattttctttccgaacaggttagataaattcaatcagctactgagctcagtgaagatttattcaaaccaagccatacaccacatttttttaaataaatgtaaaaatgtgtttaataacgtggctcctgggtgtttttaattctggtctcattaaaccagcccggtgagcttcttttcatctttctggaaactgccagaaatgcttgacaccagtgggctgagccttcctcacaaagatttgacctggcaaatagagccacctgtgacacttcagcgaatgttcactatcacccatttgaaatgtggccaagtaccatgtaccattatatttgcttccatgatcaccatctgtcttctaaaaagagacctagactaatattttcttaccataaatacccaacttctgccacaaagacaaaaagacaagagtgtgattttacatcgcacactcttgggaatacacacagttcttgtcttgatgaaagttctaaagagaaagagtaagtattctcatatttaggttagaacctttggactggggctggttcatctctgacct

SEQ ID NO: 10712 - DNA, 543 bp, Homo sapiens
  MAP TO CHR14.3; EXPRESSED IN HEART, SIGNAL = 1.4e+02; EXPRESSED IN FETAL LIVER, SIGNAL = 4.8e+02; EXPRESSED IN BONE MARROW, SIGNAL = 3.3e+02; EXPRESSED IN BRAIN, SIGNAL =  69; NT HIT: gi16173304, EVALUE 0.00e+00; SWISSPROT HIT: P04720, EVALUE 1.00e-81; EST_HUMAN HIT: AL532692.1, EVALUE 0.00e+00
tggctgggtcttggataaactaaaagctgagcctgagcctgatgtcatcattgatatctccctatggaaatttgaaaccagcaagtgctatgtgactatcattaatgccccaggacacagagactttatcaaaaacatggttacaggcatatcttaggctggctgtgctgtcctgattgttgctgctggcattggtgaatttgaagccagcatctctaagaatgggcagatccaggagcatgctctcctggcttacacactgggtgtgaaacaacaaatccttggtgttagcaaaatagattccactgagccactctacagtcagaagagatacaaggaaatagttaaggaaatcagtactttccttaagaaaattggctacaaccttgacacagtagcatttgtgtccatttctggttggaatggtggcagcatgctgaagccaagtgctcacaggccttggttcaagggatggaaagtcgtccgtaaagatggcaatgccagtgggaccacactgcctgaagctctggactgcgtcctatc

SEQ ID NO: 10713 - DNA, 515 bp, Homo sapiens
  MAP TO CHR16.3; EXPRESSED IN BONE MARROW, SIGNAL = 1.7; EXPRESSED IN FETAL LIVER, SIGNAL = 1.2; EXPRESSED IN BRAIN, SIGNAL = 1.3; EXPRESSED IN PLACENTA, SIGNAL = 1.1; NT HIT: gi7304924, EVALUE 4.90e-01; SWISSPROT HIT: P29030, EVALUE 7.20e-01; EST_HUMAN HIT: BF689180.1, EVALUE 4.60e-02
tacccaaagcctgagctgacctggtgattctgccacccctgcaatcctgattgaataatgcaacccaaattggtcataaattattctcatgtaatttgaaatcatctaccacaaggagaacaaacacaaaaactgcataatctcacagcttgctgataagaacagagggcttaccagtggcagtgagggcttggtgcttgcccttgaaagtggagttctcatctggaatttctataatagacccagagtcaacagccaggttcatgcctgagggacctcaaggaccatactggttgctctgtgaaatgactacccctggcttttgggaggtttagagatgacttgagctcttcataactaaaaacatccatggcatttgagcctcacccaatctctcaactttgtcattccctggggatttagggtgcaccgttggctggggaaccagctggctaaagagagaggcagtgcacctgagactgtacatgagcccgggcacctgagacagggaatct

SEQ ID NO: 10714 - DNA, 577 bp, Homo sapiens
  MAP TO CHR18.3; EXPRESSED IN PLACENTA, SIGNAL = 1.4; EXPRESSED IN HEART, SIGNAL = 1.7; EXPRESSED IN LUNG, SIGNAL = 1.2; EXPRESSED IN BRAIN, SIGNAL = 1.2; EST_HUMAN HIT: BE548405.1, EVALUE 1.30e-02; NT HIT: AF360346.1, EVALUE 5.50e-01
acacttggactttgggcatcttgaaggcaggaggtctgcctcctaaagactcaaccatctgtttcctcacttttggaggagcatatatttttaaggtaacaattgaaaaaaaaagtctaataaggagaattttaaggcaaatttaccttggacctagttagcctgtggtgtcctatatagagttaacttcagactgggcagcatttgggtaatgccttctaaagggtacccctccagacagtgtttggactctagtttctcatggaaaagaggagtgaaaggagaagctgaagaactagtggaacttatgtctgtgtcttcaatatttcctatagatgaatacagaaaaacaagaaagaaacaaaactacaccaagcaatgcattcaacatacttgaaggtagaatatggcttaatttttaaataaataactgtaatcacaaaagaaagaaagacaaatgaaaacaaacaagaaaacaccaaactctgggaagttcttttatgagcctgccatggcacaagactttgagatcaaacgagagcaatctgaggaaaagtggagggaagaaacaagaggg

SEQ ID NO: 10715 - DNA, 583 bp, Homo sapiens
  MAP TO CHR14.3; EXPRESSED IN PLACENTA, SIGNAL = 6.3; EXPRESSED IN HEART, SIGNAL =  42; EXPRESSED IN LUNG, SIGNAL = 4.9; EXPRESSED IN BONE MARROW, SIGNAL = 3.1; EXPRESSED IN FETAL LIVER, SIGNAL =  61; EXPRESSED IN BRAIN, SIGNAL =  13; SWISSPROT HIT: P20280, EVALUE 2.00e-64; EST_HUMAN HIT: BF669079.1, EVALUE 0.00e+00; NT HIT: X89401.1, EVALUE 0.00e+00
aggaattcgccaaaatgatgaatgcaaagggaaagaggagaggcacccggtacatgttctccaggcgttttggaaaacatggagttgttcctctggccacgtatatgtgaatctataagaaaggtgacactgtagacatcaagagaatgggaactgttcaaaaaggaagccccgcaagtgtcaccatggcaaagctggaagagtctacagtgttccccagcatgctgttggcattgctgtagacaaacaagttaagggcaagattcctgccaagagaattaatgagcgtattgagcacattaagccctctatgagccgagatagcttcctgaaacgcgtgaaggaaaatgatcagaaagagacagaagccacagagaaaggtacctggattcaactaagctccaggctgctccacccagagaagcacactttgtgagaaccaacgggaaggagcctgaactgctggaacctattccctatggattcatggcataataggtgttaataaaataaaagacctctggactataaaaatgtttctcttcattgagaagtgtggtgccccctcccccaaagaactatt

SEQ ID NO: 10716 - DNA, 512 bp, Homo sapiens
  MAP TO CHR14.3; EXPRESSED IN PLACENTA, SIGNAL = 0.86; EXPRESSED IN BRAIN, SIGNAL = 1.2; EST_HUMAN HIT: BE743925.1, EVALUE 4.60e-02; NT HIT: AL163218.2, EVALUE 7.60e+00; SWISSPROT HIT: O04887, EVALUE 4.80e+00
ccaaatgttccccaatgttcccattttgggttagatggtctcactcagtttctattagggccctgactttaacccagaaaacctgttacgtctctgcatggcacctctactactactactactactactactactactactactactactactatcactatagtgataaccagatgggagaagaattaatatcttgcaaatgattgatatcagaacaattaaggaactcctgtaactcaacagcaacaacaacaaagaaagaactcccatggaatattggacaaaagttatgaaaaattcatttgcagaaaaataaaaagcatttgaggaatgattcaaagcattacagagaaatgataaacactaagacacaataaagtatcacttaatacctaggactggtaaaaatgaaaatgctgaatttgatgagggatgttggtgaagtgagaacggagtaaccaccacgctccgctggtgagcatgtagcctgttgcggtccctgtgaagagtag

SEQ ID NO: 10717 - DNA, 595 bp, Homo sapiens
  MAP TO CHR14.3; EXPRESSED IN PLACENTA, SIGNAL =   1; EXPRESSED IN HELA, SIGNAL = 1.3; EXPRESSED IN BRAIN, SIGNAL = 1.2; EST_HUMAN HIT: AA165541.1, EVALUE 5.40e-02; NT HIT: AJ000487.1, EVALUE 2.00e-03
aatgctttcacaaagaagctgatttacttttctttatattaatttttaaagtctgcttattagatcattttacctttgcagcagcacaacgaacagccatggatctatctgtcaagcaggatctagcagctttataaacatccctgtgacaaggtgcagcggcagctcctagtccattcaatatattttgcagacttagcataatctcatatcggccttgagacttccaaaaagaaaaaaaattaaataggaaaaataattaaactgcaaagaacaggattaaacattgatatctgtctctcatactgaagaaatatccagacttctctacatactaaccaacccattatgacatcaagaaacaagttactattttatgaaatattatttgaaaagttacttgtatacactgattttcaacatgatacaaatttcacagggttgatgtgaagattaaacaaaattacatgaaaagtgcctagcaaaaagcttacatgccattaagcattcaataaatagttgctatagtctaagctaacctattaaaaatgcagggtctgccatttactagataggaccttgggcaaatctgttc

SEQ ID NO: 10718 - DNA, 534 bp, Homo sapiens
  MAP TO CHR16.3; EXPRESSED IN HELA, SIGNAL = 1.4; EXPRESSED IN BRAIN, SIGNAL = 1.2; SWISSPROT HIT: O14350, EVALUE 5.00e-11; NT HIT: gi8923484, EVALUE 0.00e+00; EST_HUMAN HIT: BG613556.1, EVALUE 0.00e+00
tcccacaacttcatcattcttgctaataaaatcttcaggtaaaatagggagatttgttttaaacaagcctgaacttccttttcatttcccaggtactcaactctgtcaataaaatcctcaaactgcagtttagggaagagcctgtgtgcccagtgctccatgtgtctgattagagtcttcaaatcttcagcctcatgacctttacctttgaattttgcgttatcaaatacatgccttaaggctggaagtcctctctctgaaattaatatctgagcatccagcttgggtatacttcttttaactgttctctttggaggtacgggactctgcttcctgactcttcatcaggttcagccccttcaacatcttgtctctctggagagattggaggcgggaatggaggaaaagtttcatcttctacatgctcataatcaggtaggtcaatcatgccattctcctgtggttctagcatcttctcctctcacgcagaaagcaggggccacagtgtagagctccagggttctcactttcacc

SEQ ID NO: 10719 - DNA, 509 bp, Homo sapiens
  MAP TO CHR18.3; EXPRESSED IN BONE MARROW, SIGNAL = 0.65; EXPRESSED IN BRAIN, SIGNAL = 1.1; EXPRESSED IN PLACENTA, SIGNAL = 0.83; EXPRESSED IN HELA, SIGNAL = 1.1; EST_HUMAN HIT: AL603053.1, EVALUE 1.00e-108; SWISSPROT HIT: O00222, EVALUE 2.10e+00; NT HIT: gi16159012, EVALUE 1.00e-108
gctcctggaaagaccaacagatgatagcgttgaagtagctattggttttcttaaggaatgtggcctcaaattaacacaagtgtcaccaagaggaatcaatggtaagtgtacattcatagtttgatgttaagtttttattatatttattgcttattttattgtcttttctttctgttaacttttagctatatttgaacgccttcgaaacattctgcatgagtctgaaattgacaaaagagttcaatatatgattgaagtgatgtttgctgtacggaaagatggattcaaggaccaccccattatcctagaaggtcttgatttggtggaagaagatgatcaattcactcatatgctccctctggaggatgactataatccagaagatgttcttagtaagtccggggcatgttagttggaaagaggcttaccaacaaatgtaaatatagaaaataaacattaacttttacattttttttagatgttttcaagatggatcctaattttatgga

SEQ ID NO: 10720 - DNA, 588 bp, Homo sapiens
  MAP TO CHR19.3; EXPRESSED IN BRAIN, SIGNAL = 1.4; EXPRESSED IN PLACENTA, SIGNAL = 1.1; EXPRESSED IN HELA, SIGNAL = 1.1; EST_HUMAN HIT: BG719763.1, EVALUE 1.00e-49; SWISSPROT HIT: P57395, EVALUE 7.50e+00; NT HIT: gi14767579, EVALUE 3.00e-49
gtcaggcaaggaatggctacatctttctagatccagactcctctgcaaagagcctttgtggaatcaatgtgccactctctctcccacgtactctttagtgcaatataccttctgttttattcatgtctacttcaagatctttagctccttcttgagtctttggggttccagtcattccaggtgtgcagaaaccatgctccacagcactgcaaagcaaaaaagcagggagtttaacaggattggcaaaggggctgtagggatgaggccaactcttccatccactggtcatgtctgcctagaatcctaggatccattggtcatgcctgtcctgggcctgggaggagaggagagtggccggcatgccagataatagagcatttgtaaaacccagagggtattcaatctgtgagtttacagaagagtctcttaaattgttagaatataaagtctgggtctatacacaattctgtgggtgagaaaatattttgaagcctcccaggggaaagaaactctcatgggaccacacatttatcttctcttaaaggtaatattaacatgaaaactcaaagggcctaaaggagaaacagg

SEQ ID NO: 10721 - DNA, 525 bp, Homo sapiens
  MAP TO CHR18.3; EXPRESSED IN HELA, SIGNAL = 1.2; EXPRESSED IN LUNG, SIGNAL = 1.7; EXPRESSED IN BONE MARROW, SIGNAL =   2; EXPRESSED IN BRAIN, SIGNAL = 1.3; NT HIT: gi15312507, EVALUE 2.00e+00
ctttccctgttttctggctggctgatgctttccagggcagttcctaagggatgactgttcccatcaaggaaggggtcaccctcattggctccaacccctacacttattagtactctcagcagagtagcttaaaattgaccagggattaactcttcacctgccagaggtagtttttcttattaagtattgctaattaacctttttgtacttgagctgctactactgatcttcctgtgatactgtcagctctatgcaataatcagctacttatctggcttttctttggactaggggcagaaatttcccacacgattgtctgtggctttgtatgcagaatgcgataatgaaggaaagcagctataatgtgcttgtagtggtggtggaccaccaggaggtgggaagctctggtgaacatgagtaataccttctacattgaaatgttttgatgtggacctggatccaagtgagagttggaatctaactgccccccaccccccacaccactggtatgtttaaaagggcgca

SEQ ID NO: 10722 - DNA, 560 bp, Homo sapiens
  MAP TO CHR16.3; EXPRESSED IN BONE MARROW, SIGNAL = 2.7; EXPRESSED IN BRAIN, SIGNAL = 3.6; EST_HUMAN HIT: AA699469.1, EVALUE 1.00e-122; SWISSPROT HIT: P35218, EVALUE 7.00e-26; NT HIT: S80185.1, EVALUE 0.00e+00
gcttccaagtgtgacagcagtggcctcatggccttatctcggggaaagcacttccttccaagcaccatgaaggcctcccgtgctgagacaagatggaagctcctagtcccgcctgaggactgacacggccttggcttctcggtctctcaggacgcgcgggcggccatgcgccccttcgacccctccgctctgctgcccacctgctgggattactggacctatgtgggctcgctcaccaccccgccgctgaccgagtcggtcacctggatcatccagaaggagcccgttgaagtggccccaagccaagtgagccgtgcccgtaactggcatgatggcgcttcatggaaggcgtctctcttgcttggcagcgtcactaagatgctgcataagagccttgaggagttatatatattctttcatgcatttggggtgttcttacacaagaagaaagttccaattgaagtaggagcttgttgagattggacagcggttccagtgatcacagcgagcatgttctgagcaatgccctaatctatcacacacagacacacaaggcatcc

SEQ ID NO: 10723 - DNA, 571 bp, Homo sapiens
  MAP TO CHR18.3; EXPRESSED IN FETAL LIVER, SIGNAL =   1; EXPRESSED IN BONE MARROW, SIGNAL = 1.4; EXPRESSED IN BRAIN, SIGNAL = 1.1; SWISSPROT HIT: P25939, EVALUE 2.80e-01; NT HIT: gi14731024, EVALUE 5.40e-01; EST_HUMAN HIT: AI244791.1, EVALUE 8.00e-01
aaattatcatgagcctggcgtttattaggtacaaggcagtgtgccggccatttttcacaattatctgaaacccttgtcctgagatacaataaggtgttttgggtaatggggtcacacagctgaggcaggatttgaactcgggtttctctgatttcaaagccctttcttttcacataacaatgtctgtctcttgatagcacccaatacactcccttgccccagacccacaggcaccagaaaaacaaggccacctgggagctaactacagcctagatatattgtgtcgacagatacctctttgggatctgtttgaagaaaagctggatctctgggatggctcggagctgctgccggagcgcttcctccggacagctgtctgctgctccgggaaggtcacatgcactgactccacagacgcggccaggttgatggacttgagagaatcggaggagtccctcctgccatgaccgagggagagctcatcatctgattcctccctggccatgccactttcagtcatgtcatcttcatcccataagccatggcactgagaaagcaggacagggacaaa

SEQ ID NO: 10724 - DNA, 512 bp, Homo sapiens
  MAP TO CHR18.3; EXPRESSED IN BRAIN, SIGNAL = 1.5; EXPRESSED IN PLACENTA, SIGNAL =   1; EXPRESSED IN LUNG, SIGNAL = 1.1; EXPRESSED IN BONE MARROW, SIGNAL = 1.6
tagtttctgggccacctttccctaataaatgttttgtttgtttgtttaatcgagagaactatcaaaatataatcacatttatagactctgtttaactagagagaaggattaataatacattttaagtaagatatccatccacaatgaatgcattttgaaaatgaaacattttgtgcttaaacaataagttttggtgttcaggaaaattcagttatttgtaactcttccttcctgaacaatgctcaataaatgacaacttgcccacctccctttttttgtggggctatttcctcaactatctgtacaatcacctcattttgtaactttactttgccctgtgtagggcattgtcctggttggtaattgtgtggcctattgtttgcagcacatggataattattatgctgtgaacatcaatttgttgtacagtggcgaatggtgcgatttcccgagggacatgatgataactgtgattctcctcagtagggggtgggatgttgctcagggctaga

SEQ ID NO: 10725 - DNA, 579 bp, Homo sapiens
  MAP TO CHR14.3; EXPRESSED IN BRAIN, SIGNAL = 1.1; EST_HUMAN HIT: BI917222.1, EVALUE 1.00e-100; NT HIT: gi16190364, EVALUE 1.00e-102
aacattgttcatccgaagcccactccaagcacaaacatcatttagcctttgagttgctccctttgatggagaagaggaataatatttacctaataaagatcctcataatctctgccatcatcctcagtcaattttcttttagagaaaatgcttcagctttgaagactctcctgttttcatgtccaattgttttctcgtgtagagcacaatgagctacaacagaaactggaaaagaaagaacgagaatgtgatgctaagactcaagagaaggaagagatgatgcagaccttaaataaaatgaaagagaaacttgaaaaggagactactgagcataagcaagtcaagcagcaggtggcggacctcacagcacagctccatgagctcagcagggtgaggtcttccgctcagctcacgggcagctgccaaggcctcactgaccctagagcccctcacccttaagtagagaacttcatactgggggaataaaatctgaaatggctcatgattcatcacaattaggagactcactccctctgctatcatgtaggcagcagaggctgtttgggggtgcatttttaa

SEQ ID NO: 10726 - DNA, 594 bp, Homo sapiens
  MAP TO CHR18.3; EXPRESSED IN PLACENTA, SIGNAL = 0.87; EXPRESSED IN HELA, SIGNAL = 1.9; EXPRESSED IN LUNG, SIGNAL = 1.9; EXPRESSED IN BRAIN, SIGNAL = 1.7; SWISSPROT HIT: Q80953, EVALUE 7.70e-02; NT HIT: gi14762412, EVALUE 0.00e+00; EST_HUMAN HIT: BG392744.1, EVALUE 0.00e+00
ccctcttttctgcttttcccagggcggtgtccgtgtcctccatgtctgagttccagcgtctaatggacatctcccccttcctgcctgagaagggcctgccgtccaccagcagcaaggaggatgtcaccccacccctgtctccagacgacctcaagtacatcgaggagttcaacaagagctgggactacacacccaacaggggccacaatggtggggggccggacctttgggccgacaggaccgaggtggggcgggcagggcacgaggacagcacagagcctttccccgactcctcctggtacctaaccacaagtgtcaccatgaccacggacaccatgaccagcccagagcactgccagaagcagccactgcggagccacgtcctcaccgagcagtcggggttgcgcgtgttacacagcccgcctgccgtgcgcagggtcgacagcatcacggcggcaggtggtgagggtccctttcccacaagcagagccagagggagcccgggagacaccaagggaggccctccagaacccatgctcagcaggtggccttgcacctcccccaggcactcccgggactatgtggagggggcac

SEQ ID NO: 10727 - DNA, 526 bp, Homo sapiens
  MAP TO CHR19.3; EXPRESSED IN BRAIN, SIGNAL = 1.4; EXPRESSED IN BONE MARROW, SIGNAL = 0.97; EST_HUMAN HIT: AI553729.1, EVALUE 1.00e-08; SWISSPROT HIT: Q52914, EVALUE 2.20e-02; NT HIT: gi14765000, EVALUE 2.00e-56
agcaactgctcttctgtccccaccaggccatggagctgctggtggagaaggctgtgagcagtgcggctgggcccctgggccccggggatgcagtcaggcgagtcctggagtgcgtggccacagggacgctcctgacaggtcagtcgctgggccggagggcccaggaggtgggcggcaaatcgcagagaccagggcccgtggccatggcacagagagctggggtcacagacacagaggaagtgtccagcccaggcaggagtgcggcccacaacacacacatgctcccagcaggaaggcagacagggccgcggtcatggaggacaccaccctgcacgcagggcacagacacgcaggtcccggaagggagggctcagcccccacccaggagacaacagttatgttctctggtggccacgcccaccggcggcggcacagagccaccccggcacagagccactctggcacaaatccaccccggtgcctgtcctccaaagattatccagagggaacagccaggagctcagag

SEQ ID NO: 10728 - DNA, 511 bp, Homo sapiens
  MAP TO CHR19.3; EXPRESSED IN PLACENTA, SIGNAL = 2.4; EXPRESSED IN BONE MARROW, SIGNAL = 3.7; EXPRESSED IN BRAIN, SIGNAL = 2.5; EST_HUMAN HIT: AA297632.1, EVALUE 5.00e-51; SWISSPROT HIT: P13468, EVALUE 6.30e-02; NT HIT: U32576.1, EVALUE 0.00e+00
ggaggtggagacaggatttgaacctgcctcagtgcaggaggctcaagagcctctgtcttctctcagggcactgtgtgggagggtgagaaggagggaggcccacagaggcatgacctctgattgccactgtcacctgggccctgctctctgaagtctctgccaagcggggaggtggccgggggagggccctgctctgtgcagcctcccctcccccggcccgcagagttgagcacagagggacagaggcacggaacccccagaaatgtccctcctcagaaacaggctccaggccctgcctgccctgtgcctctgcgtgctggtcctggcctgcattgggggtgagaagaagtgggtggagggatgtggggcccacacctggtgggtgtgagtgtggctgtgtgtcctgtggctctgtagccacgtgagacatgagtacggagtgtgtgcgtttcatggcgtgcgtatgcatgtgcgtgtcggggagtgtgtgtgtcggtggctgagagtgaag

SEQ ID NO: 10729 - DNA, 541 bp, Homo sapiens
  MAP TO CHR19.3; EXPRESSED IN FETAL LIVER, SIGNAL =   4; EXPRESSED IN BRAIN, SIGNAL = 2.8; EXPRESSED IN PLACENTA, SIGNAL = 2.5; EST_HUMAN HIT: BF025891.1, EVALUE 0.00e+00; SWISSPROT HIT: Q62203, EVALUE 3.00e-02; NT HIT: gi15308521, EVALUE 0.00e+00
gtcttctcctccctcccaagttcagaatgaccgaagaagcatgccgaacacggagtcagaaacgagcgcttgaacgggacccaacagaggacgatgtggagagcaagaaaataaaaatggagagaggattgttggcttcagatttaaacactgacggagacatgagggtgacacctgagccgggagcaggtccaacccaaggattgctgagggcaacagaggccacggccatggccatgggcagaggcgaagggctggtgggcgatgggcccgtggacatgcgcacctcacacaggtgagtgggaggagccagcgggaggggctggaacctggagacaagcccagtgtgcccaggttggggctggccacactccaggcctgttggtaacagcttggcggggttgtggagagggctgtaggctcagctcgggcatcacccaccactggcagctgtgctgttgtggccattccagggccccaggtcccaactgcaagtggcacagagtgtgggtctcacaggagaaggagtggcacattccat

SEQ ID NO: 10730 - DNA, 584 bp, Homo sapiens
  MAP TO CHR18.3; EXPRESSED IN BRAIN, SIGNAL = 1.1; NT HIT: gi15316929, EVALUE 1.40e-01; SWISSPROT HIT: Q02952, EVALUE 2.50e+00
tacaaccaaaggatttgggctctccttcagggtaggagaacaaatggtttactgttctgcttatgtttttatgcattaatgttatgggaatcagaaaaacaactgaattactactcctagttgtgtcagacattgaaagggaagcagtgcagaatcactggattttggagaacttaagagagaatctgattcaaaaacttttaataaggttccaaaacacaaacctaacgttgaaagaatgtttacaaagtagagttgaactgcaggggagaacaggccttgcagacagctactgatctgaaaagaacttcctacaaaagggaaagaggccggtcaccagggctgaagaggagagaggagacgctgtgtcggcaccaactcagtgcaattcactcttcagtctctgctttgttcacactacatttctgtttggaaacagaatttggagaagtctgaatataaactttccccaagacagccaggtttggggcctttaatttatggaaatatgcatacactgtgtcctcaaatgctagctgtgtgcatacaacaaaaaaggaagtgacttttaagatagttaagga

SEQ ID NO: 10731 - DNA, 523 bp, Homo sapiens
  MAP TO CHR14.3; EXPRESSED IN BONE MARROW, SIGNAL = 2.6; EXPRESSED IN BRAIN, SIGNAL = 2.8; EXPRESSED IN HELA, SIGNAL = 3.4; EXPRESSED IN PLACENTA, SIGNAL = 2.5; SWISSPROT HIT: Q24472, EVALUE 6.30e+00; NT HIT: AF404823.1, EVALUE 2.00e+00; EST_HUMAN HIT: AW948860.1, EVALUE 1.90e-01
tctttcagattgccagggactttttacttaaggtggccagccactcaatttccaggagctgggagcatccacccacaaaaccatggccaggcttgccaaagggaaggcatgctgtttggcacagggactttaatctactgccgatatttcattattataatgcaataataaaagtaggtgtgtacaataaagccatttaataataactattatcaggcacacattagcctgcctttgaagaggcagtttgtatgcaacgtaattcctggtagggggagaatcagtggtagaacacttaagcctcatgggaagacgaggacgcaatgggctaagagacatggggcagctgtgtgtggccctcaaatcgaagagacagctctgtctactgatgataccgcatttcaacgttatagtaataccactgagtagttttcattgttttgtttttttgttgttgttgttgtttagagggtggaaactgaaggccaaagaagtgaaataaactgcctatcccttcagctga

SEQ ID NO: 10732 - DNA, 512 bp, Homo sapiens
  MAP TO CHR14.3; EXPRESSED IN FETAL LIVER, SIGNAL = 1.8; EXPRESSED IN BONE MARROW, SIGNAL = 2.8; EXPRESSED IN BRAIN, SIGNAL = 2.8; EXPRESSED IN PLACENTA, SIGNAL =   2; EXPRESSED IN HELA, SIGNAL = 2.2; NT HIT: AF202583.1, EVALUE 1.20e-01; EST_HUMAN HIT: BI836327.1, EVALUE 7.20e-01; SWISSPROT HIT: P13983, EVALUE 2.20e-02
atgtcaagtgctgttggctggagctgcagtttctatacctctccttgttattaatacgtacttagcggcagtgggaattagaagctccgtaataatacccttcccaaaacacttcagatgaaaatttctgtttgaaatttaaggagaattctattatggctgcagcacgttatataaaaggccgatgtcaggagcgaaggccttcgtgggtgccctctgatggctgatatgcttgcgccaggacggaagcccatggatctggccatcagtggccagaggcagaggaacactcgggccggcgtggcctgcatgtggaaactcctccattcggccaacttccgagccctcccgccagcctccttcgcactccttctccctgctcggtcggggagcaaccacaagggtgtctggggacccactcccctcctgcaggtgggcacggcatgtgcctaggccattgccccacccccaaaccacctcagtgataggagtgggagcttggagtgtgaaaa

SEQ ID NO: 10733 - DNA, 502 bp, Homo sapiens
  MAP TO CHR14.3; EXPRESSED IN HELA, SIGNAL = 2.2; EXPRESSED IN PLACENTA, SIGNAL = 0.92; EXPRESSED IN FETAL LIVER, SIGNAL = 1.2; EXPRESSED IN BRAIN, SIGNAL = 1.3; EST_HUMAN HIT: BI550086.1, EVALUE 1.00e-125; SWISSPROT HIT: Q00071, EVALUE 1.80e-01; NT HIT: AL591791.1, EVALUE 4.80e-01
acctcaccaaagcaccattccaattccccacgtcgctctgcagctggatccgcgagccgacccctcacctcccgctccggtaccgatcggatgtgggtcgcgggtggatgggcgggtcttctatgacatcatcactgttcgccgcgaagagggcgcgcgtcatcagatcaagtcgactcgctcctctccttccaggccctggtgaagtacggaatgccggaagggccgggctcaaagctccgcctctggcgcgaccgacgactggagcgcagggcaggggtagaggctcgtagatggaactggtagtcagctggagagcagcatggaggcgtcctgggggagcttcaacgctgagcggggctggtatgtctctgtccagcagcctgaagaagcggaggccgaagagttgagtccgttgctaagcaacgtaagtgggctgtgttcgcttccccgcgctgacgccctccggcttccctcaagtgcctgccaaataagacccaga

SEQ ID NO: 10734 - DNA, 585 bp, Homo sapiens
  MAP TO CHR14.3; EXPRESSED IN HELA, SIGNAL =  24; EXPRESSED IN LUNG, SIGNAL =  15; EXPRESSED IN FETAL LIVER, SIGNAL =  17; EXPRESSED IN BRAIN, SIGNAL =  16; SWISSPROT HIT: P00423, EVALUE 3.00e-70; NT HIT: M34599.1, EVALUE 0.00e+00; EST_HUMAN HIT: BF664326.1, EVALUE 0.00e+00
agagcaaggctcaaaagcaggacagcatctctcacttcttccactcgttcttgtcatagtcccacttggctggcgaagccctgcaggggttcacctcatgtccagcatcctcttggtctgcatgggcacccactctttgtcaaaggtgtgcgggatggggccgtacacacagcgcttctcccagatgataatgaacgccgtgaagccaaggaagaacatggcagcgcccacaaccgtcttccactcgttcacgcccctgttcatctcagcaaagctctccttgaactgaatgtgatacaactcgactttcccatccgtggagcggttgctccaggaggccttctccttcttcttcacggctttctgtctggcagacaggtgcttgacatgggccacatcgggtacgggatagtcacgtcgatccacataagctgggagcgcatagtcatcgctcttcacaacatttccgtgtgctcgtacagacaccaaggtggaaattgctcgcttgccaactaggctaactaccctggtagccaacattctgccgcagctgccccaccaccgccgccctctatgcccggtgtc

SEQ ID NO: 10735 - DNA, 540 bp, Homo sapiens
  MAP TO CHR16.3; EXPRESSED IN BONE MARROW, SIGNAL = 1.8; EXPRESSED IN FETAL LIVER, SIGNAL = 1.1; EXPRESSED IN BRAIN, SIGNAL = 1.1; SWISSPROT HIT: P09065, EVALUE 3.90e+00; NT HIT: AE004835.1, EVALUE 1.30e-01; EST_HUMAN HIT: AA131046.1, EVALUE 3.00e+00
cttgactcattcctcgcctccatcccccacattacatcaggcagagactctgcccagcgctgtcttcagtgggagcttggcttccttgcttccttctcatctccactggctcagccctcatccttcacacccagagagtctctaaaacttctgggcctatttcttcctctctggtctctcctgacacctccctcatcagctgcatgcccacatgtggtggatctttcacaagggctgccctgaccatgtaatgcccccttcctccaaaaccgtcaatggctccctgcttccttccccatccagtcaaaacttttcaggccaatcttgaagctgtaccttccatctagcccctccttcctattcagtctcatctccctgctccccaacattgagctttcttgagggccagtgcgtcccctcactttgtgacttggtttgctgcttccaaactcctgtccccttcttgtatggattatcttcccttgatccaaagtccatccaccgctcatctaacacatgccctgaaagatccagcgaggg

SEQ ID NO: 10736 - DNA, 557 bp, Homo sapiens
  MAP TO CHR18.3; EXPRESSED IN HELA, SIGNAL = 1.3; EXPRESSED IN FETAL LIVER, SIGNAL = 0.96; EXPRESSED IN BRAIN, SIGNAL = 1.1; NT HIT: AJ004619.1, EVALUE 1.30e-01
cagtgaccggcctttacctgaacacggctggcccccgtggcagccctccttctccaacctccacaccacttggcaatccagaactctgccacaggcatcctcagaaaggccagtcttggcccaggctctgaaggcaggaggggttatccccttgacagtcagcatctttcaataattcccatccaggaattcatctcagctctctgggaagctatatttttagccctttccaccatctacaaagtgacatcccttgagcatgccagagatctttgtgatttccaccatcctcaagtcttcaaagtgtctatggagcctatctcatttctcattgcatctcatcttctcacttaagatttcaccattgctctttgccccttgtaccaaggacgtacactaaggatggagggcgctcagggatgaatcaaccatcacctctgccctggtacaagtcgcagtctagagggcctaaaagggtttatgcaaatatctagcatatgatgtcgtttccagtgcccacaaaggtgaataagtcaagggttatgggagtacctggg

SEQ ID NO: 10737 - DNA, 559 bp, Homo sapiens
  MAP TO CHR18.3; EXPRESSED IN FETAL LIVER, SIGNAL = 1.1; EXPRESSED IN BRAIN, SIGNAL = 1.2; SWISSPROT HIT: P20430, EVALUE 3.60e-01; NT HIT: gi13376139, EVALUE 4.00e-54; EST_HUMAN HIT: AA436734.1, EVALUE 6.00e-54
cctataaaattgaatgcatccttgaaagtattttaaaattgaagccgactttttttcttttaattcttaaattatttagaatgcgcacagctttggaaaaagaaatagagagactggagtcggctttgtctctgtggaagtggaagtatgaagaactgaaagaatcaaagccaaaaaatgtgaaagaggtatgggggaatatgatgtaaaggaagaaatgaagcctagctttttctttctttggatatgtaagcatgtgggcagaaaggcacaacagataagaggaagggaggttaaaaattggaatttcctctataagagtaatacttgaaatcacttgtcaatagtgggcttggtcaaattcagactctatgacatcttgtttttatttacacatttgtgtcagttttatattggtcattatttattttcaaaaatcttattctatatatttaagatataaaaatgatgttttgatatccatattgatagttaaatggttaatgatgagctacatgacacaattaatacccattctaggcacattagaggggatggt

SEQ ID NO: 10738 - DNA, 566 bp, Homo sapiens
  MAP TO CHR18.3; EXPRESSED IN BONE MARROW, SIGNAL = 0.8; EXPRESSED IN BRAIN, SIGNAL = 1.2; NT HIT: AF395008.1, EVALUE 2.00e-03; EST_HUMAN HIT: AW294477.1, EVALUE 3.00e-06; SWISSPROT HIT: P02440, EVALUE 4.80e-01
ttctaacaagcccccaagtgataccaatgctgctggtccatggatcacacgttgagtaacagagatttgcatgctatcatgttctatctctcctgagatatggcttctctattatttggggaattaaaaaaaatcatttacttacataatttaagaatattagctctttgaaagcaaataatatgtctttcacacccttgcatctccatgtaaaggttagctactcagtaactgatagtttattccaattgatttgctgaccatgtgttccatgctatttttaagcccttaactggctctcagctatcctcagaattcagtgcaaaaaccttagatcatgccaaacatgatcatgccaaaaacctgagcctgttcaccctccagtctgacctcctgctgcaagcccacgtccagccttgtgtccctgccatcatatgtgggagcctctctcattcagacgggggctccagggtaagggtctgacaattatggaagatatggctcatgtaggactctgaggagttataggaaggatggaaaatatgtccaacttcatttctttgccc

SEQ ID NO: 10739 - DNA, 504 bp, Homo sapiens
  MAP TO CHR16.3; EXPRESSED IN BRAIN, SIGNAL = 2.1; EXPRESSED IN HEART, SIGNAL =   2; EXPRESSED IN FETAL LIVER, SIGNAL = 1.8; SWISSPROT HIT: Q04307, EVALUE 3.00e-09; NT HIT: AF126531.1, EVALUE 0.00e+00; EST_HUMAN HIT: AW138186.1, EVALUE 0.00e+00
ttgacagccatgagtagcatctttttttaaatgtggtcacttcttttttctcattgccagagtcgtgtcccaaatgcgaacatcctcgtgcttacttcatgcagcttcagacccgctctgcagatgagccgatgaccaccttctacaagtgctgcaatgctcagtgtggacaccgctggagggattagggccaggatggcccagctgccctagtgtgtgcttgccttgtccctcggggtagatgcttagctggcagtatgagttgtgtgtcctgagggtctttgctagtgtggtggaaagataaaccttttgaggtgaagagccagggggtcaggaaatatggcctatctgccaggcagggtggatgaagtcatgaatgtctgggagtttttctgtgtggggaggagacagagacccataactaaatatgctctgtgtaaagtcctattctttcatcttccactttattggcagttgacattcccttactcccaatcaacactc

SEQ ID NO: 10740 - DNA, 579 bp, Homo sapiens
  MAP TO CHR14.3; EXPRESSED IN FETAL LIVER, SIGNAL = 6.4; EXPRESSED IN BRAIN, SIGNAL =  13; EXPRESSED IN PLACENTA, SIGNAL =  10; EXPRESSED IN HEART, SIGNAL =  14; EXPRESSED IN HELA, SIGNAL =  14; SWISSPROT HIT: P55010, EVALUE 7.40e-02; EST_HUMAN HIT: AL037316.1, EVALUE 0.00e+00; NT HIT: gi14754024, EVALUE 0.00e+00
gctgcatctaggcagtttcctcctctgtgaccacaatttacattgatttgttttataaacagatttatcagcttatgttgaataaaatcattcctcttaacaggtggtgtattcgaaggctgccagtgtaccgaaagttgagactgtaaagtcagacaacaaggatgacgacatcgatattgatgccatttaaagggatggatgcaacctagcttaacagtataatgctgcaaattttcctccattatcagccagaagtgcaacatgtatgtgcaaaagctaaaatggcttaacatcatgctacactttacactaaaaatctattactgtgagtggtctgttattaagcccaatgagacatctagggagtccatacacatcagtgagcagatgtagtttgcttatttatagcatgtttctttttgaaaaactagtggtggacacatttggatcacatttatacagttataaaaataaaggtttgattttggtcgttcttcagatgtttggctctgaatgacttaagctgaagtaactggctccttactttaaatgttctgccatcatttcacctgatga

SEQ ID NO: 10741 - DNA, 500 bp, Homo sapiens
  MAP TO CHR19.3; EXPRESSED IN BRAIN, SIGNAL = 1.2; EXPRESSED IN PLACENTA, SIGNAL = 0.86; NT HIT: gi15302875, EVALUE 2.00e-99; SWISSPROT HIT: P97433, EVALUE 3.00e-03; EST_HUMAN HIT: BF206770.1, EVALUE 2.00e-41
caagggggaaaataatcagaggacaaggccatgccctcccctacctcccaggaatgcaggacacaagggggcagcctacctcagggcagggccagcggggttcctcatccttaggccagtccccggggctcagatgattccagggaaggccgacccggctgactgccacctccaccatcactctgcagagcggttgagcatgaaagaccagctgatcgcacagagcctcctagagaaacagcagatctacctggagatggccgagatgggcggcctcgaagacctgccccagccccgaggcctattccgtggaggggacccatccgagaccctgcagggggagctaattctcaagtcggccatgagcgagagtaagttggctgcccacacctcaagggtgcagtcttgccggggtgggctcctcagggaaccccaggccaggctcacggctcattgtggccgacacggcaccctgtccaggacaggcttctatgtggggg

SEQ ID NO: 10742 - DNA, 532 bp, Homo sapiens
  MAP TO CHR14.3; EXPRESSED IN HELA, SIGNAL = 5.2; EXPRESSED IN LUNG, SIGNAL = 2.8; EXPRESSED IN BRAIN, SIGNAL = 2.6; NT HIT: U89432.1, EVALUE 8.00e-03; EST_HUMAN HIT: BG979999.1, EVALUE 0.00e+00; SWISSPROT HIT: P11675, EVALUE 1.30e+00
tcttctgacttgggtttggcagatcatcatcacccttcctcaagaactttagtcttcaaaacagccttaaaatcctcactccaccttgcgtctagaactgaagtccctgccccacaagtcccagcctggagccgaaaaggaaggcagaaacctagacaaagtcgtcaagatcccgagagaagtgggtaggtacttactctgtttctctctgcagggccgtcaggatcagggacttgaggctggaacacaggtggcaggtgtttggtacccagcctgcccaagaaaagtctccgcctggccccgccccaccccaggcccagcccacctctcccgttgctccgccgccagccgtcgccagcgggtgttcagtcgtctgcgggtcagcacggccgcaaactggcggatctaggacgaggaagcaagcacgtgggggtccgggcaggaaggtgctgagcggaccgcagtgggcgaatactggggcttgaccggtggcgtacagtgggaagctcggaggggagagtaaggggtctca

SEQ ID NO: 10743 - DNA, 567 bp, Homo sapiens
  MAP TO CHR19.3; EXPRESSED IN BRAIN, SIGNAL = 1.2; EXPRESSED IN PLACENTA, SIGNAL = 1.1; EXPRESSED IN BONE MARROW, SIGNAL =   1; EST_HUMAN HIT: AI909504.1, EVALUE 9.00e-50; SWISSPROT HIT: O76100, EVALUE 4.00e-64; NT HIT: gi14768167, EVALUE 1.00e-114
acaagtacaggatcccagcgaggggaactccacccagtggccctactgcaaaatacatcgccatgtcattaagaaaggtatcagaaccggcaaggcggatgacctgattaagttcatagacaaaatgtggaatttggaaatctgtgcagaagggcagtgacagcaccatcaagctatgtaatgaggaatccagatcactgataatccagaatgccagaaccagcagtccacagagccaggggctcatgatgatccaggatgccagaaccagcagtccacagaaccaggggctcatgatgaccatgtagtgcagggggtgacagatggccacaaactggtcataggccatcacggtcaggagtaagctgtccagtgcttctaagagtacaaaaaagcacatctgggtgatgcagcctgcataagtgatgactctgctctgtgtctggatgtttacgagcatctttgggattgtagtagagatgaaacagatgtccgcaaaggacaggttggagaggaagaagtacatggggtgtggaggtgggagtctgagattgtggccaggatgat

SEQ ID NO: 10744 - DNA, 572 bp, Homo sapiens
  MAP TO CHR16.3; EXPRESSED IN BRAIN, SIGNAL = 0.99; EXPRESSED IN PLACENTA, SIGNAL = 1.1; NT HIT: Y18522.2, EVALUE 8.50e+00; SWISSPROT HIT: P31356, EVALUE 3.20e+00
gaacccagaactagggggagcctgtcagggagggcagggagccccccacccgggagagaaggggcactctccttccactgggcttttactaatgcattggtctccatttgaatttcctcatgtaagcaagtgaacaagataaaaattcaaaacacctggtggtttcaaacttactcatttttttaaaacaatgctactaataaagatgatggcaggaacgatggagtccagatgaaccgcagcagccagttcaagtgacacattcgcatccctttcttctctttggggaaaaggaaaggcatcagcagtttcaagtcatttaatacagatttccatcattgttatcctaagcagaatcactgttatcgctgtaataacatttgcccggcatccccgcaagctgggtgccgtgcatctggtggccacattgtctgcaccagaagcctgcagagtcgccggctttgacaaggagggggtgctctgtggggcgagtgggtgcggtcagggaagaccggcggcttctgtcccgagggatggattccattaggcggcgtttctcagggtgtctccga

SEQ ID NO: 10745 - DNA, 521 bp, Homo sapiens
  MAP TO CHR14.3; EXPRESSED IN LUNG, SIGNAL = 1.3; EXPRESSED IN BONE MARROW, SIGNAL = 0.98; EXPRESSED IN FETAL LIVER, SIGNAL = 0.9; EXPRESSED IN BRAIN, SIGNAL = 1.2; EXPRESSED IN PLACENTA, SIGNAL =   1; EST_HUMAN HIT: AA489895.1, EVALUE 4.70e-02; SWISSPROT HIT: P15265, EVALUE 1.30e-02
gagctctgcccttgaagatgcttgaactatagcctgaaaaaatgtgtttccatactatattgtctctaaattcagcagaattggcaaataatcccttgaatttcactgccttacctctgcaaaagtaagaccctcgaggttccaggaaagactccactggccaccaagcccaacagagaagaggccctggggagacggcagaataagttgccatgtggtgagagctgcattgcaaaggtgtgggaggagacacctgggaccagccaagggggcttctcggggtgcctggacagagcatagattcctgagagcagggagcaggacaggagccaggctgagagcagggagcaggacaggagccaggaagctcagctgatgaatctttttgagaggcagccttcccaggacccatcacctattcatgatttactttcctgttcatcccaggaagagctagacagtggcctcaaggggtggtctccaggtgccaaccccaaaggtcagtccaggtctccatgaca

SEQ ID NO: 10746 - DNA, 530 bp, Homo sapiens
  MAP TO CHR16.3; EXPRESSED IN HEART, SIGNAL = 2.4; EXPRESSED IN BRAIN, SIGNAL = 1.3; EXPRESSED IN PLACENTA, SIGNAL = 0.82; NT HIT: AF023459.1, EVALUE 5.00e-04; EST_HUMAN HIT: AL042254.1, EVALUE 1.00e-128
tttgcctctgggaaatataaggatgggagatacaaaggaagacatgtcagtcttttatatcttttttagtaggcatgtgttatgataaaattctaatacatgttcaccactgattattacaatataatcataaatcctggaagagaaaaaagatagatctacttactggcacatctttcttaaagctgactccagttggcctggtgaccgtaaccgttttagcaacagtggtagttgttgaggtggttaccatagtgctaacttgaccagcaagaggagcttttgctggaacctgggcctgagcctgggcctgagccagtgcaatacttccaggggttgtgatagagccttgcattttcacaggaggatctctagactgctgtccatactcaatatactaaaagggtagggagaggaaaaagagttaaccttaattgctaagtctggattatacgtccctcttttctgagagggtaaaaaacatgtctgagtgctcttttggttcatctagctcacatactctttgcccc

SEQ ID NO: 10747 - DNA, 545 bp, Homo sapiens
  MAP TO CHR19.3; EXPRESSED IN LUNG, SIGNAL = 1.1; EXPRESSED IN BRAIN, SIGNAL = 1.4; EXPRESSED IN HELA, SIGNAL = 1.3; SWISSPROT HIT: P97433, EVALUE 9.00e-19; NT HIT: gi14670376, EVALUE 2.00e-96; EST_HUMAN HIT: BF206770.1, EVALUE 3.00e-96
ccccactcttagttcccctcaccaggcccttgacctccctgctgtttgggtgctgtggggtaaagggtgacctccccaatgccctctactcatgcaggactcaaagccacccgtcatctcgttacaaaagctcatcgtgagggaagtggccaacgaggagaaagcgatgtttctgatcagcgcctccttgcaagggccggagatgtatgaaatctacacgagctccaaagaggacaggaacgcctggatggcccacatccaaagggctgtggagaggtgaggagggcctgggggtctccccacccactgtgttccttccgctgattggtccacccttggcttcgaccgttggccatcagctgtgaccttgaactccctcatcccagcttgggacccatgacgccattccagctccttctgatgactcaacctgttggacgttgaggccaacgggcccagaaaggcagctgtaacctgggcctttctgcatgcgtgggccactgcacctgccatggcgggctctctgcattctagggccagatttg

SEQ ID NO: 10748 - DNA, 536 bp, Homo sapiens
  MAP TO CHR19.3; EXPRESSED IN LUNG, SIGNAL = 1.5; EXPRESSED IN BONE MARROW, SIGNAL = 1.3; EXPRESSED IN BRAIN, SIGNAL =   1; EST_HUMAN HIT: AW833023.1, EVALUE 1.00e-104; SWISSPROT HIT: P49694, EVALUE 5.00e+00; NT HIT: AJ414933.1, EVALUE 5.10e-01
caggccagtcctctcttgtcgtttcatctagacagccccacaccaccccccactgccatgtattgcaggggcatcaagaggtgagggcattcttcctggacagaaccaggttgtcaaatgttgaaactcttgtgggtctgtcattttcatacccaggtcatggctggcaaaatggggacgaagtttatctactcagatgtgaatcccaagactttaagctgtcctctggtttccttcctggctgaagatctatgcagatgttcctatgtgcctgatctgaagagcaaaacttcaatagaggagtcatctatggtaaaaacaaggcaggcaatcaatcttttttagcttggctgctgggcactgtttacagagccgcattcagattaatgaggagctgtttgatgagtctaactcctccatctctttggaaaaagagcaggtgccctacaccactaaccttggccagcactgggctgtggtgagagcaggcacctagaggtctctatagctaggaacctgagaagaccaggacaggc

SEQ ID NO: 10749 - DNA, 518 bp, Homo sapiens
  MAP TO CHR14.3; EXPRESSED IN BRAIN, SIGNAL = 1.1; EXPRESSED IN HELA, SIGNAL = 0.99; EXPRESSED IN BONE MARROW, SIGNAL = 1.5; EST_HUMAN HIT: BF981713.1, EVALUE 1.80e-01; SWISSPROT HIT: P51690, EVALUE 1.60e+00
tataaccccaggtcccttccctcctagacactaagcagagtcatgatgcagattactattcctcagaacacactggcttaatgtgttgggactttgctttttgttttggcaggtctcaaaagtttcttaatgctctgggaccttaaccctaagaaaagctatgaaactattgctacctctgcgcatgatcatcttcatgatactcatgctctaattgatcatgacactgtgtcccagatttgtccttagaatccttttcatcatgctacatgtagccactaattttcagttgcatttgctacaagagaagcccattcagcatggtttgttcaaatgggggagggggctaggaggctgggaggaggcaggggtaagggaagggattcattaacaagaggggaccaggcacagaggaagagggagtcctacaggcataaagaatgctaaatttgaaaagagcaaagagttttcaacaccgtaagaaagaaaaaaagtttaccaaatctgatggccttttt

SEQ ID NO: 10750 - DNA, 538 bp, Homo sapiens
  MAP TO CHR19.3; EXPRESSED IN HEART, SIGNAL = 2.6; EXPRESSED IN LUNG, SIGNAL = 4.9; EXPRESSED IN BRAIN, SIGNAL = 3.7; EXPRESSED IN PLACENTA, SIGNAL = 3.2; EXPRESSED IN HELA, SIGNAL = 6.5; NT HIT: gi14765802, EVALUE 7.00e-68; EST_HUMAN HIT: BG397575.1, EVALUE 0.00e+00; SWISSPROT HIT: P73203, EVALUE 2.90e+00
aagcgattcatggctgggcagggccagtcccgtcccgctgcacgctgaccaccgtgccctgcgctcacgcctgcaagccactcagctggaacctggcctcctcggatatgccgaactgttccagggggtcctgtggggaggacgggtggccatgagccagggctggaggactgcctctgccacctgcagccccaccccggccctctgcagccctgcacacaccttgcccgtcaccttccggatttcgttcctgtagaagatgaggcttctccgcatgaactcgtagctggggaaaagggtggcacggggtcaaatgcccgctctgcatggctgctgtgcccaccccagcagtgcccaccaccgcctggccccacctggcccgacgcagagcctccatccactcctgacactgctcctcgctgctgcactcaaagtgatacttcctctcagggtcctcaatgaagcctggggatggaacacctgtggtcggtcctacccacagccacaagcagcttcctcttgccattgcccataaact

SEQ ID NO: 10751 - DNA, 552 bp, Homo sapiens
  MAP TO CHR16.3; EXPRESSED IN PLACENTA, SIGNAL = 1.1; EXPRESSED IN HELA, SIGNAL = 2.6; EXPRESSED IN BRAIN, SIGNAL = 1.5; SWISSPROT HIT: Q02817, EVALUE 5.30e-02; NT HIT: X58562.1, EVALUE 8.20e+00; EST_HUMAN HIT: BF965873.1, EVALUE 3.00e-71
cactcatacccctgagagcccccttccccgggccctgacccccactcatacccgagagccccccttccccgggtcctgcaccccccaggcccctgagacgctctgtgctttaggacccacctgatcctccacatggcccgagcccacggctactccaaggtcatgactggggacagctgcacacgcttggctatcaagctcatgaccaacctggcgctgggtcgaggggccttcctggcctgggatacggtaggcaggggcctgggtgttcaggaggcccatcctcaccttcaccccttcggccacctttactggagagtagcctctcgcgtatcagtcctgcggcctcggatggtggtggggtctgtgacctcccctacctggcaggggaggaggggcaagcacattcgggccttgacctggaccacacagcccctgcctcccgcagggcttctcggatgagcggcacggggacgtggtggtggtgcggcccatgcgggaccacaccctgaaggaggtcgctttctacaaccgcctgttctctgttccttc

SEQ ID NO: 10752 - DNA, 578 bp, Homo sapiens
  MAP TO CHR19.3; EXPRESSED IN HELA, SIGNAL = 1.7; EXPRESSED IN HEART, SIGNAL =   2; EXPRESSED IN BONE MARROW, SIGNAL = 2.1; EXPRESSED IN BRAIN, SIGNAL = 3.3; EST_HUMAN HIT: BI908361.1, EVALUE 3.00e-80; SWISSPROT HIT: P46593, EVALUE 1.90e+00; NT HIT: gi11424606, EVALUE 2.00e-80
gtgttgagggctaaagcaggaaccaggccacacagataccagactgaagagcttggtctgagggcaccaggaacagtaggggtctgtgtgcagggaggggccggggcagctctaggtgctgaaagacccatctggggccatatagaggcagactggagggggagatgggaggctggggaagctgctggagtcagagtccaggcagggatggatgatgtttgagccggggctgtggcagttttgtcccaaagatcatcagatgacctaactttgctccacttaagagtcaggccagatagaccttaactcttacctttggatctctcagaggaactcagagtatcttcagactcagaactgtcaccatctgagaagagggataatcggggagaggtgacggtgctggaccatttcactttcttaggagaggtttcaaaactggagttcagccctctctttgagcctaaagaaaggcagacaaaatgcagactggagttacaaaggcccctctgcaggcaccattggactgggagccctgaggttatactcagctatgctgttctctttggccctcaaca

SEQ ID NO: 10753 - DNA, 524 bp, Homo sapiens
  MAP TO CHR16.3; EXPRESSED IN PLACENTA, SIGNAL = 0.92; EXPRESSED IN BONE MARROW, SIGNAL =   1; EXPRESSED IN BRAIN, SIGNAL = 1.4; SWISSPROT HIT: Q9TU23, EVALUE 3.70e+00; NT HIT: gi14779532, EVALUE 6.00e-47; EST_HUMAN HIT: AA478524.1, EVALUE 0.00e+00
atcgtcctactgggggactcccttgaaagctgccgtggactgtggggtaagaggagcattcctgggagagccaatgaatgctaggtccagattagaaggctgctgcgcagcacggttaccttctagccatctcttcatctgacacatcaagctctactgtttcatcttcaacttcttccgctttgtgcttagcattcatctgaagcatcaatttctgaaaaatacaccagtgctgaccttcaggctagaaaacgcttgtgaaaggaactgatgtcaaacttacctgaaggcagagaaactgaagtcaaataatctagagaactagtcaaaattgataagggactctctgtaatacttgataccacaatggtgtaagagaagtaagctctgagtcaaaaaaatagtaaggcaaagccccactgaattatacttagggtgaatttaaagtgtatttaagatcataaatcttagtattagttactcatatttaaagcaggcatactgctgacacattccggtgagtg

SEQ ID NO: 10754 - DNA, 559 bp, Homo sapiens
  MAP TO CHR14.3; EXPRESSED IN FETAL LIVER, SIGNAL = 1.2; EXPRESSED IN BRAIN, SIGNAL = 6.2; EST_HUMAN HIT: BG012466.1, EVALUE 0.00e+00; SWISSPROT HIT: O42230, EVALUE 8.00e-01; NT HIT: AJ243122.1, EVALUE 0.00e+00
cctgggcagaaagatagctgagattctaggcagctgaaatgtggcctagggggcagtgaggatggcctggcgatgcaggcaggtaggcatgagacccaagggagggaattctgggagggtgccacttacgcatcaggtagacacccaggtcaacaccggcaagcagaaagcccaagaggaatcggagggccatgacgcctgtggaggagcctgcagcagcccctcctactccacaggggcccaccagccccaaggtcagcagcacaatcccgcgacggccaaatctagaaagtgggaagggcttctggtcacccagactctctggtggtgggaaagttgctgggtaagacccagctgcacacttcagagctagaggtatgagaatgaagttctgggagcaagagttggacagaggcttgagaagatggggagggatggggaccatgggtgggtgatgcctggctactgggcactggggtgtggttgtggttctttaagaggtgggaacattgactcttgggctattggtcagagattagggcacttgtcaatggatgtg

SEQ ID NO: 10755 - DNA, 507 bp, Homo sapiens
  MAP TO CHR18.3; EXPRESSED IN LUNG, SIGNAL = 1.2; EXPRESSED IN BRAIN, SIGNAL = 1.5; NT HIT: gi15305351, EVALUE 1.00e-111; EST_HUMAN HIT: BF512143.1, EVALUE 1.00e-111; SWISSPROT HIT: Q01630, EVALUE 4.70e+00
gcaattatgccttgcaactggaatattgtttcatatatttgcataacttgccaatacttttaaacaccttaagaggatttttaggaataatgatcaagtactaaccttttaagtcttctgatttgctccatcaatgaccatttctcactatttaacaaactaattttatcttctaatttctgtactaacatggagttctaaaatcaaaacaggagaaaaacagaaactcaagatctcactgtacgcttttacatagtttaaatactttctgtggacttgactaattagttgctatctctcacctctgcaggctggggagtttcaagagttggaggaaggttgcttataattggtgtaagggcctctaattcatcttcttctactccactggccacatctacaagatcttttccagttacttgatgatttccaaaatcccggtagagttgcaataagtctggaggttttggaatgtttaatcctacatcatcccataattcaaaatcc

SEQ ID NO: 10756 - DNA, 567 bp, Homo sapiens
  MAP TO CHR14.3; EXPRESSED IN BRAIN, SIGNAL = 1.7; SWISSPROT HIT: P87140, EVALUE 1.80e+00; NT HIT: AL163207.2, EVALUE 3.50e-02; EST_HUMAN HIT: AL556339.1, EVALUE 1.00e-118
tgacagcacatgcttgaagacacaggtcaaaagagcacagtgcagacctttatgaagcacctttctgtgacagatactttgctagaatagctaatgacttctagatctgcagctgaagaagtttcgatgaaccttccgtctccattacttgggtgaaagtggacctggaatcctccagctgcttccattatactttcatttctgctatccctgatcttgtggagtcaagagatataatctgttactcacgcattactcaaatctctacacaagtcaccacttatgggaaaactaccctagtcaaaacaggaatagccagcttgttctccatctgcagggcaggcatgtattatttgtctttaaaactttccccaaactcagaaaaaagagttgttacacgcaaaaaattcagaagacagtcttcagtaaattgcaattttgttaaattaaaaaaaaataggatgtgtgctctttaggtaacagtgtttagactttatagttttcaataaaatttaatttcttagttgttgcaactagaggtacctcagatgctgggtgtgttgctaa

SEQ ID NO: 10757 - DNA, 576 bp, Homo sapiens
  MAP TO CHR18.3; EXPRESSED IN BRAIN, SIGNAL =   1; SWISSPROT HIT: Q9UL36, EVALUE 1.00e-09; NT HIT: gi10092585, EVALUE 8.00e-71
tgggtaaaacatgtgccttgtgacatttaattgtattactagcattgacagtgaattacatctgcttttcttttgctttgtaggtctcatccagcccattccaaaaaaccagtttttccaaagctatttcaataataattttgtcaatgaagcagatagaccatacaagtgtttttactgtcatcgtgcatataaaaatcttgccaccttaaacaacacatcaggtaaggtaacggattcacagatggaaatttagtataattaaactgacttagtgacctgatgacgtctagaagtatttaggatggtagcattagcttttggtattaaagatgtcacatttgactccaaaacatttattggtaattaatatttttattctttaatgtcttgactaaaatattttatccagaaattgctactggagtttatgtatatgctcattaaatttcagtgtttgcaatttccaagaaatgtcaaagaagtttattttattagacttccttttgtgtttttcagatgtatttatcagtttagattaattcttagtgctagccacagtgaaaaggaagtcga

SEQ ID NO: 10758 - DNA, 553 bp, Homo sapiens
  MAP TO CHR19.3; EXPRESSED IN HELA, SIGNAL = 6.2; EXPRESSED IN PLACENTA, SIGNAL = 7.3; EXPRESSED IN HEART, SIGNAL = 3.6; EXPRESSED IN LUNG, SIGNAL = 6.3; EXPRESSED IN BONE MARROW, SIGNAL = 7.1; EXPRESSED IN FETAL LIVER, SIGNAL = 3.1; EXPRESSED IN BRAIN, SIGNAL = 5.1; EST_HUMAN HIT: AI309316.1, EVALUE 1.00e-111; SWISSPROT HIT: P06870, EVALUE 3.00e-25; NT HIT: AF277050.1, EVALUE 0.00e+00
ctttctcactctcccctcccaccttgtgctcccagggtgattcagggggcccgctgatgtgtgatggtgtgctccaaggtgtcacatcatggggctacgtcccttgtggcacccccaataagccttctgtcgccgtcagagtgctgtcttatgtgaagtggatcgaggacaccatagcggagaactcctgaacgcccagccctgtcccctacccccagtaaaatcaaatgtgcatccaatgtgtgtcacgttctgccatcacctatctttccagatgtggtgcacctggacccactcggctgaggctggggccaccccagctgtgtcaatctcatgcctggaagtctgaggtcaccagcaggtggggaaaagaaggggctgtgacaggtgcagacaaacaggcagggaaaggctcagatcccaaagggcgagtcagggacgccagaacagttcactcacactaggatggaccctgccctggtggggaggtggggggcaatggaaggtctgaggctgagaggttttattgtggcggggaagccagaaaaggtac

SEQ ID NO: 10759 - DNA, 551 bp, Homo sapiens
  MAP TO CHR19.3; EXPRESSED IN LUNG, SIGNAL = 1.8; EXPRESSED IN BRAIN, SIGNAL = 2.5; SWISSPROT HIT: P29992, EVALUE 1.00e-29; NT HIT: gi13632721, EVALUE 1.00e-100; EST_HUMAN HIT: AW296533.1, EVALUE 1.00e-100
gacaggaacggatggatgaccaggggtagcctgggccggccgggacccccggcatggccccaccctggcagcgcggccaccatgctcaccaccaagcccacagctgcccaggcgctcccctccccaggcgcccgcgggctcaccttgttctgctcgtacttgtagaggatcttgagcgtctccatggcccggatcatggcctgcatggcggtgaagatgttctggtagacgagcttggtgaagccgcgcttgtcctcctccgagtagccggcgccgtggatgatgcgcatctgcttgatgaacgtgctcttcccgctctcgcccgtgcctgggggacggggcacgtgagggcgggcggcagccggggcctgactctcgtgctgctgccccctcttacccagaccctgccgtgctgcagcacccagcacaggaaaccaaggcacgtgaggctgaccgtctctccaccagacgccacggcctcctgactcctcggaaagagtttacaaagcgcccttcccatcttccaccaagccagggtcttactggaacca

SEQ ID NO: 10760 - DNA, 505 bp, Homo sapiens
  MAP TO CHR18.3; EXPRESSED IN HELA, SIGNAL = 1.7; EXPRESSED IN LUNG, SIGNAL = 2.6; EXPRESSED IN BRAIN, SIGNAL = 1.6; EXPRESSED IN PLACENTA, SIGNAL = 1.8; SWISSPROT HIT: P54924, EVALUE 2.10e+00; EST_HUMAN HIT: AI678275.1, EVALUE 1.80e-01; NT HIT: U82828.1, EVALUE 7.50e+00
tttctttgtcacctgcctccattttaaataaaacaaaaactattttagagaaaagtttactaaatattcaaagctactaagctatatgcctagggaaaatgtgtgaaaacatgttttatttttagatctctttactcctcatgctaaatttggctgagagtgctgcggccattttgatatagctgtttaatgtaaaaggccagcccccttttcgtggccgtatttgtttgaagtagttcttgatgggccctgcctcttgcatttcttctgtctcctcagttgtgggacattcgcgtgcactctgatccagctgagtgcctgccatgcggtgtctgtgcttaaatcataaagatgggatttttttttttttttggtatgatcaactggaatgcagcaaagcattatgccatcgagtctttgcatttttgtgaggtatatttatttttcctggaccctattcattcactgattctgtgaaaccttttctgtttgctgcatgcttctc

SEQ ID NO: 10761 - DNA, 552 bp, Homo sapiens
  MAP TO CHR16.3; EXPRESSED IN BRAIN, SIGNAL = 1.3; EXPRESSED IN PLACENTA, SIGNAL = 0.89; SWISSPROT HIT: Q13107, EVALUE 2.00e-09; EST_HUMAN HIT: AI471656.1, EVALUE 2.00e-01; NT HIT: gi14779377, EVALUE 2.00e-86
tgcatctacttggaatggtttggaatttctcaagatattttgctcgagtgtgatacagaatttagaatttttttttaatctctttctgtgttgctatacgcagccttaaaacgttcttgagttaattagatgagccaaagagatggtgtctgtgggtcgcatgaagtggctggtgcagcctcccctggtgctgatggcgggctctctttggcagcgtactgtaagaactctgtggacggcctctggtactgcttcgatgacagcgatgtgcagcagctgtcagaagatgaggtctgcacgcagacagcatacatcctcttctaccagaggcggacagccatcccgtcatggtcagccaacagctcggtggcaggtgaggtccactcttgttcttgggcagttttttccagagcaaaagattgtaatgaatggtctagaggacctctctggaggctctcatgactctgtcagtttgatcagatgaatccttacgtttccatttaatctggaaactaaaatgactgcagtcaaggaagttggggaggaatgtga

SEQ ID NO: 10762 - DNA, 511 bp, Homo sapiens
  MAP TO CHR16.3; EXPRESSED IN BONE MARROW, SIGNAL = 1.1; EXPRESSED IN BRAIN, SIGNAL = 1.2; EXPRESSED IN HELA, SIGNAL = 1.1; EXPRESSED IN PLACENTA, SIGNAL = 1.3; SWISSPROT HIT: Q99102, EVALUE 3.00e-10
agacggacaaaatggctttggggtcagattgtcaccgctgtacgtcaacactgggcggggatggtgactagagctgagaatgcaagcagcgcctcacctctgcccatgattgaaactgataatgtgagcagcacctcacccctgcccgtgactggagctaatgccagtagctcctcacccctgcctgtgattgaaactgagaatgtgagcagcttctcacccctgcctgtgattggagctaatgccagtggctcctcacccctgcctgtgattgaaactgataaagtgagcagctcctcacccctgccagtgactggagctaatgccagtagctcctcacccctgcctgtgattgaaactgataaagtgagcagctcctcacctctgcctttctatttgctggccctgatcttagacttgtgggattgaactccttgctttagtgaaacatcttctggttatttccaaagttactgttgaggtcccataggctgggatagtcacaaggcgt

SEQ ID NO: 10763 - DNA, 567 bp, Homo sapiens
  MAP TO CHR16.3; EXPRESSED IN FETAL LIVER, SIGNAL = 5.6; EXPRESSED IN BRAIN, SIGNAL = 1.9; SWISSPROT HIT: P13498, EVALUE 3.00e-08; EST_HUMAN HIT: BF663301.1, EVALUE 0.00e+00; NT HIT: M61107.1, EVALUE 0.00e+00
ctgggctgttccttaaccacatggcttcagtgtggcgggcgtgtttgtgtgcctgctggagtacccccgggggaagaggaagaagggctccaccatggagcgctggtgagtctcctcctgctctggggtctctccgggggctgcggggcccaggcagggctcacagggttgggtggagcttggtttctcacttggaggctccggaaccaaccctttggtgcttgtgggtaaaccaaggccggtgcctgcccggtgtgttttgtgggaggaaagaggcctgggtgccctggggtggtcagcagggcagcaaaggagtcccgagtgggagaggcccagccgcgccgtctcgccttcctccctcccccaggggacagaagtacatgaccgccgtggtgaagctgttcgggccctttaccaggaattactatgttcgggccgtcctgcatctcctgtgagtccccgtcccgcaccccctctagggctcaggagggcttggagccgaccctccccactgtcccaccggccgggctgcctggacaggagccaccccccacttacctcagtgtt

SEQ ID NO: 10764 - DNA, 500 bp, Homo sapiens
  MAP TO CHR16.3; EXPRESSED IN FETAL LIVER, SIGNAL = 1.7; EXPRESSED IN BRAIN, SIGNAL = 1.9; EXPRESSED IN PLACENTA, SIGNAL = 1.6; NT HIT: AE004248.1, EVALUE 3.00e-02; EST_HUMAN HIT: AA760898.1, EVALUE 1.80e-01; SWISSPROT HIT: Q05192, EVALUE 2.40e-01
cacaaaacattccctttgcctctagcaaccattacaacgaaagggtggtgtatggtggagaagatccccaaagtaagacaaacaggaaaatccggcctttctgtacagtggattttggaaaggagaagggaacagaggtagggaaagcatgtgtgatgcaaagtgccctgactccccctcttagacataggtcctaaagggatacagcgatgaggtaaagtgatggggtgcagtgatgggctgaaatgtgtgctaaggatgaaaagtgtgctaagtagtgaagggttctccaggaggatagtgacagaagggttccacatctcaaccaacctggggcagccacagcagagcagaagtggttgggctaagagagatctcagggggtggtcctatttcccttggatcccaaattccttgaaattgatccagacatcaccgtgtggcttcgaagaaaacttggaggtgactaccaacctggctgggagctagaggaggaggaa

SEQ ID NO: 10765 - DNA, 573 bp, Homo sapiens
  MAP TO CHR18.3; EXPRESSED IN BONE MARROW, SIGNAL = 0.74; EXPRESSED IN BRAIN, SIGNAL = 1.1; SWISSPROT HIT: P15539, EVALUE 1.90e+00; NT HIT: AB020022.1, EVALUE 2.00e-13; EST_HUMAN HIT: BI117114.1, EVALUE 2.00e-13
ttcctccccacactatctgctcaaccctaagtctaccctactgctgaggagaggcccagattccataaaaaggaacagggccttagaatttgaggttccttttcacacatcttgacgaaaggccacatcagcgattaggtgctaagctttataaagtgaagaatctctgtccacttctggcagatacagatttgcacattcttatccttgagaaccagttaggtactattgtggtcaaagattaacgacttcacctcaaagtgttatgcaactgcagtgccttatggctcttaaccttgcatagacccaagagtttgacagaagagttgttggctgctgtagacaggtagtagctcatgaagaagagaatgctaaggctgggctcagaggcatcagagaggttcatgccattggtgtgctccctgaaagctcagatcttgacccaaaagactcagagaatggaagtgtgcacgggcaagagagcatcagaaggtctcatctgtcaccttggtgagcacacgccctgtcaagacattggagaagacccaggattggtcactgaaggagctcagg

SEQ ID NO: 10766 - DNA, 554 bp, Homo sapiens
  MAP TO CHR14.3; EXPRESSED IN LUNG, SIGNAL = 2.2; EXPRESSED IN FETAL LIVER, SIGNAL = 1.2; EXPRESSED IN BONE MARROW, SIGNAL = 2.9; EXPRESSED IN BRAIN, SIGNAL = 1.6; NT HIT: D78345.1, EVALUE 0.00e+00; EST_HUMAN HIT: BI016023.1, EVALUE 1.00e-121; SWISSPROT HIT: P03987, EVALUE 3.00e-10
tgacctcaggacattgttggcccatcccggccgggccctacatcctgggtcctgccacagagggaatcacccccagaggcccaagcccagggggacacagcactgaccacccccttcctgtccagagctgcaactggaggagagctgtgcggaggcgcaggacggggagctggacgggctgtggacgaccatcaccatcttcatcacactcttcctgttaagcgtgtgctacagtgccaccgtcaccttcttcaaggtcggccgcacgttgtccccagctgtccttgacattgtcccccatgctgtcacaaactgtctctgacactgtcccacaggctgtccccacctgtccctgacgctgtcccccatgctctcacaaactgtccctgacattgtccccaatgctgcccccacctgtccaacagtgtcccccaggctctccccacatgtccccgacactgtcccccatgctgtccccatctgtccccaacactgtcccccaccctgtccccctttgtccccaacactgtcccccacagtttccacctgtccct

SEQ ID NO: 10767 - DNA, 513 bp, Homo sapiens
  MAP TO CHR14.3; EXPRESSED IN BRAIN, SIGNAL = 3.2; EXPRESSED IN HELA, SIGNAL = 3.1; EXPRESSED IN PLACENTA, SIGNAL = 2.6; EXPRESSED IN LUNG, SIGNAL = 2.9; EXPRESSED IN FETAL LIVER, SIGNAL = 1.9; EXPRESSED IN BONE MARROW, SIGNAL = 2.5; NT HIT: Y18476.1, EVALUE 7.60e+00; EST_HUMAN HIT: BI913742.1, EVALUE 7.20e-01
aatggtttgagacaggggtgtttttgtaacttgtgaactccaaagatattttcagccatgatggatgtattcaatagagcagttcattttcgattcaaattgtgacttttggtgtattaattcagcaacctgagaccctccagcagctgtgagaagttggtgaatcctagagagagaacaaagtatgaatgaagcaccacttcatgatatatttatgaaccatcaactaccacattcttctccatttgataacacttgagtccttttgtttcgctcgtctgaattttagactctttatctggttcatgtctgagatccaggaagcctgaaatctgaaaccctacccggttcactctgtccttttcctttctttgactatgaagggaagccggaaacttcagtaacaccatgtttcaattatttttattttagaccacatgggcagagactgctcaccactgtttgacaggatgttgctgtgtcttcttagtgggggtccactgctcttcaaag

SEQ ID NO: 10768 - DNA, 524 bp, Homo sapiens
  MAP TO CHR16.3; EXPRESSED IN BONE MARROW, SIGNAL = 1.1; EXPRESSED IN BRAIN, SIGNAL = 1.7; EXPRESSED IN PLACENTA, SIGNAL = 1.2; EST_HUMAN HIT: BF370361.1, EVALUE 7.00e-66
cacatcaggttcaaaggcagtgcttatgtctcaagagtctacgtaattcatattttaaaaagaaaccctcttcatttacctaaataaattgtctgtatatttcctcttagagtcacgttctatttgatgataaaatctattgttaactacaatgcctatttacatatctcctttaaaataagtggatgctagacatgcagttatctaaaatgtaataaattcagacaatttattaatgacataggagcttattctattccaaatctatggcaaatgaagatgtatcaaatgtagcactcatttacctgaacaggagaaatggcatctaagctgctagcactaggaggacgtccttttggcataactccaggtggtggttgtctggccttattcataacattactgcaattggctaccatggtgaggatagtttctgatagctcctgagaaacactcctaaaatagaggggaaaaggtaaaaaatatcagttcctattctctagcacatgtaagtaaaccaaccg

SEQ ID NO: 10769 - DNA, 502 bp, Homo sapiens
  MAP TO CHR14.3; EXPRESSED IN BRAIN, SIGNAL = 1.2; SWISSPROT HIT: P03544, EVALUE 3.10e-01; NT HIT: gi15300602, EVALUE 0.00e+00; EST_HUMAN HIT: BF992319.1, EVALUE 4.00e-27
ctatgcgaccagtgcttcagggttagggggcagatgaaatggaatcctggcagccctatagacctctcactgaaaagcatccctgctgaccacaaacccaagccgggcccttcctacctcctcacctgtctcagctgtttcctgatgaggtggagatgtgctggcccagggtgtgtcatcttcaaactgaacccagttgctgatggccgaggccaggtcaggtgggggctgctcagggctcccaggtggggaagctgcttcagagatgaggcccatcttttcagaggagtcatcctgctccgagtgggaatggtcttgagagcctccatccaccacatggttctccccggaggagctctcggactggtctggggaagatgacagtcctgggaggtgctcttccgtgccccctgaaacagataccagacgccaccatcatgtgaggaaggccgctcttcagagccatctcatggaggcaaaaactaaggatgaccatggggtg

SEQ ID NO: 10770 - DNA, 505 bp, Homo sapiens
  MAP TO CHR19.3; EXPRESSED IN PLACENTA, SIGNAL = 3.2; EXPRESSED IN HEART, SIGNAL = 6.9; EXPRESSED IN LUNG, SIGNAL =   9; EXPRESSED IN BRAIN, SIGNAL = 5.1; NT HIT: X96607.1, EVALUE 7.50e+00; EST_HUMAN HIT: BG341662.1, EVALUE 2.00e-69; SWISSPROT HIT: P50821, EVALUE 5.40e-01
tctcagagcacatttgacggctgcctcttctctctgactccccagcccgtgtccacagtgctggccatccggagaaagtggggtgttcctttatcaggaatacatgtagggtggggaggcccaggagaacagctccaggactggggccaggaggctgccatgcacagcgagcagccgactcgtggcatctctctccatccagacactggcagtgagcgcccaagaggctcctgctgtgcccgtctcgaggcccttgctcttcccgtctaccccgcagctgctgtcggggccgtgtttggcctcaccacctgcatcagcgcccatgtccgcgagaagcccgacgaccccctgaactacttcctcggtggctgcgccggaggcctgactctgggagcacgcagtgagtggccccctccccacccccaccctcctcccagcctggcagaatgacccctgacctctgctcatcctccaccctctctgttccatcccggacaagaagtaa

SEQ ID NO: 10771 - DNA, 504 bp, Homo sapiens
  MAP TO CHR18.3; EXPRESSED IN HELA, SIGNAL = 3.2; EXPRESSED IN PLACENTA, SIGNAL = 2.7; EXPRESSED IN LUNG, SIGNAL = 2.9; EXPRESSED IN BRAIN, SIGNAL = 1.8; SWISSPROT HIT: P53031, EVALUE 3.50e+00
ggggccatctaagtctcctctgtgtgacttggctagccacacacacaacgaccgccctagtcgctggggtttttgagctgagtttttggcagctcccagtggtagtctgggaatgtcaccatcctcttggaaagtccgtggtgagttctttacagctggcaggacctctgaggtgtcaccctgaggcttagcagtcttctcatcatcttcactccctaactaagaaagagggagtggaagagggtggtgaatccttcaatatttaaaagcaccaaacacaacaaaatttatgtggacctcgtcattattactattctgacttaatgaactttatcctctccttttttggctggaaaaacataaaagtcccaatgaaaggaaacggatgtagttgctttgagcatttccaaaggaaactgcagtaaaatgtgaaccatcgccctgtgaaagcctgttgtgtaatggagatgtcctgatactgtttccatctgccagctctgtgta

SEQ ID NO: 10772 - DNA, 504 bp, Homo sapiens
  MAP TO CHR18.3; EXPRESSED IN BRAIN, SIGNAL = 1.1; SWISSPROT HIT: P47645, EVALUE 4.60e+00; EST_HUMAN HIT: AI655701.1, EVALUE 2.80e+00
tgcgaaaattcaaaatgagcaatgacactaacgctgtgcaaaaatgatataacattgaaaataaaattcaaatgtagttccttccagacagagaaaacttaagtttttgtctgctaccataacacataaacattgttagaagaattttgaagatatccggaaggaatattgggaatggtctcacttcaaatatgagctttgtggagtacatgaaattcccttggaggagcttcaaaggagccctcagaaaacccagcagtcatcttccagcccatgtgaaagtcaggtgccaggtgctggccattcgcctgctaatggcgaaggcagcagagacatagagaatagacaaggttccaagaggagcccagcatggaaagacacacggcagatccctgccactgcagtcaggaacctgcggttcacatgcatgactgtgtccctctgccaggaggagaagctgggtttatttatttaataatggttcccaattttcccaggctacac

SEQ ID NO: 10773 - DNA, 540 bp, Homo sapiens
  MAP TO CHR19.3; EXPRESSED IN PLACENTA, SIGNAL = 0.97; EXPRESSED IN BRAIN, SIGNAL =   1; EST_HUMAN HIT: BE778168.1, EVALUE 5.00e-42; NT HIT: gi14763088, EVALUE 3.00e-42
cgtacattggaccttctggggagagagaaggcagttacagcaaccaactagacctgtcccaccagctaattggcaattaaagttttgcacacgcacctcttcatccataaaatcttcaggaccaagaacagatttgtctgctctgttctgtcgtgaagacacaaaggtagagggtgtccatcctgaaaaaaaaagagtttagaactttacaatcctagagagtatttgggtctatgagtaaatgattaaataacatgtatggacttgaaattcccaataactataaactcttagctacttcccatctcagtgcttatatagacgtaattattccacataaatttcttattaatccctgtatcccctgatgtaaaacttagtggatacattaaggtttccccataagaaagtgaaaccaagagatatagaattacacattgaaagttaaactgtgaaatgaacacaagcagatctgagctgacagatgcaaggtcaccttaaaatgcaggacgtgagaccagcaacctccactggcatatt

SEQ ID NO: 10774 - DNA, 573 bp, Homo sapiens
  MAP TO CHR19.3; EXPRESSED IN HEART, SIGNAL = 6.1; EXPRESSED IN FETAL LIVER, SIGNAL =  84; EXPRESSED IN BRAIN, SIGNAL = 3.9; EXPRESSED IN PLACENTA, SIGNAL = 0.99; EST_HUMAN HIT: AV704766.1, EVALUE 1.00e-121; SWISSPROT HIT: P01024, EVALUE 9.00e-24; NT HIT: gi13649324, EVALUE 1.00e-45
ttcccctacaactcagcagcacagaccctgtctcctctggcccagggttagtctgacccagagacaaaagctgaaaggaaaagaaagaccagccagatagaggtcagggtgcccctggaagcctcccaggggaggatgatgcagccttaccttgtccaggtagatgatgagggtgttcctatcggagaaggctttgtccagctcatacttggagatgtatctgtcaacaccattggccagctggggaaaggtggagcctgtgaaaaatccctcctggacccctctctccctgcagcctcttccagaacccaggctcctttccacttatcccagctcctgagcccttcatacctgcttcaggtcatctgtgtctggagcaaagccagtcatcatggatatgtccaatatagacatagtggcatcctggtctccccggtacctggatagtgcagaaagaagggcattgggtcccaaggaggggtcagccccaagggtctgttcctggacaaggaggtctgatcaggcactgagacttctgattcccacatagcagcacagaggggcgttacattt

SEQ ID NO: 10775 - DNA, 585 bp, Homo sapiens
  MAP TO CHR14.3; EXPRESSED IN HELA, SIGNAL = 2.3; EXPRESSED IN LUNG, SIGNAL = 3.7; EXPRESSED IN BONE MARROW, SIGNAL = 2.9; EXPRESSED IN BRAIN, SIGNAL = 1.9; SWISSPROT HIT: P10998, EVALUE 2.50e+00; EST_HUMAN HIT: BF877665.1, EVALUE 2.00e-47
gaaaaacaagcagagcaggctcccttgcttttgttgtctccatagaacagtagaaaaggtgaattagaccattttgtggttgacattaccaattaattttaaattcaatgcctgctttgtcgttgagcttaatcttaattatagcagatctcttcgcatttcttttctttgtgcagattgcacaggcaggggttttaagtgtatcaaagagcgtctgcactgagagaaattatttatgttgcattaaaataattggcctaattctctgaaccaacaagtaaaatctaattcctgtcttaaaggtaaagagtaatgtaatatggaaagaaaaacattcacttagctatctctcttttattactagtacatggtataatgtccaggaaacagctaagatcagcatatgtagcttgagctttgcatagaggtagtgtccttgactcatggcttaatgcacataagtgtgcaagatatttcaataacacggaggtaacagtctgagaaacacatttgaacttaaatattctgcacatgacatcaggatacaccactgtctttttttattccactttgtgcctttgtacc

SEQ ID NO: 10776 - DNA, 550 bp, Homo sapiens
  MAP TO CHR19.3; EXPRESSED IN FETAL LIVER, SIGNAL = 4.4; EXPRESSED IN BRAIN, SIGNAL = 2.9; EXPRESSED IN PLACENTA, SIGNAL = 2.2; EXPRESSED IN HELA, SIGNAL =   3; EXPRESSED IN LUNG, SIGNAL = 2.6; SWISSPROT HIT: Q15622, EVALUE 1.00e-56; EST_HUMAN HIT: AI138970.1, EVALUE 4.00e-55; NT HIT: AF127888.1, EVALUE 0.00e+00
gttgctttttcctccttccccagtagacacaacagctacatggaagcagaaaaccttacagaattatcagaattcctcctcttaggactctcagatgatcctgaactgcagcccgtcctctttgggctgttcctgtccatgtacctggtcatggtgctggggaacctactcatcatcctggccgtcagctctgactcccacctccacagccccatgtaattcttcctctccaacttgtcctttgtggacacctgtttcatctgcaccacagtccccaagatgctagtgaacatccaggcacggagcaaagacatctcctacatggggtgcctcactcaggtgtatttttaaatgatgtttgctggaatggatactttcctactggctgtgatagcctatgaccggtttgtggccatctgccacccactgcagtacatggtcatcataaacccccatctctgtggcctcctggttctggcatcttggttcatcattttctggttctccctggttcatattctactgatgaagaggctgaccttctccacag

SEQ ID NO: 10777 - DNA, 521 bp, Homo sapiens
  MAP TO CHR16.3; EXPRESSED IN LUNG, SIGNAL = 2.8; EXPRESSED IN FETAL LIVER, SIGNAL = 2.2; EXPRESSED IN BRAIN, SIGNAL = 3.4; NT HIT: gi14777228, EVALUE 0.00e+00; SWISSPROT HIT: Q50906, EVALUE 4.30e-01; EST_HUMAN HIT: BG537490.1, EVALUE 0.00e+00
aggccacatgttttcaggagacctcattggaaggacctagccattggagatgaactgatggaaatattttaaacctaaatttgtgggagtaaaggagaaaatgtcagtaaagcagcaagcagaatctgctgaggggtggggccctcatagtgttggcacctatagagtctcagccttggagccttctgattgttcaggtcacgctcccgggatcggcgtcggaggcggtcaagatctacctcccgagagcgacggaaattgtcccggtcccggtcccgagatagacatcggcgccaccgcagccgttcccggagccacagccggggacatcgtcgggcttcccgggaccgaagtgcgaaatacaagtaactactctgactccttcggtagctgcaaccaggagtgagcccttctctgtgttcccagggtctgctgagggccgtgtctggtggggatggggctgggctcaccctcaggagtagggctggggagtcgtgaacgggactcaggtgtgggaagag

SEQ ID NO: 10778 - DNA, 520 bp, Homo sapiens
  MAP TO CHR14.3; EXPRESSED IN PLACENTA, SIGNAL = 2.2; EXPRESSED IN LUNG, SIGNAL = 1.7; EXPRESSED IN BONE MARROW, SIGNAL = 2.8; EXPRESSED IN FETAL LIVER, SIGNAL = 1.6; EXPRESSED IN BRAIN, SIGNAL = 4.3; SWISSPROT HIT: gi14916538, EVALUE 2.50e-01; EST_HUMAN HIT: BI488427.1, EVALUE 1.00e-98
aacaggggaggttgacagtgcctcttgccaatctggttgagagggctattgtgccaggagtgagaaggaaggaggtgaaacatttcgggaggtggggtgtttgggagaccagatttttttctgccaggtcctccttccccttccctcttaggcatggggagtggagcaacagacggagagtggcatgaagacacaaaggaggaagcacaccattgccaagaccccaaggaagaaggatggaaagcgctggcagtcctgcctggcccccagccagttccctgctgaagatggccagatccccttgtctggtctgtatatgccacttttgctggggtggaaggagggaagggctggcttgctgagctgggctctagaatgggaagggtacctttctgcagatcccatttggactctccacttgaacaagtgaggtgtctgattttcttcttcggtaccttcctctcctccccctcccttcgcctcaccccgctttcatctctcatcaccacctgggtcctac

SEQ ID NO: 10779 - DNA, 567 bp, Homo sapiens
  MAP TO CHR19.3; EXPRESSED IN FETAL LIVER, SIGNAL = 1.3; EXPRESSED IN BRAIN, SIGNAL =   1; NT HIT: gi14756693, EVALUE 0.00e+00; SWISSPROT HIT: P32942, EVALUE 2.00e-52; EST_HUMAN HIT: BI770337.1, EVALUE 0.00e+00
tgactgggtcacccttcttcacaggacacacacacagggccatgaaaacggccttcttcaaagatcccacggctcgggcctcccttccggggccaccttgcccagtggccgggggctttccttcccagaagcctgtgaggtccggggtaccccactctcaggaaccccaaggtcagggcaccgtctaccctggctcagctcgtcacccaccgtctgaagccccttctctcaccaaaggttcggagctggcggggggctgaggtgttcacgaacagtcccagcccctggggctgcatgtccagttctgtgcggcatgagaaaggggctccgtggtcgtctctgctggccagcacagtggcagtgacctccgctggctcctccactgcgggctgccggctcagctcctcctcccagcgaagcagcaccaccgtgaggctggtccggggcgacccatcctccacttggcagcgcagggtgaagttctggcccaccggctgccaaggaggcaggggtgccagctccacacgctccgggagccctgagagaggaggggaggatggcacttag

SEQ ID NO: 10780 - DNA, 520 bp, Homo sapiens
  MAP TO CHR16.3; EXPRESSED IN BONE MARROW, SIGNAL = 2.2; EXPRESSED IN BRAIN, SIGNAL = 3.4; EXPRESSED IN PLACENTA, SIGNAL = 2.8; EXPRESSED IN LUNG, SIGNAL = 2.9; EST_HUMAN HIT: BE274237.1, EVALUE 0.00e+00; SWISSPROT HIT: P33897, EVALUE 4.00e-31; NT HIT: U52111.2, EVALUE 0.00e+00
tggtaggtgtcctgtctccctgcctggggtcagtgggagtggctgcctgaggggaggaggtggcctgttgggcccggcggcagcagcaggcggctgtcatcagcagccctcgtgccatgcccctgaccctgtccctctcctggccaggaagtaccacacacacttgctacagttcgatggggagggcggctggaagtttgagaagctgggctcggcttcccgcctgagcctgacagaggagaagcagcggctggagcagcagctggcgggcattcccaagatgcagcagcacctccaggagctctgccaaatcctgggcgaggccgcggccccagcgcacgtgccggcacctagcccacaaggccctggtggcctccagggtgcctccacctgacaccactctccccagcccctgccccgcccccaagctcggatcacatgaaggagatagcagcacccacctgcgcacgcaccccgcccctgcatgcctggcccctcctcctagaagacccttcccgac

SEQ ID NO: 10781 - DNA, 504 bp, Homo sapiens
  MAP TO CHR14.3; EXPRESSED IN BRAIN, SIGNAL = 1.2; EXPRESSED IN BONE MARROW, SIGNAL = 0.91; NT HIT: gi5835876, EVALUE 1.90e+00; EST_HUMAN HIT: BI830408.1, EVALUE 4.50e-02; SWISSPROT HIT: P50008, EVALUE 2.70e+00
ccttgcttctccaggacttgatatgtcttctgttaactgctgacagtgagccataccacctaaaaggctcccttaaagattgaaaggacaaatggacagtgttgagaactctgtggaagaggagaccagagagacgttgatcatcatggctccttgggatttgcaaagaggaatgactagaacggggtccttcactacagccaggtcaaaggtcaggtcaggaatgtggacaatgctggtgactccaggtaggtctaggagggtaaataaatctattgagtccctcctgaatcttgagaagatctgggcagccaagctcagaaagctattaggaagtctcctaatttatgagattctttggaagaaaaatgtgacatttattttttacatttttattagtgcacaatcattgtattcttacttaacactcatcatgttaatctactcttaacatattctcacagctaaagcatttactaaacacactttcatgatcacatgttg

SEQ ID NO: 10782 - DNA, 540 bp, Homo sapiens
  MAP TO CHR18.3; EXPRESSED IN BRAIN, SIGNAL = 1.1; EXPRESSED IN BONE MARROW, SIGNAL = 0.96; EST_HUMAN HIT: BI022546.1, EVALUE 7.60e-01; SWISSPROT HIT: P35071, EVALUE 6.60e+00
aggtgccgataatggttctgcagtgctcacagctaccttgttggtctctctctctggttctttcatttagaacgtttggcctttaacttcctataaacagaggcccatttttcacaccatgtcattcattgacatctgcccccaaaattctgtgctgcattttatccctcagatagctcatgtgaactgggatgaagtagctttgatcacgtggagtgatgtgcatttcctgcctaaaggaatttttgtcacagtcatgagaatgctgccaatttgggcttcttcggagcctaaagtccaggctgaagtgtgagtaggctgttgatattagatactggatattgatagggaacagtcatataacgagaactttatttcaattgagtggctacgggttgattccccatgtttaatatactaaaaaaagatactgggtattgatctgtgttcaaaatggggtggaagattctgtcttcctctaaattttatcaagtggaatatacctttatattcttaatatcttgtcagtgtgttccgcat

SEQ ID NO: 10783 - DNA, 591 bp, Homo sapiens
  MAP TO CHR18.3; EXPRESSED IN BRAIN, SIGNAL = 9.5; NT HIT: gi13645149, EVALUE 0.00e+00; EST_HUMAN HIT: AI815888.1, EVALUE 0.00e+00; SWISSPROT HIT: P09896, EVALUE 2.00e-54
accagccaaggactcaaatgtacctcccacccataaagccaaaggaagcacatttccagtctacatttcccatttgggcccacttttcagtcttcaaggaaatattttgaaatccatttgtagaacacctccacttgcacaaaaagccccacagtaacgattggcacagagctggtgctcagtaagactctccttgagatttttattgtcttcataataaaagatgacacttagaacgggatcacttggccctttctcttcttatctcctcccagttcaaaatgcttgcatcttttaatagccagcattctcttggatctgcagttgggctcaacgcactcaagccttagcacagtattctttgtagttttagcctttttctggaaaatcggcttagtctgcccaccatagccactctgcttcctgttataacgccactttccctgggcatacagagaatccttgcccttcttgtactgtgtcactttgtggggttggtgcttgccacacttcttacagaaagtctggtgggttttagggacgttaaccatgcttgcgtgagcgctatcggcacggcaagaaagaagaggt

SEQ ID NO: 10784 - DNA, 523 bp, Homo sapiens
  MAP TO CHR16.3; EXPRESSED IN BRAIN, SIGNAL = 1.4; EXPRESSED IN HELA, SIGNAL = 1.3; EXPRESSED IN FETAL LIVER, SIGNAL = 1.3; EXPRESSED IN LUNG, SIGNAL = 1.4; EST_HUMAN HIT: BE885160.1, EVALUE 5.00e-39; SWISSPROT HIT: Q28141, EVALUE 1.90e-01; NT HIT: gi15317467, EVALUE 3.00e-39
ggttgaactcctgctcttgcaccttcttcagcttcactccgcggcggagctcccgcatgagctgaacccacagtcgggcctgggccccaggggaagagaatgggtctcagccccaggtgaagctccacggccccccaggcagagacccttggcaggctgggccgcgtcagtggcccggtcaggtgggagtgagccttacccagtctgtgtgacccaggctgtccagctctgcccgaggcgtctccagatgcggctcgtcctcccgaagcttctgcagcatctgtgaccacacgtgctcgtcagtccaggggaggtacgagaatggcagatgcaagacgggccccgtccgtcagggacacgaccacgtcacgggggctccactcgaccagccggaaaagagacagctgggcattttggcgcaggccataggactcgaaaaggtatctggggaaaccgagccttcgccacaggcggcggacacaggtgtggagactccactcagtccacacagcatttcatcagg

SEQ ID NO: 10785 - DNA, 500 bp, Homo sapiens
  MAP TO CHR14.3; EXPRESSED IN FETAL LIVER, SIGNAL = 3.6; EXPRESSED IN BRAIN, SIGNAL =   4; EXPRESSED IN BONE MARROW, SIGNAL = 5.3; SWISSPROT HIT: Q08624, EVALUE 2.40e-01
ttaatatcatcccctcccccaggcttctggcaggcatctgcaaagtccacctggctactgtcattttcagcatgcagtccacaacttttggtcaaaaacctcctttctatcacagtggacctgaggcccacatttcagtaaagcaagaggcaactacaaggtctgcagtgtttggttgggttgaaggctctgtcaagtgactctcccaaggtagcacagctagaggcagccggccctttatggattctggtccattcatctgcgtgcctccggttcagcctgagaggaagtagtgagaaacaatactgtttcaagtgtagtgcctctgagatgggcgaggagttgagaagtcaagagggagggtttgtttggggagggcaggtgacatgcaggtggagcagtgataggtgaagcctgaggtgacatcctaggggaactgtccaggaggtaggggaatgtgagattggtgtgctcctgtctgccctccaaacagatcaaac

SEQ ID NO: 10786 - DNA, 550 bp, Homo sapiens
  MAP TO CHR18.3; EXPRESSED IN BRAIN, SIGNAL = 1.5; EXPRESSED IN PLACENTA, SIGNAL = 2.1; EXPRESSED IN HELA, SIGNAL = 1.7; EXPRESSED IN HEART, SIGNAL = 2.7; NT HIT: L32838.1, EVALUE 2.10e+00; EST_HUMAN HIT: BE962708.2, EVALUE 7.70e-01; SWISSPROT HIT: Q91998, EVALUE 4.60e-01
atgcacactttcctgggttcagctctctggggtccccaacacctcctctttgtggccatcttgtcccctggcaccaaagctgagctcagaggaaagcacctgccatgatccactctgtctctgccgcctccctgcccactcctgtgggaagctccctctcggcatctgtccgtcatcagcatctgtccgtcatcggcatctgtctgtcacgggtcatctgccgcaccacactgagaacccatgagtgccaaatgtcccccgtcagctggcccacccgcatttcatcttcctggcttaagaaggtgagtctcagggcccagccgtctatcagaactgacctggtcttctccgacccctttccctatgattttttggtggcttttttcttttaggattttctatatcccacgttggtcacttacactctgtatttactctcttataaaaatatgttactattggtgataaccattgggtttcgcaagaaaacctgtatcctggcacccactgcgggggtgggaatctgcgcagatagctgcctggtctttgg

SEQ ID NO: 10787 - DNA, 517 bp, Homo sapiens
  MAP TO CHR14.3; EXPRESSED IN LUNG, SIGNAL = 1.5; EXPRESSED IN BONE MARROW, SIGNAL = 1.4; EXPRESSED IN BRAIN, SIGNAL = 1.8; EXPRESSED IN PLACENTA, SIGNAL = 1.4; NT HIT: AJ006345.1, EVALUE 1.20e-01; EST_HUMAN HIT: BG495890.1, EVALUE 1.80e-01; SWISSPROT HIT: P36019, EVALUE 2.80e+00
ataaaaccccctcccaaatgcagatggccaggcagaaactctttggatgcggttctatttaaatttgacagcctatttgaaagtgactgcctgagatccacaccccaaatttaattaccactgcatctgttgtgatgcggcttgtgatgaacaagctgccactactatgttgttgtagaggttgttgcctcccctcatttatcctcaggcagtggcttcacacgcagtctggctggccatcacgcttagcctgttagattcctgccaggcttcatcttgcagcaaatactggctgttggctgaaacagaagctgagagagcggttcctgttacccatccgccagtctctctctgcaggagtggggaaatagtaggagcaacactgactcagtcacaaaatgtgttcagtcatcaatccaactgcatgatcttcctgaatggttttgccagttgccaattttatgatgatctgtgagagcgtttggttatctttcccccttccctcttttcctccctc

SEQ ID NO: 10788 - DNA, 552 bp, Homo sapiens
  MAP TO CHR16.3; EXPRESSED IN HELA, SIGNAL = 1.8; EXPRESSED IN BONE MARROW, SIGNAL = 1.4; EXPRESSED IN FETAL LIVER, SIGNAL = 1.8; EXPRESSED IN LUNG, SIGNAL = 2.5; EXPRESSED IN BRAIN, SIGNAL = 1.5; EXPRESSED IN PLACENTA, SIGNAL = 1.4; SWISSPROT HIT: Q14940, EVALUE 2.00e-37; NT HIT: gi14776209, EVALUE 1.00e-121; EST_HUMAN HIT: BF770994.1, EVALUE 5.00e-02
tgcagtatgctcaaaccctggaggctgagccccctggaacccttccccacttgccatgtctctccatcctctcccagggtgaccatgtgtggcctgggctgtaagaagtacgtggaggccaacatctcccataagtcacgcacaactgtcaaatatacaatgaagactctagccagctgtgctgagaccgtgatcttcatgctgcttggcatctcagccgtggactcttctaagtgggcctgggattctgggctggtgctgggcaccctcatcttcatcctgttcttccgagccctcggtattgctggcaccctctgctttcccactctccttcctgtcccgcccctccctgcagctcatctccctatctgagtccacatctttgtcaattcctaagcctcctcttgttgctcacctgtcccagcccctgttagacctcagcccagatacttggtcccatccggtcccacgtcctccactcccaacgctttgctcccactggcctccctcccgctgtaggcgtagtcctgcagacctgggtgctgaatcagt

SEQ ID NO: 10789 - DNA, 517 bp, Homo sapiens
  MAP TO CHR14.3; EXPRESSED IN BRAIN, SIGNAL = 1.2; EXPRESSED IN PLACENTA, SIGNAL = 1.4; SWISSPROT HIT: Q13671, EVALUE 1.40e-01; NT HIT: gi14748633, EVALUE 3.00e-27; EST_HUMAN HIT: BG960323.1, EVALUE 3.00e-46
acatctcagtgtgcaccagcaagggtcagagggcagggaggggtgggccactcactttaccctaaagaatgcctttagaggagctggcctgggctcagcagtccaggaaaaccaaggagaagcagtgaccccgccccgccactcctgagtaggatctccacctctctgggtccctggtgctggctcaggacctagagttgacttgatgctccttctgcctcagagtctgcccctcagctccagggaagcttccaggctgtatggagaccctggcagccagcagagattgccagggctcttcctttgtggaggctgggaatggacacggtggacccagacatgacttctgcccctcgtgtcttcacagagacttactgcccttcacactgcggctaccccaggccatccttgaggccagcagcttcacggaccttgagaccatcgccaacctgggtctgggtgagtcttctccgaggggttaggggagctggtggggcgttaggaactggggccctag

SEQ ID NO: 10790 - DNA, 500 bp, Homo sapiens
  MAP TO CHR14.3; EXPRESSED IN BRAIN, SIGNAL = 1.1; EXPRESSED IN HEART, SIGNAL =   5; NT HIT: gi7106454, EVALUE 1.20e-01; EST_HUMAN HIT: Z28861.1, EVALUE 1.00e-107; SWISSPROT HIT: P40900, EVALUE 1.20e+00
aatgggaaaggtgtgaaaagcaacctagagaccaggataccgtggttttggattaacagcattagggatctacagtctgtggatgtcctggatggccccacttccctcatcagcctcgccttgctcacctggtccatgggtagaaatgggcaggttggcggttggtacatgcagacgcggtggcctcagcagtggttgggccccttgtcttgtccgctaggctctgctcgatggccatctgcaccagttcatcctcgctcaggctgctgtacaggctgtactcctcctgcccaatggtacactggctgccccgagtgctgatctgcgtggccatcctcctccacctctcaccctggcctccagaacagacacccagtggggaggagggaacagcaaatcagaaaaccctgtgaggaaaccaaaaccatcctggtcacgaacagttttgcaggatagctatatttaccctcagggaagggtatgcatttcactgacagtaa

SEQ ID NO: 10791 - DNA, 594 bp, Homo sapiens
  MAP TO CHR18.3; EXPRESSED IN HELA, SIGNAL = 1.2; EXPRESSED IN LUNG, SIGNAL = 1.1; EXPRESSED IN BRAIN, SIGNAL = 1.1; SWISSPROT HIT: P46667, EVALUE 8.70e-01; NT HIT: M97752.1, EVALUE 1.40e-01; EST_HUMAN HIT: AW852524.1, EVALUE 8.40e-01
ttctgcaaagcagcattctcaataggcataaataaaaaagatagaagtgtcagatgaaatcacagatttagatgaaattgccaaatgacagcagagcccggaacagtggccagtccgggacagaggaagacaacaggtcaaagcgagagatgagggccgtcagcaaggctgggacagtagcaacaaaagtcagttcactttcactacagagaggatcctagagattgggaaaggccctaagtatgcctgacaagcttttattttctcagtggtacctctcagaggctcatgacataaatactgaagttcacgaggtaagattaaatacacatgcccgaaagaatacaaatactaagaagacccctccgaatgtatttttaatcaattccccacttctcaccagaacaccaaaggaaccgttctgattttcattcttccctgaaaatacagtcatgttgccatcagtcctgctaagttaaaaggcaccgtggactttgtgacttgttgcaaggtcttctagatgtcaccaatagtgttacatatggaccacttaatccagagcctgggaccactgggaacccaggacactagcag

SEQ ID NO: 10792 - DNA, 563 bp, Homo sapiens
  MAP TO CHR16.3; EXPRESSED IN BONE MARROW, SIGNAL = 1.7; EXPRESSED IN FETAL LIVER, SIGNAL = 1.4; EXPRESSED IN BRAIN, SIGNAL = 1.1; EXPRESSED IN LUNG, SIGNAL = 1.3; NT HIT: AB044567.1, EVALUE 5.40e-01; EST_HUMAN HIT: BE185016.1, EVALUE 7.90e-01
tttgtgattctaaacttttgcccttagacaatagaacatggcatggagaagaataaaaaagctggtcgatttgctcagaaatctataactgtcgcaacagcatatttgagaatttggaaccccaatgaaaagcccagtgaagaagagaaagttcattccaaaaatgagaacagaataggaaatgtgaactgaaaatgatgaagagaaaagaagaggctgcagctttaaataataatgagccaaggcagggctattcaggctcaaagtcaagggcaggggtgaatatcagtctgataaaggtcaccccccacccttttattctgtgcctcctatgctgttcaccacttttaaccacagtgggggcatctcatcaactacaccatgcagaggcccaggtcttcacttgcttgttattccacagcagatctaaaaggtagagcacctttgtgatctgtacacttggcaagaagaccagagtcacaaaagtgtttgcagtaactctcagagcctgctccattccctctatagctgccaagatttgctcattgccagtctgtcttcca

SEQ ID NO: 10793 - DNA, 589 bp, Homo sapiens
  MAP TO CHR19.3; EXPRESSED IN PLACENTA, SIGNAL =   1; EXPRESSED IN LUNG, SIGNAL = 1.5; EXPRESSED IN BRAIN, SIGNAL = 1.1; SWISSPROT HIT: P98092, EVALUE 2.90e-01; NT HIT: gi13651118, EVALUE 0.00e+00; EST_HUMAN HIT: BI829530.1, EVALUE 0.00e+00
gttagaatgtggaccgtggggaatgtgacggacgctctcctgttgccgcggccaccacagacacatttgggtgccgggagagtgaggccgcgggggctgggaagggaccggtgtatgggggacagcaggcgaaggtcactcgggaaccagcccagctctgaggctgcgggcaggtcggaaagggagcaggacggcgacccccgtggcctccagagctctgtgtacgagagccggcgggtcacagaccccgaacgccaggacctggacaatgcagagctgggaccagaagacccagaagaggagcttccccccgaggaggtggccggggaggagttcccggagaccctggatcccaaagaggcactttctgagttggagagagtcctggacaaggacttggaagaggacattcctgaaatcaggtgggcaccggggaacgggcctgcctgggtgcggtggggtagggctcagcccctggcagtggggggagggcagcagccccctgggcgggcgaaagggtcgtaaccggccaccggcctggctcgctgctcccgaggggcccggccctgccgagtcagcctaggtgtgg

SEQ ID NO: 10794 - DNA, 517 bp, Homo sapiens
  MAP TO CHR19.3; EXPRESSED IN HELA, SIGNAL = 1.5; EXPRESSED IN LUNG, SIGNAL = 1.3; EXPRESSED IN BONE MARROW, SIGNAL = 2.7; EXPRESSED IN BRAIN, SIGNAL = 1.5; NT HIT: gi14572198, EVALUE 0.00e+00; EST_HUMAN HIT: H19081.1, EVALUE 3.00e-68; SWISSPROT HIT: P20813, EVALUE 2.00e-26
tgcacctgcatctctcagtgtttcattgtctttctttcctattcatcccccaggactcacccttggatttccgaagctcctctatcagacactgagcctcctcctgaatccgctcctccacactccgctttcccatcccgaagtccctcatagtggtcacagagaatcgccgaagcaccttccagcggtttccattggcaaagatcacacctggggtgcaggggaggtgtgggttggttgtagaagaagttggaagaaggctctgagtccttcttcctcccatatactcccttccctgatgcaccccccacccgccccctcccagtgcctctgaggctctcaccatatccccggaagaatgggtcgaccatggcgatttttccccggccagagaaggcctcagccttgtccacaagggcctcccgtatggcctctactccacacagcatgaccacgggcctcggtcccaggtgtaccgtgaagacgtccccatatttctctcggaactgccaatcac

SEQ ID NO: 10795 - DNA, 506 bp, Homo sapiens
  MAP TO CHR19.3; EXPRESSED IN PLACENTA, SIGNAL = 7.2; EXPRESSED IN HEART, SIGNAL = 6.1; EXPRESSED IN FETAL LIVER, SIGNAL =  11; EXPRESSED IN BRAIN, SIGNAL = 7.6; SWISSPROT HIT: P43330, EVALUE 7.00e-18; NT HIT: gi14761177, EVALUE 0.00e+00; EST_HUMAN HIT: AI828447.1, EVALUE 0.00e+00
tgtttgctttgcagatggagaaagtgaggcctcgatggggcagagccagggcctctccacttgctcaggggtcctgctcccaccattcagtccgataccagctgcctcccccaagccctcctgaatccaccccactcccaaggctctggaaacagataccactagaaaaaaacacagagctttattattctcaacaccaatggcagcggtcttcataggacagaggagtgagttctgtcaacagacaggcggcccctacttgccggcgatgagcgggttccgcaggaccacgatgactgagtccccgcgcaggaacatcttggagatgtagcggtctttgttgactggcttggacttcttcttgcccttgccactcttgggtacctcagtccacatctccttcacgttctccagcaccatgttgcagtgcctggtggggaacagggaggggaggcactgggcgtgaggggcgtgcctctgacagtgccccctactgcctgctgctc

SEQ ID NO: 10796 - DNA, 592 bp, Homo sapiens
  MAP TO CHR19.3; EXPRESSED IN BONE MARROW, SIGNAL = 1.2; EXPRESSED IN BRAIN, SIGNAL = 1.2; SWISSPROT HIT: Q64467, EVALUE 1.30e-01
gccaaaactctgctccattctctagccccagtgactgtccccatcccgcttattgtcctcacccagtcaccgagccccctccaccctcacttgacatcagtaggatgctcaaagcatgggttccgttttggttcttcccctcacagagaagtctcatgcccatttctggctcttcagttaggctgatggtgctgttagcccaggggccaagcatggtggaagtcacttggaggctgccatccatgccatccacacccacggggactcctcccatccaccactgcacagagggtgtgggaatcccatggaaggaacagctgcactgcagtgtcttctccaaggagcaagaggagttgagcagcttagcaggtactgtggggaggaagggtcaggagtcagcaaggcatcctggcttccctcttccagtttctccagcatgcagccttctctttacttgctattcacaaggagcttcagaaggactttctggaagcccacaggattcaggcctcccagaccagttcccctctatcttctgtcctcatctggcctgaacctgatcgctagaccttcttgaggggtggcaagtaaa

SEQ ID NO: 10797 - DNA, 539 bp, Homo sapiens
  MAP TO CHR19.3; EXPRESSED IN FETAL LIVER, SIGNAL = 1.7; EXPRESSED IN BRAIN, SIGNAL = 1.8; NT HIT: gi14759600, EVALUE 0.00e+00; EST_HUMAN HIT: H20098.1, EVALUE 0.00e+00; SWISSPROT HIT: Q9Y284, EVALUE 3.00e-16
tcctgtttatcacttccgggttcatcattttggcatttcggtgatcgggttggaactattgaagcccgctttcaggttcttttccccattttccctttgaaaggaagacttctggcttctcctaaatctccgttctctgggtaaggggagtccaagcctctgtcatgaggaacggaaatgcgagggcctcgggtgttactctaaaatccgccctcagcttgcacgccggaagctgcgattcctgcagcggaagaggcgtgatctggccttcgactcgctatgtccactaacaatatgtcggacccacggaggccgaacaaagtgctgaggtgaggaccccagcgtcgtgggcacgggttcgggttgtgggtgtggatcggggccctgggaagcgcctgtctatcccgggggcaggacctgagcgcccctgaccctcgagcctgtcgcaggtacaagcccccgccgagcgaatgtaacccggccttggacgacccgacgccggactacatgaacctgctgggcatgatcttcagcatgtg

SEQ ID NO: 10798 - DNA, 586 bp, Homo sapiens
  MAP TO CHR16.3; EXPRESSED IN HELA, SIGNAL = 2.9; EXPRESSED IN LUNG, SIGNAL = 2.7; EXPRESSED IN FETAL LIVER, SIGNAL = 2.2; EXPRESSED IN BRAIN, SIGNAL = 6.2; EXPRESSED IN PLACENTA, SIGNAL = 2.6; SWISSPROT HIT: Q13087, EVALUE 8.00e-42; NT HIT: gi14777214, EVALUE 8.00e-99; EST_HUMAN HIT: AI041729.1, EVALUE 1.00e-98
gtcacaagtgcagctcgaagctctgctcccagcctacccctgtccccgcccctgccagccctgtgtaaagaggatttgtgcagaggcctggagccctggcttagggacacccaccgggaacggggctgctggctcctccgggggctcctccgtgggcagcacgcccccgttgtccaggaacttggagaaagtctccaggtccctggtgcttttgtattcaatcacctgagaagaggcagggggatctggaggacacgtggggcccagccccatgcccagcaagatggcaccccggcttcctccccagccacctgtccgccataccttccgacctggccctgctgggaagtacttgagagtagggaagccgtgcacagcgaaggcatccagctcgttggccgtggcatccagctcagcaatgatgatgtcctcgtggtcttggtacttctcagccaatgcctcccaggcaggggccatctccttgcagtgggtgcaccacggggcatctaggatgggagccgttgagcacagccatctgggcagcccctgcccagcccacaccacccctgcctccctcaacactcac

SEQ ID NO: 10799 - DNA, 597 bp, Homo sapiens
  MAP TO CHR18.3; EXPRESSED IN HELA, SIGNAL = 1.2; EXPRESSED IN FETAL LIVER, SIGNAL = 1.1; EXPRESSED IN BRAIN, SIGNAL = 1.4; EXPRESSED IN PLACENTA, SIGNAL = 1.3; NT HIT: D00817.1, EVALUE 5.70e-01; EST_HUMAN HIT: AV711928.1, EVALUE 8.40e-01; SWISSPROT HIT: P54259, EVALUE 5.10e-01
ccacccatttttatgggaacataaaatgatgtgaacttccatttttaataaagatgcatagcacttttatgaagactgactaataacactataatgaactgaaaagctactgatatattaagaatgaaaattttgaggagtgtatttactgagactttttcatgagaggcggtatttctctgaagtctctacttgaatcattataatggctcaaaacagaggcaaaattttcagggagagcacagcatgagtgttgtagaaatttatcctcaggatgtgagaatggtcccagaacggatgtgcctagagaacagtacttgtgctccattgatgcccaacgccgggtgtctgggcaacggggcagagcagagggggctacaccggaaagctgcggctgctcctttttatcttcctccttcacctcttcaccctcagagcaccaacaatccaccagtaatttcttgggagccacttcccggaacagaagcccctgaaagatgaggcgatgggatgttaaggttttgcttcaccatgtggcatcttcgtgcagctccacctctcccagctctgggcagggccctcatcttcatcctcagc

SEQ ID NO: 10800 - DNA, 554 bp, Homo sapiens
  MAP TO CHR18.3; EXPRESSED IN BRAIN, SIGNAL = 1.7; NT HIT: gi15304446, EVALUE 3.00e-73; EST_HUMAN HIT: AI217408.1, EVALUE 1.00e-107; SWISSPROT HIT: P23977, EVALUE 4.00e+00
tgcactttttggttggtttggttacggctgaatcagcctcactaactcctgtggaggtcaggaggaggaggcacaagggcaagggctttgtctacgtggaaaactgttatgcacttgaacacatggagacccatctctttccctatctctattctcacagaatgtgtgacacaggagaaggactattcacttttcaaacaagggaaggagaaatgatctatcagaaggttcattctgcgacactggccatagctgagcaacatgaaagattaatgctagaaatggaacagaaggcccgggtaaggccccttccttggtaacctatcagcttggaaatgaatgtcactgggatctgatgtacactgtgtatgtgtggggccattcatgtcagcgcctgggtgtccaccctgccctgatcctgagggcttaccctaccctctcatctctctaatatcctattcaatatgtcaaaaaagaagttattgtggccaccaactgtgagccctgcacttctggcatctacctatgtaagacctgttgccttggatgtcaga

SEQ ID NO: 10801 - DNA, 522 bp, Homo sapiens
  MAP TO CHR16.3; EXPRESSED IN PLACENTA, SIGNAL =   1; EXPRESSED IN BRAIN, SIGNAL = 1.3; SWISSPROT HIT: Q9NSI6, EVALUE 3.70e+00; NT HIT: gi11421866, EVALUE 2.00e+00; EST_HUMAN HIT: BF337569.1, EVALUE 2.90e+00
catcttccaagagggctcacacaaaggccgctgcagcaccacggacagctccttgtgcccagtcatgttggagacggtcttccttcctacagctgacggttgcttcaccaggctgccctgctctatggagaaggactctgcggttctaaaaggaaccttgaccacctcttccttttctgtgttaaggaaatgatcctcttcatttctatctgaaggtgcaacccatcaacatgaggctcatcaaagggatctaagttctcacaggttttgttggattcaatacttggaatttccattagtgtcctgtggctaattccccaccagccatgcttcataaatccttattccctggaggtgaggacagggaccttagggctctttgtacatctggctccatccttactgtattccttgactagcattcacttccggagggaatactctggccctactctgtaccttctttgacctagtgtgtgggtttcagggcactttcctgctacatttaggacagccagctcc

SEQ ID NO: 10802 - DNA, 537 bp, Homo sapiens
  MAP TO CHR16.3; EXPRESSED IN BRAIN, SIGNAL = 2.6; EXPRESSED IN PLACENTA, SIGNAL =   2; EXPRESSED IN HEART, SIGNAL = 1.9; EXPRESSED IN FETAL LIVER, SIGNAL = 2.7; SWISSPROT HIT: Q12931, EVALUE 1.00e-05; NT HIT: gi14778058, EVALUE 1.00e-32; EST_HUMAN HIT: BF529390.1, EVALUE 3.00e-83
gactatttggtgagcctggggccagagtggggaagtgatagctactgatggagaacctggagccagcacactggagtcccctccacacagggctggcctgctgcagggctgcagtcacaaccctggggcacaggtgggcaggtctggctctgcggcccctccccctatccagactccagcctcagccatgaccagccacccccaccttcttctggaccacaagcttcagaggccaggccagcacctggaaggctcctgagggcccccatgtgcaggccgggcttccccgaccacctctgctctcagctccatgggccacggctagggccctctgggggcaaaggagcaggtaggggccttgtccccagcagggtcctctccccgcggcccgaggctcacctgatgagtgcgctctcctgcagcagctcccggctgaggttcaggggaatgtcctcactgtccaccacacctgggagacacggcagtcagcttctcccggggctgcggccctccacaccacccaacattccccattaa

SEQ ID NO: 10803 - DNA, 548 bp, Homo sapiens
  MAP TO CHR18.3; EXPRESSED IN BRAIN, SIGNAL = 1.3; SWISSPROT HIT: P26632, EVALUE 6.00e-01; NT HIT: AL163204.2, EVALUE 2.10e+00; EST_HUMAN HIT: BG035395.1, EVALUE 1.90e-01
tgattcagtttctccctggccacagctgattggacttaaccatagcagctgattggacttaccgtaccagcacagagataagctgagccaatcagggtcttgcttgggtgaatagaaatgaagaaacacaaaagaaagctgccaattggatatgggtattgtagctgaaacgtcttgcgagctgagtcagggtcggggaagctgtgatggcaatgagaagtcaacacactgaggatggagagaaagaagatgagtctgggagagaaagagaatgattcttctggccgagggaaagcaagaatatctgttcctgcaactgcactgattctagaaacactctctattcgaactctcatgaggtaacttcttgttccttaattctgggtctcctctactcctgttcttgactcctcatgagatcatttgagcttagtaataaaccccacttatctttaccaggcttgagggaatgcgtgtgtgtggggtctctgctcctttcaacaaaattatcctctataaaataggtggcactgggggaatggttatca

SEQ ID NO: 10804 - DNA, 587 bp, Homo sapiens
  MAP TO CHR18.3; EXPRESSED IN BRAIN, SIGNAL = 1.1; EST_HUMAN HIT: AW194580.1, EVALUE 2.10e-01; NT HIT: U92656.1, EVALUE 1.40e-01
tgcccatctgtttgtacagcagagaatgggtttcctgatttattcaaagcctctttccagtttgttttaccatctttgcctttaactcaggaatagaacagagtgtattttgcattccttgctcagttttaatagaataaaatgaaaagtttaaacagggttaacccttgtttcattatcatttctcagcacgaaagaccaatgaatccaatgtgtgtcttctcttttgtggataagacaccaccccagggtctgtgtaatgtccaaacaggtaaagtaaacctaagcaaaacctatgatcttgtgtagatttgcagtgctcctatagtggatgtcaacagaaaacagattttataaatacctgtctgaattaaatttaagcatatgtaccttgatatatgcaggtttttttacataatcaaacatcttttatacttggttcataattgtgaaagcatttgtgtgtatataaattcatataatatatagtgtatatttaatatgtattaatcctaagggtatattatgtgagcctatatttgcaagtagcctagaagtttctgttaaggatactgcttatggccaaa

SEQ ID NO: 10805 - DNA, 532 bp, Homo sapiens
  MAP TO CHR16.3; EXPRESSED IN FETAL LIVER, SIGNAL = 2.6; EXPRESSED IN LUNG, SIGNAL = 3.8; EXPRESSED IN BRAIN, SIGNAL = 2.2; EXPRESSED IN HELA, SIGNAL = 2.9; SWISSPROT HIT: Q16651, EVALUE 9.00e-73; NT HIT: U33446.1, EVALUE 0.00e+00; EST_HUMAN HIT: BI763558.1, EVALUE 0.00e+00
cacacaccatgtcctcttggacaaagtgcggctcctcaggcttggcgtcgatgttgtacaggcagttacacgtctcacgactgatcagaggcacctcgagttgctgcagtggcttgggcgtcaggaggctcactgtgggggtaaaagaggcttaccctgggcccctccccaagtcaggtgcccctccacacctctaggcacccagcgtcccacctcacctgagggggccacatgaccccagccagtgacagtgcagtggaggccgttggggaaggaggcgttggctgcagggaggcagatgggccggatgtagcgggagaaggtgatgggtctgctgagttggaggagtgcaatgtcgccctgggagccctcctggaggtagctggggtgggggatgatgtccttcagggtgctgaccttggcgtcctcggagtaggagtctagctggtgggcccccagcttgacctcataggcttccttgtggtgctcgctgcaggcagggggcaaaggctgagacccaggagacctctcc

SEQ ID NO: 10806 - DNA, 544 bp, Homo sapiens
  MAP TO CHR14.3; EXPRESSED IN BRAIN, SIGNAL =   1; NT HIT: AB038161.1, EVALUE 2.00e+00; EST_HUMAN HIT: BG539672.1, EVALUE 4.90e-02; SWISSPROT HIT: Q07436, EVALUE 1.70e+00
taacatgcccctcctttgagcagaggcacacttcttctctgtgtgtctttgtatccccttatacaccaggaatccatggagcccatcataccaggtgcccatagcatggtaactaggaagtagcataaaaaatattaccctacaaaaaaggagagctgttacaacccaattcattaattcctggtagaattgaagggttaggtcctgctagacctgggtagattgggctgtcactgtcgggaggcaagtataggcaggaaagagctgacagagtaggtctgagacttcagagcagagccctacagtcagaaacagaggtagtggctcctggtggcctctggcacagacactgaggaaataatggccaggttggaaccaggagaaggacgagggacagaggtagagagccaagggaaaagctggatgtgggttcaagcgcaggctatgagacagaattatgaggctcagggacatctatgctgatactttcacagagagcaatggcttttctgaagtgacaggttgacccccattctcctaggat

SEQ ID NO: 10807 - DNA, 534 bp, Homo sapiens
  MAP TO CHR14.3; EXPRESSED IN BRAIN, SIGNAL = 2.8; SWISSPROT HIT: P54265, EVALUE 7.00e-16; NT HIT: AB032950.2, EVALUE 0.00e+00; EST_HUMAN HIT: AW162515.1, EVALUE 0.00e+00
tgagaacggtgctttcacactcaccgtgtttctcagcacgtcgtcatccacgtcgaagttggatgtgtcagagggactgctcacatcaggaatataaggtgcttctaggtttcgtatattttcccaatttagaccttcaaaaaacgcatgctttttgaaatcctctattccattctgccccagccggcgttctctactgcagatcagtctctggatgaggtccttcgcttcttcagatacatccgtgacatgggatgggaactggaatcgctcctgcaaggggtggcaaaaacaccggtggacaggtggacgcattcagagagtttaaggtgtacagatatgataggaaacaaagtagaaatggtagcttcaaagcaggtcacttcatgggaactaaatgcaatccaaagctaataaatttccattcccaaaaggcaaacaagaaaaccagtggtccttctggttttactcattgtagacttgtgaccacactgcatgtaaatgacacattttacctatggaagtggcaaggaa

SEQ ID NO: 10808 - DNA, 593 bp, Homo sapiens
  MAP TO CHR19.3; EXPRESSED IN FETAL LIVER, SIGNAL = 0.93; EXPRESSED IN BRAIN, SIGNAL = 1.1; SWISSPROT HIT: P23508, EVALUE 3.00e-04; NT HIT: gi14785847, EVALUE 9.00e-74; EST_HUMAN HIT: AA349514.1, EVALUE 6.00e-45
gctctccagtgagggttctgtggattggggccatcctcagaaagcccactccctccccagctggtgacatcactggcagggtgcactgacctgtactgcaaggccagatgcaatgctgtggcctcagcctcccgctggcctagctgcatgctgaggccttcacagcggcccttgtatccctgtagcacagctgatagcagacgattaaagcatttgagcttctcaatgctcctgttcccgaaggtggggaagagggaaagtcagaggccttctaaggcagtcaggcctcaatttccaccctttccctccctcctgttgcagcttcagactcctggctttataactcagttggaggaggtgcctgtgcccttatgagctcagcatttgagtctcttacccccggagttgctccatctgggcttccatgatgtgcatctcaggactgaggggctggttgggaagagacccaaggatctgggtgctggaatggctgcggaggcgccgaagcagggggtgagccagggagaaggagtcctgccaagaagaagtgatataactgaccccaattgtcaccaagagcctgggattgtagg

SEQ ID NO: 10809 - DNA, 516 bp, Homo sapiens
  MAP TO CHR18.3; EXPRESSED IN FETAL LIVER, SIGNAL = 1.4; EXPRESSED IN BRAIN, SIGNAL =   1; EXPRESSED IN PLACENTA, SIGNAL =   1; SWISSPROT HIT: P57181, EVALUE 9.40e-01; EST_HUMAN HIT: BE141076.1, EVALUE 7.20e-01
ggaaaattttggccatttctctttctggtggtcttcagaatgccgtgaagaccctctgagaaattttgagtagaattttgacaggcatcaccttttaaaatggagttttatttgccagaaagcaatgtagaagacagattggaagactagaagacagtccggaggccccagaggaagctaatggtctgaaataacagcttaagaacaaagaactgtgaatagttgctcacctctgaaaaattctcgaaggaataggtgatcattgggttgaagacgaacagaagatgataaacttggaagataataaacttaaaagttatgcctttcttatatggtaaaaggactttctcctgaaatgcaattaacttgagatgtttaggtatgcaaacaaacaaaaggtagttagggttttcattctggtttctataaatatccacaatacttttctggctagtttccaatctaaaattttcaaaatcatggttttttttttgttgttgttgtttgctggtggaa

SEQ ID NO: 10810 - DNA, 550 bp, Homo sapiens
  MAP TO CHR14.3; EXPRESSED IN PLACENTA, SIGNAL =  25; EXPRESSED IN FETAL LIVER, SIGNAL = 1.1e+02; EXPRESSED IN BRAIN, SIGNAL =  19; SWISSPROT HIT: P12970, EVALUE 5.00e-66; NT HIT: gi4506660, EVALUE 0.00e+00; EST_HUMAN HIT: BI438637.1, EVALUE 0.00e+00
ctggaaggccaaacagctactcagctgtttaagctggcccagagacaaagcaagagaagcagcagaggctgttggccctggctgagaagaaagctctgggcaaagggggcatccccactaagagaccaccggtccttcgagcaggagttaacaccgtcaccaccttggtggagaacaagaaggctcagcccgtggtgactgcacaggatgtcgagcccatcaagctggttgtcttcctgcctgccctgtgccataaaatggaggtcccttactgcgttatcaaaaggaaggcaaggctgggatgtctagtccacaggaagacctgcaccaatgctgctttcacacaggttaactcggaaaacaaaggggctttggctaagctggtggaagctatcaggaccaattacaatgacagatctgatgagatctgccgtcactggggaggcaaggccctgggtcccaagtctgtggctcacattgcccatatggaaaaggcaaaggctaaagaacttgccaccaaagtgagttaaaggtacactgttgagttttc

SEQ ID NO: 10811 - DNA, 507 bp, Homo sapiens
  MAP TO CHR16.3; EXPRESSED IN PLACENTA, SIGNAL = 1.6; EXPRESSED IN LUNG, SIGNAL = 1.7; EXPRESSED IN FETAL LIVER, SIGNAL = 1.3; EXPRESSED IN BRAIN, SIGNAL = 1.4; SWISSPROT HIT: Q9UH03, EVALUE 8.00e-13; EST_HUMAN HIT: BI832349.1, EVALUE 6.00e-60; NT HIT: AB018490.1, EVALUE 3.10e-02
tatacactcaccaccaccgccacccccatcactgccctgcctccggcagcctgcggcccctggacattgagttcctgcagcggctgtgccggactgtgaatgtggtgcccgtgattgccagggccgacagcctgaccatggaggagcgagaggccttcaggcgcagggtgatctggatgcccgggcagggctggggtcagcgggggcagagggcagagtgggcagggtgggctgaggtcacctgtgtgggatctccagatccagcagaacctgaggacccactgcatcgacgtctacccccagatgtgctttgacgaggacatcaatgacaaaatcctcaacagcaagttacgggtgagaggctgtggggcgggaggcgggcgaggtgatttccttcccacacatcctttccatccaaagactcatctttctctacatctcagggaaatgtgcacatattcctagcagatatgattctctactcatccacaagctcaaggtgagcaa

SEQ ID NO: 10812 - DNA, 590 bp, Homo sapiens
  MAP TO CHR14.3; EXPRESSED IN FETAL LIVER, SIGNAL = 0.84; EXPRESSED IN BRAIN, SIGNAL = 1.2; SWISSPROT HIT: P96123, EVALUE 2.60e+00; NT HIT: gi6226515, EVALUE 8.80e+00; EST_HUMAN HIT: AV724297.1, EVALUE 1.00e-64
tgacccctgaggaattgaaggtcagcactaaaataaaaatgtagggggaaatgcgactaataaaatgtaggaaaaaaaaaacgatgaacagaaaatataataaacctaaatggtggtgcttacatagataaaactgaaagaggattgtaaatagaactgtaagaatggatttgtctaccatttattatattttgataaaaataaagaaattcaatttacaatattgaattttactagactttctggtttgaagagctagagtttctttttcctttcagaaggcttgtattcaggtaatactgatgaagataatcctcaagacctttacactctgggtcagttccaagatggctgagaagctgtttaaaataatcaaaaaacaacttgataggattgacaatttcatgttttttaatgtgttgaatgagattgctaactacaatcagcagatatacatacgtggtatcacagatgttaggttttcaaaaataaagaatgtgttagaaaaatgcctgccaatcacttgaatgttacaaccttttattattattattactatactttttaaaagaatctggctgttgagtgca

SEQ ID NO: 10813 - DNA, 562 bp, Homo sapiens
  MAP TO CHR16.3; EXPRESSED IN PLACENTA, SIGNAL = 1.7; EXPRESSED IN BRAIN, SIGNAL = 1.6; SWISSPROT HIT: O95416, EVALUE 6.20e-01; NT HIT: AF108454.1, EVALUE 0.00e+00; EST_HUMAN HIT: AI141460.1, EVALUE 0.00e+00
ctggaactgtcagggactggtttcatttacacataacgtttataaccttggcagagaaaaatgtattgtttttaaaatttatgttaattagtcataattcaaattggcctctccctttgcgcacagaggtaagagaagcaaatcttgtgcttgccttgagtgagtgacaggatcttggggcagccaaaacctcagttaagtcttgcttccccgctacggaagccccacatgcatgcactgacccctgtgcgttaaacctgcagcgcctctgggaacaaaggggtgtaccttatctccaggctgaaggccttttaccttccctcggatattcttcaccagctctgggtagaagaactctgggcagcgtttgtgatctggttcaaagagggtgagtgtaatccgaacagctgctgcagccggctcacagtcctgatgctgttctcctgccccagcctcctccttccgggacttcttcaaaaacgcaggattcagggaacctgggagagaggtgaactggaccctgtggggctccgacatggctaccaacaagtcttagcgggtg

SEQ ID NO: 10814 - DNA, 518 bp, Homo sapiens
  MAP TO CHR18.3; EXPRESSED IN FETAL LIVER, SIGNAL = 0.89; EXPRESSED IN BRAIN, SIGNAL = 1.3; SWISSPROT HIT: Q13207, EVALUE 2.80e+00
atgtgaagcagcagaacacgtctgttactcttgtcaatcaggaataacgatggtcagggagaccagcaggagtgctaacagaaaggagcccagcaatggaggatgctctgagacaggccccagctgctctcagtgccctggcatcctagctttccaagaccacatcagctttaccttgagggctcgacgaggacatgtaagtgtcctcgtggtgccagccagggccctggtaagatccaaaggcacagcccaatttggtgatgtggggagagcctgaggaagggatgatttcctaaggtacaaggagccaaaggggatagagcaaagcctgggactaaaagcactggacattcttactaccctttaagaggtcagtgagaggaagcagctctagaaagagagagagagagaagaaaagggactgaaacctgtgaaccagaggtagccagagcaagatcactgccagaaaggagcaacgagccagaggagggagctggacaacaaagacctccagcctc

SEQ ID NO: 10815 - DNA, 528 bp, Homo sapiens
  MAP TO CHR14.3; EXPRESSED IN BRAIN, SIGNAL = 1.4; EXPRESSED IN PLACENTA, SIGNAL = 1.1; NT HIT: AF321003.1, EVALUE 0.00e+00; SWISSPROT HIT: P15502, EVALUE 2.90e+00; EST_HUMAN HIT: BG819486.1, EVALUE 0.00e+00
gctgaaactgtcgggagaagttctgcgaaggctgctccttgcggcgttgggactgagggtcacaggcacctgtatttccgtttccggttcgcctccggagccatggcggcggcactgaagtgtctactgacattaggaagatggtgccccggccttggagtggctccccaggcccgggtgagtgcctacattccctgctgtcggagagactctggatctgcagagacatctccgcgcagaggaggagcgctcctggcagcccccgccctagcgattgccagcaactttcctttctgccaggaaatcaacctacctttctctgcctgcaggcgctcgccgccttagtacccggagtgacccaggtagataacaagtccggtttcctgcagaagaggcctcatcgccagcaccctggcatcctaaagctgccgcacgtgcggctgccacaggcactggctaacggtgcccagttattgctacttggtgagtaacggcgggaaagcgagaagaaacgggactggacctaca

SEQ ID NO: 10816 - DNA, 596 bp, Homo sapiens
  MAP TO CHR18.3; EXPRESSED IN HEART, SIGNAL = 2.4; EXPRESSED IN BRAIN, SIGNAL = 1.2; EXPRESSED IN PLACENTA, SIGNAL = 1.2; NT HIT: AJ007607.1, EVALUE 0.00e+00; SWISSPROT HIT: Q9Y6N8, EVALUE 1.00e-21; EST_HUMAN HIT: BF819993.1, EVALUE 0.00e+00
aaaattttgatggtaaaaagccctaattatttgactgcactgcagaaccaaacatgcatgctaatcttttaaagcgaggtcccaactcattaaggtaatcatagctttcatcctgatcagagactgctgattctaaggagctcagggatccagctaatgaccctgttccctcaaaagcgtaggtctggagggaatcaaaaggaggggcacacggatcagtattagcttcttcgagcttttccagaatgaatttcctgaatatggcactgtcggggccaacttgcaaagactgcctgtataggctcctgatctcagcgcttgtggttttccgagtcttgcgttcccgcattatggtactactcctcagctctgctatatcaaaggcctctgtatcttcttctccacccccttcatcatcatattggaatatattctctctgaaatcttcacttttctcaggaaatagaatctgttttctccgttgttttaaacccaaagtcaaaaaaataaaccctgatgaagaaagcacatcagaatatcaataaacaataaagagtattataaacattacagtctttgctctcatttcaagctca

SEQ ID NO: 10817 - DNA, 544 bp, Homo sapiens
  MAP TO CHR14.3; EXPRESSED IN BRAIN, SIGNAL = 1.3; SWISSPROT HIT: P30772, EVALUE 3.90e+00
ggagggcatgggataaatgaaattaggagacacactaaagtcacaattaacatggcaaaaagtcacagtaagaaaacatacttagtatatcatacttggaagtagacaagatacagtattgaataataaatttttaggtatttttaggaaacaattttccttccctatgtctatgcatttatttctgctgccagttaaacattactgttacaaaatataaaaggccaatgtcaacatttaatgaagctgtagacctaccatcaactattgtatccacaatgaagcctagtaatgccacatcattggcacaggggcattttgtcactttgagatctaccacatgtggatataatttactgatttcactttctggaatcacatccccaggagtccactgaagaatcggttctgtggaaatcaaatttgggtgtttaaattgtgggagcacccttgaaaatggatgctactttcctttaaaggttttaaaagaactatgtaaagaaactattctatagttcaaaaaaggtgcattacctcactctgc

SEQ ID NO: 10818 - DNA, 506 bp, Homo sapiens
  MAP TO CHR14.3; EXPRESSED IN BRAIN, SIGNAL =   1; SWISSPROT HIT: P47828, EVALUE 4.70e+00; EST_HUMAN HIT: BE709577.1, EVALUE 3.00e-09; NT HIT: AJ229041.1, EVALUE 1.00e-16
cccccaaattataagaggcgtgcctacgggtccaaacccaaagaatgggctaagagaccagaagtacagcgaaagtgaaacttgactgtcagtcttgcaagatcaggtgtccattgagcaggcacatctggtacagttacagcaatcaatttatcccctagtgcgcaagtccctcccccggttcctgtaggctgagcactgtggggttacaatcttcctggacgtagtcacctaagtttcttttcttgttttttattggtcgttgggttggggcttttggtactttcttcagggtcttcttgctgcattttgttgcagcccttaatgcattgtaattgtagtcagctctgggactcttcaagtatttgacctatgacccagggggttaagcgagctgttaggaatagacaaggtgagctatttttgcaagctagtaaacttccattctaagctaaatcctctggtttgggtgagggtaactaaagggtcccaataagcaggcactg

SEQ ID NO: 10819 - DNA, 504 bp, Homo sapiens
  MAP TO CHR16.3; EXPRESSED IN BRAIN, SIGNAL = 3.4; EXPRESSED IN PLACENTA, SIGNAL = 4.2; EST_HUMAN HIT: BG771903.1, EVALUE 0.00e+00; SWISSPROT HIT: P01764, EVALUE 9.00e-46; NT HIT: J00239.1, EVALUE 0.00e+00
acttgatgaatcagccccagatgctgagagaaaatcagcctttagcaccaccagcccctgccacggagagcagcccagttcatagggcccaggacaccccctcgtggtctcagatgcccctgcagcgaggtttttgtctgggctcacattgacttcccctcactgtgtctctagtacagtaatacacagccatgtcctcagctctcagactgttcatttgcagatacagcgtgttcttagcattgtctctggagatggtgaattggcccttcatggagtctgcgtagcttgtgctactcccatcactattaatacgtgagacccacaccagccccttccctggagcttggcggacccagtgcatccagtagctactgaaggtgaatccagaggctgcacaggagagtctcagggaccctccaggctgtactaagcctcccccagactccaccagctgcacctcacactggacacctgcaaacacggagacaccctggtcagaaa

SEQ ID NO: 10820 - DNA, 571 bp, Homo sapiens
  MAP TO CHR18.3; EXPRESSED IN BRAIN, SIGNAL =   1; EST_HUMAN HIT: BE933939.1, EVALUE 5.10e-02; SWISSPROT HIT: P25391, EVALUE 2.00e-45; NT HIT: X58531.1, EVALUE 0.00e+00
tgattctggattgagacttttcagtgtctttgtttcaggtctttcaagttgcatatgtcatcattaaagctgccaatgcccctcgacctggaaactggattttggagcgttctctggatggcaccacgttcagcccctggcagtattatgcagtcagcgactcagagtgtttgtctcgttacaatataactccaagacgagggccacccacctacagggctgatgatgaagtgatctgcacctcctattattccagattggtgccacttgagcatggagaggtaggtatggtgcccgctgcagcaagatctgtttcctcatcagagtctccctgtctcagactcaaaattgatctctctcaatacaaagatctttaatataactatctagctctatttaaagtggccttgagtcatgtctattataagtaatttcacaaacaatatggtttaccttgttgacttcctctcttcaaggaggctctcagtcttcactctgctgtgatttaataacgcccttggatcctccttcagagcatcttccccacagcaccagggcaagaatgtttgtt

SEQ ID NO: 10821 - DNA, 521 bp, Homo sapiens
  MAP TO CHR16.3; EXPRESSED IN BRAIN, SIGNAL = 1.2; EST_HUMAN HIT: BF955512.1, EVALUE 2.00e-93; SWISSPROT HIT: O83172, EVALUE 3.70e+00; NT HIT: Z49597.1, EVALUE 1.30e-01
gtggtgtgttcttgcactgggaggtacattgtgttcaattttttttttaagcagcttcataaattttcataggaaacaatgttttcctccttcacattaagcttggtattccaaagccaacataagtcaagtcaaaaatcatttctttctttaggcgttgggaaggaggactatccccacactcagggcgatttctcatttgatgaagacagcagtgacgctttgtctccggaccagcctgcgagtcaggagtcacaggggtcagccgcgtccccaagtgagccaaaagttagtgaatcgccatctcctgtgactacaaacactccagcgcaggtattatctttctggttttgacccctaaagaaagaaaatgccttgtttttttttaatatattaaggtaatacactttgaccagaagaaaattctgaattgaatttaaattgatttattaagcaaaaagcaggcacttaactgccctccaggaaggtaataaagatttccagccactatgtcttcatca

SEQ ID NO: 10822 - DNA, 589 bp, Homo sapiens
  MAP TO CHR19.3; EXPRESSED IN BRAIN, SIGNAL = 4.6; EXPRESSED IN PLACENTA, SIGNAL = 2.4; EXPRESSED IN LUNG, SIGNAL = 1.9; EXPRESSED IN FETAL LIVER, SIGNAL = 2.7; SWISSPROT HIT: Q14324, EVALUE 2.00e-24; EST_HUMAN HIT: BI755020.1, EVALUE 5.30e-02; NT HIT: gi4758747, EVALUE 2.00e-80
tctaccctgtcactcaccccatgtagggaaggacgcagtggtcgtggccaaggtgaacgggaaggagctcccagacaaaccgaccatcaagtggttcaaggggaagtggctggagctgggcagcaagagtggcgcccgcttctccttcaaggagtcccacaactccgccagcaatgtgaggaccccgtgggccagagggctggtggaggggagtggagcttgtgcaggacatgctcctcagaagccctgttgcctgaggcatcaatgtgggcctggagccgggatggagagtgggccctctgaggatggaggttgtgcggggctgctggggagaggttgtgtgaagcagagggaggatgcctggggttgggtggggatgcattagggcttggtcatgtacattcctggcaaggcctgagggggccagggacctgggccccagaagtcctgatgggtcagatatgaggagacagagctggccaccaggtgctgagccacctctcggtctccatgtgcgccccctgtggggtgggggtgaggacgtggagatagagctatgagtggactctgaggaatatggggtggctct

SEQ ID NO: 10823 - DNA, 557 bp, Homo sapiens
  MAP TO CHR14.3; EXPRESSED IN BRAIN, SIGNAL = 1.1; EXPRESSED IN PLACENTA, SIGNAL = 0.82; SWISSPROT HIT: O14338, EVALUE 4.70e-01; NT HIT: AF172642.1, EVALUE 1.30e-01
tccttgaatcctcaaagtaaaaatgatagcataacaaccttagaaaggtttaagctttcaaaatgtcttaccttcatcccactttgcaaagattttcagcataagctgttctctttcaacatactctatgctcttgccctctggcttatctaatctaaacatgtttctgttaaactctaccataacccctaacagagaattgaatgacatttattcaagcctcagcaccagattaagatgccagaagttatgctagaaaatgttactttttttttcctgtgtgctttgaagccagataatttagcttcaggcaatcaaagcatatttctcttcaaggctgatttttccaaaaccagctgtttgtattctaaagctgaatctgtgtgtgagtcattagcacagtgtttacaagtttgctttttttctgtatggcttctgtaaaactgtattacggcttaaattttctatctaaacattttcctatattaattccttctctgatgtgggaatacatgaagcatgaattcaatcatctacccaatcagatcttcctgttg

SEQ ID NO: 10824 - DNA, 549 bp, Homo sapiens
  MAP TO CHR14.3; EXPRESSED IN BRAIN, SIGNAL = 1.4; SWISSPROT HIT: P78540, EVALUE 7.00e-27; EST_HUMAN HIT: BF739231.1, EVALUE 1.00e-101; NT HIT: gi14784202, EVALUE 2.00e-87
tttctgagcagggctaatggataaaattatacggatttggggacaggacagcagtgacatctgtcacactgcagggtagcaagtcaccagcttcgaatctctagggctttatcactcaagattaatttttgagaactacaactacaggtcttgcctcacccaaacccagtctccatctaggccctggctttgcactgtggagagagtataagttgttttggctgaggacgtttgttatcggtcatgtttgccaagcagagggccttcaagattatacttgttctttgcagcctggcaatcggtaccattagtggccatgcccgacactgcccagacctttgtgttgtctgggttgatgcccatgctgacatcaacacaccccttaccacttcatcaggaaatctccatggacagccagtttcatttctcctcagagaactacaggataaggtcagtgggccaaaacgaaaagaaaggtgaatggcttgcagggttttgctggagttggtctagttcagttaagattttggtgaagggtgggttgagtgt

SEQ ID NO: 10825 - DNA, 563 bp, Homo sapiens
  MAP TO CHR14.3; EXPRESSED IN BRAIN, SIGNAL =   1; NT HIT: AJ250280.1, EVALUE 7.00e-99; SWISSPROT HIT: Q02280, EVALUE 2.00e-36; EST_HUMAN HIT: U69185.1, EVALUE 0.00e+00
taggctgcgaccacctttagtctaaaaggtactgtcctactgttgccaaagaaagtttaatcaaactcagcccattaggttgtgactgatactaatgttctctgctgaaatagcattattagttttcattaagattcacgtctcattagtgacccaatttccaaagttaccaaacaaaggaaatttctctttaaaaatgcgaaaagcaaaatatctaaaactgttactacgcatttgctactacattaggaaagttcacagtacctaaaatagccaccacctcatcatcctggatgacttccaaggatcctgacaccacaaagcagagggcatccacactttctccagcatggtaaatgaggtccccgggagcacagtgaatggtttggaactctaccgccaaggcgcgcagacacccatcgctggccaatcgaaaagcaggatgttcattaaaaaccttccggtttagatgaacacagatatcagctctcatgtccttgggacagatggagaggacctaaagaaggtgagagatgaataagtgaaaaggaaagaggaagggg

SEQ ID NO: 10826 - DNA, 559 bp, Homo sapiens
  MAP TO CHR19.3; EXPRESSED IN HEART, SIGNAL = 3.2; EXPRESSED IN BRAIN, SIGNAL = 2.8; EXPRESSED IN PLACENTA, SIGNAL = 1.3; EST_HUMAN HIT: BI833931.1, EVALUE 0.00e+00; SWISSPROT HIT: Q62267, EVALUE 2.70e-01; NT HIT: gi13633669, EVALUE 0.00e+00
tgcctcaacctctaaaagatcccaggaagtcagtatcgaaagttagggtcctttattgggggatgtcagcagagaacgtgggacatgaaaacaagtcttaggagtttgagaaggggctcccaggacaggctcctctgctttaaggagcctgtcctgggagaataagcagggccccagtatgtgcagaagttgtcagggggtgcccaggggtatggtgaaggagaggtagtccccaagggcaccccagcggggccggtagatctggaagatggtgatccaggaggtgagcactatcacccagaagaggaagcccacagctgagcgccagacatctgtcatgggaaacagaagctggaagggttggcctccggctgctctccagacttccctagaccagccttcccttctcacccagagccccaacattttggatcctccattgtcccttcccaccaagattccccgcttccccctctcccctgccactggcctccctcctctgtgctctagactcacagcctttgatttggctctgttctgtgtaggctgggacaaggaa

SEQ ID NO: 10827 - DNA, 559 bp, Homo sapiens
  MAP TO CHR14.3; EXPRESSED IN PLACENTA, SIGNAL = 0.95; EXPRESSED IN BRAIN, SIGNAL = 1.2; EST_HUMAN HIT: BG877827.1, EVALUE 5.00e-02; SWISSPROT HIT: P22297, EVALUE 9.10e+00; NT HIT: gi16158323, EVALUE 3.40e-02
gccgttagggaactgaacacctcaggacttatccataagagctaaggccttttattactagattgatatatccccataccacccagatcaaaagtaagtaaaagtcatttccacataataactctctggtagcctatggataatgagtttgttatctccagccatctctcattaggaagggattggcccctttacaaacacagtacagagtggctaactctatataaagcttttatgaagaaagagctagatacaatttcccagtgcatcaaggaaagcagattctaacctcatctgcgctgactgggtttgacaaatttaaccttgacacacttccatttgtaaagatgtaaaacagaaataccctcaataacaactcatcttccacagagtctttgtcaggattaatgactttggtgtgtatcgtaagaaaaatattcaaatagaatccacagctgtatttttctgctgttccaactatagccatggtaaagcctggtaaagacaatgattcagtaagaaaaagaaggcagaagtttgttaccaggggttggcaata

SEQ ID NO: 10828 - DNA, 576 bp, Homo sapiens
  MAP TO CHR14.3; EXPRESSED IN BRAIN, SIGNAL = 1.1; NT HIT: gi14742901, EVALUE 6.00e-04; SWISSPROT HIT: Q55694, EVALUE 7.30e+00; EST_HUMAN HIT: AI089805.1, EVALUE 8.00e-04
tcccaaggtcagtggatctcctttgaggtttctagctagccctctcatgatccttgtcagctttccatactcttcagcatatatgcatattcataatgcgctttaacgcatcctttgaatgaattcgtgcatttactcaactttccatttgcaggacctttctcgatggagtgtcatggaagccctcaaatcaagggagggctgggacagaggtgtacatagcaccagatttaaagtctaggctttatttcaagtcaggtaaaggggagctagtgaagatttcagataggacatatctggcctcacttgcacaaaatcttgcgggtgagacaacaaacagggaatcatgctgaaggtgatgcagaagtgatgaatgtggggctggtggtagtggtcgtaaaggtttcccattgggtggatgtaggttctgagctagagaaggtggtgacactttgtcaactaagactgggttggaggaagaaaagaacagaattcacacctcaggtctggagggagaggaggaaaagtcagtgtgtgaggaaggggctactaagttgtttcattactggggcagga

SEQ ID NO: 10829 - DNA, 502 bp, Homo sapiens
  MAP TO CHR18.3; EXPRESSED IN BRAIN, SIGNAL = 1.5; SWISSPROT HIT: P79385, EVALUE 6.00e+00; EST_HUMAN HIT: BI459899.1, EVALUE 7.00e-01
aaagtgtcactccggcaaactcagaacacaacagcttatgtctcttcctcagggacactgtcaaaggactgactctgggcaaaagtgttcacagatacaatgttgggatccagaagccaaaaaggaaggatgaagaaatgactgtgagcaaaacagtattatatggtagaggagagatgggccaaattaagcagcaggtaataaaatcaatcaaacaaacatgaaaccaaccaagcaaatccagctgagcctatttgaaaggaaacaacaccagaggcagacccctcactacaaggaaaactattccaaacaggaccgttctctgagcctagaatgttcaagatttggggtccctcagggcacaagcagtgaaaagcatcaacacatgactcatttcaagcacggaggatgacgctaatgctgagggtctgggaggaagccacccccaggacacaggacttttaggactccagaatttcagagcagaaggagtacagcagcc

SEQ ID NO: 10830 - DNA, 557 bp, Homo sapiens
  MAP TO CHR19.3; EXPRESSED IN HEART, SIGNAL = 4.8; EXPRESSED IN BRAIN, SIGNAL =   6; EXPRESSED IN PLACENTA, SIGNAL = 3.1; SWISSPROT HIT: Q01397, EVALUE 1.40e+00; NT HIT: AL583925.1, EVALUE 1.30e-01; EST_HUMAN HIT: BI668410.1, EVALUE 0.00e+00
acctgcattccaggagtcacggatgggaaagtaaatctttggaggggctgggagctgggaaaaagagatgggcagaaagaactggtgaaaaggctcagcagcccatccccagaggcggagggaggaggacaggccggagaatcaggtcagcatcaatatggaggacaacatcgtgcagggctggagggacctcccagagctgaccacccgccaaaccctggcctcgttcccggcccgtagtacctggggtatctgcaggcctgtctgctgacacacgtactggctgaactggtacatggcgggggggaccacctccccagccttctgtagggctgcctggctcttgtcgctgggccccagcagctcctggtcgtacaccaggtagacggcgcccccagccacacttcccttgatgaggaacctgcgggcagggacgggaggagcagaagctcagcggacactgacagccaccctcaggggccaaggcccacggggagagtgagaccctcctgagggctcaccgtccacagggtgacactctgtagtgcagcaccgtc

SEQ ID NO: 10831 - DNA, 518 bp, Homo sapiens
  MAP TO CHR16.3; EXPRESSED IN PLACENTA, SIGNAL = 0.93; EXPRESSED IN BRAIN, SIGNAL = 1.7; SWISSPROT HIT: P42845, EVALUE 2.80e+00; NT HIT: gi16163755, EVALUE 4.90e-01; EST_HUMAN HIT: AI286357.1, EVALUE 2.90e+00
tagacgttgttgaggagggcaaggagcacaggcagttaaagtgaacatcttatgctcaagtgactgggaattctaaacccaagctccacagtacatactttccctatttacttttcgttaatagaatcgcaacatatcattggatcttaatggcaccccaagggggttaattatatgatggggaattgtcctcagtttcaaccactgttggtttaatggatgttccttcagaaaaaagaaatatagcacattgatctttaaaaaggaaaaataaagatctctcaaatgcagatgaggaaagggaaaagttcgcactcagcattcagcccaccattaatcctcaggacgcatttcgtacaggatctctgggttcttcctgtggtggacttcggaattctaaggctgaaggcttgcagccagcagtttccccatctccctgaacaagaccctccttcttctacatagtcaacatctcttagaagaaaaaattctctcaccctctgcaaactcaccaccaa

SEQ ID NO: 10832 - DNA, 526 bp, Homo sapiens
  MAP TO CHR14.3; EXPRESSED IN BRAIN, SIGNAL = 1.5; NT HIT: gi13653275, EVALUE 6.00e-19; SWISSPROT HIT: Q9UKN7, EVALUE 1.10e-01; EST_HUMAN HIT: BF338634.1, EVALUE 9.00e-19
accacagccacgtagagaccggcccccacggcgatggcgagtgtggctaggaagagggcccggcgggaggtggtgctggccaggcggaagtcccctttggagatggccttgctggtctagggagagagacatgctgatgaacaggagtgtccccacacccagccaaacagcccagcctgccaggcccctgaccccatcctgcagacgggatgccaagccctccagtagagtgacgggccagagaagggacctgggccccaggtgctcttaccccctgggagaagtagaaggcagcaatgcccagtggccagaagcagcagagcatggagaagagagtaagtcccaggtggtccctgggaggcagcgtgaggaagttgtcttcactttcactctccgttgaagtggcatcgctctgcaaaacagtggagtttggtgaccaggcccaggatcagcccagccccatcaggctggcaagaggttttttaaaaggcaatgcccagtggccagtgacatggagcaacaagca

SEQ ID NO: 10833 - DNA, 526 bp, Homo sapiens
  MAP TO CHR14.3; EXPRESSED IN PLACENTA, SIGNAL = 0.83; EXPRESSED IN BRAIN, SIGNAL = 1.1; EST_HUMAN HIT: AL039933.2, EVALUE 1.90e-01; SWISSPROT HIT: P79001, EVALUE 3.70e+00
atctaatgtcaattcatctgttgcatatagtatttttagctatttttcatgttaattataggttatattcacttatatttgcacagacatttaaatttgatgtagcggtcattggggagccagtgaagggatttaaaggagctattgagtttgcagtgagtggagaggaagataatctgtagtacagtttactgacatctgtgtcacttgaataggtaatttcatttgattgttttatggcttgtctccatgtcaactgacatagctcttaatcattaatttttcagtgctgttttgaaaatgaatcttctttaaacaagtaacatttcatttttaaaaattacagaaagtctggctgactctcatagtgatgaatcagattcagatctgtctgatgttccagaactggattctgaaattgaacaagagacacagctcacctaccgtcgacaggtaattttccatatcacatggtttttctctaaaaagtctaatttcttctttatcttgctccccgttagtcatc

SEQ ID NO: 10834 - DNA, 589 bp, Homo sapiens
  MAP TO CHR14.3; EXPRESSED IN BRAIN, SIGNAL =   1; SWISSPROT HIT: P33478, EVALUE 4.30e+00; EST_HUMAN HIT: BE730433.1, EVALUE 1.30e-02; NT HIT: AJ276505.2, EVALUE 2.20e+00
agaatgcacccaaaaagctggaatcaaatccaggaagtataaacaactagatctcgactgctaagaattagtagccacagactcacagggaagagtaactagcccatgtgcacctagacgcacagtgttaggtttttccttaatggtgacctggttaaagccatgggaggtgtcctactcttccgtccaacctcctccaacaccacacccagggtctgccttcatccttcttggtttctccagctgctcaacatgacaccaacacattttacctgttcttcttcctaccttccttttttcctccccttcaccatctctgcgcttcaagagaaaacaaatgaaggtgctgatgttgccttcctgtgagattccaggtgaaaactggttaatctgattaatcattcttgctgcttttattgcagcaaccactttgaactgttgtgctaaaatataaccgttttccatctcataaatgtctatgaaaagtgtaaacagtgctttcagagagcaatttattttggaatccagtttcacagaattttaaagctaggaaagtccttagtggtcaccttgaacagcatcctcacca

SEQ ID NO: 10835 - DNA, 561 bp, Homo sapiens
  MAP TO CHR14.3; EXPRESSED IN PLACENTA, SIGNAL =   1; EXPRESSED IN BRAIN, SIGNAL = 1.3; SWISSPROT HIT: Q15542, EVALUE 8.00e-05; EST_HUMAN HIT: AU185858.1, EVALUE 4.00e-98
aatccaggtgtactgccacagaaaagttctattctgtagcatggactctaatatgtaatctagcccattgtgcttacagatagatgtgtgcctgtagtcacagaaaaatttgcatgagctaatgactgccttgctactagattagctcaaagcaaaaagttctctgaaagcaggtcaatagggtcatttttatattatgaagaagaaaagcagctgttgtattacattcactgtattggtcctgcttgtgtttcagggcaagatccttgttgggacaaggaatgctgaaataatcgaagttggagagaaaaatgcagcttgtaatattttagttaacggtcatgtggatgggccaatctggggactagcaacacatccttccagggattttttcctttctgctgcagaagatgggacagtgagactttgggatattgctgataaagtaagtacagataatttttttaaaagaggttacaacttctaaaaagaaaagttggaagttctaaattgctagtacttaaagaactgccagaattctgttgagcattttgaggggaa

SEQ ID NO: 10836 - DNA, 567 bp, Homo sapiens
  MAP TO CHR16.3; EXPRESSED IN BRAIN, SIGNAL = 2.6; EXPRESSED IN PLACENTA, SIGNAL = 1.8; NT HIT: gi14779225, EVALUE 0.00e+00; EST_HUMAN HIT: AI905414.1, EVALUE 0.00e+00; SWISSPROT HIT: O76071, EVALUE 1.00e-43
atgccaagtgaggaaagtgcagttcataattgcatgtcgttttttaggataatcatagtaggggaaagaactagattgcagcatctgaagatataagtgggtgatatttgtgactccttattagttaaggaaacattttaataagaggtttttagctgaggcctgaagttagggaagagaacaggccaggaactatggaacaggtctctctggcctaattagtcaggtatacccactgatgtcactttccttccaggtgtcagctgacaggggctctggccacagcttgtggggatgacgcgatccgcgtgtttcaggaggatcccaactcggatccacagcagcccaccttctccctgacagcccacttgcatcaggcccattcccaggatgtcaactgtgtggcctggaaccccaaggagccagggctactggcctcctgcagtgatgatggggaggtggccttctggaagtatcagcggcctgaaggcctctgagctacctcgactttggacagagtaatgactccccagaaaacgtcatataagactttaccagcccctgaga

SEQ ID NO: 10837 - DNA, 515 bp, Homo sapiens
  MAP TO CHR16.3; EXPRESSED IN PLACENTA, SIGNAL =   1; EXPRESSED IN BRAIN, SIGNAL = 1.8; SWISSPROT HIT: Q03385, EVALUE 6.00e-05; EST_HUMAN HIT: BI522821.1, EVALUE 1.80e-01; NT HIT: gi16162394, EVALUE 1.20e-01
atgttggccaagaggctatggccacaggctttctgaggctggcccccagggagagttcaatcctactgtcccaattcctgccctggccttacctctcagtctcaccgagtcgcttcatggtcccaaaccaggacccaaagtgctgcttgggcttaaggttgtaattatttgcagccaactggagcagcggacctccttgcttactttgaattcctgggtccagagggaaaaactgggtggtgacagggactggacagggatgccacaggggccctgtgggggtgttaggtggggtggtggccagtctttgctcataggggaccccctcctcctctccagtcctgtccccacctgttctcagagctggctcaagcagcagctcctccaggaaggtgtccttggtttcaacctggtactcccacctgcaggtcttcctggagtgtctcctctttgtctgtctccccataaatctaagacgagggggatggatttgcccacggctactcaccgtatga

SEQ ID NO: 10838 - DNA, 585 bp, Homo sapiens
  MAP TO CHR14.3; EXPRESSED IN PLACENTA, SIGNAL = 1.3; EXPRESSED IN BRAIN, SIGNAL = 1.7; SWISSPROT HIT: Q11171, EVALUE 5.70e+00; NT HIT: J04809.1, EVALUE 2.20e+00; EST_HUMAN HIT: BG106555.1, EVALUE 2.00e-60
tgcttctgtggacaacttgcaccgtctggacaggaggaaaccctgaagaccgggaagaatccccgcccccatccctgtgcaggcctcagaaggggaggcagctagtccgaggtcaaagagtaagctcagggcagaccccagctgactccggggcacacgtcagagctgtgccattggcagcaccacacatgtgagtcgacaccacaccagaaacatgtctgcaacacacacaaaggtaggagaagcagccggggactcacagctcctgcctgacgcgccgcagcctggccttggtgtcggccagctctacggccaggtgctgcttgtcttcgctagagaggctgctggtggggctgggagtggagtcggcgctggaggacttgatggggctgggtggatgctgtgcctgcaggtagtcccgttcctgagtgaggtccacgatcagctgcagccgggcagagagggggatggaggagaacaaacggggttaaccagcacaatgcctgagcttgaacagggtgaagaaaccgccaaaagacagatatttcagcggagactaagaaacgaggaggaaggtgggaaaag

SEQ ID NO: 10839 - DNA, 543 bp, Homo sapiens
  MAP TO CHR16.3; EXPRESSED IN BRAIN, SIGNAL = 1.3; SWISSPROT HIT: P32170, EVALUE 6.70e+00; EST_HUMAN HIT: AI187125.1, EVALUE 4.90e-02; NT HIT: D00295.1, EVALUE 1.30e-01
agtttcccaaaccagaaggggcatgaaaaacttttcaaagagttagaagagtaaccaaacataagataaaagaattatgtatgagcccactgcccaaacttcaaagcagcacagttcacccacagcatggagatgaaagggattggattggatctgagagccgtcatgaaagacctaggtggaccagaagcaaaggaagcctccagtcccatccagaggcaccacggggaggggagggagaagaggctgaggatgctctttctcccaaggtgatgcttccccagtgtttcttgtcattgttccgcattctatgttctatgttgacataggtgaaagacatcaaagagcctgagtgtgaaagcaagatgacaagatacagcattcttttcacaagaaatgcagagaaacagcccggaggtgacctgtgcttgctgcagcccattccccaaacagtgggccagggacctctgtcgtaattatgcttgcaactcagcgatgtatttcatcacccggtagtggggctgctgccaattccacctctac

SEQ ID NO: 10840 - DNA, 571 bp, Homo sapiens
  MAP TO CHR16.3; EXPRESSED IN PLACENTA, SIGNAL = 0.91; EXPRESSED IN BRAIN, SIGNAL = 1.3; SWISSPROT HIT: Q9WU42, EVALUE 1.90e+00
ttcctcgtactatggccgaccagcctgcagagagcttgttaaactggcttcttcgaagaagaagagctaagtcaagctgaaatgtgcatttgaaatttatatttgtattcaattcaattaagcttcagaaagaccaggggggacaggaaggaccctctccagtgtgtcctacagaaatggcatgggtaggaacggtgatgtttcagtccagctggactttccagaggcaggtcgggggtcagccacagaaagtctgtgagacagagcagagaagcaggcagggacccccaaggggaagggaggcagtgatgtgtcccaggcagggaagaaggatcattaatgagtttccatgaagggcaaattcagcagccaggaacctgctgctggggccgggaatcaggaagcggacacccacaaactaggatgggtcttggctgctggctccaactctggttggtgattttcttctctctcttaagttttatgttcccttttgctcagaggggacaagaggcaggggcgaagagacagcccggtgaggttggacctgccagggaagagccagagtttg

SEQ ID NO: 10841 - DNA, 588 bp, Homo sapiens
  MAP TO CHR19.3; EXPRESSED IN BRAIN, SIGNAL = 1.6; EST_HUMAN HIT: AV751658.1, EVALUE 8.00e-75; SWISSPROT HIT: P01229, EVALUE 1.00e-22; NT HIT: X00264.1, EVALUE 0.00e+00
gtaggtgcacaccacctgaggcaggggcggcaggaccgcctgcagcacgcgcatctggaggccgtgtgagtgggggaatgagcatgtgcctgaggccagcgcctcagctgagctcccaagctgaccccacaggtcctggactcaggagcccaggaagccctctgttcctgccttcccacaccccattccccaaccgcaggccagagaggcagaccacccttcctcccccgctgcctctgtgggtctggccctgaggtggcagcatctgcccctggccccaggcagctcaccatggtggggcagtagccggcacagatggtggtgttgacggtgatgcacactgggcagccctccttctcgacagccaggatggcattgatggggtggcaccatggccgaagcggctccctggatgcccatgccccgcccatgctcagcagcagcaacagcagcagcccctgggacaaggacactgcttcacccaggtctgagaccgcagccccgagtcctggccttcccatcccgcgtggtacaccacccacaaagacccagagacccttcccggcatctcctattcaggacccacca

SEQ ID NO: 10842 - DNA, 565 bp, Homo sapiens
  MAP TO CHR14.3; EXPRESSED IN BRAIN, SIGNAL = 1.2; SWISSPROT HIT: Q61555, EVALUE 1.20e-01; EST_HUMAN HIT: AW294986.1, EVALUE 2.00e-01
acctattggatttggggaccatgattaaatattgaaagaacaattcattctttaaattcaataagcagcatcccaacccttaaggactccctctgacagagtgaattgtacaggaggactcttccttagtctaaaatcaaacattgtgcagcttcggcagttctagagctccattgcttcttctacaatgagatactggtgctcagcagataacccatcagagggtgctgaggatgagagcagcggtggagtccatggagcctgcagcacctggtggagcactacaagttctccacccccatcctgtggcagacacggcatccagcagtgcagtactactacctgccagggaccacagtgctcagagtctcacagcaccacctgtcaaagtggatggggctggactgcaaccacgtgtgaggccttccctagggatacccagagatacttaggggaatatcgctaggagatgggagcaagacccctgcaccaacaggtgggagcaaaagcaaaggaaatgtgagtgattgctgtttctgtcacctcatccatctcaaaggtggct

SEQ ID NO: 10843 - DNA, 543 bp, Homo sapiens
  MAP TO CHR18.3; EXPRESSED IN BRAIN, SIGNAL = 1.3; NT HIT: gi15305503, EVALUE 0.00e+00; EST_HUMAN HIT: BI861691.1, EVALUE 0.00e+00; SWISSPROT HIT: P07947, EVALUE 8.00e-37
ggagaatgaagcgattggagtagggcttttgcaaattgtaataaagataaatgaggggaagagacctcgttttcagctttctattttttgttttgtttatgttcctttttgcagggatggcatatgcttttcttaaaatgattttttgaaccctgtctttttgaagtatcctgtgtgttaactgactctcaaaatattttattgtctctgtagatttgataatgggctgcattaaaagtaaagaaaacaaaagtccagccattaaatacagacctgaaaatactccagagcctgtcagtacaagtgtgagccattatggagcagaacccactacagtgtcaccatgtccgtcatcttcagcaaagggaacagcagttaatttcagcagtctttccatgacaccatttggaggatcctcaggggtaacgccttttggaggtgcatcttcctcattttcagtggtgccaagttcatatcctgctggtttaacaggtgagatttaaatggacaattatgttgtctgtttgagaacatcaccttggg

SEQ ID NO: 10844 - DNA, 585 bp, Homo sapiens
  MAP TO AC004493.1; EXPRESSED IN FETAL LIVER, SIGNAL =   5; EXPRESSED IN PLACENTA, SIGNAL = 5.3; SWISSPROT HIT: P26371, EVALUE 5.00e-05; EST_HUMAN HIT: BF984399.1, EVALUE 0.00e+00; EST_HUMAN HIT: BF984399.1, EVALUE 0.00e+00; NT HIT: gi16165307, EVALUE 0.00e+00
ggtggtgttctggacctagctcggtcaaggagcggtggtgaggttctgccactgacacgctcgtaggcagaaaggggcaccctggggctggtgaggtttgcaccagacaatgctggagccatcctagcactggtgaggctcgcgggggccaaggctgcggcggttctggagccggcaatattcacaggagctgtggcatgtgcagaccgaggacccaccaggtttgcagaggctggagcctgtggtgttctggagctggagggatagtttgcagcagttggtggtgtgccagagcctgtgagactcagagctgccaaggcagctggggttctggcccctgctaggttcacagctggggctgtgggagtgcgagggtcagccaggttcacagccgaaggtgccaccgctgttctggggctggccaagttcatggccgctgctgcagctggcgttcgagagtcagccaggttcactgctgttggaatggcaggtgtcctggcgctggctaggttcatggctgccgcagaggctgcaggaatcctgctggcaaggttggctgctggtgcggttctgagactcatgaga

SEQ ID NO: 10845 - DNA, 505 bp, Homo sapiens
  MAP TO AC000072.2; EXPRESSED IN FETAL LIVER, SIGNAL = 0.35; EXPRESSED IN PLACENTA, SIGNAL = 0.59; SWISSPROT HIT: P53675, EVALUE 8.00e-40; EST_HUMAN HIT: BE745822.1, EVALUE 1.00e-124; EST_HUMAN HIT: BE745822.1, EVALUE 1.00e-124; NT HIT: L77569.1, EVALUE 0.00e+00
ttaacgttgggcagaaaaccacttcagcatgaaggaaagcagccactcctgaaggcagccagggctggctggggaatctgggttggcctcaaaggggcccacccttaagacctgcggccagagtcactgccagggttgggtcatgccacacaggggccggggagctgcagccggcccggcacctaccttgctcaggtactccctcatcacctggatgaagtagggcatggccaagtccacgaggttgtgcctccaggccagctcaagcaccatgtctgggcgaagcaggtcatagcaggtgaagagacaagctgcgaagcactccctcttgccttcctccaggaaccactgcagcaacttctgggccagctcagcatcccgcgactctgcagcatgctgcatggcatcctgcagccaaggcaaatgcttgcttgggcatcctgcaggcagaggctttgtgcctgcagcagctgggccggagggcagggagtggcactagactcca

SEQ ID NO: 10846 - DNA, 538 bp, Homo sapiens
  MAP TO AC008554.6; EXPRESSED IN FETAL LIVER, SIGNAL = 1.2; EXPRESSED IN LUNG, SIGNAL = 0.64; EXPRESSED IN HELA, SIGNAL = 0.65; SWISSPROT HIT: P26808, EVALUE 3.00e-32; NT HIT: AJ271736.1, EVALUE 0.00e+00; EST_HUMAN HIT: BI825292.1, EVALUE 9.00e-90; EST_HUMAN HIT: BI825292.1, EVALUE 9.00e-90
ccatgcacttggagggttagaaaggcatgtctagagtcaatgtagatatttacagtcttaccttcactgagttctagagctcgagttaaagcagtgagctcagccttctgggctgaagtgccctgtggcaatggtttggtttcaatgacagcatccaaagttaccaccgcatattctgcacatctttctccttgtgggttgatgaagctactcccgtccaaatataactccaagtctactgatgcccatggctggtccctaaggtcaggtctgctagaataaactgagtccaacacctctacacagttatgctcgactgggctctctgatactgggagcagggtggtgggatttagggtgttacagacttcaatgtttatgtggggattttcacatagcaagctttggtacttggttaatctagcatttgttagccaatggtgtcctttggtgttcatcaaagttaccacagcatgggggcttttatattcagatttggcccaagggttagtttatctgcttcttgtgctaacagggc

SEQ ID NO: 10847 - DNA, 545 bp, Homo sapiens
  MAP TO AC022143.6; EXPRESSED IN PLACENTA, SIGNAL = 1.7; EXPRESSED IN HEART, SIGNAL = 2.7; EXPRESSED IN FETAL LIVER, SIGNAL = 2.1; NT HIT: M32788.1, EVALUE 0.00e+00; EST_HUMAN HIT: BF732456.1, EVALUE 7.00e-35; SWISSPROT HIT: P21416, EVALUE 4.00e-29; EST_HUMAN HIT: BF732456.1, EVALUE 7.00e-35
tgaggcccacaaggagataccggtgaaaatcatctaaagccctcctcccacccgaggagttaggatcccaattaggccgggtagagggaaaaacctccttaacgaggttttgggcttccccctctggtctatcagctgatgtaaggaaatactttctggcttctcttcggatacaattcctctcttcagagatgaagagggttaaaaggcgttgctgacaatcatcccaggtgggccggtgagtctggagcatggactccatcagtgaggtcagaacctggggtttttcaaagaaggggggattatgagccttccagttgtacaggtcagaagtagagaaagggacgtaaactaagaatggagctgagcgctcatcacccggagggatttgtgcctctctcagtgggaggaggggggctacctcctcctgccatggccacaatcaggaggcaatagatggggacgccacaggagatgtagttgaggaggcaaggggagattctgggggagcaggagggttataaggtggcagaactgtgtgagga

SEQ ID NO: 10848 - DNA, 509 bp, Homo sapiens
  MAP TO AC024568.2; EXPRESSED IN LUNG, SIGNAL = 1.4; EXPRESSED IN PLACENTA, SIGNAL = 0.61; EXPRESSED IN FETAL LIVER, SIGNAL = 0.46
tgactagatgtgggggaagcatagatcactctgctaagcagcatgctagactctgttttctgtttccatttcactccttaagtctttctgctccccagggatttttccgaaggggcaataaaataaaatgggtgaaacaaagccataagccagttaagtctgaaagacatgtcatctcatctaaaaggaagaaacggaccatttccatgcctagggctgacagcaacgcctgagctggcaatagtgctattccatttgatttatagaataatggggtgacaaatgatgacaaaaataaacttttactgcactgaactgctcctttatttatgaaatttggccaagtagtgaaatcttttatctgcaagttgtaacatggagtgggagcaagcgattatggtgtggtaatagtaatccagcgatggaggccgagtcggttggaaatggattgaggtaaaataactcccgcaccatgataaatgtgaacagcgctttgctgacagatgatc

SEQ ID NO: 10849 - DNA, 531 bp, Homo sapiens
  MAP TO AC016629.5; EXPRESSED IN PLACENTA, SIGNAL = 2.1; EXPRESSED IN HEART, SIGNAL = 1.8; EXPRESSED IN LUNG, SIGNAL = 2.8; EXPRESSED IN FETAL LIVER, SIGNAL = 1.9; SWISSPROT HIT: P35824, EVALUE 1.30e+00; EST_HUMAN HIT: BI545013.1, EVALUE 0.00e+00; NT HIT: gi14755652, EVALUE 0.00e+00; EST_HUMAN HIT: BI545013.1, EVALUE 0.00e+00
cttaaagccagcgaatcaccctcgaccggccccgaagctctcgggctaggcgccctcgccctgctcctgcttgcggttctcgaacgggctgtgggctttctcccgaatgagcaccacactgaggggcatgttgcgctggctctggtcctccatccgcatgctcagcagctgctccatgttctccatcaccaggctgcggccacgcgtcaacttggtggccgcctgcagtgtggcctcctgggaactcgcccagatcttttccttgttgtcacgaatggtggccaaggtggagttggacagccccagcgccttcccgattctactgagcttctctccggcttcaaagcgccacagcgcctcgagcttcacctgtaggttgatggccttgcgatcctaccagatgcctcagtaatcgcgagcgttcagcggcctcttcaggcccgacacggtggagcgggagactgtccgcgccgcttcctccagacaccgcaagggggtgcttgtgttcctgctactgagcccgctgatctc

SEQ ID NO: 10850 - DNA, 538 bp, Homo sapiens
  MAP TO AC004792.1; EXPRESSED IN PLACENTA, SIGNAL = 5.1; EXPRESSED IN HEART, SIGNAL = 1.7; EXPRESSED IN FETAL LIVER, SIGNAL = 5.5; EST_HUMAN HIT: BE420422.1, EVALUE 1.00e-121; SWISSPROT HIT: O14901, EVALUE 6.70e-02; EST_HUMAN HIT: BE420422.1, EVALUE 1.00e-121; NT HIT: AL163246.2, EVALUE 7.00e-99
ggagaaattcaagcctgctgcagaaatgtgcataagtaaggaggagccaaattttaatcctcaagacaatggggaaaatgtctccagggcatatcagaggtcttcacagcagcccctcccatcacaggcctggaggcataggaagaaaaaatggttttgggggctgcgcccagggtccccgtgctgtgtgcagcctaggcacttggtgtcctgcatcccagctgctctagccatgactaaaaagggccaagacacagcttggcccatggcttcagagagtacaagtcccaagccttggcagcttccacgtagtgttgagcctgcgggtgcacagaagtcaagaattgaggtttgggaacctccacctagatttcagaggatgtacggaaacacctgaatgtccaggcagaagtctgctgcaggggtagggctctcatggagaacctctgctagggcagtgcagatgggaaatgtggggtcagagcccccaaacagagtccctactggggcactgcctagtggagctgtgagaagaggg

SEQ ID NO: 10851 - DNA, 507 bp, Homo sapiens
  MAP TO AC011904.3; EXPRESSED IN LUNG, SIGNAL = 1.3; EXPRESSED IN FETAL LIVER, SIGNAL = 1.1; EXPRESSED IN PLACENTA, SIGNAL = 1.4; SWISSPROT HIT: P12577, EVALUE 2.10e+00; EST_HUMAN HIT: AI807476.1, EVALUE 0.00e+00; NT HIT: gi13937343, EVALUE 0.00e+00
atctatggtgattggcgtccctgaaagagaggagtggggagggagatggaataggaaaaatacttgaagacataatggccaaagattttctgaatataataaaaactaagtccacagatccaagatgctcaacaaaccctgagtatgagaaatatgaagaaaaatatgccaaggctcatcataacttgctggaaaccagtgttaaaaagaaaatcttaaatgcaaccaggggagaggatagttacttgcagtggaacaaagacgaagttgacattacacttctcattggaaacaatgccagtaagcaaactctttaaagtcctgaaagaaaaaaactgttaacctagagttctagaactggcaaaaaatatccttcaaaaacaaaggtgaaataaataagtttggaggtaaactaaagcttaaaagaaagagtttacagcagactgacacttcaagaaaggaagtcttaaaggaagtccttcagacagaaggaaaatgccagatgga

SEQ ID NO: 10852 - DNA, 520 bp, Homo sapiens
  MAP TO AF274858.1; EXPRESSED IN FETAL LIVER, SIGNAL =   7; EXPRESSED IN LUNG, SIGNAL = 4.9; NT HIT: gi16160081, EVALUE 0.00e+00; EST_HUMAN HIT: AL514938.1, EVALUE 0.00e+00
gattttgttcaccgctgctctgctcatgttgctactgcagttccgaggcagcaggaagagatgcggcccctggatgtcgccgagctgtcagaaccggaggaagtggaggtgctggagctggaggggggttttgagcagtttctgctcccggtcatccatgagatgccagaggacatcgcgtcgctgacaagcactggcgggcgtacctgtggaagcggagcacgctgtgggagatggacaatatgctcttccagatcaaaacccaggtggaggcttcggaggagcatcctcaaccgcctccacaacccgggcgacgcagtggagggcagggtgaccaagaggtgccagaaggccgaggagaaggccaaggaaatggtgaagatggcagagatgctggtggagctggcccagaggatagagacgaacgagtcgagagcacggtcggtggtttacagccaatggattctggtaaactggtggagattggctgacacccagaagaagctgaaaccagacagcc

SEQ ID NO: 10853 - DNA, 573 bp, Homo sapiens
  MAP TO AC004197.1; EXPRESSED IN HELA, SIGNAL = 1.8; EXPRESSED IN FETAL LIVER, SIGNAL = 2.1; EXPRESSED IN PLACENTA, SIGNAL = 2.6; EXPRESSED IN HEART, SIGNAL = 1.5; NT HIT: gi14771631, EVALUE 5.50e-01; EST_HUMAN HIT: BI870191.1, EVALUE 8.10e-01; SWISSPROT HIT: P04929, EVALUE 5.00e-03
ttttccaaagcactgctgacatgattcccccctgccttcttgccaggctcccctatgaacccaccctgggtactcaccagacaaaaactcagtcctactgacaatccaacagcagccacaactgcagccagggaaatgaggatgatagcccagggctgtaaatatccacttggtttgatcacgtttgtgggtgtgtggctcatgctaactgtgtttgtgcccatggacaccgggcctgtttcctggaaggtgctgctggttggctcacgggtggatcctgtggtggtcctgacgccgtgggctgaggtggtagatgatgctcccatagtggatgtacccaggccagaggtgtttaagactattcctggcacagtatggctggcagcagaggccgtgaagtccattccaggggccatggtgacagagctggaggcagtgagtctggttccagtggttctggtgcctatgaaacaggtcacacaagatgatgcatttgtagcagagatgattaaaggggaatgggggtgcttagaccagaggagggtgaatctaacaaacctatggtggaggtgg

SEQ ID NO: 10854 - DNA, 582 bp, Homo sapiens
  MAP TO AC004206.1; EXPRESSED IN FETAL LIVER, SIGNAL = 1.3; EXPRESSED IN PLACENTA, SIGNAL = 1.5; EST_HUMAN HIT: BG704757.1, EVALUE 0.00e+00; SWISSPROT HIT: P42558, EVALUE 2.00e-92; NT HIT: gi13645239, EVALUE 0.00e+00
agggtctccaatgagcttcctagcaagccagaggaagggcttttcaaagttatagttacttttggcagaaatgtcgtagtactgaagattcttctttcggtggaagacaatggatttcgccttcactttcctgtccttaatatccactttgttgccactcaacacagtgggggtgttttcacacactcataccagatctctatgccagttaggcacattcttgtaagtaactctcgatgttacatcaaacactatgatggtactctgggcttggatataatagccatctctcagtccactgaatttctccaggccggctgtgtcccatacattgaacttaacaggtcctctgttggtatggaacactaggggatgaacctcaacacccaaggtggctacatacttcttctcaaattcaccagtcaaatgatgtttcacgaaagtcgtttttccagtaccaccatcaccaaccaatacaagtttgaactggacctggggctgtccctgcgcagccattgcggtgttccttccagaagcgtctccatgcccgtctgactcaggaaggaaggattattattgctg

SEQ ID NO: 10855 - DNA, 539 bp, Homo sapiens
  MAP TO AC004211.1; EXPRESSED IN PLACENTA, SIGNAL = 1.8; EXPRESSED IN HEART, SIGNAL = 1.6; EXPRESSED IN HELA, SIGNAL = 2.1; EXPRESSED IN FETAL LIVER, SIGNAL = 2.1; NT HIT: U48705.1, EVALUE 0.00e+00; SWISSPROT HIT: Q08345, EVALUE 3.00e-42; EST_HUMAN HIT: AL539517.1, EVALUE 0.00e+00
gtcccttgggctaggagaacctcatattatagatgagattctgtaaaatgcaacccagagaaagtgtgtgactgatggagaccagggctgtgagtggcggccagtgttctcccacctgccctgctccaacctggctgtcctcgggctgctcaccatgaggatgcactcccaggccatccagcggatgggcagcactgcccggccctgcacacggtaatagtccccagcatagaggttccggctcatgccaaagtctgcgattttgatggtgaaattttccccaactaggcagttccgcgtggccaggtcccgatgtacaaagttgagtgtggccagatagcgcatgccggaggcgatctgggctgccacatgcagcagcattgggtagctgagaagggaaccgacagaaggtcactgggggcagcttcgcagattcccatccaggagaggagagagagcccactccccgggcccggtcactctggctccccatgtggaggtggaatgcccacgtgaggccaagggtcacttccctctca

SEQ ID NO: 10856 - DNA, 531 bp, Homo sapiens
  MAP TO AC008886.4; EXPRESSED IN LUNG, SIGNAL = 0.54; EXPRESSED IN HELA, SIGNAL = 0.62; EXPRESSED IN HEART, SIGNAL = 1.3; EXPRESSED IN FETAL LIVER, SIGNAL = 0.6; EST_HUMAN HIT: AA186411.1, EVALUE 7.40e-01; NT HIT: AF135139.1, EVALUE 7.90e+00
tgcaggctattcaagcacagcttgcatgtctgcttgtgaaagatagcataggtaggattcaaaatcaggcaggtggtgacttgctgatcttaagttctgcttcagcgctggcatgtatgatctacttttctaagttcccctgaaattccttccctagctttggccaaagaagggctccttcacagcagcagcagcagcagcagtcttggctgttgccacagccacagggggactgtggaggagcggccctcggcaatgtatggcttggtgtccttactcagcatgtgttctcttgtccatgccatttttgtagcacacaggacacctccctgcattaaaggcaactctgggcttaaaatcaacaataaagtgggaatgaagagtggatggatgtgaaaatctggaccaatatccttagttactctagaatcaaccagaagacaaaggaatgctgtccagacactgctccttccgagtatcacggagagcagtaacagagtctgcccgtcaggccagattccaacagtaggc

SEQ ID NO: 10857 - DNA, 511 bp, Homo sapiens
  MAP TO AC004517.1; EXPRESSED IN HELA, SIGNAL = 2.2; EXPRESSED IN FETAL LIVER, SIGNAL = 3.5; NT HIT: gi16163484, EVALUE 7.60e+00; SWISSPROT HIT: P13468, EVALUE 1.60e+00; EST_HUMAN HIT: H14014.1, EVALUE 1.00e-82
aagggagggaggagtctcagacgcgcccagatcttgaacccatcacaaggtggttggtagggttgttgcccgacacaggaagacttagcagaaaaccatgaaccccaccttggccatgttgttgctgaggtgtctggtctgggctggccaggctccagatggaaccgtggaccttgtgggcaaagagtggcctgtgacttccaggcctgggctgtgtgcgttgcagggagatgggcaggggtctctggctgcgtccttgatccccatcctttgtgcaaacaggtggggtggggcagggggaacccatgttttccccatcccgggtccttttgttccagttggaagccacgaccaattcgaaaagtccagatgtggagttggacgcaacccttggaccgtgcggtctggggaggccagtggcccgtcatccaacaggtcaggcctccatgtggcctcgctggctgtggcccggctggggctggggggcagaacggctttgatttcgagtctc

SEQ ID NO: 10858 - DNA, 555 bp, Homo sapiens
  MAP TO AC004530.1; EXPRESSED IN FETAL LIVER, SIGNAL =   4; SWISSPROT HIT: O15260, EVALUE 8.00e-35; EST_HUMAN HIT: BF569936.1, EVALUE 0.00e+00; NT HIT: AF078866.1, EVALUE 0.00e+00
ctttaccaagggaggggaagggaagaggatacataaaagctggcagttttgttgaatccaccccgaaccagtccttgacggccacgggtcttagccaggcaggtagggatctgtgactgttaccactccttcttcttctcatccatggagacacccccagggcccagggccaccaccaggagcaagcccccaatcaccgacatggtctggaagaagtcgtatttcaggaagtcatgcatgggcttgtagactggaatggtccagaaggcgttgaaatatacgttgatggcaaagagccacacaacaagagtcaaagcagccagcttggttttaaaaccaatggccactaaaatcatcagagctgtgcccacgatgttctggacaatctgcataggttgaaacgtaagaaattcaaaataaatgtgaggaaaagagatgctttataaacaaaagttccagctgctgcacgtcatgaagtctctatccatcaggctgatgtagctactgctgagacggctgctggtgcaagtagggagataaaagccaaagggaggc

SEQ ID NO: 10859 - DNA, 505 bp, Homo sapiens
  MAP TO AF241734.1; EXPRESSED IN FETAL LIVER, SIGNAL = 1.3; EXPRESSED IN PLACENTA, SIGNAL = 1.7; EXPRESSED IN HEART, SIGNAL = 2.3; SWISSPROT HIT: Q50925, EVALUE 3.10e-01; EST_HUMAN HIT: AL048996.1, EVALUE 5.00e-11; NT HIT: AF289221.1, EVALUE 5.00e-07
tgagcccaggagtttgaatccagcctgggcaacatagcaaacctcgtcaagaaacaaagaaaaaaaagaaggaaggagggagggagagaggaaagaagggaggcagggagggaggaagggaggcaatgaggaaggaaaagggaaggaaggaaagaaggaaggaaggaaggaaggaaggaaggaaggaaggaaggaaggaaggaaggaaagtatacattctgggcctgaactgaccatgtggctttgcctgctccaacaggacattctctgaaggaggatggggccagcttcatgttccccagctcaggaaccttcagcagtgatgagtcgagggtccctctgcctcccttttgcagtctaggcatgtgggaaggtgtcgagagccacctgctgctctcaacacagccaaagctggccatgaccaaaccctggaaaggggtgtggaagctgcttcagattcaccaaagcacctaggctagggtgctgaggaccaggttggcctatt

SEQ ID NO: 10860 - DNA, 529 bp, Homo sapiens
  MAP TO AB000878.1; EXPRESSED IN FETAL LIVER, SIGNAL = 1.3; EXPRESSED IN HELA, SIGNAL = 0.85; EST_HUMAN HIT: BI521312.1, EVALUE 0.00e+00; SWISSPROT HIT: P15979, EVALUE 5.00e-04; NT HIT: AB003604.1, EVALUE 0.00e+00
tgacttctccattcccgaacccatcacctttccacccaagtgaggaactcagcccagcggcgacccctccctggccctcctccatgcctccctgtgtgggctgagttccggctcaccaccctgctgagcctccctgaccctattcctcatccccacccccagccagatccagcgggaagagacaggtccctgctctctgtctccaactttcctggagaaggcctcccattactcttgcccctgccgactctcacctcctttctggtccttgatatgagtcagggtcctcctgaggtcttgcccattctctgtcaagtcctcggtctctgtgtcccaggtctcagctcccaggacatcttctgcccactgtccctggggctttgccctgcgtttctgcctgtcatagcgcaggaagggctgaccatccagatgtccctcagcgagaaaccctgactgcacagatccatcctgggacagcaccatgaggttgtaacgaagactgtggggctctggggaagaggaaatcaca

SEQ ID NO: 10861 - DNA, 567 bp, Homo sapiens
  MAP TO AL109910.27; EXPRESSED IN LUNG, SIGNAL = 0.46; EXPRESSED IN PLACENTA, SIGNAL = 0.67; EXPRESSED IN HELA, SIGNAL = 0.56; EXPRESSED IN FETAL LIVER, SIGNAL = 0.81; SWISSPROT HIT: Q9WVS8, EVALUE 2.10e-01; NT HIT: K00824.1, EVALUE 1.40e-01
ctgtgttgtccgcttcctgggacggtcccctgcgtccagcacactcacggccagggccgcacgcaggcctgtgttgtccgcttcctgggacggtcccctgcgtccagcacactcacggccagggccgcacgcagggctgtgttgtccgcttcctgggacggtcccctgcgtccagcacactcacggccagggccgcacgcagggctgtgttgtccgcttcctgggacggtcccctgcgtccagcacactcaaggccagggccgcacgcaggcctgtgttgtctgcttcctgggacggtcctgtctgggaaacccggacagtcgttcctgtctcttcagtcttggttttctgttagtatgacaccaatctcctacgttgagttgcctcctgtaattccctgcaggatctgtaatcacatggcgtctggtttgggtgccggccacacgtccgctcacacgtgctgtctccgactccccccagccccatgtgcagctccctcatggcatctttttgggagggccattttccacgtcatttataccatctgggtgctttgaacccaaaaag

SEQ ID NO: 10862 - DNA, 552 bp, Homo sapiens
  MAP TO AC016027.15; EXPRESSED IN FETAL LIVER, SIGNAL = 0.43; SWISSPROT HIT: P39188, EVALUE 1.50e-01; NT HIT: gi8923624, EVALUE 1.00e-118; EST_HUMAN HIT: BG910944.1, EVALUE 1.00e-118
catttgagcctgctctttccaaggctgcttcagaagggcctggcccagtggccctgaccctcagcagcaggcccgactcattggagtgatgatggtgggggaggagaacctgcacctgcaggctgaggatcgcatgagccccagagattgaggctgcagtgagctgaacacagactgcactgtactctagcctaggtgacagagcgagaccctgtctctaaaaaaaacaaaacaaaaccaactatgtgtaattggtagtggagtctcccagggtgggagatggcagagtgacaggtgagaggggtgggacgttcactgtagtctccctctgccctgcagcttccccttcctccctgcacttcctctacaagctggcccagctcttccgctggatccggaaggctgcattttctcgcctctaccagctccgcatccgtgactgagggtccctgcgcaccacagcctctctgctcctcacgtccgtggccacagaagcagagcgacagagcgacacatccacaggcgcccctggggaaatgggaccagcctaat

SEQ ID NO: 10863 - DNA, 500 bp, Homo sapiens
  MAP TO AC025457.3; EXPRESSED IN PLACENTA, SIGNAL = 1.4; EXPRESSED IN LUNG, SIGNAL = 1.1; EXPRESSED IN HELA, SIGNAL = 2.3; EXPRESSED IN FETAL LIVER, SIGNAL = 1.7; EST_HUMAN HIT: BE439390.1, EVALUE 0.00e+00; SWISSPROT HIT: P03888, EVALUE 4.10e-01; NT HIT: gi11968034, EVALUE 0.00e+00
ttcctgagcaagaggattgcagaattataataactaaataatataaacacctaactgtatttttaaaaattaactttaatgttggctactcttaattatcatcatctgagccatttgcttctctaagactgccgtgtacctcagacatcaatacgaactccatgttttgaagacatcatttgtctggttcctgttaaatacataacgaatgaacagatgtgaggtaaagatgatgtgattattacataaagccagaatggcaaaggagaagtttttccaaatgggcatatccacaaaccatgacgaatcccatctcggatatgatgtgaagtccaggatataaataacatccagggaagaaagcaccatgagtctttgagcttgaaaaggtgcatagtaaatttcagggtcagaaccacaacgggaatcacagtagaacagtgaaggaaaggtcttcgcgggagagtcaaagcagcctgagggagcaaagtaatagcgag

SEQ ID NO: 10864 - DNA, 568 bp, Homo sapiens
  MAP TO AC000034.2; EXPRESSED IN HELA, SIGNAL = 0.78; EXPRESSED IN FETAL LIVER, SIGNAL = 1.6; EST_HUMAN HIT: R00245.1, EVALUE 2.00e-14; SWISSPROT HIT: Q04749, EVALUE 1.10e+00; NT HIT: AL163284.2, EVALUE 2.00e-09
tttgatggctcatggttctgcaggctgtacaggaagcagagcggcatcagcttctggggagccctcagggaacttccaattgtggcagaaggaaaaggggaagcgggcttgtcttacgtggctggagcaggaggagggggtaagggaaggtgtcacacacttttaaacagccagatctcgtgagaactcactcgctgtcgtgagaacagcaccgagaggatggtgctaaaccattcatgcaaaacccagccccaggatccaatccctccctccaggccccactcccaatactggggattccaattaattcaacatgaggtttgatggggacgcagagctaaaccatatcaccaaggacaatggtctcaaaacaattacacaaccctcattttttccttgaaaaacctttactgtcctctgcctccctgcgtatgcacctagtttcaccgtggcacacgtattccccctgcaaggcctgttcctgaatggacaccttttcttttagagagcctctctctgtctgttatttaggttgacagcctcagcaccactcacaactcccccatct

SEQ ID NO: 10865 - DNA, 557 bp, Homo sapiens
  MAP TO AL121886.22; EXPRESSED IN LUNG, SIGNAL = 1.5; EXPRESSED IN FETAL LIVER, SIGNAL = 3.2; SWISSPROT HIT: P10244, EVALUE 3.00e-75; NT HIT: gi14770912, EVALUE 0.00e+00; EST_HUMAN HIT: BF965730.1, EVALUE 0.00e+00
gggctgtgggatcatacttgacacttaaatatttcccgtaatgaatgagtcctcttgtattaagagcatagtaattgcaattcctaacctccctccctggacaggaccctgatgcttggtgtgacctgagtaaatttgacctccctgaggaaccatctgcagaggacagtatcaacaacagcctagtgcagctgcaagcgtcacatcagcagcaagtcctgccaccccgccagccttccgccctggtgcccagtgtgaccgagtaccgcctggatggccacaccatctcagacctgagccggagcagccggggcgagctgatccccatctcccccagcactgaagtcgggggctctggcattggcacaccgccctctgtgctcaagcggcagaggaagaggcgtgtggctctgtcccctgtcactgagaatagcaccagtctgtccttcctggattcctgtaacagcctcacgcccaagagcacacctgttaagaccctgcccttctcgccctcccaggtgcgtggaccccactctggctgcttattgggtcggtac

SEQ ID NO: 10866 - DNA, 515 bp, Homo sapiens
  MAP TO AC020945.6; EXPRESSED IN PLACENTA, SIGNAL = 0.69; EXPRESSED IN FETAL LIVER, SIGNAL = 0.71; EST_HUMAN HIT: M78198.1, EVALUE 1.00e-123; SWISSPROT HIT: P23677, EVALUE 6.00e-20; NT HIT: gi14787019, EVALUE 1.00e-128
ccaattaacctgatggtggctgagcagctcagctctgtgccagcccctgcaggaggcagatcatgttgtccaggccccagaggtagccgtcctcacggttgccctcagcccagggcagcctgtggctgagcgtctggtggtcgggcaaggccaccgtcttgccgaagtctatcatccagaccttggccaggccggtgtggtcgtgcacgaagaggagggagctgcctaccacctgccggggtagagacgggaggttaagggaggagcaggcactggccaaggtcccttcctgacaggcagcagagcagggtgattgacagcatgaaccctggagcctggctgcctgattcatatcctggctgtgccacctcctgtctgtgcagccttaggcaggtgtcttaacctctctgtggttctgcgtcctcatatacaaagtgagagtaatacagttagtctccccagtccgtggtttcattttctttggttttagttactctcagtcaagtgcgatccaa

SEQ ID NO: 10867 - DNA, 566 bp, Homo sapiens
  MAP TO AL078642.12; EXPRESSED IN LUNG, SIGNAL = 2.9; EXPRESSED IN FETAL LIVER, SIGNAL =   3; SWISSPROT HIT: Q9JL04, EVALUE 9.40e-02; NT HIT: U63721.1, EVALUE 8.40e+00; EST_HUMAN HIT: BE904402.1, EVALUE 1.30e-02
aggtgaaggcattcgatttgaggcagctgtggtgccatgagaaagccactggagatggagaggaggtgctgagatcccgtgctcagatcctgcctctgccaccctcagaccgtccagctacttaatcccgccgtagcctcagtttccctaccagtaaaatcaaggaattggtccaggtggttgccaaggtctggaaatctttgttctgtgtgtagttgggagtcccagaaggttttgggcagggattggaatgatcagagctgtgctttggggaggttaatcgggcttctggtgctttgtgattatcctgctgtagggctggaagtgacgtgggggtgacactttgaaattcagcagcaggtgaattagctgtgctctgagctgtggctgtttggaactccctcatgccgtttctgggtctggtggcagcttctgctcccctgccgctgcctcctcctgcctgctcgttccctggcaccagcgctggcttctctgcaccccctgtgggcacagcaggcacaaggataatgaggctgtttgggtgggcttgtggtgctgaggagaca

SEQ ID NO: 10868 - DNA, 550 bp, Homo sapiens
  MAP TO AL096791.12; EXPRESSED IN FETAL LIVER, SIGNAL = 1.6; EXPRESSED IN PLACENTA, SIGNAL = 1.5; EST_HUMAN HIT: BI552553.1, EVALUE 0.00e+00; SWISSPROT HIT: P17053, EVALUE 4.60e-01; NT HIT: gi14150083, EVALUE 0.00e+00
aaaacacatttcggcctctggtggcccaaaccaagtctgagtgggcacagaaaggccaacatcttggctaggagccaccactcaagtgtaggagagtaagttcaggtcataacagccatctacatcaaagtggcctatcctcgcggaggtgtgactggcccggatcatctctgtcagtgcccacatctgctgcacctcagaggataccctgctggggtctgggagaccctcatggaggagtgcaggttgctcacagggcactgggtgggagagccacttggggaagatcatggaggggctctttggtccctgctgatagatctgcagctcctccactgtgaaagacagccacagtggtgatggctgctgcagaatcaggtgtagctccgatattctggccatgtcacacagtatctgttgcttgaacagcgacacatactcctgggctccctcctcactgtgtgggtcgggcatcagacagtagtcccacaggcaggtcacccacttggccggtgtgtgtgctgaggtgtgctgacagacaggatgctca

SEQ ID NO: 10869 - DNA, 568 bp, Homo sapiens
  MAP TO AC008537.4; EXPRESSED IN PLACENTA, SIGNAL = 0.81; EXPRESSED IN HEART, SIGNAL = 1.1; EXPRESSED IN HELA, SIGNAL = 0.77; EXPRESSED IN FETAL LIVER, SIGNAL = 0.99; NT HIT: gi14277708, EVALUE 0.00e+00; SWISSPROT HIT: P20853, EVALUE 3.00e-18; EST_HUMAN HIT: AV650274.1, EVALUE 8.00e-75
caagtgaatggtgaacacggggccatagcactcactgaactgatggaggcgagtgggagtggttagagggagcagcccccactctgaatggggcccagcaccgagatgtcaagtactgggatccttcacccccaggttctcacagtcagggagctggacatcccaagatcctgtctttcctggctaggacccggatgctgaaactccaaaactccctttcctaagactctggtccacactggtcaatcccctgccacaaagccccagccaactaggcagcccccaccctgtgccacccatcttcctgccttgggacaccttcatgatggagtcacatatgtgctctgtgttcagctggaggtagtttccaatgaagggcagtggggtgggtcccggaggcagcttccccctgctcttcctctgctgccagacagacatcaagaccatcacagtcaggcaggccagcaaggccaccagaagcagccctgaggccagcatggtggtagtgagatgacagatggtgatgggtggggtggtttgcctttatactgcctgaaaaagagggatg

SEQ ID NO: 10870 - DNA, 570 bp, Homo sapiens
  MAP TO AF196971.1; EXPRESSED IN HEART, SIGNAL = 2.5; EXPRESSED IN FETAL LIVER, SIGNAL = 3.7; EXPRESSED IN HELA, SIGNAL = 2.8; SWISSPROT HIT: P08359, EVALUE 4.00e-04; EST_HUMAN HIT: BI223868.1, EVALUE 0.00e+00; NT HIT: AJ271736.1, EVALUE 0.00e+00
aagaccagcagagccttgactattctggcccggcaagaaacccaaatgagaaatgctatttatcaaaatagattggttctcgactacttgctagcagctgaaggaggggtctgtgggaaatttaaccttactaattgctgtctacacatagatgatcaagggcgagtagttgaagacatagttagaaatatgacaaaattggcacatgtgcccgtgcaaatgtggcatggatttgatcctggggccatgtttggaaaatggttcccagcactggaaagatttaaaactcttataatgggagttataatagtaatagaaacctgcttactgctcccttgtttactatctgtacttcttcaaacgataaggagcttcatcgctaccttagttcaccaaaatgcttcagcacaggtatgctatatgaatcactatcgatctatcttgcaagaaggcatgggtagtgagaatgaaagtgagaactcccactattgagtgagattctcaaagcggggaaataagggaggagactacccctcattttgtcttattcccaatttctgcctccaaaga

SEQ ID NO: 10871 - DNA, 521 bp, Homo sapiens
  MAP TO AF176815.1; EXPRESSED IN FETAL LIVER, SIGNAL = 2.4; EXPRESSED IN PLACENTA, SIGNAL = 1.7; EXPRESSED IN HEART, SIGNAL = 1.9; SWISSPROT HIT: O15527, EVALUE 2.00e-46; EST_HUMAN HIT: BI256306.1, EVALUE 0.00e+00; NT HIT: AF176815.1, EVALUE 0.00e+00
aattgagtgccagggttgtcatgtgccttgggctcaggtggagggagcaaagtcctgcacactggagtggtgtactagcggatcaagtatggacactgactcagactgaggagcagctccactgcactgtgtaccgaggagacaagagccaggctagcaggcccacaccagacgagctggaggccgtgcgcaagtacttccagctagatgttaccctggctcaactgtatcaccactggggttccgtggactcccacttccaagaggtggctcagaaattccaaggtgagtacaggacctgggctggggttagggttcttggacataagtcacttctctatgactcagttttgccacctgtaaaatggggattatatctacttcataggcttttatgaggatttaaggaactaatacatgtaaagtgcttagaataatgccaggcacatagtaagtattattaccattattattatcctgctaatcaccatagtgaagtgacaaggattttgagcccattc

SEQ ID NO: 10872 - DNA, 586 bp, Homo sapiens
  MAP TO AL109981.1; EXPRESSED IN FETAL LIVER, SIGNAL = 0.95; EXPRESSED IN PLACENTA, SIGNAL = 0.85; EXPRESSED IN HEART, SIGNAL = 7.2; SWISSPROT HIT: P81274, EVALUE 3.00e-05; EST_HUMAN HIT: AI221148.1, EVALUE 5.30e-02; NT HIT: M95828.1, EVALUE 8.70e+00
catgcaagagtgaggagaaggaaattactggactggggtttgtgatgctagtcatatgagataagtggtgctagaataaaggttgaagagtttatacttgaaataagccacaaaagatatgataaacatttatttctagagcgtattagaaaagattgtttttgtatcatcctacattctcctgttatgttgctgttattgttgtttattttcagactccctcgagcccacttatcagcagcttcagaaaatgaaactggacaagagtccctttgtggtcgtgtctgtggttgggcaggaactcctgacagctggccatcatggggcctctgtggttgtcttagaagccgcactgaagattggcacctgcagcctcaaactgagaggttctgttttctctgccctgagcagtgcttactggtctcttggaaatacagagaagagcaccggatatatgcagcaggacttggatgtagccaagaccttaggtagagtgatgcttctctatttcagtgcagaaagggaacaaagaaagctgagtaacatgacatgaatgagaataatatgcaatgaaaagtgatcgcct

SEQ ID NO: 10873 - DNA, 597 bp, Homo sapiens
  MAP TO AL121902.13; EXPRESSED IN FETAL LIVER, SIGNAL = 0.7; EXPRESSED IN HELA, SIGNAL = 0.68; SWISSPROT HIT: P36081, EVALUE 5.80e+00; EST_HUMAN HIT: AI459577.1, EVALUE 9.00e-10; NT HIT: AF207550.1, EVALUE 6.00e-07
taggtggagcataactgcccctccataagcatgagttgtgcatagtgacttccctccaaaaaccacagtataaaggaagggtagggggttagaatggtaacttaacagtgaagaaacctgacaaaacacaacttcagccaggtgctcaaggtcagtatcacagtgataaatcatgctgatggcatgtgcctttgatatgatgtgatgaaaatgacactttacctctgtggtctttttccccaaacccataacttcagtctaatcacaaaaaacatcagtcaaacccaattcagggatattttatgaaatacctgaccattaccgctgacaactctcaaggcaaccaaaaacaagaaaaatctgagaaacagtcacagccaggaggagcctatggagacatgatgactcagtgtaatgtgggaaccaggatgggagcctggaacagaaaaaaaatcaggtaaaaactaagaacatttgaataaactataaacttgaatgcacagtgatgcatcaatgttgattcatcaaaggtaacaaatacaacattctaccgtcatgtacgatgttaacaaatggggaaactgggtgaggggtaca

SEQ ID NO: 10874 - DNA, 521 bp, Homo sapiens
  MAP TO AL109827.8; EXPRESSED IN LUNG, SIGNAL = 2.5; EXPRESSED IN FETAL LIVER, SIGNAL =   2; EXPRESSED IN PLACENTA, SIGNAL = 2.4; SWISSPROT HIT: Q99829, EVALUE 3.00e-39; EST_HUMAN HIT: AI885518.1, EVALUE 0.00e+00; NT HIT: AF314092.1, EVALUE 0.00e+00
tgggccctgaagtatgagaccagttgtgtgggcacttctgcgagcacggtctgtgccaatgcctcccgaggggcctgccaagaaaagggaaaagtcagtggtggcccagaacagctgcccaaagtctgtatttcatgctcaagaacccaaccatatcccaggcttagaggaaaaggtgagcatcccttgggcctcaaccctactcacatcagggaaaggtgaaagggtaaactcccagatcaaatttgcacctactcacattctggaaccggcggtagggtacaaactgcacaatgtcgcgggcagcagcctgcccagaacgtgtatgcaggggtccaccatcagcgtccagctgctccatggcctcaaagtcagcaccacccacacccacaatgatcactgacatgggcaggttcgaggcacgcaccacagcctcacgtgtggcttccacatccgtcacagcaccatcagtcagcagcaacagcatgaagtattgctggggacaagcccattcatgtcct

SEQ ID NO: 10875 - DNA, 550 bp, Homo sapiens
  MAP TO AC004798.1; EXPRESSED IN PLACENTA, SIGNAL = 2.1; EXPRESSED IN HEART, SIGNAL = 1.4; EXPRESSED IN FETAL LIVER, SIGNAL = 2.2; SWISSPROT HIT: O60885, EVALUE 2.00e-41; EST_HUMAN HIT: AW268959.1, EVALUE 0.00e+00; NT HIT: gi13633366, EVALUE 0.00e+00
gaaggttctgatgtggagggacagcctgcccaccttgtcccttccctcaggcacatcccgctaaccttgattgtgctcatgtccatggggtgcttgatgatgtcacagtagtcgtgtaggcccagtgcctccacgtccacaggcttgtagaagggccaggcgtaggcggcgtgcttcttggcaaacatctccttgaggatgccgctgcagcacttgagctgctccgagaccttgctgctcttctctggtgctgggtgctgctgagagtcgggcacgtccttctttggaggtttcacaggccggctgctctcccgccgctggcccagcttggtggtcttgggctccgggggcagcgagggtggctcgtgaatggggtcaatggtggtgggggtggtggtgtctgctttcctcttcactcccttctttgtctgccaagaacacggacgccaacaggcacagtcagaagtggcagccggcacagctgccctcagggtcacccccaaagccaggccctgtcttggggcccatcgctcacacagaatggacccaa

SEQ ID NO: 10876 - DNA, 576 bp, Homo sapiens
  MAP TO AC011604.10; EXPRESSED IN PLACENTA, SIGNAL =   3; EXPRESSED IN HEART, SIGNAL = 3.3; EXPRESSED IN FETAL LIVER, SIGNAL = 5.9; SWISSPROT HIT: P26808, EVALUE 3.20e-01; EST_HUMAN HIT: BF815912.1, EVALUE 0.00e+00; NT HIT: AL163213.2, EVALUE 0.00e+00
aaatgactgcagtggccttctcagaccctataggaaaggcctctacctatctagtgaaagtgtctacttagacaaagaggtattttagtttttgggactcggggtatgttgagtaaagctaatttgccagtcctgggtgggggcaaatcctcgagcttgttgtgtagggaaggggcctgaataatccttgaggagtagcagatggaatagcagatggaacactaagaagttatttccttgaggatagatttctacgatggaaaggaaatgaaaggttctaagaggcgggctagtggcttgtactatagcatagcctgcctttgctggtgtgtggtgattaggcctggtggaactgccatcaataaatcaagcgtgatcagggtgagaaacagggacgaaggaaatgtggggaaatgggatgaacatcaggtggatcagagagatgcagtcatgagggtcaggtgtggtgtctggaataatgtgggaggctggattgaagtccgggccaggaacaatggtaattgtgggacttaacaaagagtgagtacagctgaaggagccagggagcagaaagta

SEQ ID NO: 10877 - DNA, 542 bp, Homo sapiens
  MAP TO AC026722.3; EXPRESSED IN PLACENTA, SIGNAL = 1.1; EXPRESSED IN LUNG, SIGNAL = 1.1; EXPRESSED IN FETAL LIVER, SIGNAL = 1.5; SWISSPROT HIT: P07572, EVALUE 9.00e-15; NT HIT: AL163209.2, EVALUE 0.00e+00; EST_HUMAN HIT: BG008447.1, EVALUE 4.00e-64
accacatccccattcaactctctcatttggcctgtgcagaagacagatggatcttggaaaatgacagcagattatcgtaagcttaaccaagtggtgactccagttgcagttgctgtagatgtggtttcattctttgagcaaataaacacatctcctggtacctggtatgtagccattgacttggcaaatgccttattttccattcttaaccataaggcccaccagaagcaatttgtcttcagctggaaaggccagcaatatagctttactgtcctacctcatgggtatatcaactctccggctttgtgtcataatcttatttggagacaccttgatcacttttcgctcccacaagatatcacactggtccattacattgatgacattttgctgattggatccagtgagcaacaagtagcaaacacactggacttagtggtgagacatttgcgtgccagaggatgggaaataaatctgactaaaattcagggaacttttacctcggtaaaatttacaggggtccagtggtgtgggtcctgata

SEQ ID NO: 10878 - DNA, 549 bp, Homo sapiens
  MAP TO AF235093.1; EXPRESSED IN HELA, SIGNAL = 0.8; EXPRESSED IN PLACENTA, SIGNAL = 1.8; EXPRESSED IN FETAL LIVER, SIGNAL = 1.4; SWISSPROT HIT: P18294, EVALUE 1.00e+00; NT HIT: AL163210.2, EVALUE 0.00e+00
taaggcaatggcaagattccaaacggtggctcctggttatagattatttgctgtatctaggatgatcatgatagtgaatattatgatgatgataaggaatatgacagtgatgatgaagatggtttttgctgtcagagagtggtgatattcttgactgccatcttgaaaactcctcttcggaattaatgaggccagaaaaatatgctgctaatatatgtataaattaggcactcgtcaccagaataatgaaatgtatgctatatattttaggtttattgctttgaatggtaacattttagttctgtctttatatatgtctctgtataataaaattagctacattaaatttttgccaggcaattaagtcaatgaacactgctatcctactggctttgaaatgaaggcacaccccttcagagtgtaccctatcagaaagaaagaagaggaaaaaaaattataattattaattcatgatgctatgcaggtaaattctctaccttatcattctgccacccaacacttgacttagggtttgagcgtcatgacaga

SEQ ID NO: 10879 - DNA, 528 bp, Homo sapiens
  MAP TO AL121928.13; EXPRESSED IN HELA, SIGNAL = 0.73; EXPRESSED IN FETAL LIVER, SIGNAL = 0.92; EXPRESSED IN PLACENTA, SIGNAL = 0.85; NT HIT: gi13376155, EVALUE 0.00e+00; EST_HUMAN HIT: BG290690.1, EVALUE 0.00e+00; SWISSPROT HIT: P37250, EVALUE 2.50e-01
ttttgggcctgagttattgggtggatggtggtgcccgtcactgagatgggaagagtaggagaggagtgggtttggaggaatcaggagttgtggtctggacacgtccatgtggtgtctgagatgtcacaccatagacttggagggcaccaaggcttggaggacagtgggctgaccatggtctttctgtgctctcttgtcctaggtcatgacctcttccagcagtccctcataacccctgtggggagtgcccatccctggccagagcccccagctccagcccctgcacaggccccgacgctccgccagggctgcttctacctgctggtgctggtgcccatcacctgtgctctgctgcagctcttcacctggtcccagttcacgctgcatgggagacgcctgcacatggtcaaggcccagcgccagaacctgtcacaggcccaaaccctggatgttaagatggtgtgagagctgtggcaaggtcaccccactgaggatgctgctggcagcctggggaaggagccagttttt

SEQ ID NO: 10880 - DNA, 593 bp, Homo sapiens
  MAP TO AC008857.4; EXPRESSED IN FETAL LIVER, SIGNAL = 1.4; EXPRESSED IN LUNG, SIGNAL = 1.4; EXPRESSED IN HEART, SIGNAL = 1.8; SWISSPROT HIT: P10637, EVALUE 7.60e+00; NT HIT: AJ277546.2, EVALUE 8.80e+00
cagccactcctctccatctcctgccactcccagaggggctgcctgctgctgccccgctgtgctgacctcattccccacatttgctttctgtccttttggggcctcgctggacctttccaaccccccagctgcacactttatagtttccagaacatactgagtttcttctaacctagcccatgcacatgatttcctcccctagaatgttctccagtccccagtccctgttaagctgggaaattcttactggttcaccaaaaatcaactcaaatagataccctcttgagggaaatcttccattcttctctctccttccccctgagttaagggccttctatatcctggcacctactgctgggcctctggagagagggccccagctcagtcctctcctggcccagcatagtgctcggtgtttggcagagcttgcttatatgaacaggtaagtgggtgaataaacaagttatttttaattttaaaaaatgtttaaaatgtgtctcaggtttcttctaatccagagttgcacagtgccataggcagtcaggaatctgcctccttcgcatctcaaacctgggatcatttcctgattccca

SEQ ID NO: 10881 - DNA, 593 bp, Homo sapiens
  MAP TO AC003966.1; EXPRESSED IN FETAL LIVER, SIGNAL = 0.4; EXPRESSED IN PLACENTA, SIGNAL = 0.43; NT HIT: gi15296967, EVALUE 2.00e-10; SWISSPROT HIT: O14978, EVALUE 2.00e-27; EST_HUMAN HIT: BF309455.1, EVALUE 0.00e+00
caggagcagaacttcctagagcagaatgatgatggtagatctgaaagtggctgcgtacttggaccctcagatcagggctttgtgggagaccaaggggcctgcaagagagagctccggtcagagtaaaaaatctcctcaaatggactgtctcgatcctaagagctcttgctggcacttccggaatttcacctatgatgaagcaggtggaccccgtgaggctgtcagcaaacttcaagaattatgtcatctatggctgaagccagagatccactcaaaagagcagatactggaactgctggtgctggagcagttcctgactattctgcccagggagacacagacccagatgcagaagcaccatccacagagcattgaggaggctgtggctctggtagaacacttgcagagggaatctggtcaaacatggaatggggtgagaagaaagattcctgacatgtacagtgaaataggatgcaggtggatatagtagagatggtggcagttagttgagaaattagatggattaggtaggtcattgtttggttttttttttaaggacagttaaggtgggacttgaaactacaggcccacag

SEQ ID NO: 10882 - DNA, 539 bp, Homo sapiens
  MAP TO AC000076.2; EXPRESSED IN FETAL LIVER, SIGNAL = 1.4; EST_HUMAN HIT: BI193304.1, EVALUE 0.00e+00; SWISSPROT HIT: Q01200, EVALUE 7.70e-01; NT HIT: gi15317317, EVALUE 0.00e+00
aaggacatgtaatcgcccagctgggccaagaagcggtccagtagccacggggagccatcaaaggtgcctgggtctgagcctggtacccagcagaagtccaccctgtggggtcgggagctgggcatgtgcccagctaggggacccctttctgcaggtttaccgccacaagtgccactagctgtgctcttctgctccatggtcgttcgcacacacacggtgtccccacagcagggccgctcaatccagggatccacaaggggggtgtatgccaccccaggagacgccttgtccatctgctgccatggatgtgcgttggcataattggcggctgcccagatgggaatgcgagggccctgctgacggcaccggccacgaggcatgctgggagcacaggggagaagagaggagagccagcactggtgggtggtgggggtgtggacagatgtggcttgcacgacacaacaggacagggatggctgaacagggcgtggcagacccgcactggtccaggcaagtgctgaggatcagggagctgacag

SEQ ID NO: 10883 - DNA, 545 bp, Homo sapiens
  MAP TO AC008408.5; EXPRESSED IN FETAL LIVER, SIGNAL = 3.7; EXPRESSED IN HELA, SIGNAL = 2.2; EXPRESSED IN HEART, SIGNAL = 2.3; SWISSPROT HIT: P24875, EVALUE 6.70e+00; EST_HUMAN HIT: BF984850.1, EVALUE 0.00e+00
cttcatggccatccaatagcagtgagatttagaatagagatctagacctgtcagaatcagtgtaagaattattataattatgaaacattttaaataaatattagtttctttccagagataagtttatgatatatgaagctatgtatgtttcctatagtagtaacacttgtcttatctcttctttttcagaattgctgtgtgatgcgttacactactgctggtcagctttggaatataatttccccaagagaatttgttgatttctcctatactgtgggctataaagaagggcttttatcttgtggtaataatctcaacatgttatgctttttttcagtatggtttaaatatttgtgttttcttggctggatgtctctttccttgtgagatatattttcaactctgactctgtaatcactaacattttttgcaagtgctaaactctagggagtaaaatagcaatatcaaaagagttttgaaacccttctgataagtttttgttcccagttacacagtatcctctaggtcagaggtagcaaatgtgg

SEQ ID NO: 10884 - DNA, 536 bp, Homo sapiens
  MAP TO AC002398.1; EXPRESSED IN FETAL LIVER, SIGNAL = 0.38; SWISSPROT HIT: P09593, EVALUE 6.00e-03; EST_HUMAN HIT: AW166303.1, EVALUE 2.00e-53; NT HIT: gi16177545, EVALUE 2.00e-53
gagaatgagctggtgttcggggtgcaggtgacctgtcaggtgaggccatcccgcctctcatctagcctgagagaatggccactgtagtcctcagctcggtgtcatggggcccctgctcccttctgtccctctgctcccacagggccgttcctggccggttctccggagttacgatgactttcgttccctggatgcccacctccaccggtgcatatttgaccggaggttctcctgccttccggagcttcccccgccccccgagggtgccagggctgcccaggtaacctgcttgttgtctcagcccctgcctcatgagtgtgtcctcatccacagtgtgaaatcatcaaggcagcgggatagagaaatatttaaatactggtatggcccaagtcccaaccaatctgaatgaatggagaagccttagaaacgtagtaggcttctgctacatttagctttgctaagttttaggatcatggggagttccagggggtcccatgggagggtcaccatggtcatgccaaccagggtactcaaga

SEQ ID NO: 10885 - DNA, 595 bp, Homo sapiens
  MAP TO AL031007.1; EXPRESSED IN FETAL LIVER, SIGNAL = 1.5; NT HIT: AL163300.2, EVALUE 5.00e-29; SWISSPROT HIT: P48878, EVALUE 2.30e-01; EST_HUMAN HIT: AA937297.1, EVALUE 4.00e-18
aactgcagcctaagccattgaggaaattacaaacactaatgacactgtttacagccaaataactcatagagaaacttcactacttcatgcactcagaatcaaagctaaagtatcctatccaaccaacacataaatacatcttcaaaaaaaagatttcccctataaaagccagtccaaaaaattagaagcggcaactattatgctagatgtgcagacatcaatgtaaagacccaagaaatatgaaaaaagaaggaaatgtgacacctccaaaggaacacgataattttccagcaacagattccaatgaaaaagaaatagttgaaaaagaattcaaaataatgatattaaagaagctcggtgagatacaagagaacacagataaataatacaaagaaatgagaaaaacaattcaggttgtgaatgagaaattcaccagagaaatagatagcataaaaagaaccaaagagaaaccctagaaatgaagaattcaatgcattaaataaaaaattcctttgagagcttcacaatagattagagcaagcagaagaaagaagctcagaactggaagataggtcctttgaaatagcccccatca

SEQ ID NO: 10886 - DNA, 551 bp, Homo sapiens
  MAP TO AB015355.1; EXPRESSED IN FETAL LIVER, SIGNAL =  11; EXPRESSED IN LUNG, SIGNAL = 0.71; NT HIT: AB015355.1, EVALUE 0.00e+00; SWISSPROT HIT: O54902, EVALUE 4.00e-19; EST_HUMAN HIT: BF811960.1, EVALUE 0.00e+00
gctctcctcagtgtcccaagtagttggactataggcacacaccacacagcaccacacctggcttgtttcctttttaaaatggtggctcttgtcctttttgggaagtgtttgggcacagaggtactgatactgttattctggttttagaataagaggctgatggaacctgcaggtaagggaagagctttgacttggacagagaagtggccagcttcttaataaaaagtgggtaagatggaggtgaaacttggacacatgcaatatctgacattgtaaatccttttttcttgtgaggctggattttgttgcttcatatgtgataacagaccaattatatcagtagttcaatggtgatgttcagtttaatctcttttcctctcttgtacagtactcttgttttagctttcgtaaactctgggctttcaccggaccaggttttcttatgagcattgcctacctggatccaggaaatattgaatccgatttgcagtctggagcagtggctggatttaaggtgaacatctagtcctacccctgtccttttaagcaca

SEQ ID NO: 10887 - DNA, 501 bp, Homo sapiens
  MAP TO AC011891.2; EXPRESSED IN PLACENTA, SIGNAL = 0.76; EXPRESSED IN FETAL LIVER, SIGNAL = 1.2; EXPRESSED IN HELA, SIGNAL = 0.73; SWISSPROT HIT: O05190, EVALUE 6.00e+00
aaaaccaacccacattccacattgttgagatgcttaactaataagcatgttttaaaggcacttacacaatggagagccctttaaccaaaaaaataaaaattgatttgcctactaagtccattaactgtacataatgacacaatttatttgcacaagaattttagaatattggcagtattgggtaatataaagattttgaatagtggctttaaaagccaccaaaaaatacagtactaaaaaaattatatggtattaaatataataaaattccgttccattgcaaagtcagaggttatatgcaaaatatgcgaaaggctcccaacctgagggctggaaaaaaacagggcaccaggcctataaggaatagttgtgtttcctgttgctcagtaactgtcctgaccatgaagagagatttcactgtgtctaattttttctggtcctctataggatgactaaagcagaagaaaagagttaagaaaaagccagaattcagaagaccaa

SEQ ID NO: 10888 - DNA, 600 bp, Homo sapiens
  MAP TO AL109754.13; EXPRESSED IN PLACENTA, SIGNAL = 0.42; EXPRESSED IN FETAL LIVER, SIGNAL = 0.44; SWISSPROT HIT: Q99728, EVALUE 2.00e-05; NT HIT: gi9507136, EVALUE 8.00e-25; EST_HUMAN HIT: BI825767.1, EVALUE 0.00e+00
tttgaactgttttaactttatgcccactcaatatttttgatatttatgtataaatcctactttctgaacatttcttaaaaaacaatctctgttcttaaggaagttccaaaatattgttatttaatcaaaatgaagatgataaaattaactttgagttatttttcttttttgttgcttcagctttagttttggtccagaaagcattttcaaggagctggtcaagcatggctttagcagataagagacttgagaacttacagatctacaaagttcttcaatgtgtgcggaacaaagacaagaagcagatagagaagctgaccaagcttggataccctgaactaatcaattatacagaacccattaatggacttagtgctttgcacttagcctcagtttccaatgatattgatatggtcagctttctccttgaccttggtgctcaccctgatgtgcaagaccgaatgggctgtactcccacaatgagggctgcagaactgggccatgaattgtcaatggaaatattagcaaaggcaaaggctgatatgactatagttgataatgaaggaaaaggtaaaaatcccgacatcctctccagcagat

SEQ ID NO: 10889 - DNA, 584 bp, Homo sapiens
  MAP TO AC002105.1; EXPRESSED IN HEART, SIGNAL = 0.94; EXPRESSED IN FETAL LIVER, SIGNAL = 0.65; NT HIT: gi15299700, EVALUE 0.00e+00; EST_HUMAN HIT: BE382945.1, EVALUE 0.00e+00; SWISSPROT HIT: Q15059, EVALUE 2.00e-47
agcacagatatcctcagggcatctgtggtgggacgaaggagccaagacagcgtggcagccctgtgcccaagctcgccgcacagggtccgtgaggagtgacaggaggggcaggccaaggaggggagaggaacttcaagcaccacgctccacgcaggcaacttacagaacggtttcctttgctttttctgtaaacaagacttgacatatctctccagttcccgcaaagtggtgggtttcagagtctcaaagtcaatttctatctcatcggggttggagtccctgagcgagggctcccgagattggatgatgtgcactacccggcccagcttctccccgggcagccggttgatgtccaggctaagctggcgcttttcatcgtagctcatgggcaggccctcctcctcttcctctgagtcgtaggaggcagatgcctgcttgccgcctttcttcagctgtctggggcaggagacagagcaacgtggtgttgagtctccgtctacctgccgtgggagcccactgcacacaccccttcctcccaacagcaggctgctctctgggaccaagctttcttcccaaagtggtgc

SEQ ID NO: 10890 - DNA, 550 bp, Homo sapiens
  MAP TO AL109865.36; EXPRESSED IN FETAL LIVER, SIGNAL = 1.3; EXPRESSED IN PLACENTA, SIGNAL = 0.77; NT HIT: AF140227.1, EVALUE 2.10e+00; EST_HUMAN HIT: AA777646.1, EVALUE 7.70e-01; SWISSPROT HIT: P21308, EVALUE 1.80e+00
gctgtttgcatctgcatctcttaactgaccctctgtttttcatgaccctcaccaataactttgggttttgcatgtgtctttagaattggcccacttataactttagaacctagagtctaggtcaggggtatccctttgccagcctcagctcacatcacccatactgcacctatcccttattccccactacacttgccatcctctccactggaggaggaggtatagctgttctttatgttcttggcttcagacccccaattcaattttcaagtgagtctcttgtaccccattaaacttatactgagccctactttcccaacttcctgcttgcctgtgtattcggttcttgctccagctctgggcatttggccactttggacaaatctcctgcccttttcagccagtcctggggtccctctatgtctgcatgaccctcaccccactctaccctaactgcaatggccagtgttcttgctgtgacctctcgagccatttgcaccagatttggagggaggtcaagtcttctgaaacaagcctaatgcatcgttga

SEQ ID NO: 10891 - DNA, 534 bp, Homo sapiens
  MAP TO AC022471.8; EXPRESSED IN HEART, SIGNAL = 2.7; EXPRESSED IN FETAL LIVER, SIGNAL = 3.3; EXPRESSED IN HELA, SIGNAL = 1.8; EXPRESSED IN PLACENTA, SIGNAL = 2.9; EXPRESSED IN LUNG, SIGNAL = 2.4; EST_HUMAN HIT: BE908464.1, EVALUE 4.80e-02; NT HIT: AJ007302.1, EVALUE 7.90e+00
cgaggtagggaaatgcagtcctactatgtaccaggaaactggaaagccagaaaaatttcttgaagaacactactaaccagcatatacacccatatgaattagattaacaataattattctacctctggttgatcttctgtgattgtaccaacagcactgagtttatgcactgccagataactgggctgaatcgtcaatgtggtgatcccgtgaacatactgctgttgatacacttctgcctcagctgtcagcttgcttactttagcagcagctctgttttccattctttctaatatcaatagtgacatctgctacagaataccaacttctctggtttgaattctctctctaccaactaaacattacaactgaatatttcctcccatgagaaggaaggtgattggccttagatcttgctctgagagatttcttctaatgaattttttaagtggctgcaaatgtaaactttctgtaaatattcttgtgtgagattgttagaatgagtcaggttccaggaagctgatcaagcctgag

SEQ ID NO: 10892 - DNA, 597 bp, Homo sapiens
  MAP TO AC008050.4; EXPRESSED IN HEART, SIGNAL = 1.2; EXPRESSED IN LUNG, SIGNAL = 0.57; EXPRESSED IN FETAL LIVER, SIGNAL = 0.49; EXPRESSED IN PLACENTA, SIGNAL = 0.92; SWISSPROT HIT: P25623, EVALUE 1.50e+00; NT HIT: AB021498.1, EVALUE 8.90e+00; EST_HUMAN HIT: BE676699.1, EVALUE 3.30e+00
tggggtaaggaagggttttctcatcagcattctcttgtgtttcaggtgtaggtcttgcctttccagggatagtggccacatagttcgccgtgttccccgcagttattccagtacatggtaggttcccaatttcctgaggacgtacaaagatgagactttgtttaccagtttcctttattttgatctgttatcccatctttccaagttttatacttttggtatgtttgttgatcacggtgatggtgattgctctcaacacaatgtctacttctcctcgacggtcaaggagggaaatagacagagcccagaggtggccagtcatggttcctcaagacctgccaagaagagtgcaggccaccaggtaagtcccgagtgtcctctggagggggccatgctgctgacccacctcagcccttcttctgctcccccaatccctcaatagcccactccagtttattgcatcagccctcacaccctcagtgccacctaagactttaccaccaagaccacaactctggaatcttccatatggaataaatgcatgctgatcaaatgaatagatcagtaaacctcctgtctctttccatttcttggcca

SEQ ID NO: 10893 - DNA, 567 bp, Homo sapiens
  MAP TO AC022424.3; EXPRESSED IN PLACENTA, SIGNAL = 1.2; EXPRESSED IN HEART, SIGNAL = 0.93; EXPRESSED IN FETAL LIVER, SIGNAL =   1; NT HIT: U82671.3, EVALUE 2.10e+00; SWISSPROT HIT: Q61771, EVALUE 3.20e+00
tgtgcatctaggtgtcccagcaatgccttgtattcatgtccaatacaagaccgagtctttgcttgttgttacttaacatgctcctcaccatgattctgaggtttaggctcaacaactgacagctgtcttcagtttcacctggtttccttcgcctggcaattgatctgtccctgagcctgtgtgcctctcccttgccctcccctttgccacggtgctggctgtgctcttattatcactctgccatgagctcccactgccatgagctcccacagaaacccttctggagaggaggaggactctttcttcatctctccagctatcatccttatcatctttgttgctttgttccaaaaaaccttcagttctcatcaaagccctctgcctgtcttagcaccatagatagacccattacttcacaaaaattagtaccagatacaagtccttgtctctcatctgatctggtgacacctatccccaccaagttgctttgctgtatgccctcctcagaccccagaggctggcagcgtgagccgccctgggcttcctgcctctacagctggcatcaca

SEQ ID NO: 10894 - DNA, 528 bp, Homo sapiens
  MAP TO AC002096.1; EXPRESSED IN FETAL LIVER, SIGNAL = 0.33; EXPRESSED IN PLACENTA, SIGNAL = 0.64; NT HIT: gi14738494, EVALUE 7.00e-96; EST_HUMAN HIT: BE731805.1, EVALUE 1.00e-95; SWISSPROT HIT: Q92574, EVALUE 6.00e-30
tggagacacgtcaccaactctgttggcatacaatcaggtagcagaccaaggacatctaaattaaacttgaaggagaaattaattagaagaaaatggagggacatgcaaatttaagatattttgggaaaaatccctaggaactgaactaagtcttactccagaaaagaaaatcaacaaagacaaataatgttttccagagacaaagttgcaaaacagataagtaccaaagacactttttaccatagctattctgtgtgtcagcataagggctggtggtgacatcggctgaacgatgaggaaagcgggctgagatttggtgagacacagaatagccatcttcatatgaggcttctgtgggatccagagagattttggcacactcgatcacaacatcatgagtttctaatctcttccacctgtaaaatgcaatgaaagtcaagaaatgcaaactgtaatcaactgaattaaatacttcagagtgtcaactcagtgccagccacggaactctgatagcaaagaacaagcggg

SEQ ID NO: 10895 - DNA, 567 bp, Homo sapiens
  MAP TO AC004200.1; EXPRESSED IN PLACENTA, SIGNAL = 1.3; EXPRESSED IN FETAL LIVER, SIGNAL = 0.72; EXPRESSED IN LUNG, SIGNAL = 0.89; EST_HUMAN HIT: BF797314.1, EVALUE 4.00e-09; NT HIT: AF055066.1, EVALUE 0.00e+00; SWISSPROT HIT: P16212, EVALUE 3.00e-04
ccctcctttccctcaaagacttcatcctttaattgtcccagagtgcagggcaggccctcagtcactctctagtataggatctgaaaacccgggaggactcttcctcctcacaagagggagagggatgttttagcgttggtcccattttccttcccttcttttggaatgtgactcaaggagatctgcaggagatcagggaggcaccccgtggccactggtacctgggcagtgcagcgtctccttcccattcttaaggactttgctgagccactccgcccaccttccctgcaggtaggtttcgagcagctctgcatgttcctccgccagggcatctgagccgccttgtccgctgcagtccaggagcgcagttcctggtttcggacgaggtaactggcgccgtcatagggtatgttcatacccactgaggaggctgcagtccgagtccaggtcgcagctgtgtacccattggagggtgtgagacccattcccagcgaccgaggtcagcccaggccgctgagccccgcctcagcctcgaccaacccccggggatttgggcctgaactgaaa

SEQ ID NO: 10896 - DNA, 520 bp, Homo sapiens
  MAP TO AL109797.18; EXPRESSED IN FETAL LIVER, SIGNAL = 0.96; EXPRESSED IN LUNG, SIGNAL = 0.73; EXPRESSED IN PLACENTA, SIGNAL = 1.2; EST_HUMAN HIT: BF846728.1, EVALUE 0.00e+00; SWISSPROT HIT: Q93008, EVALUE 6.00e-40; NT HIT: gi14764091, EVALUE 0.00e+00
ttaatacagccctctccccctcttctctatttttccaggtagtctatgccttgttaatgcctgctggtgcacctctggctgatgattcctctgattttcagtttcacttcttgaaaagtggtggcctaccccttgtactgagtatgctaaccagaaataacttcctaccgaatgcagatatggaaactcgaaggggtgcctacctcaatgctcttaaaatagccaagcttttgctaactgccattggctatggtcatgttcgagctgtggcagaagcttgtcagccaggtgtagaaggtgtgaatcccatgacacaggtaatacagactttttaaaaatccttttataatagtagatagcaatttttaaagtaaaactaattagtattttaagtgtagagttcaaggttgactcaatgttcaaagtgccttatttcagaggttttctttatgatgtttgtattaaaagtgcaaatacttttcgctgacagctgataatctgagggtagtttctccctgcc

SEQ ID NO: 10897 - DNA, 590 bp, Homo sapiens
  MAP TO AC000028.1; EXPRESSED IN FETAL LIVER, SIGNAL = 3.5; EXPRESSED IN LUNG, SIGNAL = 1.9; NT HIT: gi14758330, EVALUE 0.00e+00; SWISSPROT HIT: Q13438, EVALUE 1.00e-14; EST_HUMAN HIT: BE065882.1, EVALUE 0.00e+00
cccagacccttgactcactctcttctcttgggtattccagacagagaaagagctggacccagatgggctgaagaaggagtcagagcgggatcgggcaatgctggctctcacatccactctcaacaaactcatcaaaagactggaggaaaaacagagtccagagctggtgaagaagcacaagaaaaagagggttgtccccaaaaagcctcccccatcaccccaacctacaggtgagagcagtcagacaagaaagagtagcccagtctgttgttttcatccctcagctggttctgttcccagaggggaccctgttccttcccttctgagggtgctcattctctccccactttctggaacactgtcctcacttgcgcctgcttcccaacaccgtcatccctttgcgtgtttacctcctattcatctctctgggaagcagcttttagagcatatctgctggttttctggtttgctcctgtacacccagtgcctagcactctgcctggcacacaatggatgatcagtagctagtaattgaatgcttgtgagtctatatgctgaaaaccactttaggactttgcaccaagagaggc

SEQ ID NO: 10898 - DNA, 554 bp, Homo sapiens
  MAP TO AC010328.4; EXPRESSED IN PLACENTA, SIGNAL = 1.1; EXPRESSED IN HEART, SIGNAL = 1.5; EXPRESSED IN FETAL LIVER, SIGNAL = 0.73; SWISSPROT HIT: P51522, EVALUE 1.00e-65; EST_HUMAN HIT: BE161730.1, EVALUE 0.00e+00; NT HIT: gi13649241, EVALUE 0.00e+00
tgagtgtggcaagacctttgttcaaaattcatctcttgtaatgcataaggtcattcatactggagagaaatgttacaagtgtaatgaatgtggcaaggtttttaatcacaaatcaaaccttgcatgtcatcatagacttcatactggagagaaaccttacaagtgtaatgaatgtggcaaggtttttaattgaaaatcaaaccttgaacatcatcatagagttcatatcggagaaaaaccttacaaatgtgaagaatgtgacaaagttttcaatttcaattcacgccttgaaatacataggagagttcatactggagagaaaccatagaaatgtaaggtttgtgacaaggcattcgggtgtgattcacacctggcacaacatactagaattcacactggagagaaaccgtgcaagtgtgatgagtgtgacagagccttcagtggtcagtcaacacttattcaccatcaagcaatccatgtcatagggaaactttactaatgtaatgattgtcacaaagtcctcagtaatgctacaaccattgcaaattattgga

SEQ ID NO: 10899 - DNA, 515 bp, Homo sapiens
  MAP TO AL121896.10; EXPRESSED IN FETAL LIVER, SIGNAL = 0.58; EXPRESSED IN LUNG, SIGNAL = 0.85; SWISSPROT HIT: Q94124, EVALUE 9.40e-01; EST_HUMAN HIT: BF772358.1, EVALUE 0.00e+00
tttctctggattggctctgggttggtcgaggtcccttttaaaatgtggccccagggctgcacaccacctttggatgctccctgaggctgcaggagcacaggccgtagttcctgtgactggacctcatgtttcctatgcagaggtctcaagagaatgctggtgtggctggctgttgcatcactctcatctctcatctccaatctgtggccaaccgaaatcctcagacattgttcacaatgactgctatgaaaccacatcactctcaccctgtactcaggcagctgattatccaaagcccagtacataacgttacattttgccctcttaaacctcatcttgctggcttgggcctggaagtctctcatctgttgagataatcctaatgtgtgactttgcatcgtgtcaaattagttaaccctctcagctttctgacaaatggtggcttgataaacatgttttagacctttatgaaagttactgaaaaaactgctgactggaagacgggttaacagcaa

SEQ ID NO: 10900 - DNA, 567 bp, Homo sapiens
  MAP TO AC000404.1; EXPRESSED IN FETAL LIVER, SIGNAL = 0.63; EXPRESSED IN HELA, SIGNAL = 1.1; EXPRESSED IN PLACENTA, SIGNAL = 1.2; NT HIT: X13259.1, EVALUE 0.00e+00; SWISSPROT HIT: P09172, EVALUE 1.00e-46; EST_HUMAN HIT: AL514764.1, EVALUE 0.00e+00
tccagtcccaaggaaagatgcagaagtcaagatgttggtcactttggtccaggcagggaagtgggagctccaaggccctttgagggtaggggagtgagcagagtgatggggaagccaagaccactcgctgctcccctgctcaggcaggtgcctgaggttccagtgataagaggacacctggtccaaccaggactgtggacagctctccagggtcagggacaacccaggcccgggaggaaggcagggctgggcgaggacctcggccctggacccgcacgtaccttgataatgtggtgccgagagaagccctttggaagctccttaatgtagcaccagtacgtggtctcctggctggggatctggatattgggagcttggacctccatggtgcacgcgtctgagggcaactccggttcggggatattgggcttcaggagctgcaccctctgcagccccatctgcaggcccgagccgttgatggcctccagtgaccggaacggctcctccaggatcccgtagaccaagtggacagtgccgtcctgcagccgagacagggttcagctggtc

SEQ ID NO: 10901 - DNA, 565 bp, Homo sapiens
  MAP TO AC008699.4; EXPRESSED IN FETAL LIVER, SIGNAL = 0.4; EXPRESSED IN HELA, SIGNAL = 0.6; NT HIT: AB025000.1, EVALUE 1.40e-01; SWISSPROT HIT: P14943, EVALUE 1.40e+00; EST_HUMAN HIT: AV752248.1, EVALUE 7.90e-01
aacgcaatgtgattcttccctgggatgggtgaagttttgagttaaaaatcacaacaaaaatatcaatatgtttggtgtgacagtattttggggggaagctagtgatgcagctgggtttgtgctggaattggtaggggatgaagcagcctgggaggacgaggagtcagcagccacctgggaggacgaggaacagtgccaaacaggggtgaaaagggcaccgttcaatcccattgtaccgccaaacccaccattaaatctcttcattaatgaggggcatgcacatgttttgctcgcttagagaagctttccctaactagtttaagctctgtgcaaagctcgtgacatttgggatttaaattccatttaagtgttgccaagaggaaggtaaaaatcatacacacagagcacagaatggcccttcaactcctacagcatcaaagcacttaaaaaaaatctctaaaaggactctggggcttttgcaaatttctcttagaaaatagcgtttttgtcagaaagaggcgaatcagcaatgcatgaattaaaatcctcttgaaacccagatgga

SEQ ID NO: 10902 - DNA, 523 bp, Homo sapiens
  MAP TO AC011471.5; EXPRESSED IN FETAL LIVER, SIGNAL = 1.6; EXPRESSED IN LUNG, SIGNAL = 0.99; EXPRESSED IN PLACENTA, SIGNAL = 1.4; NT HIT: gi14767599, EVALUE 0.00e+00; SWISSPROT HIT: P30754, EVALUE 3.70e-02; EST_HUMAN HIT: BF329507.1, EVALUE 1.00e-95
tttctcagaatgccctcagcagacaagtgcctcggcaggaccccatgctgcccgatgctccccacagatgccgcctacatctctccacccggtagctggagaagcctccagggacggagagggtggagcccacaggcctcctaagcctggtggataaactcaccagctggggcctccaggggtctcagagacactccggcaaaagataccaccagcagccccagcagacgcagccccgccagccccagggagggcacctctccaaccaagaagtcctttctacgcagggttttaggtggcttgaagtgacccgtacagaagaaatcttgttgtggtagctgagagggacactgccaagatccccagcaagagcttttccttcattgagcctccacaaggctcagggagagataggccaggaggccgagtggggagaccccagggttccgtttcctactcagagaatctggcaagtctgacgatttctaagacctgctggccttggggaaagagccagaaagac

SEQ ID NO: 10903 - DNA, 523 bp, Homo sapiens
  MAP TO AC010444.4; EXPRESSED IN PLACENTA, SIGNAL = 0.97; EXPRESSED IN FETAL LIVER, SIGNAL = 0.63; SWISSPROT HIT: Q9UX24, EVALUE 1.30e+00; EST_HUMAN HIT: AL521707.1, EVALUE 1.00e-100; NT HIT: AL163208.2, EVALUE 4.00e-88
ttcacagcatcttcaccaggtctagcagattccatctcaagaaactacttatttgatcatctgtaagaagaagcaactcctcattctttcatgtttgatcatgagattgtagcaattcagtcacatcttcaggctccacttctaattctagttgttttgctatttccaccacatctgcagttacttcctccactgaagtcctgaacccctcaaagtcatccatgagggttggaatcaacttattccaatatcttgttaatgttgatattttgacctcctcccatgaatcacaaatgttcttactggtatctggaatagtgaatcttttttagaagattttcaatttactttgctcacatctatgagaggaatcactatctatgacagctatagcttcataaaatgtgtttcttaaatggtaagacttgaaagttgaaattacttcttaattcatgggttgcagaatagatattgtgttagcaggcatgaaaacattaatatccttgttcatcttgatcggagc

SEQ ID NO: 10904 - DNA, 500 bp, Homo sapiens
  MAP TO AC010507.4; EXPRESSED IN FETAL LIVER, SIGNAL = 1.3; EXPRESSED IN PLACENTA, SIGNAL = 1.2; SWISSPROT HIT: Q92599, EVALUE 6.00e+00; NT HIT: AF109718.1, EVALUE 0.00e+00; EST_HUMAN HIT: BF796079.1, EVALUE 0.00e+00
aggagttcacgctttagttggggaaaatatacaataagcaagccagtttttaaaatgagaactgcaattagagttaaatgctacaaagacaaactcacaggaagatgggatgtagaatgataaggctctcagaatagtaagagaaactattgcttcttacgatgtttgtctttctttgtatcggtgctcagctgagtctgcagtgcttcagaggcagctttcattttataaaaatctatgatttctccttccagttgttttttctcttcctcgagcttccttatctcctcctgttgaatcattttaagatgctcgaacttgtcctgcagctgtgaaaccaatgtgcagttgtgacaccaaagcagtgtggctgaacacctaaaagaatacgctttttttctgattatcaaacaaacccaaatcatcacagtagagcacgatcttaataacaatctcaaaaactcaggagtaaacactcagatatggaatttttcttttct

SEQ ID NO: 10905 - DNA, 543 bp, Homo sapiens
  MAP TO AC004409.1; EXPRESSED IN FETAL LIVER, SIGNAL = 0.34; SWISSPROT HIT: P04372, EVALUE 7.70e-01; EST_HUMAN HIT: AA377938.1, EVALUE 0.00e+00; NT HIT: gi14861871, EVALUE 5.00e-04
atttttccccctggcattacttcttcttgagcatcttcattcctttctccacaatcactttcctcatttatgttgatgagtttttcttctttaggttcatctggttgcatatctagagtctttgaaatgatgtcaacattcccatgatcaacaatttattctgtgactccatatatattgtattcaaatttcatttccaatattcttactttctatttctttgttgcaacctcgtctatgttgtccagttttctctctttttaattgatctttgtaaaatgtcacttgtgtttatcactgagattcatggagtcaaaacatctacatgctttgttgtctgtgcatgaactgaataacagctgcacaatgaccaatagctggcaagctttgaatgaagtgatgtgattggccactgatcatgatgcatatctgttatttatgtagttatctgtgaactgatgagctagcaacaaactctgtactttatgtaattacagttaatatactatggcaactaaaatttgaactgtgttgttgggggac

SEQ ID NO: 10906 - DNA, 558 bp, Homo sapiens
  MAP TO AC010328.4; EXPRESSED IN FETAL LIVER, SIGNAL = 1.5; EXPRESSED IN LUNG, SIGNAL = 1.5; EXPRESSED IN PLACENTA, SIGNAL = 1.8; EXPRESSED IN HEART, SIGNAL =   3; NT HIT: gi13643735, EVALUE 0.00e+00; SWISSPROT HIT: Q92747, EVALUE 1.00e-71; EST_HUMAN HIT: BG024835.1, EVALUE 0.00e+00
atccaagctgaggactgtggagcgaatcggctttttaatatgcttgcttacccaccagtcattttcagactcaaagtaacaaacaaatgagtcatgctccacttcccacagcaaatttgttctctagcggggaccacttcacaaaagtagctgcacgattaattctaaggatcaccagggttggcttccagacaccatctttctgactccagacataggcattgcagtctaccccgcaagtgacgatgcggtcgctcttgggagcccagtgaatgcctgtgatatgtccattgtgctcactgagttcacgagctttcactcgctggctcccatgcttcttatagatgtgcgcttcctgattatcaggactgagggcaatctgggtacgatccctgttccaggcacgacaggtgattggctctagtaaaaactgatgcagtgatgtcattcttagtgttttcaaaggagagaaggctgggatcggggaagtccggacgggctcagagcagaggatttgcggactctgggctgtcgacgtgaaccagtgcttgcattttg

SEQ ID NO: 10907 - DNA, 526 bp, Homo sapiens
  MAP TO AC010336.5; EXPRESSED IN LUNG, SIGNAL = 1.1; EXPRESSED IN PLACENTA, SIGNAL = 0.89; EXPRESSED IN FETAL LIVER, SIGNAL = 1.1; SWISSPROT HIT: O14733, EVALUE 1.00e-29; EST_HUMAN HIT: BE676123.1, EVALUE 0.00e+00; NT HIT: AF003199.1, EVALUE 2.00e-53
tacagcgccttcacaatctgcaggcacgcagaggggggtgcatgtggcagggggcacagacccaaggccacctgcccggtgcacgccccacctggccactcaccgccactgtcatcttgcccagtgcacgccccgcctggtcactcaccgcctctgtcatcctgcccagtgcaagccccgcctggtcactcaccgccactgtcatcttgcccagaatgcgctcggggatggggccctgcatccgcttcttgagcttctcagcgcaggtgcccatgagctccatggcgatgaagacgtccgtctgcagggagaggggcacccgggggagctgtgtcttccggcccaccccccagaggctctgctccctaggaaggggcaggggtgagggaggaggagacgctgcagggcgcggccaggtactcacgttggtgatgaacgtcccaaagcactgcacgatgtaggggcagtcgtggctcttcagcaccacatccaggtccatgaggatgcgcttgttctcctccttgtt

SEQ ID NO: 10908 - DNA, 576 bp, Homo sapiens
  MAP TO AC004475.1; EXPRESSED IN PLACENTA, SIGNAL = 2.9; EXPRESSED IN FETAL LIVER, SIGNAL = 5.7; NT HIT: AB047978.1, EVALUE 2.20e+00; SWISSPROT HIT: O60548, EVALUE 2.60e-01; EST_HUMAN HIT: BG746583.1, EVALUE 1.00e-126
tcctttgctctcctcacctcagagggcctgaggctcagctcagaggtctggtggctgcaactcagccgaaagcacccatgcccctggcagcacttgccctgcccaccacagatcccacctgctagagcacgggcactggtggtgggggagcagcagctcccacaacttacctttgatctccagccactgctcatagtcctcctcctcgtcctcgtcaggggactggaagacactcgggcggtgcgccacgggcagctgcttggcgtgggagtagctcttcacagggcccggcaggctggccagccccaggcctgtccgcctgctgatgagcagggacctcttcccagcgctgggggtgggtgtgctgggaggggcgctgggcgcactggtcggggcgtctggtatagaaggaaggatatgcgcactcgggatctgcagggcacctctcccggcttccgacctaacctaggtgctgtgggccccgggggagctgggtccttgacttccagaactcaggggctcagaggaggccaccctgattttacagatggggacagtgaggcaaagagcaaaagg

SEQ ID NO: 10909 - DNA, 552 bp, Homo sapiens
  MAP TO AL110118.3; EXPRESSED IN PLACENTA, SIGNAL = 1.8; EXPRESSED IN FETAL LIVER, SIGNAL = 2.2; NT HIT: AB067468.1, EVALUE 1.00e-04; EST_HUMAN HIT: BI820081.1, EVALUE 2.00e-04; SWISSPROT HIT: P10161, EVALUE 2.00e-01
ttgtgttccctcctcctgtctcccatgtcccttccttctccctcttcccctttggcttcatcattcaatttctgaactttctggttatggcaggactttaggaacttgcttcttggggaatcgaggttgttggtgcctttgctctgcacgagtttcccagtgaaaaatgagccccgacaggttgttttattttcccgagaggctgtggtggtgcatgtgggattccaccaccagaggggatgcagttttccgctgccacctcctggtccttccattgcactgaggccctggaggctggagaccaggccttccagcttggtgccacccttgcccacggtggtgcacctggtggtgaacacgtgggtgtggggagagccctgttccgggccagctcctgcacttcctgagtctcccaggcctcggcctgctctgcaggtaatggggtaaccactgtcccaccctcatgaggctgcagaaggtattggtgagtggtgagcttcaaggggtgtgtagcatacgtgggtggccccctcttttctgccactgttgcaa

SEQ ID NO: 10910 - DNA, 600 bp, Homo sapiens
  MAP TO AC016656.5; EXPRESSED IN FETAL LIVER, SIGNAL = 0.33; EXPRESSED IN HEART, SIGNAL = 1.1; SWISSPROT HIT: Q9WTI7, EVALUE 5.90e+00; NT HIT: gi13385949, EVALUE 5.70e-01; EST_HUMAN HIT: BF744721.1, EVALUE 8.00e-66
atgagccaaaggacctgaagtctttctattgaaattatgatgctttttgagtaaacatatatttataattaagcaattaatatagaatgaaaagatccttaaaatcaaaatcaaaatactggatatataaaacaacattagctgaattctgagattagatcttgaatgatataatgattaggaatattataatttcctctaaaaatcaggagtgttttctgagacttgattaatactgataaaatttcagtattctaccttgaagtcagtcctcaaaccccaattattaaaaggagcacacagctctgcagctgaggatgctgggcccctgaaatgtcataccatttttttaaagtagtaattctggactgttttcctttcgccacctccctggcccttgttttcttccccatgcgtttccgctctgcacaatatgtccacagtgctggcttcaagcacagctgcaccaccaggattgagtctctcaggttccatgcacaaagatactcctgttcagaggaagttttctccggtttctttaccccatagataatacctcctgctctggagggaaagggatgacgaaacccctgcttctta

SEQ ID NO: 10911 - DNA, 529 bp, Homo sapiens
  MAP TO AC016831.1; EXPRESSED IN FETAL LIVER, SIGNAL = 1.5; EXPRESSED IN PLACENTA, SIGNAL = 1.8; EST_HUMAN HIT: AA373654.1, EVALUE 3.00e-99; SWISSPROT HIT: P78413, EVALUE 3.70e+00; NT HIT: X76065.1, EVALUE 8.00e-03
aattgaggcttagatgggggggaagaaaaacattacacagattaaaccacagctaatgtcaggtggtgaccaaagcaagtcttttattgcaggctgggtttttccatgtggctggttgtatgctgcaccaagaggcagacacagtaggccagtttcctgtgcagacccagctgcaatcccatctctaagccaggatgctattaggtctcaacaacccatgggaatttagggtgctcatgatttaggctggaaagaggtgactaagctccttgatctaaggtctatgcaactggccactcactgcggaccagggacattcaatgccagacagcggtagggctggtctggggcggcaagccagatcctgggcaaagcagcctttctgctaagggttccctggcagaccacgacgatggcctcttgcaaatgtgacctgacggtggcaaaagtcttctttcaaagcccattcctagggcctgctctttccccagcactgtcccccaggaagcccccttgctagccatattca

SEQ ID NO: 10912 - DNA, 584 bp, Homo sapiens
  MAP TO AJ132410.1; EXPRESSED IN FETAL LIVER, SIGNAL = 0.88; SWISSPROT HIT: P12977, EVALUE 1.10e+00; EST_HUMAN HIT: BE267802.1, EVALUE 3.20e+00
agttatggccacgtttgctcgcgtgatggtcagggctggccctgaggttttgcatctgccaaaatgtcgcctgttccctcccctcctgctacctcagtttgcattccttcctgatgatgcagtgaggtagtaaatttagaaagaaatggaattgggggcagctcagctgctggccatggctaggttccagggcatttgctgacagttatctttacattaaatgtgggcagcaaggattgcattgcaggcctgattgtgctgctttctggctgtaagcttgacttttctgcttcacttttctgtcctcagtttcttcatattatggagactggaggtcctgtgctgcttataatcctgtgtcctttcccttgctttgagcctcagagccagttttagattcagggttgttggctgggagaagactcttggctctgagggtgacagtggtttagggagaacttgcttcggacaccttgtgtgtatgggcgggggcatcgcaggcatgtacattggttgaacttggaagctttccctcatttgcttgcagagaagcccactgacggagtgaagaagcctgagttggg

SEQ ID NO: 10913 - DNA, 523 bp, Homo sapiens
  MAP TO AC009533.9; EXPRESSED IN LUNG, SIGNAL = 0.7; EXPRESSED IN FETAL LIVER, SIGNAL = 0.45; EST_HUMAN HIT: AA609601.1, EVALUE 2.00e-26; NT HIT: gi13640785, EVALUE 9.00e-15; SWISSPROT HIT: P23389, EVALUE 1.60e+00
tgtgtgtgatctttctgccctccccaagtttgcattttcaatattaaagtttacttttaaatttaaaaaaaaattggcagaggaaaaccttttgcaagtgaagtgcagctaacacctaatggctagcagagggctatttggggcggggactcaggtgagagttgaagcagaggtggggaggaaggagggttggttggtgtctgcagcagtgatggaagatgctggggccttgctcctctcctgccttccaacgtgggagtaaccggtgaaggagcagagagagtcaggggctccctgtctctttctcatggtggaggcatcttcagagctggggtgaggacagaatctcttagcccctcttgagatgctccagatgccgcatctagtacagagaatgaggttgagaggcccccatgccctccggccttcctatgctattacattcacatcaaactctaccacgtcgtcattcacttcacattaaagcatcttaattgccccctgggaggttaagctgtgtgga

SEQ ID NO: 10914 - DNA, 565 bp, Homo sapiens
  MAP TO AC008565.5; EXPRESSED IN FETAL LIVER, SIGNAL = 0.41; EXPRESSED IN PLACENTA, SIGNAL = 0.64; EST_HUMAN HIT: BE673306.1, EVALUE 2.00e-01; SWISSPROT HIT: Q9Y8G8, EVALUE 8.10e-01; NT HIT: AF117240.1, EVALUE 1.40e-01
ttggtggtctggtggtagtggtggtggtggtaggtacatatgagaaaaggtgggtactatggctagttagagaagatgaagatccttcagtagagtctggcctgttttcctttttttaggagctgaaaatagtctgtttgcttacatgaggatgttttcatgccaaaatgtctcctttttttttttcagccaaatgtcatcatcttgattttcttcttctttatcctccttcttttccctttcctgtttcttttgctcattagccaggtcagggtaagatggaaagcaaggtagctgaagccctcaatgaccccatgctccacatgcttctgaaggatggggaagacccgggagcaggccatgcatctgaagccactgtccagagctaccaacaagtcagtcgtcctcggcctggaactctcctccagagctgggggctctactgggttgtcagcctctcaggctttgctggccaagctggactcactgtcagttaggagttcctttgtagacatatgggagagagtgacttctgtatggatcttctcaagcaaggccacttctt

SEQ ID NO: 10915 - DNA, 525 bp, Homo sapiens
  MAP TO AC005175.1; EXPRESSED IN FETAL LIVER, SIGNAL = 0.84; EXPRESSED IN LUNG, SIGNAL = 0.53; EXPRESSED IN PLACENTA, SIGNAL =   1; EST_HUMAN HIT: AA039960.1, EVALUE 0.00e+00; SWISSPROT HIT: P56486, EVALUE 7.00e-40; NT HIT: D15056.1, EVALUE 0.00e+00
aaggatcagggaggagttgggggtccccgggttggattggggtcaacccaaaaccctgctgctgatgcccactgtccatccagcacccccagcccctgaatcctcagaacaggcagatgggctgtccgaggggccaagggctccgcggaaaggcgcgggaggggcgctctgtccacttcctactgcagcccggagcgctgcgtgagctggggctggagggacagcgacctgggccgggtgctgaggcgaggctggagacgccggagcacggcgcggcggaacaggatatacacccaggggtccaggatctggttccaggtggccacgcgcaagtagatgagcagctccttctccgtggtgcgggacagctgcccggcggggctcatggcaggcgggtttcgcagcactgtctgggcgatgaagacctgcaaaggggagagctgtcagcctgggcccccgcctccagccccgcccgccccggtccctgcccggggtcccttgagatccagggtccactccgttttt

SEQ ID NO: 10916 - DNA, 600 bp, Homo sapiens
  MAP TO AL117190.3; EXPRESSED IN FETAL LIVER, SIGNAL = 3.6; EXPRESSED IN PLACENTA, SIGNAL =   3; NT HIT: L35930.1, EVALUE 8.90e+00; SWISSPROT HIT: P03337, EVALUE 5.20e-01
atgacaggcatacccagaggtaggctgggggtcctgaggcagacaaggctcatcctgacctccgaaatgtccgtgtcccttcatcctctttcctgcaggatttcagttttcctaagggctccacggggaaggctggcagggcagcagcatggaggactccttgccattttataggctcctcgtccctatggaggggcagtgtggacatggggtcagcagtgttcaaacggtgatcccggggctgacacttcagcggccctcgtgttggggggtcagggcttgtgggggcccttcctgcctttcctggcatggcctttctttcccatgctgcctgggctgcctggtggtgtcttctttcccaacaaagtggtcctgattttttcatttctccgcatgacctgctgtccttccctctcttctatctcagagtgccaaatgggccattttcctcttccccagcaagcagggcctggaaggggtggaactaaggcaaggctgtgcaggtctggccccttccttaccctattcctgccgcccagagtggagcagctctctccacggagccgtgcccccaggaccacccgaaactcactgctccta

SEQ ID NO: 10917 - DNA, 500 bp, Homo sapiens
  MAP TO AC007031.2; EXPRESSED IN FETAL LIVER, SIGNAL = 0.83; EXPRESSED IN LUNG, SIGNAL = 1.3; NT HIT: gi6753601, EVALUE 1.20e-01
tagcacagctccacacatccaaagcctggaaagggtggaagatgaatatgaacggacagatccctcatgctcacccttggtggtgaattgagtcatcagctgagtatggaaaggagtggggaacaagctcacaggctctttgtctccttcgacttttgtttcacatttgccaggaggtaaggccttcatacctgcagctgggtcaagtatctggaaacacgtgggctgccagcagagccacttcatgtcagcatcagagtacaaagtgagtgtgagactgagtgagaatgtgaactgccagggtattcctacccgtgtggcccaggcctggctgcagggagggcaaagtctggctgcagggaggggaaaggtcagctacaggtcccaccacacatgtcctccaactgcactttccttgttctagcttggcatcagcccaccttgctgtgtgccttgcatgcctccttcctcttcctttaggaggggatagaagggtccag

SEQ ID NO: 10918 - DNA, 600 bp, Homo sapiens
  MAP TO AB012723.1; EXPRESSED IN FETAL LIVER, SIGNAL = 0.89; EXPRESSED IN PLACENTA, SIGNAL = 0.68; NT HIT: AB012723.1, EVALUE 0.00e+00; SWISSPROT HIT: P29776, EVALUE 1.30e-01; EST_HUMAN HIT: BF303941.1, EVALUE 1.40e-02
gccagctccacacctcttacaggtgaacctgtggagcgtgctggctgcggaagtgcaggcagcatctggcgggcaggaagggacgagggccatgtggaagtggggtgggcaggggctgagcctggcggtgcggacggtactgctgggtgggtggtgcctacaccacaaactcctgtggtggagcctctccgaacaggtccagggcgagacagttgctggacctcttgctggggagagtggccctggtctcgcaggggcctgccagcctgcagtccagggcgcggtggaaggtatggctgagtgaggtgggcgctgggtgcagggccagctggtgcagctgcatgtcgtccaggccatggctgtgctgctcctcactgaccccggctgtcatttcctggatctgcggggagaggccatgggatgaggcctgctgccccctctcactcccaccaccgcacacggcagccacactgcttgtggccacagagccacactccctgccaatgcccaccctgcgccgcagtgcatggccggcctgcccctggacggtccccagcacacacctctgcgagagaggcttggcatcttcctttgatgcat

SEQ ID NO: 10919 - DNA, 597 bp, Homo sapiens
  MAP TO AL035068.3; EXPRESSED IN FETAL LIVER, SIGNAL =   3; EXPRESSED IN PLACENTA, SIGNAL =   2; EXPRESSED IN HEART, SIGNAL = 1.7; NT HIT: gi14778462, EVALUE 1.00e-75; SWISSPROT HIT: Q9Y3I1, EVALUE 1.00e-23; EST_HUMAN HIT: BG217428.1, EVALUE 1.00e-127
aatccctgtttccatgatgcagttttacctatttgaacaaaaattttgattaaaagtgttctaatatattatcttatacaatatggttatcctacaatataaaatatattggcaatgttaatgatttgatgcattttattaagaggactgtgtggagtgattatttcaaacaagttaggagtcttttggatttttaatctttttgagagtaacacctttcttcattatttgtttccctttcatttcgttccccagggcaccgaagccaaagcactgtccatgccggagaagtggaagttgagcggggtgtataagctgcagtacatgcatcctctctgcgagggcagctccgctactctcacctgtgtgcctttgggaaacctgattgttgtaaatggtaattggatagcatagtcatggttgctggtttatggattcttagacgtttctttccaaatgttttatagccacttcagtgattggctatcatgatacagttgtgagtccttctcaactgtatttaattcctaggccactgataacatgtgtctggaagatcatggaatatgaggttgttgagttgtttaggccagcacc

SEQ ID NO: 10920 - DNA, 599 bp, Homo sapiens
  MAP TO AC009024.6; EXPRESSED IN HEART, SIGNAL = 1.3; EXPRESSED IN FETAL LIVER, SIGNAL = 1.1; EXPRESSED IN HELA, SIGNAL = 1.2; EXPRESSED IN PLACENTA, SIGNAL = 1.2; NT HIT: M64239.1, EVALUE 6.00e-04; SWISSPROT HIT: P17029, EVALUE 2.00e+00; EST_HUMAN HIT: BG986804.1, EVALUE 5.40e-02
catacagaggaagcgggaagtgccaaagaattaatgcctctacaagcaagagttaatgcagccctgaaagaggactaactgcatttggtatataaatcgcccaagctctcttgtcccttacgtaggctatctcaagagcacatattctacactgatgtcttgagttcctcaagaaagattaggctccagttgcccagaatggtaacttgcttaataaaacatccttcactggcttccttttctccctctcgcccacttttccttgcctttctcgctccccacccactttctggtatttcccagactcatcttccaaataaccacttgtatttgaatcttcacatcaggatctgcttctgaagtctatctcaaggagccctctaaggtgaaggacgaggtcatggagagacatggggaaccaagttatggggaagcaggagtggcagaggcagaggaaggggtgagggagtcaaaggcccagagtgggtaaggggaggctgggggttcctcccctaagcagcctcagcaccacgtggctctccaggtgcaggcctaggtccaagataccttacagaaagccctcttcttcaaaggccaga

SEQ ID NO: 10921 - DNA, 561 bp, Homo sapiens
  MAP TO AC000127.1; EXPRESSED IN FETAL LIVER, SIGNAL = 0.38; EXPRESSED IN PLACENTA, SIGNAL = 0.41; SWISSPROT HIT: P43078, EVALUE 6.20e-01
ccatctaaatttccccaggcatgtcaaaagtagccagaccaaaactgaatttatcttctcaccaaacctgttcttcctcttccagattttggtaacagtgttgctatcgattcgggcacccaaggtagaagccttggagttatagagaggagcatctgcaaagatgcaaagtaatgaaaattacctgtgtacaaggtttctcttctcacgtatccccaacatctaacctggaaccattagctattggttatacttcaaaaaggcctaagaaatatggagagtttcctctctccatatgcaccatcagtcttctagtcccaaacctcacctctgaaccattgccataaacacctctgtgctctccctaccactgatctccgcctcactccaatattccacactatcaacagaattatagtccaaacaaacctgacgttacgctgcacttcaaaatcccttttgactgccaactgcacagactaataagtcaaatcatcaaaaagcattagtacaaagattgtattttggagtcagaaaaaatcggagcatcctatctccatc

SEQ ID NO: 10922 - DNA, 582 bp, Homo sapiens
  MAP TO AL121768.2; EXPRESSED IN FETAL LIVER, SIGNAL = 0.87; EXPRESSED IN PLACENTA, SIGNAL = 0.61; SWISSPROT HIT: P25569, EVALUE 1.00e-03; EST_HUMAN HIT: H66873.1, EVALUE 2.10e-01; NT HIT: gi15893298, EVALUE 2.20e+00
agctcagatcttctttgatttcctatgatcaaatgtaacttacactctgcttccagtaaaactctaaaatattgtataggtactacaaatctataatttgctagaaattgttacctggcattctataaaaaagtcttttcccatttccatcatttgtctgcaaatatctactgtctgaagaccagtccagatgagtgatgaaactaagggatcccaaacactcgccaacttttttataacgctgagcaactccataaatatcaaccgagctgtcattgcatccaacagcaaggtaagttccatctggtgaatattttaactcatgaattgcctccttcctatctttaatatgtacaacttccgtcatatctctgttaaaaagaaaaaaatgagactacatgaacagaagtcacaacagaattaatgccgtttcaaacatgtctaaaatgaccgtgaagctgtatcaagtgtttataaactataaagtaaacataaataacacaagtagtattaattcagcaacaatacgttgctgaacagaaatacatggaaacaatatatgccagatgtacaggaaaatgc

SEQ ID NO: 10923 - DNA, 540 bp, Homo sapiens
  MAP TO AC008859.4; EXPRESSED IN LUNG, SIGNAL = 1.5; EXPRESSED IN FETAL LIVER, SIGNAL = 0.94; NT HIT: AF095703.1, EVALUE 1.00e-114; EST_HUMAN HIT: M78799.1, EVALUE 0.00e+00
ccctggcatgcttatactggtccaagcaggcattagttcatagcctgtttctcttccttatttaaaggtgtttttacctttctcagcattccacaagttacttcctccttccttttttctcctctagctttgcctcttttaataagttctaagttgctagccaatcgggacaaatacagaatgtgaggtcctgttccagccaatggaaaccggacacagcagaagggtggacgcgtcaggttataaatgaccctgtctcctttgttcggggtactctcgtggcaaaactgctgccaagtgtaccctttctgcagaaaataaaaatggccttgctgaataaatttaagttcaagtactatttctttacggcaccggggaacaaacatttcaaactgttatatgtccactggcatgacctccaaaatgacctctaattttggccttctaaaatcagtaggacagctttttatctcagagggtagtcacagtagttgggcattcctatgtgtcagggccacctggcaaaaattccaatgcagt

SEQ ID NO: 10924 - DNA, 546 bp, Homo sapiens
  MAP TO AC010507.4; EXPRESSED IN PLACENTA, SIGNAL = 1.7; EXPRESSED IN HEART, SIGNAL = 1.2; EXPRESSED IN FETAL LIVER, SIGNAL = 1.8; EXPRESSED IN HELA, SIGNAL = 1.5; NT HIT: AF109718.1, EVALUE 0.00e+00; EST_HUMAN HIT: BG015076.1, EVALUE 0.00e+00; SWISSPROT HIT: Q21184, EVALUE 6.80e-02
tggtggaacctggtaaaagctcacctcccaccatggaggaggagccctgggcccctcaggggagtccctgctggacagtgagacagagaatgaccatgatgatgctttcctctccatcatgtctcctgacacccagttgcctctaccactcagatgatgtcaggcccagtccctcagtgccctgcgcaaggaacaggactcatcttctgagaaggatggacgcagccccaacaaatcagacaaggaccacatccggtggcccatgagtggcgctcatgatcttcagcaggcggcaccaggccctggcggggcgcaccagggtcatcccaaccaggataaccggaccgtcagccagatgctgagcgagcggtggtacaccctggggcccaatgagatgcagaaatacaacctggccttccaggtgaaggtggcccacttgcaacaaggaccgaaagaagtccagctcagaggccaagcccacaagccaggggctagcaggagtgtaacaagggctcgtgggagcggagcatatcagagacgggcact

SEQ ID NO: 10925 - DNA, 535 bp, Homo sapiens
  MAP TO AC010077.1; EXPRESSED IN LUNG, SIGNAL = 1.7; EXPRESSED IN FETAL LIVER, SIGNAL = 1.3; EXPRESSED IN HELA, SIGNAL = 2.4; SWISSPROT HIT: P26358, EVALUE 4.00e-36; NT HIT: AF202552.1, EVALUE 1.00e-120; EST_HUMAN HIT: AA827129.1, EVALUE 1.00e-110
aaaaataaaaggaatcatctgctcttacgcttagcctctccatcggacttgctcctcctgggcgtgcgaggtttggaaaggggtttgggggggctgttggcatctgccattcccactctacgggcttcacttcttgcttggttcccgttttctagacgtccattcacttcccggttgtaagcatgagcaccgttctccaaggacaaatctttatttaaaagggatttgactttagccaggtagccctcctacagcaggaaaggataatttaagtagcagtgaatgtaaacaagtgtcagagaacaaggaaacacatgtgtttccttcatcatcatcatcatcatcatcatcatcaggcaatgaggacagctggggatcttgctgcctccctggtcacagacaagttactaggaggagacatttttctagaggctaggatgctgagaactgacttacctcggataattcttctttacgtaatttggtttccaagtcacataactgattctttatttctgtttgcagaaattcgtgc

SEQ ID NO: 10926 - DNA, 582 bp, Homo sapiens
  MAP TO AC006334.3; EXPRESSED IN PLACENTA, SIGNAL = 1.2; EXPRESSED IN HEART, SIGNAL = 2.5; EXPRESSED IN HELA, SIGNAL = 0.59; EXPRESSED IN FETAL LIVER, SIGNAL = 0.94; EST_HUMAN HIT: BI008017.1, EVALUE 3.00e-96; SWISSPROT HIT: P34678, EVALUE 5.00e-11; NT HIT: gi11141878, EVALUE 6.00e-04
ggcaagaacttcctggacacagcatatcatcaggagcagggcagccagattaacataataagactgggattaacacactaagacccttctaatctctgtaagtggatttaaagagacttccattgtgctagccctggagttaggcaggagttctaaagctgagacatctgtgaatccctttgaaatgcattcataatttttctaagcatgagcattttctggggaggaacgattggtttattaaataaatagtgatcaaacagtaaggatcactgtactggggtggtggggaaaggctggtgatccctacctccagcggcaggttccacgctatgtacacatgagacttgtaatcgtccatccagacctcagcaacgcgaagagcattcctcttggtgtagaagccaatgttgctattatatggcttcttcttccgctcaatgtgggccacccgtgagcaaggaaggacctccatgctgcccccacagagccatacctaggggtacaaagatttcatcagcctgaaaaagaaattcccagaggctatgccccctccccaagcccaaaagcaatggttcagct

SEQ ID NO: 10927 - DNA, 541 bp, Homo sapiens
  MAP TO AC008716.6; EXPRESSED IN PLACENTA, SIGNAL = 0.44; EXPRESSED IN FETAL LIVER, SIGNAL = 0.55; NT HIT: AB037738.1, EVALUE 0.00e+00; SWISSPROT HIT: O53257, EVALUE 3.90e+00; EST_HUMAN HIT: AI345820.1, EVALUE 1.90e-01
cagagtccggagtaagtcgcttttccgccgcatctctgactgttggatcagctggacagggcccttcttgatgggacggtccagagtctggatgttggtctggcgtgtcacgggaccacagatgaccgtctcctggggagagctggcctcagactggctgtcgcagctagatgtggagaggtcattgcaagacgtgccgctctccccttctttgtcacctttgccattcttgcagcagcaatcgcagtgtgagggtgaccatctggaaggctcacctgaaaagaaagcaaaggacccaaaggattaatgccagccaggtcagttggagtagcagtatagcacttggacatacacagaaacacacataagagaagcatcgcagaaccatgcttttagaaaaagtggggtggcacccagggtgggctgcaacaggtgcacccaaaagccaagtccacgaggggaggaaattaatgatggcatgctatataagaggaaatatagtataatgcttaagcccatgagcacgggagtcagaaatacc

SEQ ID NO: 10928 - DNA, 585 bp, Homo sapiens
  MAP TO AC016630.5; EXPRESSED IN PLACENTA, SIGNAL = 3.5; EXPRESSED IN HEART, SIGNAL = 1.9; EXPRESSED IN LUNG, SIGNAL = 5.7; EXPRESSED IN FETAL LIVER, SIGNAL = 3.5; EXPRESSED IN HELA, SIGNAL = 5.6; SWISSPROT HIT: Q62318, EVALUE 2.00e-22; EST_HUMAN HIT: AW630027.1, EVALUE 8.00e-72; NT HIT: gi16162701, EVALUE 8.00e-71
caccagatgcaaccaacatcataaaagcaactgagggcacacatgggagaacaactccaacagcccccctcagcctcatgtaccagtagagcgcacagtatggtccttggtgtacttcacccgctggtgcgcctctacacaggtctcacacagaggctccgagcactccacacagtagctggtggctggggcattatcctcacagctagtgcagcactgccagacaaaggcagggtcagagaaggcaagacaacttgatagatccacgtttacatcccagaaaatacaaccggagatttaagattggtcccttgacccaacctaggcagcccacccagagccttgggaaagtggagtaacagcctggagctggtgccaagctcctcctgcgcagatgccccctccccagaaacctccttgtggttgctgagataggacgcacctggttcgcatcctgggcgtcggtggcagccttgctgccactatcacgcatgaaataattctccacgatgtctttggagaagcactgttgcttgcacacgggacagtccaccacttcgagaagcagggatgtgggagactgtt

SEQ ID NO: 10929 - DNA, 551 bp, Homo sapiens
  MAP TO AC016572.4; EXPRESSED IN FETAL LIVER, SIGNAL = 0.53; EXPRESSED IN PLACENTA, SIGNAL = 0.53; SWISSPROT HIT: P08547, EVALUE 1.00e-51; EST_HUMAN HIT: H80159.1, EVALUE 3.00e-31; NT HIT: AL163213.2, EVALUE 4.00e-17
gcattgccctcataccaaagctagacaaagacacaacaaaaaaagaaaactacaagccaatatcttgaatgaacacagatgcaaaaatactagcaaaccaattccaacaacacagcaaaaagataacacaccatgatcaagtggaatttatcccagggatgcaaggatggattaatacacacaaatcaataaatgggatacaccacatgaacagaatgaaggacaaaaaccatatgatcatctcaatagactcagaagtagcattttacatgattcaacgtgccttcatgatgaaactggatatacaaagaaaatacctcaacacaataaagaccatgtatgacaaatccacagctaacatcatacttattaggagaaaaacctgaaagcctttcttctaagagctagaagaagacagaggtgtccactttcaatacttttattcagcatagtactggaagccctagcaagagcaattaggcgagggaaagaaataaagtccattcaaattggaaaggaagaagttaaatcgttcttgtttgcaaatgaca

SEQ ID NO: 10930 - DNA, 547 bp, Homo sapiens
  MAP TO AC002991.1; EXPRESSED IN HELA, SIGNAL = 1.1; EXPRESSED IN FETAL LIVER, SIGNAL = 0.58; EST_HUMAN HIT: BF684004.1, EVALUE 3.00e-77; SWISSPROT HIT: P71944, EVALUE 2.60e-01; NT HIT: gi14778134, EVALUE 2.00e-77
gtaaacccaccaggttcacggccacctggtcccactccttaccacatccttgccacccctgctcttcaggtcttggatctcagccatcagcctctgtagctcctggcaggtgtacttgtataactcatagtctctgccagggtcccgcagatccacctcggcctcctcactgtagtatttaccttcctgtagaggtaaggataaaggctctgtgtgcatggggtaaaagtctccctgctgggatcagggacacttggctgacatctccttttagataaaaacagtaacaatgaagcctcagtcaggtctctaaaagatctggtccttaaattaaatgcttttcttctcttcaaaatagaaacctcttttgctttctgattgcagagtaatgcatgcctggtatcaaagattcagaatatacagaggagtatcaaaaagaaaatggaaaaattgcctataatttcgcctctcagtccgaaactgagtgaagattgtggataaataaacattttatttgtaaacaaaacgggatcatactgtccgtgct

SEQ ID NO: 10931 - DNA, 530 bp, Homo sapiens
  MAP TO AC000051.2; EXPRESSED IN FETAL LIVER, SIGNAL = 1.3; EXPRESSED IN PLACENTA, SIGNAL =   1; SWISSPROT HIT: Q9Y2N3, EVALUE 4.00e-09; NT HIT: gi16167547, EVALUE 0.00e+00; EST_HUMAN HIT: AL042278.1, EVALUE 0.00e+00
tctgctgccttttcacactgggtgtgacctgaagagacagcctgaggcctgtcctcactcactgtctttgaggaactgagggtcagctggcagtgggatgaggctggccccctcctccgctttagccccggcaagcctcccgtggagctgtaggagctggagatggcatttcggttggtgcaggagctcgtccaggaggtctgggatgtctggttatatctgatttctgacctctgggcatggaggtctgtctgcagaggcccgggcccgggcacaaagggagagaggcctccattgtcccgcaggggccgaaatgcagacggtgcatccccggtgacctccgggacccttctctgatcaccaggattctcttggactctagggtccttgtcctgctcaggcatccctgccccgctctccttgagggccctcaacactatcttccctggacacaagtctggggacagccgggtgttgtggaccccaaaggggtgactcccggctcctgggccccacagagagtccatgtt

SEQ ID NO: 10932 - DNA, 556 bp, Homo sapiens
  MAP TO AC009086.5; EXPRESSED IN LUNG, SIGNAL = 2.5; EXPRESSED IN PLACENTA, SIGNAL = 3.8; EXPRESSED IN FETAL LIVER, SIGNAL = 4.1; NT HIT: AF042836.1, EVALUE 8.30e+00; SWISSPROT HIT: O35625, EVALUE 4.00e-03; EST_HUMAN HIT: BI008490.1, EVALUE 0.00e+00
ctcatggaggcatggtcaggcaccttagatttgagaacagctatgttgctgctgaccagctgtgtgaccctgggctggtttccttccacacaatgggagtgccaatggctgcatgcatgcaaagaccgtctgaggataggaggaagcaatctgttgagcacccgtgtacctgagtgtcatcacctcccaagggcatccttcgttccagagctggcgccttggaaggcccttggtcactgaaggcagtgatgatggtaacagcagtaaatcatcatttacggctgatgagggaaggccaggggtagggctcctaggtcctggataagaatgagggtctgggcactcctggggacagctgagtggtaggactcctgggtccccagggggaaggtccatcttcagtggcattgggcctaggctgggatgctgagttatccactggagcatcagcagtacaggcaggcacagaggcagtggatccatcggaggtggcaggtgtaggatcgtctggtgagcaagtagagtcaccaaatctggctgaccactacccccacta

SEQ ID NO: 10933 - DNA, 515 bp, Homo sapiens
  MAP TO AC005790.1; EXPRESSED IN FETAL LIVER, SIGNAL = 0.48; EST_HUMAN HIT: BI461316.1, EVALUE 3.00e-77; SWISSPROT HIT: P23468, EVALUE 2.00e-18; NT HIT: gi14765215, EVALUE 2.00e-77
gtgatcatgggcgtgtattgagagttgtaaagttccttctgtgtgcagtggtgctgtgtacactgcactgtgaagaagactcagagagggcagggctttgcttgaggccacacagcatggagctggtagagcaagtaaggcgggcagggccctggctggaggctgcgcagccatgcttgcttggccacagatgatgctccacctggggaacgtgtccacgaagtccactgtggctgaggtgctgtggccctgccttgggggagcattgaccccaggctgcctccccctaccccaactcacctcaaagcgctgagagttgaccttcttgcccttcttgttccaggtcactcgtggcttggggtcacccgtggcctgacacacgaaagaggccacaccccccgacacgccgatctggtccttgggttctttgataaacctggggggctctggggatacagtggaaagaagggggggcgctgatgggtccaggcatctggctaggataccaaggagcc

SEQ ID NO: 10934 - DNA, 556 bp, Homo sapiens
  MAP TO AC019183.3; EXPRESSED IN LUNG, SIGNAL = 1.5; EXPRESSED IN PLACENTA, SIGNAL = 3.7; EXPRESSED IN HEART, SIGNAL = 1.5; EXPRESSED IN FETAL LIVER, SIGNAL = 1.9; NT HIT: gi7656876, EVALUE 3.00e-95; EST_HUMAN HIT: BI087886.1, EVALUE 4.00e-86; SWISSPROT HIT: P21445, EVALUE 1.40e+00
cctgcttttagcctgattggtattttagtgagccctttttttaatacctgattggtcgggtgtgagctgagttaccagccccgtgtttaaaggtgggtgccatcaccttccccagctaggcttaggaattcttagttggcctaggaaatccagctaatcctgtctctcagtccgccctctcaacaggaaaacccaagtgctactggggaggttggctgatgacagctctaactgcctcctgctgaactggggcgtagtaggggttgtgcagttgagatttccttgggagggttgcctttgatgtcatcaacatcggagcatgggctagcaggctggctcaggggtccgtggtagatcttagtcatggactgtatctggggctccatttgaagaactatttgtagttttccagctttgattctgaaagagacaaatttaacaaggaggttaaagatacagggattgaaatgtatggcctgaagtacagggggaggcacatccaacagttagtagggttttctctgaggcttcatggagcccagtgagggtggtatta

SEQ ID NO: 10935 - DNA, 538 bp, Homo sapiens
  MAP TO AC002077.1; EXPRESSED IN PLACENTA, SIGNAL = 0.7; EXPRESSED IN FETAL LIVER, SIGNAL = 1.6; EST_HUMAN HIT: BI818629.1, EVALUE 2.00e-59; NT HIT: gi13649019, EVALUE 2.00e-59; SWISSPROT HIT: P39981, EVALUE 2.60e-01
gcacgtcctcctcttgagtccttgaaacaaacatgttttccattctggcttcagggcagagcccccagccaaaggacacgtgtgcccacacaaggcctggccgtggggcttggccatcacgtgtaaggtgccaaaaggacagtctctggcctgtaagaccggcctgtgttgtgacctcagtcggtttactgggcagtgaggtatatttgtttggctgtggatgtttttttcagccgcggtttgttagtgtaagaagtgcccacccactgcagcctggatgctgggacagggaactggcgggtcctgggaggtcatgattggtggcttgcttagggcccctatctttagaagtttctctgagggcactcacaggaaaaggataatgcccgtattggccatggcataggcgagtcccaggatgccgctgcccatgatggcattgctgaggttgaacactgacatcccgaatgatgtcttcccctcgaactgcaggcaccagaatgggacggggagggtgggaggagtcagcaagggacag

SEQ ID NO: 10936 - DNA, 501 bp, Homo sapiens
  MAP TO AC008518.3; EXPRESSED IN FETAL LIVER, SIGNAL = 1.2; EXPRESSED IN HELA, SIGNAL = 0.66; SWISSPROT HIT: Q99767, EVALUE 2.70e+00
gtctcgacctcaggagttgcctgaggaaactgatgctaaaaatccaagttgcaaatcaaaatattagaaaaatcaagccatgctctagacttggaagcccgacacttagatcatctctctctgagcagagccagctgttggcccccataggtgagtgtcagtgacattctgacacaggaaaggtcaacaggtgccccaggaccacatccacctggttagaagctctgctgggtttggtctgggagagacccgctgcctcaagagaatttgctacagggaaagccccctgggtaaccatgaagatgtgatatgttatgtcagcatgaagatagacgatattgtagaagaccttatggggtttgtaatggggaaagtgggcaggggaggtgggaataaatattgcaacaaagtatcttttctctcttgtgtgtgtggaaatgtgctctttggggcattaaaatcctaccagtgtacccccatgcccttccaagatgagctcag

SEQ ID NO: 10937 - DNA, 504 bp, Homo sapiens
  MAP TO AL121594.3; EXPRESSED IN LUNG, SIGNAL =  10; EXPRESSED IN FETAL LIVER, SIGNAL =  13; SWISSPROT HIT: P12970, EVALUE 4.00e-72; EST_HUMAN HIT: BE619541.1, EVALUE 0.00e+00; NT HIT: X06705.1, EVALUE 0.00e+00
tggcaacttttgcttggtctacagaaggtactaaaaaatattagcttcccaagagaagaagcagaggctgtttgtccaggccaagaagaaagctgctggcaaaggggacgtccccactaaaagaccacctgtccttcgagcaggagttaacaccatcaccaccttggaggagaacaagaaggctcagctggtggtgactgcacatgaagtggatcccatcaagctagttgtcttcctgcttgccttgtgtcataaaatgggggtcccttactgcattatcaaggggaaggcaagactgggacatctagtccacaggaagacctgcaccactgtcaactttacacaggttaactcggaagacaaagacactttggctaagctggtggaagctatcaggaccaattacaatgacagatatgatgaaatccgccatcactagggaggcaatgtcctgggtcccaagtctgtggctcgcatcaccaagctcgaaaaggcaaaggctaa

SEQ ID NO: 10938 - DNA, 593 bp, Homo sapiens
  MAP TO AC007559.3; EXPRESSED IN FETAL LIVER, SIGNAL = 0.56; SWISSPROT HIT: P03545, EVALUE 1.10e+00; EST_HUMAN HIT: AW970864.1, EVALUE 1.00e-30; NT HIT: L13460.1, EVALUE 3.60e-02
ctaaccttcctggccattccacattgactgtgatgtgcaaatgtagtaatacaatgaaaccactacatttaccattactccaatgtataaatgcaatattgtgatgaaaccacttaaatatcttctgcttaaggagatttgcactgtcctttttctgaaaactgttaatgatcactgttttttccttgaggagatccctaaaagtctcagattcttaaggacgttgctaaaaagtacacgtaaatttcaagttgaatgccacctgaaggttgatggaagtggagcaacacagaattctgaagataaactggctgtcctgagcgaaaactggaagaaagttaaagacaactggataatgtgtatcaaatgtgccattaaaatatacaaaccctttgatccagtaaattccatatctgggaatttaacccaaataaatcatccgagaagacacaaagatgtggttataccaacatttgaaattctgcccaaagaagcagaaaaaaggaagaaagaaaggaaggaacgaattgtgtaacgatagcctattgataataaattatagtacattgattcaatggaaccctataccacca

SEQ ID NO: 10939 - DNA, 592 bp, Homo sapiens
  MAP TO AL121846.6; EXPRESSED IN FETAL LIVER, SIGNAL = 0.83; EST_HUMAN HIT: AW894443.1, EVALUE 6.00e-08; NT HIT: AL163208.2, EVALUE 2.00e-03; SWISSPROT HIT: Q16531, EVALUE 1.50e+00
tcaaacgttacaggtagctcaaaggtagaaaaacctgatgaagtccatagaatttgttgattaataagttactgatatccttttcaaaaggatttgtagtaagcagcataatggctccccaaagaagttcaaacctaaatccttggaacctgtgaatatatcaccttacgggcaagagggagtttgcagatgtgactcagttaaggattttgatgggaagattatcctggattatttggtgggtgctaaatgtaatcacagtgtccttacaagtgaaaaaggaaagcaggagagggagagaaagagatttgatgatggaagcaaagttcagagtgatgagatttctggctgcgagcaaagaaataccaagcagcctctagaaatggaaaaggcaaggaaaggattctcacctggaacctccaaaaagatccagttctgccaacatcttgattttaaccttgcaagaccgatttcagacttctgacctccaggactgtaagataataagtgtgtgatgtttttaaaccactaagtttgtggtaatttgctaccatagaaataggaaaccagtacagcatttcagtcaaggggt

SEQ ID NO: 10940 - DNA, 549 bp, Homo sapiens
  MAP TO AC004789.1; EXPRESSED IN FETAL LIVER, SIGNAL = 1.1; EST_HUMAN HIT: N39489.1, EVALUE 0.00e+00; SWISSPROT HIT: P57737, EVALUE 9.00e-30; NT HIT: gi13648926, EVALUE 1.00e-94
tccagacattattcctgggcgagttgcatccactggattagcaaaggcctgggcctaggtccatgctgtacatccacctggggtgaggggagtgggcagccgggactcaaagagtgcagggcgggcggggacggcatcctcacacgtggttccatgtccctgccacctgccaggccccagttccaagttccgccatgctcagggcactgtcctgcaccgagacagccacatcaccaacctcaaggggctcaacctcaccacacctggtgagagtgacggcttctgtgccaacaagctgcgtgtggccgtgccgctgctcagcagcgggggacaggtggctgtgcttgaggtgagggccccaccccaccagggctgcccctcagttccctgcctgtggcaaagacgcggagggccttagctacccacacaacacagggagcacaaaccttgtgtcaggctcctgcccgcctgtcctgtgatcctcccagccacctgccatggggcctgccacttttatccccattttacagatgagggagaagaggcaca

SEQ ID NO: 10941 - DNA, 576 bp, Homo sapiens
  MAP TO AC027663.12; EXPRESSED IN PLACENTA, SIGNAL = 0.88; EXPRESSED IN FETAL LIVER, SIGNAL = 0.89; EXPRESSED IN HEART, SIGNAL = 1.1; EXPRESSED IN LUNG, SIGNAL = 0.63; SWISSPROT HIT: P37643, EVALUE 1.90e+00; NT HIT: U53930.1, EVALUE 9.00e-03
attggctgtgtacctctccgtatatgaagcaatccctgaagaggcttacagctgaaggctgtctgccgagtacactcccaggaactggggcaatatgtcgtcttcaaaggagaatctggatggtgcatcattgtgtccaccacagatctcaagatcaccaaatccggactggcaatgcataagaggcatgaagttctggtaagactggatagctagtggagaggaacaggtgaacatatgtcggggtagaagtcaagtcaggcagcaaggatcctgaaggctgcatgcctaggccagagattgtaagtccaagttggcaatgcctgagtctagggagtcgggcaatgttcacagggtcaggcagggctcaactaacatagcagaaacagttttaaaaccagcagctaagagggctccaggaagtaacaccaaggaattgggaaagaagaaaactactattattatattacgttcctactctgtgctaggcattttacataatttatctcctttctttctagtaactccaagttaagatgctatatttcaccatgctgcagataaggatgctgaggc

SEQ ID NO: 10942 - DNA, 528 bp, Homo sapiens
  MAP TO AC019209.3; EXPRESSED IN PLACENTA, SIGNAL = 1.3; EXPRESSED IN FETAL LIVER, SIGNAL = 1.3; NT HIT: AE007818.1, EVALUE 3.20e-02; EST_HUMAN HIT: BF528382.1, EVALUE 7.40e-01; SWISSPROT HIT: Q13023, EVALUE 6.40e+00
caccacgttcaggtcacaagcacatgtcttgctattaggagagttgtaaaggaaacagcagaagcagtccctccccagaaaaatgcacagtctaatggaggtgaaattaacttcagcaataaacttaagattcatattgaagaggcacttgcactgactcagaaactttctgcagagaatctgaagaagagcaggagcagcaagacagaaagcactcaagaggtgacttcggaggctcagtcaccaaacaataggcaatgttgttctctaagccttgtaccaaaactgatagggtaaagggtcttccaaatacaactttatttattaacaatcctcctttattctggtccacctgaggctacacaaatgtaccctcttcttaaagaaactgatttggatagacagggaataggagatttcaatcctgctgaactaggttgcttctcttatgaaatcagcctgcaatagactttcaaaaggaattccaagtaggctttgaaaataatgggaggagtaagtggcccatca

SEQ ID NO: 10943 - DNA, 576 bp, Homo sapiens
  MAP TO AB014077.1; EXPRESSED IN FETAL LIVER, SIGNAL = 5.5; NT HIT: gi16174607, EVALUE 1.00e-113; EST_HUMAN HIT: BG744340.1, EVALUE 1.00e-113; SWISSPROT HIT: P36915, EVALUE 2.00e-34
gggttgactttcactgctccatcctcttatcaactctgtcctaggttgtgaatttcccgccagcactttatgagtatgtgactggagaacttggactggccctggtgctggttttgaacaaggtggatctggccccgccagctcttgtggttgcctggaagcattatttccatcaacactatccccagctccacgtcgtccttttcacctcttttcctcgggacccccgcaccccacaggatcctagtagtggtgagtgggcaatgagagagggcaacttgggagaggtgagttggcaggggacaaaggggagaacagagaggcttattgacaagggggcacctggtcttgggcctaagggtggtgggagagatgagaggcctaagcccgtgtgcccatccttttgtgccctctgatctcagtcttgaagaagagtcggaggcgggggagaggatggactcgggccctggggccagagcagttgctgagagcctgtgaagccatcactgtggggaaaggtatgtggcccttagaggagggctgtaggaggacatgggggagaccaaagatgcagaa

SEQ ID NO: 10944 - DNA, 579 bp, Homo sapiens
  MAP TO AC004510.1; EXPRESSED IN HEART, SIGNAL = 2.2; EXPRESSED IN FETAL LIVER, SIGNAL = 0.71; SWISSPROT HIT: P50646, EVALUE 9.60e+00; NT HIT: gi14861873, EVALUE 4.00e-05; EST_HUMAN HIT: BF932663.1, EVALUE 9.00e-07
agggttcatttgcattgtagcatgcaattgtaacagtattaaaacaccacagcatgcgtctgagctttattcctgtttatggctgaacgattttccattttatgaatatgcgtcatcttttcatggacatgagggttgtgccccacctgttggccttcgtgaacaatgctgcaatgaaaatgcttgtagcatttggaacctatcagtggtttccaggggctggggtgaggggagaatggggagtgactgctaatagatacggtgtttccttttgggctaataaaaaattattacctttgtctggaactaggcaaaggtggtgttagtgcaacagcataaatgttcttgatgccactgaattgtatacttttaagtgtttatgtggaaatccagtaataaaaggcaaatgcagtgggctttctcaaaaataaaataaaataaaaataaagaaataaaataaaataaaaataaagaaaagaaaataaataaataaataggtaaatttcaggttgtatgtatgttattacaataaaaagatcattttagaaagggtagttcacttccctttaagtgggctca

SEQ ID NO: 10945 - DNA, 513 bp, Homo sapiens
  MAP TO AB023053.1; EXPRESSED IN PLACENTA, SIGNAL =   1; EXPRESSED IN FETAL LIVER, SIGNAL = 3.8; SWISSPROT HIT: P08547, EVALUE 7.00e-10; NT HIT: AL163246.2, EVALUE 6.00e-13; EST_HUMAN HIT: AI348538.1, EVALUE 6.00e-20
caccacttgaatcttgcaccttaaactcacacatccaaatccactatctctctcattcttcctattcctcaggaacacgtaccaatagccaccccattatccaagccattacagacaacagtaaggaggcttctcaaaaaattaaaagtagaactactatatcatccatcaatctcactaatggatatatatccaaaggaaatgaaattggtacgtcaaagagatacatgcactcccatgttcactgcagcgctattcacaatagccaagatatgaaattaaccaaagtggccatcaaagaatgaatagattttaaaaaatgtggcgtatgtacacaatggaatacttttcagccataaaaagaatgaaattctgtcatttgtaacaacatgaatgaaccaagaggacattatattaagtaagccaagcaatgaagaacaaatggcacatgatttcactcatatgtggaactgcaaaagctgatctcatagaagggaagaggagaatagcggt

SEQ ID NO: 10946 - DNA, 539 bp, Homo sapiens
  MAP TO AC020894.3; EXPRESSED IN PLACENTA, SIGNAL = 2.2; EXPRESSED IN FETAL LIVER, SIGNAL = 1.5; EXPRESSED IN HELA, SIGNAL = 1.4; NT HIT: AJ310932.1, EVALUE 5.00e-04; EST_HUMAN HIT: BF819573.1, EVALUE 1.00e-05; SWISSPROT HIT: P34207, EVALUE 3.90e+00
aacaagcatggacttcagggccattaagtcatacattcatttattaacccattaattcaagaaagtctttactgaacttcagttaagtaataacttctgctaggcactggacacatagaggtgaacaaaatggacaaggtccctgtcctcatggagcttacagtctaatgacaatcacccaaagccaaattcaattgcctcctctgccagttactagctgggtgaaattcccactgaattgaggatttcattttgccatctgggaaatgggcatcactttgtggagttgggatgaaaattaaattacgcatatgtatgtgtgtgtgcatgtgtgtgtgtgcagatcatgtggcacatggaaagtccttacatatttgagttttatttcctgttcctgttctcttaaatcagggatggcatcttgggcagggtaattctttgttttagggcctatcctgtgcatcgtgggacatttagcggtatccttggcttctacccaccaggtgctagtagttctaccccccagcacaagttatgat

SEQ ID NO: 10947 - DNA, 512 bp, Homo sapiens
  MAP TO AC024578.2; EXPRESSED IN PLACENTA, SIGNAL = 0.69; EXPRESSED IN FETAL LIVER, SIGNAL = 0.72; SWISSPROT HIT: P35846, EVALUE 2.10e+00; NT HIT: gi14149951, EVALUE 1.20e-01; EST_HUMAN HIT: BI021244.1, EVALUE 1.00e-05
aggccataggtaacagtgcggggggttgggggacgtagcctcccgtatcacaccacgctccccacagatgtctgaggtgcaggggtagtgtggcgggggaaggggggactagtaactgtctgaaagattgggttgctcccccacccacctcaccccacccctttgtgctttccatccctgagagtggccactgctgggagagtgaaaagatttgcagaccaatagctttggaattcctttcaaagtggttgaaaaatctgtcttcaaaataggtgggcagtggtggaagggtcagaagcacagctgcaggccgaggcagcactggcacaggcctgggtgggaggcagaggcgtgactcaactctgccccaccaggcgggcgggtgcagccagtgactccacacggttggagggggcctcacacagggtagaacttgtcctttctcactgaaaggtcagaaagaaattagaggtggtccttcattgctgccttcaccagaggaacatcccatc

SEQ ID NO: 10948 - DNA, 595 bp, Homo sapiens
  MAP TO AC010641.5; EXPRESSED IN FETAL LIVER, SIGNAL = 0.41; SWISSPROT HIT: P10266, EVALUE 6.00e-44; NT HIT: gi15922990, EVALUE 1.40e-01; EST_HUMAN HIT: AI394290.1, EVALUE 2.00e-87
tcaaaacacctcgcccttactcgtatgtttcacctgcctcacagccaggctcgaactatggcgcaagcctgtcccacttgtcagcatgtccctggtgttatacctgtggaaggatgcaatccacaaggcttggctccaaatgaaatttggcagatggatgttacacatatagcagcctttggcaagcttagctatgttcatgtaactatagacacttaatctcatatgctgcattctacatgccaaacaggcgagacagctgctcatgtgcggtgacattgtcggtcatcatttgctcatatggggatccctaaacaattaaaaacggacaatggacctgcttatacttagccatgtttttcaaaactttttacagttatgggcaatcacccacaaaacaggaataccttacaatccctgaggacaaggcattatagagtgggcacatcaaacattacaatgcatgttgaaaaaacagaaagggggtataggagaccagctaccacctcaaataaaattacatttagccttatttactttaaattgtttgactcctggtctggatggtaagactccagcagaaagacattggcaa

SEQ ID NO: 10949 - DNA, 532 bp, Homo sapiens
  MAP TO AC016656.5; EXPRESSED IN FETAL LIVER, SIGNAL = 0.51; SWISSPROT HIT: O75962, EVALUE 2.00e-08; EST_HUMAN HIT: BF740956.1, EVALUE 2.00e-78; NT HIT: gi16170978, EVALUE 1.00e-78
aaggcaacaaagacaggacggaacccagagaacaataagaatgaaaacatttctgtcttactgtcttctctttaaagagctggatttcctttcttccatctcatcaatgggcgaggaggaagagagaagggaattatccgaagggttgaaggaagggctgctactatctccctggtcaacaaggagtgagctggggcgatcctccagtgcctggaagaaattgacataatcaacaacacttactgcccacagcccatgattggctaaaactaagacaagaaaatacccaaagtcagaaaatacagaaaatgtatttgtgaaattataaaatctttgtttgtgaaattatagcatttaataacacaaaaaacccaactattaataaaaaaatagagtcaaaggaggtggagaaaaaagttggaatgaaaaggatagtgaatttacatacattaatatattctatttcttgttatcaaacaagtagaaatgttatacttgcttatgtcagagtactgcacccatttttggacat

SEQ ID NO: 10950 - DNA, 512 bp, Homo sapiens
  MAP TO AC000393.1; EXPRESSED IN FETAL LIVER, SIGNAL = 2.2; SWISSPROT HIT: Q13164, EVALUE 2.20e-02; EST_HUMAN HIT: BI769257.1, EVALUE 0.00e+00; NT HIT: gi11427526, EVALUE 0.00e+00
tctgactctggcactcatgcctgtcaattgcttagcacagggccaggcacgtggtcagagctcaatgaatggtgatgaggatgaacgttttgaatccttaatcccaccagagccccaacattcacagcacagagaacgcccagagctgccagtgagttgagagggagtgcggagaggagggcccaggtgcccaccacaccccccgctgcccaccttgttgcacttcacacagtggtacgcatccatgcctggggagtagcggaggctgaagtccaaggcgggctcagtgctgggcacaagaggactgccgtacaggctgacggagtgctccaggaaggctgactgcatggtggagggggcctgccggtagctgtggccataggttgtggccaaggtgtcccaggagaagctaggcttgtagaatgggggtgagtcggacagtggagagtccccatcctggggtcgggacagcacaatggggccctctgtggagataacgacacaggcctggt

SEQ ID NO: 10951 - DNA, 596 bp, Homo sapiens
  MAP TO AC004179.1; EXPRESSED IN FETAL LIVER, SIGNAL = 0.49; SWISSPROT HIT: P35410, EVALUE 5.00e-26; EST_HUMAN HIT: N79066.1, EVALUE 5.40e-02; NT HIT: Y19213.1, EVALUE 2.00e-03
acatgccaggcccttctcccattactcacaaacctggctaaccacatgcaaagaaagggccagggcccagctcaggatgctcatcacagcagaggtgtgctttgggcggtggcagcaccaggtgggacagaggacacacagaaagctctcaatattcatggccaccaggagacagagactcactgtgtcagagaaataggacacaggctccagaaacatggccacctgcaatgtcacctggtgatacagcatgaggattttctccaacaggatcacagttacacaggagaggttgaccatatcagcagcggccaggttaaggacataggtcatgtaggggctgctcctgacctggaagcagaaaagccagcacaccacaccattgcccaccagcccacagaaggccaccagcactgtcaggatgaaaaccacctgtttgcccaccaaccactcgcctcccgtatgactcatgttcacttgtcctggggtctctgtcctgttgtcccaatccagcttcccagagaacactgagagaaactgggccatggtgggctgccttggctgcctgggcacaccctgcaaagacaaaggttggt

SEQ ID NO: 10952 - DNA, 571 bp, Homo sapiens
  MAP TO AC002984.1; EXPRESSED IN FETAL LIVER, SIGNAL = 7.3; EST_HUMAN HIT: BF815912.1, EVALUE 0.00e+00; NT HIT: M18048.1, EVALUE 0.00e+00; SWISSPROT HIT: P21414, EVALUE 1.10e-02
aaatgactgtggtggccttctcagaccctgtaggaaaggcctctccctatctagtgaaagtgtctacttagactaagaggtattttagtttttgtgactcggggcatgttgagtaaagctaatttgccagtcctgggctggggcaaatgctcaagcttgatgtgtagggaagggagggggcctgaataatccttgaggagtagtagaataacagatggaacactgagaagttatttccttgaggatagatttctacaatggaaaggaaatgaaaggttctaagaggcgggctagtggcttgtactatagcatagcctgcctttgctggtgtgtggcgattaggcctggtggaactgccatcaataaatcaagcgtgatcagggtgaggaacagggaagaaggaaatgtggggaaatgggatgaacatcaggtggatcacagagatgcagtcatgggggtcaggtgtggtatccggaataatgtgggaggctggattgaagtccgggccaggaacaatggtaattgtgggacttaacaaaaagtgagaacagctgaaggagtcagggagcag

SEQ ID NO: 10953 - DNA, 582 bp, Homo sapiens
  MAP TO AC004172.1; EXPRESSED IN FETAL LIVER, SIGNAL =  18; EXPRESSED IN HEART, SIGNAL =  43; SWISSPROT HIT: P30467, EVALUE 2.00e-39; EST_HUMAN HIT: AV730970.1, EVALUE 4.00e-95; NT HIT: AF055066.1, EVALUE 0.00e+00
gagctcacccctttcctacctgggatcttattcctccacatcacagcagcgaccacagctacagtgattacagcaactagaagaaccaggccagcaatgatgcccacaacggggatgatgggctgggaagacagctctaagaaaggaggtgaacgtgaggggccctgacccccaggcctcagccctgaccctgcttaaaggctccagaaggacttctgctttgcctgagaagagacatgacccctcattcgtctccttaccccatcttagtgtgaggggctcaggcaacccctcgtgctgcacatggcatgtgtacctctgcttctctccagaagacaccactgcagctgcccacttctggaaggttctgtaccctgcaagtctggtctccacaaactctgcatcctgaatttggtcctccccatcccgctcctgggtcagtgtgatctccagagggtagaagcccagggcccagcacctcagcgtggcctcatagttggagatggggtggagggttacctgtgccttcaggggatctgagggcaagaggtagaaaattcaggcactttgcattcctcatga

SEQ ID NO: 10954 - DNA, 539 bp, Homo sapiens
  MAP TO AC003955.1; EXPRESSED IN FETAL LIVER, SIGNAL = 0.43; EST_HUMAN HIT: BI765545.1, EVALUE 3.00e-03; NT HIT: AF325161.1, EVALUE 2.00e-06
tcatcctccgtgtctttgtgagtttatgcttttaataaggaatatgttcaatctcctcctttaactaggagttgcagatcaaaccttttaaatgtattcaaattgtcatggatttggttgtgcctttaacttcgcaggctcagggagtaaatggtgatgataatgatgataatgttgatgataggtaattgagtacttattttatgtaagactctgctaaaagctttacaggaaaaaattcttcaagtatattttaaaacagtataaggtggatattaatattcacgcttccatattttactttggtgacatgtggattagataataactttaaaaactttcagcagtgaaatatttttataccaatatttttacctcatcattttctcttgtcttgctgcagtggctacaaggcaatatgatgtggtacaatagccgtgttcattgcttatacctagctttgatggaaatatttcaaatgctttatgtctagttagagtgtttgttgtagatatctggcagagcaccatttataaagg

SEQ ID NO: 10955 - DNA, 565 bp, Homo sapiens
  MAP TO AC004196.1; EXPRESSED IN FETAL LIVER, SIGNAL = 0.53; SWISSPROT HIT: O55196, EVALUE 8.00e-10; EST_HUMAN HIT: AI804667.1, EVALUE 2.00e-35
cttgggcctctgtacctcagctctccatgcccaccacttatcctcagttggcctcgttcccctgatgccctaaatattcccagaccaaatactcaccacaatgaagcccaatccaacaaagagcacaacagtgactgtggttgcagccagggatatgaggataattcccatgggtgtcaggagcctggtgggtttcactgctgtgactgaagtagttcacagaaggtgagtgtcaccatgtttagtggtttcatcttctgtggtccctgggtctgcagtgacggagtcctcggtggtccctgggtctgcagtgatggagtgtttggtggtccctgggtctgcagtgacagagtcctcagtggtccctgggtctacagtgatggagtgtttggtggtccctgggtctgcagtgacaaagttctcagtggtccttgggtctgcagtgatggagtccttggtggtccctgggtctgcagtgacaaagttctcagtggtccctgggtctgcagtgacagaatccttggtggtccctgggtctgcagacacatagtccttggtggtcgct

SEQ ID NO: 10956 - DNA, 513 bp, Homo sapiens
  MAP TO AL117376.2; EXPRESSED IN PLACENTA, SIGNAL = 2.9; EXPRESSED IN LUNG, SIGNAL = 2.2; EXPRESSED IN FETAL LIVER, SIGNAL = 1.8; SWISSPROT HIT: P06914, EVALUE 2.20e-02; EST_HUMAN HIT: BI064021.1, EVALUE 2.80e+00
accccctgcacgggagtcagccagggaagcagaaggctaccagatagttgctaaacgccatgagatatcccactgagtctggagtgaatctaactccctaggcccaggcttgcctaacttggacccagcagcctcagcttcatcccagccctccctcagcctcaccatgtggcccctgctggccctaatgcaccaggtcaccttcactcctcctgcagtctcatcacggggcccctgctggtcctaacacacccaagtcaccctcacccctccctcagccttaccacgtgtcccctgctggccccagcgcaccaggtcacccctcacctctccctcagcctcaccatgtggcccctgctggccctaatgcaccaggtcaccttcactctcctgcagcctcaccacgtggtccctgatggccccagcatatcaggtcacccctcacctctcccgcagcctcgccacgtggtccctgctggccccaatgcaccaggtcacccctcacccctcccg

SEQ ID NO: 10957 - DNA, 509 bp, Homo sapiens
  MAP TO AC008753.5; EXPRESSED IN HELA, SIGNAL = 0.37; EXPRESSED IN FETAL LIVER, SIGNAL = 1.1; EST_HUMAN HIT: BI911853.1, EVALUE 5.00e-42; SWISSPROT HIT: P33076, EVALUE 1.00e-09; NT HIT: gi14731965, EVALUE 1.90e+00
tgggccgtgtggtgatgagcaaagatagctcagggagcagcttcttccgaattaagctgttaagaagcagctccgtgggccgtttctcctcccagcagaggcaccagggtccctgaggatcgtggaaagaaggcttgagctcatcgaagccgtcgatgatgaaaaggaggcgctcgggaactcggatgagctcctggagaggcgcgctgggctcaggccagcagctgaagatgaggtcttgcatgctgcattccgtggcactctggttcatctccctgcagttgatgtagaagagataatcaaatctgccttggaagagcttcccgtccgcccagtccagcatcaccttgtgtgccagcatggacttgcctatccctgccgcgccttgcatgaccacggtgcgcggtggctcggggcgctcctcgtctggctcaaagagggtctctatcttgatggggctagcctggtgtcccacggtcctcgcgtgtccccggcctgtgtccagaagc

SEQ ID NO: 10958 - DNA, 509 bp, Homo sapiens
  MAP TO AL022313.1; EXPRESSED IN LUNG, SIGNAL = 1.6; EXPRESSED IN FETAL LIVER, SIGNAL = 1.9; EXPRESSED IN HELA, SIGNAL =   3; NT HIT: gi11418049, EVALUE 0.00e+00; EST_HUMAN HIT: BF363869.1, EVALUE 0.00e+00; SWISSPROT HIT: Q9Y698, EVALUE 4.00e-32
atgcgggtgatggcagaggcctggaggtagtccgtggcgcgggccgtggcccgcagctgtttgtgccggtcgataaacatgtgcaccgccagcaccccgaccatctcggcgatgatgaaggacagggccccgaagtagaaggaccagccgtatgagtaactattctttttggagtcgctcttggaggggtctccggcattggcagatatgtacactatgatgccaatgatgttactcagacctgcggggcgcagggtggcggggtgggggatcagagagaaggacgttagtttctcaggaagtcggccacagggcagccgtaaaggacggggacagctgtgtgggccttccccggtcccgcgccttcatgaacaggtggggcggtgtagatggacatccgcaagcttccccttaacattttatctttccattcagagagagccacaagggaagcgctaatggaaacagacatgggcagggcgggagaagggaggcatttcacaaggcgc

SEQ ID NO: 10959 - DNA, 506 bp, Homo sapiens
  MAP TO Z83844.5; EXPRESSED IN HEART, SIGNAL = 2.6; EXPRESSED IN FETAL LIVER, SIGNAL = 2.5; EXPRESSED IN PLACENTA, SIGNAL = 2.2; SWISSPROT HIT: Q06852, EVALUE 2.00e-09; EST_HUMAN HIT: AW408957.1, EVALUE 0.00e+00
gccccagaacatcctgtgcccgacgggacgatcccagagcctcctctcctaacagaaccatccaacaagagaaccccagaacatcctgtgccctacgggacaatcccagagcctcctctcccagcagaaccatccaacaagagaaccccagaacatcctgtgcccaacgggacgatcccagagcctcctctcctaacagaaccacccaacaagagaaccccagaacatcctgtgcccgacgggacaatcccagagcctcctctcgcaacagaaccatccagcgagacaaccccagaacatcctgtgcccagcgggacaatcccagagcctcctctcctaacagaaccatccaacaagagaacctcagaacatcctgtacccgacaggacaatcccaggacctcctctcccaatagagccacacgagacaaccccagaacatcctgtgcccagcgggacaatctcagagcctcctctcccatcagagccacccaacaggacaacccc

SEQ ID NO: 10960 - DNA, 533 bp, Homo sapiens
  MAP TO AL136163.3; EXPRESSED IN HELA, SIGNAL = 1.7; EXPRESSED IN LUNG, SIGNAL = 1.9; EXPRESSED IN HEART, SIGNAL = 1.9; EXPRESSED IN FETAL LIVER, SIGNAL = 1.8; SWISSPROT HIT: P38859, EVALUE 1.70e-02; NT HIT: AP000001.1, EVALUE 2.00e+00; EST_HUMAN HIT: BI090514.1, EVALUE 0.00e+00
tgcacctgcatttccacggcagaattgtttatttgtgactcagctttctttcgttcctctgggtcaagagaaaggcactccttcaaggtgtcttttttgtgcattccaccaccagtttgagaagaaagttcttccaagtcaacaaaatcatcatcttcccctagaaagttttctttggctgtagattcaaatgcagaagaagtgtcggaaggttccttgctgagcttagtcactgtgggagaaccatgggatgtctccctagaggagtccagtttctttaatttctctgacacagagctgcctgagggctttgtaggtgtatgtcctgtggacttctccaaaggtactattggtctggaatccgaagtcataattttctctccattctgctgtcgtttttccttgttgatagatttgaacttactgaatgggttgatatccttttctgaagccaggtcttcccattctccaggcctgtacagaggacaaagatcctgaggtaggtcactgttgggggagaaatggtgggtgca

SEQ ID NO: 10961 - DNA, 520 bp, Homo sapiens
  MAP TO AP001760.1; EXPRESSED IN LUNG, SIGNAL = 1.2; EXPRESSED IN FETAL LIVER, SIGNAL = 1.2; EXPRESSED IN HELA, SIGNAL = 1.2; NT HIT: gi16166512, EVALUE 2.00e-86; SWISSPROT HIT: O95613, EVALUE 9.00e-08; EST_HUMAN HIT: BF684984.1, EVALUE 4.70e-02
ctggctcggacgctgtggtgtgagtaggaggttggttgtgcctgccgtgcgtggctctggcggggatgtgtgtgtgccatctcttgctgagggcgctggttcctacctgtggtctgtgacctggcgactcccatggctttggcctttggcctctgggcttctctggcttcatggggcctcttcactctcccacttactatttctggtggtcgagggaaaagtagtaagagcagttaaaatcccgaaacgatgacctgaacagttgaagtggcatttcctgtgggaaactgacttggcttttgcaagggtcattgcttcctgatgcatgtttaactgtcctgtgttcactttgttgccgcaggtttttagaggaacgtaaagagatcaccgagaaattcagtgcggaacaagatgccttcctgcaggaggcccaggagcagcatgcccgtgagctgcagctcctccaggagagacaccagcagcagctcctgtcagtgacggcggagctcgaggccagaca

SEQ ID NO: 10962 - DNA, 500 bp, Homo sapiens
  MAP TO AL136295.2; EXPRESSED IN LUNG, SIGNAL = 1.7; EXPRESSED IN FETAL LIVER, SIGNAL = 2.1; EXPRESSED IN PLACENTA, SIGNAL = 2.9; EXPRESSED IN HELA, SIGNAL = 1.4; NT HIT: Y11484.1, EVALUE 0.00e+00; EST_HUMAN HIT: AI268131.1, EVALUE 4.00e-98; SWISSPROT HIT: Q16822, EVALUE 3.00e-34
tccccaaagcctggccacaggaagtgccctgcctcgtcacgccggaaccagttgacatggaagatacggggcagctgggcccccttgcgcccttccatgctcagccagtgttccaggtagtgcccgaagttgtagccaaaaaagggccgcatggcaaatgggtcgtgcatgatgatcttccctgggggggaagcaagatgggtaaggaatcttccttctcactggggtagggaagggcaccctgcatccagttggaggaagctgtgaaaggcttatggttctgaatatcttcagggatggggaaaagatagaagtgggaagaggtggggccatatcagactccaggggtggacaaaaggaaggtctggctcaggaagggagagaggacgtgctgtgtgcacacacaggagagggaggaatggtgagggtgctcacctttgtgttctgctgcagcagtggactcagagcgcatggcgctgcccacaaacaccccatgacgc

SEQ ID NO: 10963 - DNA, 536 bp, Homo sapiens
  MAP TO AL035701.13; EXPRESSED IN PLACENTA, SIGNAL = 1.5; EXPRESSED IN HEART, SIGNAL = 1.3; EXPRESSED IN FETAL LIVER, SIGNAL = 1.6; EXPRESSED IN HELA, SIGNAL = 1.3; SWISSPROT HIT: P22413, EVALUE 1.00e-04; NT HIT: gi12732601, EVALUE 1.00e-127; EST_HUMAN HIT: BG547099.1, EVALUE 1.00e-61
gtccgctcatggggcctgtcatttcagatattgacaagaagttaggatatctcatacaaatgctgaaaaaggcaaagttgtggaacactctgaacctaatcatcacaagtgatcatggaatgacgcagtgctctgaggaaaggttaatagaacttgaccagtacctggataaagaccactataccctgattgatcaatctccagtagcagccatcttgccaaaagaaggtaaggctgactgaatgaatggtgagctgagactagatgtgcatttgcccagtgtgatcaaatgaacagggatttctgttgctgcgcctttaaagtagactttgcctgtgtcatggtaatattctgggatttaatcctcagactctgaaaagacaaaatctcttttttcaaagcctaatttttttttcctttttcctagaatactgaaattgatgtgctctatgtatgtatggcagtaggttttaaccattttggatccatagaatattatgaaagctatagcctcccttctcagaaaaattgagatg

SEQ ID NO: 10964 - DNA, 552 bp, Homo sapiens
  MAP TO Z83844.5; EXPRESSED IN PLACENTA, SIGNAL = 1.5; EXPRESSED IN HELA, SIGNAL = 0.84; EXPRESSED IN HEART, SIGNAL = 1.8; EXPRESSED IN FETAL LIVER, SIGNAL = 1.6; SWISSPROT HIT: P19881, EVALUE 5.00e-04; NT HIT: gi14778744, EVALUE 8.00e-71; EST_HUMAN HIT: BF240620.1, EVALUE 9.00e-53
ggcctttcgcttcgcgttttgtttgtagattcttattggttaagaagagcgtcagtctcccaccgcgtaagagtgtagtcggcgttgaaactcggcggcgactggtccagcagaaccagggacggggagaaggatcaagctagctcttcattggtcccttcccctcggtgttggccacgaatccgcccctctctccaagttccgttagctcgcggcttcgctcctctcccagactctcgcccccattggctgcaggccacgccgtcgccccgccccccggtccttccagcgcgccaattggcggctgcgtggaacgtgccagggagagcgcgccgtgcccgcggagagagcgcggcgcgggaggccggcggccggccggctgcatggcgcgctgcgagaggctgcgcggagcggccctgcgcgacgtgctgggccgggcgcagggggtcctgttcgactgtgacggggtgctgtggaacggcgagcgcgccgtgccgggcgccccggagctgctggagcggctggcgcgggccggcaaggcggctctgtttg

SEQ ID NO: 10965 - DNA, 546 bp, Homo sapiens
  MAP TO AP000111.1; EXPRESSED IN HELA, SIGNAL = 1.3; EXPRESSED IN FETAL LIVER, SIGNAL =   1; NT HIT: U00690.1, EVALUE 3.30e-02; SWISSPROT HIT: P35168, EVALUE 3.90e+00; EST_HUMAN HIT: AW301637.1, EVALUE 3.00e-09
gagcttgacggcactggccctgagggtccttcttcttcctttggaagaatgaaactgggggctatgcaattcagggaagaataaaggaaaaacaggtaattggcagaggaggttggctgacttagaggtatggaaaagacaaaacaaaggagggaaaaagagaggtatgtatgatggggaggagttcagagccactgaaaattttctctggccctaacaggaaaacgagttaccccacaagccagggttttatcatctggtacgtggagatatccatcagcattgtcattggttttcatttgtttgtttttaattctcaagtttaaaaaaaaatttaaaatttaaatgtgtctcaaccaccagaaactatagtgagatttctctgtaataaataggaaagaaggagactgatccagtccttgttaaaaaaaaaaaaaagaggaaactgaatcacaacatactttgcttttttcttttctcacaaaggaacagtgggccctttatgctgggtgaaggtgagtgagatgggggaaggttcactgggca

SEQ ID NO: 10966 - DNA, 572 bp, Homo sapiens
  MAP TO AC002097.1; EXPRESSED IN LUNG, SIGNAL =   1; EXPRESSED IN FETAL LIVER, SIGNAL = 1.1; EXPRESSED IN HELA, SIGNAL = 0.56; SWISSPROT HIT: P19835, EVALUE 5.00e-30; EST_HUMAN HIT: BI224412.1, EVALUE 1.00e-95; NT HIT: M94579.1, EVALUE 0.00e+00
ccggccccaagacaggacagtctctaaggccatgatcgcctactggaccaactttgccaaaacagggtaagacgtgggttgagtgcagggcggagggccacagccgagaagggcctcccaccacgaggccttgttccctcatttgccagtggagggactttgggcaagtcacttaacctccccctgcatcggaatccatgtgtgtttgaggatgagagttactggcagagccccaagcccatgcacgtgcacagccagtgcccagtatgcagtgaggggcatggtgcccagggccagctcagagggcggggatggctcaggcgtgcaggtggagagcagggcttcagccccctgggagtccccagcccctgcacagcctcttctcactctgcagggaccccaacatgggcgactcggctgtgcccacacactgggaaccctacactacggaaaacagcggctacctggagatcaccaagaagatgggcagcagctccatgaagcggagcctgagaaccaacttcctgcgctactggaccctcacctatctggcgctgcccacagtgaccgac

SEQ ID NO: 10967 - DNA, 513 bp, Homo sapiens
  MAP TO AC012615.1; EXPRESSED IN FETAL LIVER, SIGNAL =   2; EXPRESSED IN HELA, SIGNAL = 0.36; SWISSPROT HIT: P52746, EVALUE 2.60e-01; EST_HUMAN HIT: BE391901.1, EVALUE 0.00e+00; NT HIT: gi15306752, EVALUE 0.00e+00
ccaggaagggttgccccaggccgcgggggtccacagccggccgtggcaggagctcagccagcgagcgcgggcccgaggccggcccagccaggcaaagcagcatctccagggcgtgggggctgccggcatcgcggctgggccgcacccgcttgaggtgaggctgggcggggagcgggtgcagggccgacacctccttcaggaggcgtgaggtctggcgcttgtccaggacgggcgcggcgtaggccagcaccagctccacgtcccctgactgcttctcggacaggacagggagggcctgccacggcgccggctcaggctccgggctcccggcctccaagcacttgggctgctccacgaggcccggggcgggctccatcctcagcgaggccgactgtgggagacagagacgggagcagaggatcatccggcggctgcgggcggctgggggagagccggggagtccgtcccgggaggccgtggctccacaaggcagggcgtgctgccaccaaagct

SEQ ID NO: 10968 - DNA, 594 bp, Homo sapiens
  MAP TO AC004923.2; EXPRESSED IN HELA, SIGNAL =   1; EXPRESSED IN PLACENTA, SIGNAL = 1.6; EXPRESSED IN FETAL LIVER, SIGNAL =   1; SWISSPROT HIT: O60412, EVALUE 1.00e-49; EST_HUMAN HIT: BG117417.1, EVALUE 0.00e+00; NT HIT: gi16163994, EVALUE 0.00e+00
ccgccacggttcccaagatgattgtggacatgcagtcgcatagcagagtcacgtctcatgcgggctgtctgacgcagatgtctttcttggtcctttttgcatgtatagaaggcatgctcctgactgtgatggcctatgactgctttgtagccatctgtcgccctctgcactacccagtcatcgtgaatcctcacctctgtgtcttcgttttggtgtcctttttccttagcctgttggattcccagctgcacagttggattgtgttacaattcaccatcgtctagaatttggaaatctctaattttgtctgtgacccctctcaacttctcaaacttgcctgttctgacagcgtcatcaatagcatattcatatatttcgatagtactatgtttggttttcttcccatttcagggatcctatggtcttactataaaatcatcccctccattctaaggatttcatcgtcagatgggaagtataaagccttctccacctgtggctctcacctagccgttgtttgctgattttatggaacaggcattggcatgtacctgacttcagctgtgtcacaaccccccaggaatggtgtggtgg

SEQ ID NO: 10969 - DNA, 537 bp, Homo sapiens
  MAP TO AP001717.1; EXPRESSED IN FETAL LIVER, SIGNAL = 1.7; EXPRESSED IN LUNG, SIGNAL = 2.5; EXPRESSED IN HEART, SIGNAL = 1.9; SWISSPROT HIT: P18583, EVALUE 9.00e-10; EST_HUMAN HIT: AU117418.1, EVALUE 0.00e+00; NT HIT: X63751.1, EVALUE 0.00e+00
tggcaccatggatgctcagatgttagcgtctggtaccatggatgcccagatgttagcgtctagtacccaagattctgctatgttgggttcaaaatctcctgatccctataggttagctcaggatccttacaggttagctcaggatccctataggttgggccatgacccctatagattaggtcatgatgcttacaggttaggacaagacccttatagattaggccatgatccctacagactaactcctgatccctataggatgtcacctagaccctacaggatagcacccaggtcctatagaatagcacccaggccatataggttagcacctagacccctgatgttagcatctagacgttctatgatgatgtcctatgctgcagaacgttccatgatgtcatcttacgaacgctctatgatgtcttatgagcggtctatgatgtcccctatggctgaacgctctatgatgtcagcctacgagcgctctatgatgtcagcctacgagcgctctatgatgtcccctatggctgagcgctc

SEQ ID NO: 10970 - DNA, 534 bp, Homo sapiens
  MAP TO AL080317.11; EXPRESSED IN HELA, SIGNAL = 0.92; EXPRESSED IN FETAL LIVER, SIGNAL = 0.98; SWISSPROT HIT: O60673, EVALUE 5.00e-85; NT HIT: gi4506482, EVALUE 0.00e+00; EST_HUMAN HIT: AI873302.1, EVALUE 1.00e-112
gcagaggcaactggtggcagcatctgactttcacttgcagtttgactacatcccgtggttggtgcttgtaaagcaatctgagaattatcaacatcctccttggtatgtgctgtagtggggagtatacatggacttacatccatttttggaggcactacaggtttgtcatctgggttaactgaagagctaaagttctcagcagattttacaactccagttggcttggttttaggcagtttcttggaacgttcgtattcttctttggcttgaagccacacttgaaccagttgtcgacttggggcacatttgcaaggcataatcacaatttttttatcttcaaccatcttagggctattacttgaccctttattgacaactccttggccactgcgaaggggtgaccctggccttggattctgagtcattgctgagaatgctgttttccaaagacgaagtccttccaaggaaaagtctccctcaaactcagccagatcatttgcaagtcgagtttctaccatgaggagccgtccacca

SEQ ID NO: 10971 - DNA, 512 bp, Homo sapiens
  MAP TO AJ239319.2; EXPRESSED IN HELA, SIGNAL = 0.39; EXPRESSED IN FETAL LIVER, SIGNAL = 1.1; EST_HUMAN HIT: AU099808.1, EVALUE 7.00e-72; SWISSPROT HIT: P28230, EVALUE 3.00e-16; NT HIT: L47127.1, EVALUE 0.00e+00
gggataggcgctccccaaggtaagagggctttgttgagtttgccccaggtctggagttaaggagctaggggacagggagccataggggatggctgatatcggaacaagatgggcttggcaaagaaaggggctggcgggaaaagaatgttggatgaaagcgaagaagggggatggggctcagggaggtcaagtcaagtgagtgaggaggaggagaagctggcaagggagatggggtgacgaggaaagacatgaccatccttcctttcctgctactggctcttggaagagttgagggggggtgcgcaggcagtgctatggcgcccgactttccaccccagctttctgacagcttgcttcatggctggtgttttgcaggtgtgaatgaggcaggatgaactggacaggtttgtacaccttgctcagtggcgtgaaccggcattctactgccattggccgagtatggctctcggtcatcttcatcttcagaatcatggtgctggtggtggctgcag

SEQ ID NO: 10972 - DNA, 576 bp, Homo sapiens
  MAP TO AC007463.3; EXPRESSED IN HELA, SIGNAL = 2.3; EXPRESSED IN FETAL LIVER, SIGNAL = 0.98; EXPRESSED IN LUNG, SIGNAL = 1.1; SWISSPROT HIT: P38451, EVALUE 7.30e+00
tggggctcccaattcctgctctgctcctccaggcaggattctacacagctttccagtaacactgcaggagtgtccctcaggtggtctgggtacacctttgcctataacctgctgcactgtatattcttacagccatagccactattttcctgcactgtgtcatctgtttgcctgctcctatttcagtggtattcgaagtgcctctgataaaagtgcttttccttctttttctttttatatttttggcctagttcaatacctcggtgaatgaataaaattcattaagagagcatttataatatctaatgtttgaatgaatgttggagatacaaagttcttagagaccatctaacccaacttcaaaattaatttctgcatcacaggtgcaagaatgttcagtgactctgcgaactatgtttgcactttggcatcaattccacctcctggagtcttctctaccactttgtctcagagacaaagcctaggacggcatttcttagaatcccttccccataggcttccatgaaaaggaaggaggccatgttaggaggccacgttctccagcagctgtggcgg

SEQ ID NO: 10973 - DNA, 500 bp, Homo sapiens
  MAP TO AP001754.1; EXPRESSED IN PLACENTA, SIGNAL = 3.2; EXPRESSED IN FETAL LIVER, SIGNAL = 1.9; EXPRESSED IN LUNG, SIGNAL = 1.5; EXPRESSED IN HEART, SIGNAL = 1.8; EST_HUMAN HIT: AW891082.1, EVALUE 3.00e-55; NT HIT: X17502.1, EVALUE 1.90e+00; SWISSPROT HIT: Q90690, EVALUE 2.10e+00
ctccactgccaggccttccgccctgctaggtgtcagcagggcctaatggcccagcagcgggcagcaggaagggctgcccccagtgtcctgctctcagtgtgcgtctcaccatggcatgagaggaggagggggaaatggacacggtgccacctagttatggccgtgtggaggctcctgcagccacaaacaggagcatcctggagctggcaagggatggccaagaccaggccaagtgccctcccccttagagacatgtatgtactcctgcctttccatacctccctcaccttgtctgtaagatggagacacgatagtccctgtctcttggagttgtttccagaatacagtggggtcctgactgtaaagaattgagcacatatgctggaactataaccagggatctgctaacgtggctggtgcttttatcatcacccttacttatgagtagtgggggcggtggtggtgatggtgatgatggtggctgcgatggtgatggtggt

SEQ ID NO: 10974 - DNA, 505 bp, Homo sapiens
  MAP TO AC011899.2; EXPRESSED IN LUNG, SIGNAL = 2.1; EXPRESSED IN HEART, SIGNAL = 2.3; EXPRESSED IN FETAL LIVER, SIGNAL = 2.1; EXPRESSED IN PLACENTA, SIGNAL = 1.9; EXPRESSED IN HELA, SIGNAL =   3; NT HIT: gi15321342, EVALUE 4.80e-01; EST_HUMAN HIT: BF208332.1, EVALUE 7.10e-01
catgcgtgatcctgcacccgtgctcatggctggcagccggtattggaagagaatcatgagactgcaaatcaggaatcctcagatatccttttatcgttggctctttagttcaaaactagaactgtgggtgtggaaggtataggaaactccctccctgcaccactagtgagtgccaccactggtcttagtaatagaggtaacagtggtggcatgatcatcctagagatagtaatgctttaacgctgccactagggagttaatttgctcatgcttcctataagtcacttattcattccctcaacagataatcgttgaggtcctctaatgtgctggacagtgttctaagcactagggcaaatcctcgctttgtggaactgatattctagagaaaaaatagataataaccaagcatgcatcatgtcagagggtgataaatgttttgggaaagaatgaagctggatgagggcacagacaggtgatgggatgagggcccgatgttgggtga

SEQ ID NO: 10975 - DNA, 517 bp, Homo sapiens
  MAP TO AL078593.9; EXPRESSED IN PLACENTA, SIGNAL = 1.9; EXPRESSED IN HELA, SIGNAL = 0.91; EXPRESSED IN FETAL LIVER, SIGNAL = 1.1; EXPRESSED IN HEART, SIGNAL = 1.3; EXPRESSED IN LUNG, SIGNAL = 1.5; SWISSPROT HIT: P00519, EVALUE 2.80e+00; EST_HUMAN HIT: BE273681.1, EVALUE 0.00e+00; NT HIT: gi7662247, EVALUE 0.00e+00
ggattggaggaagggaggggcagaagacaagactattatcatgattagcctattttctcttatacatttattcaacaaactttaaagggaacattttaaatgttgttgacagttacaccttggttactttattttaaaaagcattgtattctttgattttttaatgcaaggtctctctattgtagctggctcctctcattcaaaaaaaacaactggctctaaagcatcagcttcgccatccacttcatccacctcatctcgtcccaaagcttcaaaggagacagtttctagcaaagcagggacagtggggaccaccaagggcaagagaaaaactgacaagcagccaataacttctcacctgtcctcagacacaacaacttctggcacatccgacctgaaaggagagcctgcagagaccagagtggagagtttcaaactcgaacagactgtccctggagctgaggagcagaacacaggcaaattcaagtccatggtccctccaccccctgtggctcca

SEQ ID NO: 10976 - DNA, 586 bp, Homo sapiens
  MAP TO AL109797.18; EXPRESSED IN FETAL LIVER, SIGNAL = 1.1; EXPRESSED IN LUNG, SIGNAL = 1.3; EXPRESSED IN HELA, SIGNAL = 2.3; SWISSPROT HIT: Q93008, EVALUE 6.00e-44; NT HIT: X98296.1, EVALUE 0.00e+00; EST_HUMAN HIT: AU132252.1, EVALUE 0.00e+00
tgcataggaaaccaccttcgtgggaacaacagtaaacatcaaacaggtaataatggctagataacaatgacagaaaccagtcaacaatttaccatttgcatattattaatttcagcatttaaatcagctgataggattatcttgattatgctcattgtcatgtatttgtttatacttaaaaattcagataagtcttaatatcatttaaaagtttgcttggggtttttttttttttcctgtggattttaatagaacatctggtaactttgtcttgtttattttaggttgataccgtaaagcgcttgctgattaaaaaattacctcctgttcttgctatacaactaaagcgatttgactatgactgggaaagagaatgtgcaatcaagttcaatgattattttgaatttcctcgagagctggacatggaaccttacacagttgcaggtgtcgcaaagctggaaggggataatgtaaacccagagagtcagttgatacaacagagtgagcagtctgaaagtgagacagcaggaagcacaaaatacagacttgtgggtgtgctcgtacacagtggtcaagcgagtggggg

SEQ ID NO: 10977 - DNA, 585 bp, Homo sapiens
  MAP TO AC010789.7; EXPRESSED IN HEART, SIGNAL = 2.1; EXPRESSED IN HELA, SIGNAL = 2.7; EXPRESSED IN FETAL LIVER, SIGNAL = 2.2; SWISSPROT HIT: P24724, EVALUE 2.20e-01; NT HIT: gi14746094, EVALUE 0.00e+00; EST_HUMAN HIT: AU122772.1, EVALUE 0.00e+00
ttgcatgggggcaatgtcactaatacaatcttcttgcatggacatctctggggattttgattcagctatgctctctttatcagtgtccattggtttcaattcctctgccattttcgcttcaacaatttcactcagtatttgattgtcattcttgtggtccgtttcttcttgtttttccaccaccatgtccatgggttcttcatcaggctgtttcttttcttcttccttggtcagagtagtaggctcaccactcaaggctgctccctggctcataatgggctcctgataaactgttgttactacggttgtggcatttaaagagggtgctgcaactaaaggagtcccatcaactacacttgctttagctccactgtgtgcaacttgcctacctacaaaaataaataaatgtataaataaaatggtcacacagataatcagaattagagatagaacacattagattcagaaagatgctttatcatatttgttaagtggaacctcaattttagatccaaattaatttgacctctaagaaaaatgagatttctctatactactagggatgcaggaatggaagggcgttgg

SEQ ID NO: 10978 - DNA, 504 bp, Homo sapiens
  MAP TO AL049636.21; EXPRESSED IN HELA, SIGNAL = 0.47; EXPRESSED IN LUNG, SIGNAL = 0.97; EXPRESSED IN FETAL LIVER, SIGNAL =   1; NT HIT: AF197560.1, EVALUE 1.00e-113; EST_HUMAN HIT: AW003235.1, EVALUE 0.00e+00; SWISSPROT HIT: Q9UJU5, EVALUE 1.00e-23
  unsure 235
  unsure 236
  unsure 237
cacggcgcagtcgtttctgcggccacccgggaccgtgcagtcggcagcgctcatggccacccaccaaccgctgtcgctgagccggacgactgccaccatcgcgcccattcttagcgtgccactctccggacagtttctgcagcccgcagcctcggccgccgccgctgctgcggccgccgctcaagccaaatggccggcgcaatagggacgcgccaatggccgggacccagggtcnnncggcggcctcgagcaacaaatgcacctccaggctgcgcgccctgtcccaagcccggtcccggtcccgctgcccaatcctggactctgcctctccccaatttcctttcccctgagcccccaacgcctaccttccgcggcctccatcccctcgcgcacacctaagctggtcgagcaaactcaccgcgcgcccgccggggatagctttccatacaggtaaaaccgaaaaccgaattttccaaaaatgcaccccgacggcgcctgctctta

SEQ ID NO: 10979 - DNA, 535 bp, Homo sapiens
  MAP TO AL035445.4; EXPRESSED IN HELA, SIGNAL = 0.95; EXPRESSED IN LUNG, SIGNAL = 1.4; EXPRESSED IN FETAL LIVER, SIGNAL = 1.1; SWISSPROT HIT: P36044, EVALUE 2.00e-06; NT HIT: gi14782532, EVALUE 0.00e+00; EST_HUMAN HIT: AI935027.1, EVALUE 3.00e-40
tgggtgtgccaagaagacaggaatcccaagtaaagaagagtcagtctggtgtctcaaagggacaggaagcccaggtaaagaagagggagtcagttgtactgaaaggacaggaagcccaggtagagaagagtgagttgaaggtaccaaaaggacaagaaggccaagtagagaagactgaggcagatgtgccaaaggaacaagaggtccaagaaaagaagagtgaggcaggtgtactgaaaggaccagaatcccaagtaaagaacactgaggtgagtgtaccagaaacactggaatcccaagtaaagaagagtgagtcaggtgtactaaaaggacaggaagcccaagaaaagaaggagagttttgaggataaaggaaataatgataaagaaaaggagagagatgcagagaaagatccaaataaaaaagaaaaaggtgacaaaaacacaaaaggtgacaaaggaaaggacaaagttaaaggaaagagagaatcagaaatcaatggtgaaaaatcaaaaggctcgaaaagggcgaaggc

SEQ ID NO: 10980 - DNA, 500 bp, Homo sapiens
  MAP TO AC018836.2; EXPRESSED IN HELA, SIGNAL = 0.4; EXPRESSED IN FETAL LIVER, SIGNAL = 1.4; EST_HUMAN HIT: R87221.1, EVALUE 7.00e-04; SWISSPROT HIT: P04474, EVALUE 7.00e-01; NT HIT: gi7662289, EVALUE 8.00e-83
caaagttgcgcagggcatggcccaacataccccacttgctatggcggacttgggggggatgggacggaagggcccgggactcaagttgcttcggcacagaaagctcccattctgcccctgctcagcctgtgtgtgttgccatccccaccagcagtcccaggaggggctaggcctcagcgcacaggctggcaccgtcctagccaccgaccttgtgtggcagcttcctatgctcataggccacggtggacctcaagctccgtgcttggaaggatgcagccacgcccacccgccaaggcccagcaagccacagctgcccaccctgaggggtcacccatggtactcacttgttgaagaggttcaggccgatgcggtagtgcctcttgcggatgacatcgttgctaaaggcaggcgagtcccagctgttgcgggcctccttgtggtaggtctgcttgctgagcgtctgctcccgcaggctgtcacgggacgatgactcggagctg

SEQ ID NO: 10981 - DNA, 555 bp, Homo sapiens
  MAP TO AJ239319.2; EXPRESSED IN FETAL LIVER, SIGNAL = 1.2; EXPRESSED IN HELA, SIGNAL = 1.2; EST_HUMAN HIT: BF197762.1, EVALUE 0.00e+00; SWISSPROT HIT: P45386, EVALUE 2.00e-03; NT HIT: gi16162728, EVALUE 0.00e+00
cggaagctcccgacgacaagagtgatgattcggatgttcccgaagacaagagtgatgattcggatgttcccgatgacaatagtgatgatttggaagttcctgtgccagcagaagatttgtgtaatgaaggccaaattgcttcagatgaagaagagctggttgaggctgctgctgctgtctcccagcatgattcatctgatgatgctggtgagcaggatcttggtgagaatctcagcaaaccaccaagtgatcctgaggctaaccctgaagtttcagagagaaagctgccaactgaggaagagcctgcacctgtggtggaacaatcagggaaaaggaagtcaaaaaccaaaactattgtggagccaccgaggaaaaggcagacaaagaccaaaaatatagtggagccaccaaggaaaaggcagacaaagaccaaaaatatagtggagccactgaggaagaggaaggcgaaaaccaaaaatgtatctgtgacacctggtaagccagtcatgccaagtatgcctgtcccactgaatgtgccttgcctgccaaatgtgc

SEQ ID NO: 10982 - DNA, 500 bp, Homo sapiens
  MAP TO AC004943.1; EXPRESSED IN PLACENTA, SIGNAL = 2.1; EXPRESSED IN HEART, SIGNAL = 2.1; EXPRESSED IN FETAL LIVER, SIGNAL = 1.5; EXPRESSED IN LUNG, SIGNAL = 1.5; SWISSPROT HIT: P34708, EVALUE 8.00e-02; EST_HUMAN HIT: BF924448.1, EVALUE 0.00e+00; NT HIT: gi14777629, EVALUE 0.00e+00
tgggtgagcggcactgatggctgggccggtgcaattgtaggtgaggtgatgggtggggctgatgcggggatggctggtgtggacgccggctgaggcggcgctgccggaagtgggggtggagggggtggagggggaggtggtggtggctctggggtctggggcctcagtgggtacagtttatcgtagtggtctctgtactgtttggcaaacctctcgagctgtttgaaaggaaagtaattctgatgaacgtgctcttgatgactctttaaaatcaagatgttggaaaacaacttgccgcaggagtcacactcgagcttttccaggttctctccctggtcagtcttcccattctttttctgcaccttctgcttgttctcattatactggatgaccaactcaaagccaaagttctccagcagggccttggtggcgttccctctggcatctgaagcaatgcgtggagggagcatggaaggctcagaaccaccccctggtgccaa

SEQ ID NO: 10983 - DNA, 506 bp, Homo sapiens
  MAP TO AL160313.1; EXPRESSED IN HELA, SIGNAL = 0.5; EXPRESSED IN FETAL LIVER, SIGNAL = 1.2; SWISSPROT HIT: P56730, EVALUE 6.00e-04; NT HIT: AB058725.1, EVALUE 0.00e+00
tctccccaccgccctcagtctgcaagctgtgcctctgttagcacagccaggggccatgtccgtcctcgaagcctggctgccctccctcctcagggtcccacagcccggctgctgttcctgctggtgtctgaaacgcttggaggtaagaaaggaactcctcccgcccatgatggaccatgcacttccagagcccacaccgcccccaacacacactcctgccttgggtctgcagaggacacacatgcactgcagcgcctcacacatgtccccaggacagcacacacccgcacccccttcactctagaacacgtgtgcacccgctgggcgcacacagggcggagcggcccctgccaggctcccccgccggcgggatggcctggggcagcggcgtgttgcctacaggtcggggttctggtggctgcacacgacgcccgcatcctcgtcgtgctcgcagttgtgggtgcccacgccgttgtgctggcactccagcaggttccgctcccagc

SEQ ID NO: 10984 - DNA, 526 bp, Homo sapiens
  MAP TO AC010219.4; EXPRESSED IN HELA, SIGNAL = 2.2; EXPRESSED IN LUNG, SIGNAL = 1.2; EXPRESSED IN FETAL LIVER, SIGNAL = 1.1; EST_HUMAN HIT: AI927210.1, EVALUE 1.00e-116; SWISSPROT HIT: P25021, EVALUE 2.00e-08; NT HIT: AB023486.1, EVALUE 0.00e+00
agcccacggccagacagacgaccacattgccagcaacggtgatgaggatgaggaccgcaaggaccacggtgatggtgatcttgcatgcggtagagtccaggcaaaaggaagaggctgtgccattgggtgccatcctgggactctacggctcagtcccctgatcagggcccctggttgcttcttctctgctcccaatgtgacaactatgccaaccactggactccaagctcccaacagatccaaaatgtgtccagtttttttttttttttttttttggccagggggtggggaaggcttcaatgactgactctgggctgcttttctagaaataaattaagcaacaccttctaaggtgttgggaatgaatatgaatgaagaagagagaaaagcaaggcctcgaagccaggttcatggatcaaactccagtcctcagacggtcccctgaagagctagcttcctcccggggctggggtaggtctccgcttcccaggttttgcatagaatccgaggcactgtctggcggtgg

SEQ ID NO: 10985 - DNA, 514 bp, Homo sapiens
  MAP TO AC005544.1; EXPRESSED IN HELA, SIGNAL = 0.4; EXPRESSED IN FETAL LIVER, SIGNAL = 0.97; EXPRESSED IN LUNG, SIGNAL = 0.93; NT HIT: AF142625.1, EVALUE 0.00e+00; EST_HUMAN HIT: AL526464.1, EVALUE 0.00e+00; SWISSPROT HIT: Q9UBN1, EVALUE 7.00e-18
gggaaggccctgaaatcccgtttttctggcaagattcgtttccaagaggagataatggctcaattttgtcttcccaagttgatcaaggccaggcagcctcaggaaagctctggggcttcccgggagatttcagagaccctgaggcatcaaaacaccctttttcggggaggggacaaagtcagccttcagcttcttctgcagccccgggtccggtctcccagcacaaccttcgtgcaaagccagcccacgccacctctggaggccagggagggctgcatttggctttagttcattgttcgtcgtcttgaggatcacatgccatcctgtgtgacaaaaagagccgttctggggagaggctggagcggagagaaagggcaggcggctcacacaggggtcgtccgtcggttcagcatgctgacgtggaaaccttccttcaggtcctgctggaaaaagtcatgcacctgcaggaagctggcctcctggtcggggctgtagctggctgcggtggtcacct

SEQ ID NO: 10986 - DNA, 568 bp, Homo sapiens
  MAP TO AL096710.8; EXPRESSED IN HELA, SIGNAL = 1.8; EXPRESSED IN PLACENTA, SIGNAL = 4.4; EXPRESSED IN FETAL LIVER, SIGNAL = 2.8; SWISSPROT HIT: Q9QXZ0, EVALUE 7.00e-32; NT HIT: AF396879.1, EVALUE 7.00e-53; EST_HUMAN HIT: BF330731.1, EVALUE 0.00e+00
tgcgctgcacttctctgtgggttgcagaagtatcaaccttgccaccgtctctcttgctgcaagatttggcagcttccaacactctgtttccagaaattgtgatgtatctcaagtcacctttgtgagaaataacgtcttctgagaaactcttctgcctcttcaatttggtcattaaaccattgatgtcatctgcacctgcctccaggttttcaagttcttgttctgactgctgtagccagtgctcaaactcggtatagtcagcatcaaacttttctaattcttcctgcagagagtgagttaacttcattttcttctctgactcagccagtgcagtttcataatgcactttcagttccttcatgttcttttgcagtttctctttttcttcaggagagagatactgaccctgtttctcaagcaacacttgtgcagactgagtggctatgatcactgcttggtgctgagagatgatcttctcgtgttgggcctatgtgaaaacaaattgatcataatcttcaagcagtaacggggtaacacctgcagggagctccttgccgcctcaagactg

SEQ ID NO: 10987 - DNA, 519 bp, Homo sapiens
  MAP TO AC009336.2; EXPRESSED IN HELA, SIGNAL = 2.6; EXPRESSED IN FETAL LIVER, SIGNAL = 3.2; NT HIT: AB032481.1, EVALUE 3.00e-67; SWISSPROT HIT: P10569, EVALUE 3.20e-01; EST_HUMAN HIT: BI906500.1, EVALUE 2.90e+00
agagaaagccgcggcactggcctgacgccgccgccgccgccaccgatgaggaggaggaagaggccggggcgccaccggcgcccccgccgtctgcccgcagcccgtccatgtcccagctcccggcgcggctcatggcccggcctggcccggccccggccctggccctggccccgcgcaggacaccatggcgcggcgcgcctcctccctcctctcctttctctctggttcgctcgctcccgccctcttcctctagccctctctccctctgtgagcctcccgcctccggcccgcctgccctccaacaggttagctcatcgcgggacgtttataaaaacgaagttcaggttgggagggggcctgggccggtcggggggccgcctcccgccccgagggcccccgccgggggcgtgccattggctgcgcgcggccacgtgggggtaggaacgcgggggagcctggctcccggcccaggcctggctggacccacccactccggcccccacccctctcctgcccctt

SEQ ID NO: 10988 - DNA, 514 bp, Homo sapiens
  MAP TO Z69710.1; EXPRESSED IN LUNG, SIGNAL =   2; EXPRESSED IN FETAL LIVER, SIGNAL = 1.7; EXPRESSED IN HELA, SIGNAL = 1.4; NT HIT: gi14729322, EVALUE 1.20e-01; SWISSPROT HIT: Q03172, EVALUE 7.20e-01; EST_HUMAN HIT: AW250525.1, EVALUE 0.00e+00
agccggacccgagcctcttccaggctcagacacgggaagggaaccacgcccggagccagacccgagcctcttccaggctcagacacaggaacattctcggagccggacctgagcaaccgccagtccatcagctatggtcagaggaaggcctccgtggctgtctctcccccatgagatggggcatttacacagcacacttagggacacggaggccctgcaggtttggtgaggtctcccgaggtccctgagctgcagaggtgagagttgaaagacgctgcccccaggccacagtctctgactgtccacagaaccacacgctccacatcttcccctcaaactcaactcaagcgctcttggctttaaatcaggccgggccgtctcacgggaaaaggaggttggctgcaaagacccacagggcccagaggggaagctggctatgacgcgatcccttcacgagcactggctccggccccagccaccaggacacttagtgaccagccaacaagcgggtggt

SEQ ID NO: 10989 - DNA, 500 bp, Homo sapiens
  MAP TO AC010332.6; EXPRESSED IN HELA, SIGNAL = 0.51; EXPRESSED IN FETAL LIVER, SIGNAL = 0.98; NT HIT: gi15301350, EVALUE 9.00e-15; SWISSPROT HIT: P41561, EVALUE 1.60e+00; EST_HUMAN HIT: AI160765.1, EVALUE 4.00e-27
gggtgtgggaacacctcactcctgggattgtgtctctcctagctttatgcgtatattatactattactaatgtctatacaactgctcttaaatgtcttattttctctaagaggctcatccctgctttttctgagaagctttcagtttctgttctatttttctgcccttaatctttctcaaagtcactcataatcctcccgagtcctgcagattccccactgctccaatgcatcacgtcacccccttgtgttttcagctctcacaatgtgacatgcaaagtatgccgatacttcttccagtgtctgagttgggtgaggctgattctggtccctccaccagacggtaaacatgccagaatcatgggttcatgttctactctttcttcttttctagggaggagctgtgtattgggaagcaatgcagaaaacaagcctattaaaaatcaacttggattaacccttgagtcacatctgtctgaattgcagctgtttcaagccgga

SEQ ID NO: 10990 - DNA, 500 bp, Homo sapiens
  MAP TO AC005837.1; EXPRESSED IN HELA, SIGNAL = 1.1; EXPRESSED IN HEART, SIGNAL =   2; EXPRESSED IN LUNG, SIGNAL = 1.6; EXPRESSED IN FETAL LIVER, SIGNAL = 1.5; SWISSPROT HIT: Q92183, EVALUE 4.00e-04; EST_HUMAN HIT: AL544554.1, EVALUE 0.00e+00; NT HIT: Y11341.1, EVALUE 0.00e+00
caccagggcaaagcggcaaccacagccaagacgctcattcccaaaagtcagcacagaatgctggctcccacaggagcagtgtcaacaaggacgagacagaaaggagtgaccacagcagtcatcccacctaaggagaagaaacctcaggccaccccaccccctgcccctttccagagccccacgacgcagagaaaccaaagactgaaggccgccaacttcaaatctgagcctcggtgggattttgaggaaaaatacagcttcgaaataggaggccttcagacggtgagtttttgccaccacgccttccctctggctcccagctctgaagcccctcctgagaggaagcccagcccaccctctcctcacctcctgggctctgcttctagactttgtcttgtcctgccccaagctcattatgaggcagagctcagccctacaagactctgccccacttgtctttccaatgatggccacaatgggggaggaggagcaggcaggcc

SEQ ID NO: 10991 - DNA, 518 bp, Homo sapiens
  MAP TO AP000512.1; EXPRESSED IN FETAL LIVER, SIGNAL = 1.4; EXPRESSED IN HELA, SIGNAL = 1.3; NT HIT: gi15304463, EVALUE 2.00e-43; SWISSPROT HIT: P03291, EVALUE 1.60e+00; EST_HUMAN HIT: BF738697.1, EVALUE 0.00e+00
gccagagggagggagccaggaccagaaagggcaggcctccagcccaacaccagagcctggggtgggggcgggggaccttccgggacctacctcagcccccgtaccttctgggagccagtcaggtggaaggggatccccagtgagccccaggaggcatcagaaaggtaagtgaaggcagaggggaacccaaggtgatacacaggcctcgtgataatcaacccctgggcaaccagctgcttggaactcagccacctttgtgtttactttctgtctaggcctcctgaattgcaagatgccacctgctgagaaggcttccaggatcagagctgctgagaaggtttccagggtgagagctactttttctacctcctattccacaagtcatctctatatcttctccaatgctctttcacctagcctcactttaatctattcctttctcattattcagttttcttccatttttgtcacgccttgattggcttctattcctttatcctcggcacccgttgttttcc

SEQ ID NO: 10992 - DNA, 528 bp, Homo sapiens
  MAP TO AC005020.1; EXPRESSED IN PLACENTA, SIGNAL = 2.5; EXPRESSED IN FETAL LIVER, SIGNAL = 2.3; NT HIT: gi13937343, EVALUE 0.00e+00; SWISSPROT HIT: P12753, EVALUE 1.30e-02; EST_HUMAN HIT: BI548533.1, EVALUE 0.00e+00
tctcactggtgaaggtttccttgctgattgttatttgcctaaactctctctccaggtacagaaatttccttagaatttcctgaagtctttctaatctgtcctcagacttatacacttctctagtctcaggaacttgggtaatatcgtgtttgagtcttcctactctcactttgtatgaatgcacttcttccgaaattttctgcttaggaatcaacagcttgttctcttctctggtctctccatctgatacaatatataaatagaaaatgcaaatgtaatctgtaccctgtgcttaggaaaagaaaactcagatgagaaaactaaacaatgtagtatctacaaggacaagaaaagtttatttactctgaaaaacaggcacaaaatctcaacagcagaagttaagggcataaacaggagcagtgaggtaaaacagcggacatgttcagcagagtaaggaaataatagggaaacagctgaaagaattttagataagcaacttgattggggtctagtacgacatgtgcacgg

SEQ ID NO: 10993 - DNA, 600 bp, Homo sapiens
  MAP TO AC008174.2; EXPRESSED IN FETAL LIVER, SIGNAL = 1.4; EXPRESSED IN HELA, SIGNAL = 0.8; SWISSPROT HIT: Q9NGX9, EVALUE 7.70e+00; NT HIT: gi14861873, EVALUE 8.90e+00; EST_HUMAN HIT: AW962146.1, EVALUE 1.40e-02
ttggggtgggggaataaccgattaagtcatttatactataaactattttaccagccttagacagccaataatctcaaaaaacataagaaatggtagctgtttcaaagaagagaaaagcaaagaaataaagccagatcatgagaagctaccggaagaaggctatgatgcggatacacttgaaagtggcatggagaccctgactatagctggattatagataaggagaaggagaaaggaaaggacaatgattcactttgtctacaatttaagcttagtgctgaaagtctgcaaaagactaagtttcactaaatccaagtagaactataaaaatggaggattccatggaatcatttgcttatgagcagcactcttatgtaatcattaaaattagttatgattatatataattccttaggtacttacatatttgtgtaaacaggagaagaaaatatacccgggtctgtagcatgagcctgaggtcctatttatcagaaaaataaaattacatagtttgtatccatcctcagcaacttgctaaatggtaatcctccagtaggtatttattttctgttatcactgcctcgtttacaggctttcagg

SEQ ID NO: 10994 - DNA, 518 bp, Homo sapiens
  MAP TO AC020667.3; EXPRESSED IN PLACENTA, SIGNAL = 1.9; EXPRESSED IN HELA, SIGNAL =   2; EXPRESSED IN LUNG, SIGNAL =   2; EXPRESSED IN FETAL LIVER, SIGNAL = 2.3; NT HIT: gi16161709, EVALUE 0.00e+00; SWISSPROT HIT: Q03368, EVALUE 1.90e-01; EST_HUMAN HIT: AL040121.1, EVALUE 0.00e+00
tggacaggagggcaggtggccatctaagcccctcacgtacagcctcacaggcagcacccagcagagcaggagcttaggagcccaatcttcaaaggctggagagacaagggaggcagtgccacaatgcagagtccccttggaaacctgtatgctggcaaacctccaagccacaagtgaggatgtgcatggtttcgaggctccagggaccagcaaaagctctctacaccctagagtgtctgtctcccaagatccaagaaagctgtgtcttatggaggaggttgttagtgaatttgagcctggaatggccacaaagtcagagacccagcctcaagtttgtgccgctgttgtgctccttccagatgggcaagcatctgttgtgccccacgcttcagagaatttggtttctcaagtgccccagggccatctccagagcatgcctactgggaacatgcgggcttcccaggagctacatgacctcatggcagccagaaggagcaaactggtgcaagaggagccca

SEQ ID NO: 10995 - DNA, 508 bp, Homo sapiens
  MAP TO AC012085.4; EXPRESSED IN FETAL LIVER, SIGNAL = 1.4; EXPRESSED IN LUNG, SIGNAL = 1.2; EXPRESSED IN HELA, SIGNAL =   1; SWISSPROT HIT: P25113, EVALUE 5.00e-10; NT HIT: gi14763462, EVALUE 2.00e-56; EST_HUMAN HIT: BI114563.1, EVALUE 2.00e-56
gcgtcgtaccagccgctgaagcggttctccaggttccatgcgctctcgccgtgccggatcagcaccagtttgtaggcggccatggcggcgggctggggatgcggcaccgactgtgaaagtgttttgattatttgttagtccataaatactagaaactcacttgtgctagcttgagtaaggatattggatttgaccaattaagtgtcatacagcacaagatcaagaaggaacccaagacattatctttcccgtatgtagcagatccttccagggttcacaaatatctggttctttttacctttgtaggcacaaagtgaagttaaattttctagtcttctttgcatctagatagaactgttaccaaaccaaactgggttcgtttgcctgcatgcaatggaaagcgaaacactgaagcactgcatttttgcagcaaaaaggcttattgccagtgaactggcaaggagacaggaggaaatgctcaaatctgactccccaagctgagggctgg

SEQ ID NO: 10996 - DNA, 531 bp, Homo sapiens
  MAP TO AC005151.1; EXPRESSED IN LUNG, SIGNAL = 1.2; EXPRESSED IN FETAL LIVER, SIGNAL = 1.3; EXPRESSED IN HELA, SIGNAL = 1.9; SWISSPROT HIT: O95782, EVALUE 2.20e-02; NT HIT: gi7305360, EVALUE 2.00e-16; EST_HUMAN HIT: BF104634.1, EVALUE 1.90e-01
cgcctgggtcattgctgctggagtgaaaggcagtactgggctaagtgtctgagcaggcagagtcgtggcctgtggctggagtggagtggtgatgacagaggctttggggccgggtgtggccactggggcagatgtgcccaccttggccaggggcaggctggtgtcgggaggcaggccagagaggagctgggagggacgagttgactcaagggacatgaagggtgtggctgccagcccatcagtggctgttgacaggctggcggcagctggggtctctgggggcagagctggagacctggtggccatggtggtatgctgggctgggcggggtggtgcagaggggagtgggtgtggctgtggggaggcaggcgagcccatgggctggctgtgcccggcttcgcccttctctgtggatagcactatctccaagctcctggttgcaaggggactgacaggaacctgttctgctgctgttccagccacagttagaggggtgctgggacttgaagcactctgggcctgggtgggctg

SEQ ID NO: 10997 - DNA, 513 bp, Homo sapiens
  MAP TO AC005664.2; EXPRESSED IN FETAL LIVER, SIGNAL = 1.9; EXPRESSED IN HEART, SIGNAL = 2.7; EXPRESSED IN HELA, SIGNAL = 1.4; SWISSPROT HIT: P07901, EVALUE 2.80e+00; NT HIT: gi13647481, EVALUE 0.00e+00; EST_HUMAN HIT: BE466225.1, EVALUE 0.00e+00
tggcgggagtgttggtgacggggtaggcatagggggtgagagtgctgataagaaggatgaggagaatgagctggatcaggaaaagagagtggagtatgcagtgctcgatgagttagaagattttactgacaatttggagctagatgaagaaggagcaggcgggttcacggctaaagcaatcgttcagagagacagagtggatgaagaggccttgaatttcccctacgaggtatgttggcagcccctcctctagagggctcttagcaaaacccaaagagagatttgggaattgcagcatcttttgaaagcagggaaattaaaaaaaaaaaaaacaaaaaccaaaatcccctctgaggtggaataatgttaatgtggagaagagaaagatgtaaggagtccagatttttaaagtttcctaatgaaaagtttggcccatgggtaggccctgcatccctgatctagcgcgtggggcagcaggtgctgctgagttacgctccttggcagtgtgtgccc

SEQ ID NO: 10998 - DNA, 598 bp, Homo sapiens
  MAP TO AC011406.1; EXPRESSED IN HEART, SIGNAL = 1.4; EXPRESSED IN LUNG, SIGNAL = 1.9; EXPRESSED IN FETAL LIVER, SIGNAL = 1.9; EXPRESSED IN PLACENTA, SIGNAL = 1.5; EXPRESSED IN HELA, SIGNAL = 5.2; NT HIT: gi14726708, EVALUE 0.00e+00; SWISSPROT HIT: P09801, EVALUE 3.00e-01; EST_HUMAN HIT: AA418909.1, EVALUE 0.00e+00
tgcctgtgacccgtcaccaaagattgtgatttaataggcctgggatatggcctgagctttggaatttttaaaggattctcaagtgatcctaatttgcagacaagtttggaaacccttggatgaatcaaaatacatcttgaatcaaggaccagagacagccaaaaacaaaagaaaagaaaacacacatattagtcaaattccattcaaagaagtttcctggctatttcagagtactggaatgttgtcacaataacattgctttacttaaattggctcaacaacctatctaaagaaatctttattcttgtaaactacattttctgaaataaattcctgcattattttgtttggaggaaatctgtaattttggaatcaataagggtttgtgtcactcttttcattaaatattcatctatgccatttaattgtccaaaaatggcatcaggaatgtctacacaagtggaaaggaactgtctaagtttctgtacacttgatatggcttctgtgatggtgacttttggttgctctggtaaagatacctccccttcatcttcacttcctgcttcactggtattttcgccagccaccatgtcctgga

SEQ ID NO: 10999 - DNA, 545 bp, Homo sapiens
  MAP TO AC018432.4; EXPRESSED IN LUNG, SIGNAL = 0.95; EXPRESSED IN FETAL LIVER, SIGNAL = 1.1; EXPRESSED IN HELA, SIGNAL = 1.5; NT HIT: gi6754751, EVALUE 5.20e-01; SWISSPROT HIT: P13816, EVALUE 2.60e-01
cgcaaaggtgctttccaagggaaaatacacagaaacaaaaagattttttggaacttgttctggagttgtcaaatgtcggtttgctcatttccccaggaagcaaaatgcataaaagcagtgaagaattagaagccataaaaattcaagtgaatacagaaagtgtaaatctgaaggaaagtaaaccattgatacttaatgttacagaagacagtgacctacgtgaaagtgaggaactggaatgcaacactggaagtaacataacaaatatgcatcaagataaagaaacgtctgatgcatttcacagtgccacttacactaccatttctcaactacctgatacagaaacacatagcatatcaaaagccaaggcagacacattaagaataataaggctcagtcattcagcatcaaagcaagagaaattaccagatgagaaggaaacacagaacgcagaatacattgataagagctgtacatttaaaaagccacaacaatgtgatagaaaggaacaggagaaagaggcaaattcagagctgacacaaggc

SEQ ID NO: 11000 - DNA, 505 bp, Homo sapiens
  MAP TO AC005789.1; EXPRESSED IN HELA, SIGNAL = 1.5; EXPRESSED IN LUNG, SIGNAL = 0.99; EXPRESSED IN FETAL LIVER, SIGNAL =   1; SWISSPROT HIT: P17140, EVALUE 3.00e-03; EST_HUMAN HIT: AI016248.1, EVALUE 5.00e-51; NT HIT: Y13845.1, EVALUE 4.80e-01
catcccctcacccccatccctgagtggcctcggacgtggtcctccttgataccctcagggacagggtcaaggcagtgtatagggtcaggccagctgggaccagcctccctctctaatggctccaagagaggtacaggagggccaagagtccacttagggattggatgccatagggctgggccagggtgtccccctttccccgtcaaaggtcagcatgggatcatgggtcctcttggtcctgaagggtgggagctcagctaggtttgagatgtggcagagatgaaggccacgggtcattctagggtcaggaagccaaagggctgagtaggactctatccagcagtctggggttcggcaccctcctgtcccttctcccctctcaccaggcagagacgttgcgtggcaggcggcgatggcgtggctggtggtggcagtaacacttgcagggacaggagttaagcacctggaagggcagccagtggcgcgcagcgcgggtgttagctgc

SEQ ID NO: 11001 - DNA, 543 bp, Homo sapiens
  MAP TO AF207550.1; EXPRESSED IN FETAL LIVER, SIGNAL = 6.1; EXPRESSED IN PLACENTA, SIGNAL =  23; EXPRESSED IN HELA, SIGNAL = 3.6; EST_HUMAN HIT: AL526730.1, EVALUE 6.00e-91; SWISSPROT HIT: P16110, EVALUE 5.90e-01; NT HIT: AF207550.1, EVALUE 7.00e-96
acgacgccggagtcacggtcgcgatcgccgccgcccacgcccgtgccgccgccgcccacgcccacacctccgccgcgccgcggcgccgggggcatcggcccgggcggcggcggctcgttggcggggtcggcgtcgggaggcggcggcttctttttggggagtatagtcatggctgcactgccgagtaccccccaacaaacccggcgcggggcacgccgggagagaacccggatgagggggctagtgtagtgcgcgaggcacgacgggaacggcgagacccggataaagggatcgcggcaccggttcgagaaccctcggcggcggaggcggcggcggcggcggcggcggcggtggcggcgcgcgggtcacgccgagaggagaacccggatgtaaagtccaagatgaaggcagtgcggcgagtttgtcttagccttctctccaagtccagcaagtttattgctacgcttgttccggccttctgcttcaaaggaaacagaaccaaaacaagcacctcttcgctccgccccctcgcaggttcttgca

SEQ ID NO: 11002 - DNA, 575 bp, Homo sapiens
  MAP TO AL136311.2; EXPRESSED IN HELA, SIGNAL = 4.2; EXPRESSED IN FETAL LIVER, SIGNAL =   2; EXPRESSED IN PLACENTA, SIGNAL = 1.8; SWISSPROT HIT: P57071, EVALUE 3.00e-06; EST_HUMAN HIT: AW503602.1, EVALUE 0.00e+00; NT HIT: gi14783257, EVALUE 0.00e+00
tggcaatgccggatttgtgaagatatgtttgattcccaggaatatgtaaaacagcactgcatgtctttggcaagccacaagtttcatagatacagctgtgctcactgcagaaagccttttcataagatagaaacattgtaccgacattgccaagatgagcatgacaatgagataaagattaaatacttctgtgggctttgtgatcttatctttaatgtggaagaagcatttctgagtcattatgaggagcaccacagcatagattatgtatttgtgtcagaaaaaactgaaacttcaattaaaaccgaagatgattttccagtaatagagaccagtaaccagttaacttgtggttgccgtgagagttacatctgtaaagtcaacagaaaagaagattatagcagatgtctccaaatcatgctggataaaggaaaactgtggtttcgctgcagtttatgttcggcaacagcacagaatttaaccgacatgaacactcatatccatcaagtgcacaaagaaaagagtgatgaggaggagcagcagtatgtaatcaagtgtggcacctgcaccaaagc

SEQ ID NO: 11003 - DNA, 515 bp, Homo sapiens
  MAP TO AC004586.1; EXPRESSED IN HELA, SIGNAL = 3.4; EXPRESSED IN FETAL LIVER, SIGNAL = 1.3; EST_HUMAN HIT: BE258003.1, EVALUE 4.00e-61; SWISSPROT HIT: Q15034, EVALUE 2.00e-03; NT HIT: gi14754490, EVALUE 1.00e-63
tctaccggcctctggctccggagctgcgggcacgccagctggagctgggcgccgagcacgcgttgctgctggacgctgctggccaggtgttctcctggggcgggggcaggtgagcggaggcgggggcaggtgagggctgctgattggagaagcaagcggagcgggaccccttaatgcgactgtagctgacgacggtctcccttgctcaggcatggacagctgggccatgggaccctggaggcagagctggagccacggctgttggacgcgttgcagggcctagtcatggctgaggtggccgcggggggctggcattctgtgtgtgtgagtggtgagtgacttagtgcttctccagacgagctcatgatcttgtgcaaaccttcctcctcgttttccagtttgggtgggggcctacccaggcctccttccaaattcatccatccatcgcccagtcagttatgactcctaaatgcctctcaccctcggcctcctctgcctgcaccatggcccactca

SEQ ID NO: 11004 - DNA, 569 bp, Homo sapiens
  MAP TO AC008524.5; EXPRESSED IN HEART, SIGNAL = 1.7; EXPRESSED IN FETAL LIVER, SIGNAL = 1.1; NT HIT: gi14728537, EVALUE 0.00e+00; EST_HUMAN HIT: BE898612.1, EVALUE 0.00e+00; SWISSPROT HIT: Q62523, EVALUE 1.20e-01
gtgtgtgggggtgggggatggggtaggtatgtgcttttggctcatgtttgtgatgataactgaagtcttttgtgggtccgacctgttgtagggtgtgggggaaagtgaaggaagagaatgaaggtgagtccccgccgttgcaaaccttcaccaaaccacgcggcccagttttcgtgagtacccctgtgtcccagagaggaggacccagcgtcctcggctctgccgcaggccttcttggtctggtgggtactcgaggcagttgagaaccttgctgagctgagcgggcacctcgccttgcctgctggttcgacacctgaccccctccccctgggattatgtacacgcatcattgggcttcatggatgtggaaaggggagcaaaggatggtttggggggtacgtccggctttagcgagggcgtacgcttcagccccgaccttgtcagtgagttgtaggcgttgaggctgggctgcctcgagacagtcacggcctggccagatggctgggagctgtgcacctggatggagtccaccctctgcggggcgggcggcgggttgtctcccctgccaa

SEQ ID NO: 11005 - DNA, 526 bp, Homo sapiens
  MAP TO AL136980.2; EXPRESSED IN HELA, SIGNAL =   4; EXPRESSED IN FETAL LIVER, SIGNAL = 1.5; SWISSPROT HIT: Q09417, EVALUE 3.00e-05; EST_HUMAN HIT: AU125152.1, EVALUE 1.00e-95; NT HIT: gi14741880, EVALUE 1.00e-109
tgactggaggataaggtcccaaaatgatcatgaaatgttccatactccatatgttaactgcttaggcatcattcattgcaaattctaatggaaaaaatagggatagactggtgaagttcatggggtgttttgttttcagatttaagtgtatatactttaaaaggccaggatacttttattaactctaattctaattagatccctttgcttttcccaaaaaaatattatactatcatttgaaagacttagtaaactagtacctaggaacttaagaacctgcagatttaataggaaaacaacttgattcttgtctctccttctccagctgccattctgtcctcctgttgtactagcccagtctgttgaaaatgtctggacaacgtgtcgagcaaataaacagaaacgtcaccttctggaggccctctggctgagctgtggtggtgcagggatgaaagtttggctccctctcttccctagggatcaccgcaagccccattccttcttgtcccagcggatcatgctgcct

SEQ ID NO: 11006 - DNA, 525 bp, Homo sapiens
  MAP TO AC011307.1; EXPRESSED IN FETAL LIVER, SIGNAL =   1; EST_HUMAN HIT: BF997379.1, EVALUE 0.00e+00; NT HIT: AF245505.1, EVALUE 0.00e+00; SWISSPROT HIT: P09915, EVALUE 9.60e-01
tgatgagcacgggaacctggtgaacttggtgtgtgacatcaagaaaccaatggatgtgtacaaaattcacttgaaccaaacagatcctccagatattgacataaatgcaatggttgccttggactttgagtatccaatgacccaggaaaactatgaaaatctatggaaattgatagcatactacagtgaagttcccatgaagctacacagagagctcatgctcagcaaacaccccagagtcagctaccagtacaggcaagatgccgatgaagaagctctttactacacaggtgtgagagcccagattcttgcagaaccagaatggatcatgcagccatccatagatatccagctgaaccgacctcagagtacggccaagaaggtgctactttcctactacaaccagtattctcaaacaatagccaccaaagatacaaggcaggctcggggcagaagctgggtaatgattgagcctagtagagctgtgcaaaaagatcagactgtcctggaagggggtcgatgcca

SEQ ID NO: 11007 - DNA, 503 bp, Homo sapiens
  MAP TO AP000346.1; EXPRESSED IN HELA, SIGNAL = 1.4; EXPRESSED IN LUNG, SIGNAL = 1.2; EXPRESSED IN FETAL LIVER, SIGNAL = 0.98; EST_HUMAN HIT: AW375965.1, EVALUE 1.10e-02; NT HIT: X92684.1, EVALUE 3.00e-39; SWISSPROT HIT: Q02388, EVALUE 2.70e+00
ggggcagctgtgcttccaggtactttgtcactacccaagaccttagggtcccagggcagcaattgaaagggtccccatttccctttccctccctgtaactggccaagccccctgaaatgtctgaggtttggaagcagcaggtgggttgtgaccttcagggacccacttccagcttcagccaatcctgcccaccctgggtccctctgagctctgagtgtctggctgtgccctacagttggccatagctctgcacctagcattttgaacagttcctggggatccctgagaagggggtagggcctgcatgaacagaagcttctggagcagaagatgccgcttctgtcccttgactgactgtgatcttgagaccctgtctagctcaggtctgggcacagggcctgggcacctcggtgctggatacaggcccatttcccagctgggctggtggaggcttcattaaccgaaccctcccctaccctatgtccccacccccactagcctcc

SEQ ID NO: 11008 - DNA, 510 bp, Homo sapiens
  MAP TO AC008752.3; EXPRESSED IN HELA, SIGNAL =   2; EXPRESSED IN HEART, SIGNAL = 1.5; EXPRESSED IN FETAL LIVER, SIGNAL = 1.3; EXPRESSED IN LUNG, SIGNAL = 1.4; EST_HUMAN HIT: BG912660.1, EVALUE 0.00e+00; NT HIT: gi15302126, EVALUE 0.00e+00; SWISSPROT HIT: O95897, EVALUE 2.00e-72
agagcgggctctgggctgtgtacaccaccaaccagaacgcgggcaacatcgtggtcagccggctggacccgcacaccctcgaggtcatgcggtcctgggacaccggctaccccaagcgcagcgctggcgaggccttcatgatctgcggtgtgctctacgtgaccaactcccacctggctggggccaaggtctacttcgcctattttaccaacacgtccagttacgagtacacggacgtgcccttccacaaccagtattcccacatctcgatgctggattacaacccccgggagcgcgccctctatacctggaacaacggccaccaggtgctctacaatgtcaccctgtttcacgtcatcagcacctctggggacccctgagccaatgctgtggctcgggctgctgcctggggggcctctgggggctgggggcccttttcattctgcctgtgtccctcaagggtgatctctctgtctctgtcacgccctttctccccgcctttttgctggg

SEQ ID NO: 11009 - DNA, 500 bp, Homo sapiens
  MAP TO AL157971.2; EXPRESSED IN HELA, SIGNAL = 0.48; EXPRESSED IN FETAL LIVER, SIGNAL = 0.92; EST_HUMAN HIT: AW470753.1, EVALUE 1.00e-60; NT HIT: gi14250967, EVALUE 7.40e+00
acagcgcggcgtagagcagggcgtgcaggacgctcagcgccaactgcacggagcccggcaccgcggcgcctgaggctgcagcgacggcgcctccgcctccgctgcccccgccgggcgtggagggctcgcggccggctgcgggggcggcagcggccgccggacccggcacggacaccctcatgagggggctgggggccgggcgagcgagcgcgggaaggaaggggctggactcggagccgccgtcgaaggggagaaggactgcccccttaccccccacccaccccagcctctaaccccaggaagcgccgtgacgggacccggagtccagcgcaaagcagccgcggctcccccggaccccgcctcctctttccccccaccccccgggggtctcggctcctcctgctgcggctcggctccgtagctgcaaaaaacaactctcggctggagacaatcagctgagaaacccgagcatttgaggcgctcgctccgcactgtgggct

SEQ ID NO: 11010 - DNA, 525 bp, Homo sapiens
  MAP TO AP001717.1; EXPRESSED IN PLACENTA, SIGNAL =   2; EXPRESSED IN HEART, SIGNAL = 1.9; EXPRESSED IN FETAL LIVER, SIGNAL = 1.1; NT HIT: gi16166227, EVALUE 0.00e+00; SWISSPROT HIT: P17656, EVALUE 1.00e-06; EST_HUMAN HIT: AW962600.1, EVALUE 0.00e+00
gccagagttgccagggctgccttcggcaactagggcactggagttgtcggggcagcctgtggcaactggggcactagagttgcctgggccgctcatggcagctggggcactggagttctcggggcagtctggggcagctggagcactggagcttttggggcagcctctggcaacaggggtgctggagttgccagggcagcctggggcgccagagttgcctgggcagcctgtggcaactgtggcgctggagatctctgttcagtctgtggtgacaacatcggagctgtcaacgatgaccgtgtcgcagtccctggaggtgccctcgacgacagcgctggaatcctataatacggtagcacaggagctgcctactacattagtgggggagacttctgtaacagtaggagtggatcccttgatggccccagaatcccatatattagcttctaacaccatggagacccatatattagcatccaacaccatggactcccaaatgctagcgtccaacaccatggactccca

SEQ ID NO: 11011 - DNA, 506 bp, Homo sapiens
  MAP TO AC002400.1; EXPRESSED IN FETAL LIVER, SIGNAL =   2; EXPRESSED IN HELA, SIGNAL = 0.58; SWISSPROT HIT: O51345, EVALUE 8.00e-09; EST_HUMAN HIT: BE794758.1, EVALUE 2.00e-87
gctggcagccaccccacttcgcccacctgcccctgctcctcaacagggatggcagcaagctctccaagaggcaaggggacgttttcctggagcactttgctgctgatggcttcctgcccgattccttgttggacatcatcaccaactgtggctcaggttttgcaggtacgtgcccacctgaatagtcctggcagcagagagcatggccaggaggagcagggctttggctcagacagtcctgctctttggtcccagctttgccacctaccagccaggtgaccttggacaagtttattcttttattcaataaatgtttattttgccagacaccacattaagtgctggggctacagtagtgggtgagatagacatgatccctgccctcaagggacttatagtctctgagcctcagttgcatatctggaaaatggggataagtgtctacctcattgggttaggattcactgagctcaggagtgtaaggtacccagcccagcacctgtcac

SEQ ID NO: 11012 - DNA, 501 bp, Homo sapiens
  MAP TO AC009470.2; EXPRESSED IN FETAL LIVER, SIGNAL = 1.9; EXPRESSED IN PLACENTA, SIGNAL = 1.9; EST_HUMAN HIT: AW087099.1, EVALUE 0.00e+00; NT HIT: gi5803004, EVALUE 0.00e+00; SWISSPROT HIT: O10341, EVALUE 2.70e-02
ccgcgacctaggcgatggaagctccagcactggcagcgtgggcagtccggatcagttgcccctggcctgttcccccgatgattgaaggcactgcttcctccacgccgacgcccgcccggattgctccccgagccccgggaccgctgtggacctcgggacctggacgccgtcctggctgcgcaggaggggccgctggcatggactaagaaatcctgacaccaagaagggcccctcgctcttgctggcagggcagcagggggactgaaggctggagcggagggacttgctgggggttggattgggggtaataaacccggacggaagcggagcccacggcctgggcagcgtctgtttggtactcgccggggttggggcgagggtggggtgctgatacagggtacaattcccatccagaaggactgcagaactaatgattcccccattacttcgagcctggggtgggatgcggggcagtggtaaaccagacttcccccatcgggc

SEQ ID NO: 11013 - DNA, 570 bp, Homo sapiens
  MAP TO AL050329.9; EXPRESSED IN HELA, SIGNAL = 1.8; EXPRESSED IN LUNG, SIGNAL = 1.1; EXPRESSED IN FETAL LIVER, SIGNAL = 0.98; EST_HUMAN HIT: AU124429.1, EVALUE 0.00e+00; SWISSPROT HIT: Q02896, EVALUE 1.10e+00; NT HIT: gi14759418, EVALUE 0.00e+00
tcaaagccttttgggcaccactggtcaagtatatgaccaggcccagtcagtgatggaacaaaacactgttaaagaaattccatttttaaatgagcagaccaactcaaaaatagagaaaacagataatgtggaagtaactgatggtgaaaacaaggagataaaagttaaagtagataatatttcagaatctacagataagtcagcagaaatagaaacatcagtagtagggtcctcttccatttctgcagggtctttgacgagtcttagtctcagaggtaagccaccagatgtttctacagaagcatttttaacaaatttatcaattcagtcaaaacaagaggaaactgtggagagtaaagagaaaacattaaaaagacagcttcaggaagatcaagagaataatttgcaagataaccagacttcaaatagttctccatgcagatctaatgtaggaaaaggaaacatagatggtaatgtgagctgtagtgaaaaccttgttgctaatacagcgaggtctccacagtttatcaacctgaaaagggatcctaggcaagcagcaggacgaagtca

SEQ ID NO: 11014 - DNA, 519 bp, Homo sapiens
  MAP TO AL049698.3; EXPRESSED IN HELA, SIGNAL = 0.8; EXPRESSED IN LUNG, SIGNAL = 4.1; EXPRESSED IN FETAL LIVER, SIGNAL = 1.1; SWISSPROT HIT: P55196, EVALUE 3.00e-79; NT HIT: gi14761899, EVALUE 0.00e+00; EST_HUMAN HIT: AI418780.1, EVALUE 0.00e+00
gttcagcctccaggcgctgcatgatcagcatggtgtccacatcatcgtcctcctcctcctcgtcatcttcgtccttctgcttcgactcctggagtctcttctggaactgccactccagcatgagcttgcgcagccggtcgctctcctcggcgctgcggtccggtttgctctggagctcctggatctccttgctcagcatgtccacgatgtgcatctgctgctgcttctccagcttctccttggcgtcccgcttccacgggtcgggggacagactgtcccccgaggaaagctcctctttgctgactgtaatgtactgcaagtctctgcgctcgatcgtgcggggctgctgctgaggctgcagctcccgaatgactgtttcctgtggccgctggagtgtggaaggcttttcgggcttcatctgctgtgcagtcaggggagaaaacggagcagggtttaaggactgagtgcgcatctggcccaacttcctctcctgctctctccgcttcctctcccgctcct

SEQ ID NO: 11015 - DNA, 532 bp, Homo sapiens
  MAP TO AL021395.14; EXPRESSED IN PLACENTA, SIGNAL = 3.5; EXPRESSED IN FETAL LIVER, SIGNAL = 5.8; EXPRESSED IN HEART, SIGNAL = 2.5; SWISSPROT HIT: P05092, EVALUE 5.00e-13; NT HIT: Y00052.1, EVALUE 1.00e-123; EST_HUMAN HIT: BG027568.1, EVALUE 1.00e-126
ggtgtctgaggccagagaggctgagtgatgtgctcaggtttgcacagagctcctgcctcctagctctgagttctctctattacatcacagcatattcaacataattcagctgctatcttgattatccccaggagtagggagattgattttatggcccaaaacaggcccaaaaaacagagcctgtcttttttttcttttggttatttagtttttatttcataatcataaacttaactcttcaacacagctaggcatggaagggaacaaggaaaacatggaatccaaagggaactgcagcaagagcacaaagattctaggatactgcgagcaaatggggtggaagggtgctctcctgagctacggaaggaatagtctggtggttaagataaaatggaagtcaaacttatcgaagttgtctgcagtcagcaatgattatcttcttgctggtcttgccattcctggacccagagtactccatggcctccacaatcttcatgccttctttcaccttgccgaagaccacatgcttgcc

SEQ ID NO: 11016 - DNA, 538 bp, Homo sapiens
  MAP TO AL078639.5; EXPRESSED IN HEART, SIGNAL = 2.2; EXPRESSED IN LUNG, SIGNAL = 1.3; EXPRESSED IN FETAL LIVER, SIGNAL = 2.1; SWISSPROT HIT: P51861, EVALUE 2.00e-28; NT HIT: M31423.1, EVALUE 0.00e+00; EST_HUMAN HIT: BI036653.1, EVALUE 0.00e+00
ccgtgtcttccagcaaatccacgtcttccaacaaagccatgtcttccatcaaattaatgtcttccagcctacttgtgtcttccaacaaaggtacgtcttccaacaaaggtacgtcttccaacaaaggtatgtcttccaacaaaggtacgtcttccagaaaatccacgtcttccaaccaagccatgtcttccagaaaatccacgtcttccagaaaatatatgtcttccaactaagctacgtcttccaacaaatccatgtcttcctatatctccaggtcttccagcatctccagggcttccagcatctgctcgtcttccaacatctccacgtcttccagcatctctgtgtcttccagcatcttcatgtcttccaacaactacccagtcttccatcaactggctcaatatccatgtcttccaacgtctccagtgtgctgatcttctgacattcaggtcttccagtgtctgcaatatccaggtattctaacatgttctatagtccagatcttccagcctttccccaggtccaggccttttca

SEQ ID NO: 11017 - DNA, 562 bp, Homo sapiens
  MAP TO AL031346.8; EXPRESSED IN LUNG, SIGNAL = 1.1; EXPRESSED IN FETAL LIVER, SIGNAL = 1.1; EXPRESSED IN HELA, SIGNAL = 1.9; EST_HUMAN HIT: AU130652.1, EVALUE 0.00e+00; NT HIT: gi14779283, EVALUE 0.00e+00; SWISSPROT HIT: Q59094, EVALUE 8.10e-01
tccctgagcagaaccgctgctccagtctttatactcctctggttgctgttggtacatctgtctcttataatgcagctgagaattcaaacctgcgttagggtccccataagcatgagcccgagtatttgcatgataagcagaggccagggtttctgagttgggagaaaagggagtgtgtaaagaactccggttagccctctctgaaaaggtcatgtgtggattcatgtgatgagggtctccccctgggcctctgctccgcccaggagacattttcaatttttctgcaaagtcatgatattgagaaggggaccgacccctcatgccctcccgaccaccaactctgccagggacccgccgcattggcgtgggtctgctgtcttgcgggccatagtctgaaagggaatcatgggttgctgctccagggctggcattgccgcggtaagactcatgcttgatgctaggaggatggcagtggtctccagatttcttgttgttgaaactagcttgagatttagactgttcaaagtcttcctcttttatctgcccgctctgggatttcagc

SEQ ID NO: 11018 - DNA, 502 bp, Homo sapiens
  MAP TO AC007956.5; EXPRESSED IN PLACENTA, SIGNAL = 2.1; EXPRESSED IN FETAL LIVER, SIGNAL = 2.7; EXPRESSED IN LUNG, SIGNAL = 2.5; EXPRESSED IN HELA, SIGNAL = 3.9; NT HIT: AB033168.1, EVALUE 8.00e-43; SWISSPROT HIT: P49752, EVALUE 5.00e-10; EST_HUMAN HIT: AL046823.1, EVALUE 0.00e+00
ttctgcagggccaccaccagttcttcccccaccatctctctcttcaacagcacctccacctgtcatgcccctcccaccattgtcttcagctacacctcctccaggaatacctccccctggagttccacaagggatacctcctcagttaacagcagccccagttccaccagcctccagttcacagagctcgcaagttccagagaaacctagaccagcactgcttcctactcctgtgtcttttggttctgccccaccgacaacttaccatcctccgttgcaatcagctggtccatcagaacaagtgaattcaaaagctcctttgagcaagtctgctctgccatacagttcattctcatctgatcaaggacttggggagtcttcagctgctccatctcagccaatcactgcagtgaaggacatgccagtgagatcaggtggcctgcttccagatcctcctagaagtagttacttggaaagtccaagaggcccaaggtaggtctgc

SEQ ID NO: 11019 - DNA, 511 bp, Homo sapiens
  MAP TO AC007106.6; EXPRESSED IN FETAL LIVER, SIGNAL = 0.96; EST_HUMAN HIT: BE073723.1, EVALUE 0.00e+00; NT HIT: gi9635487, EVALUE 0.00e+00; SWISSPROT HIT: P21414, EVALUE 1.00e-08
agccgtgtcgcatctgtgggggacctcactgaaaatcggactgttcaactcacctggcagccacttccagagcccctggaactctggcccaaggctctctgactgactccttcccagattttctcggcttagccactgaagactgatgctgcccaatcacctcggaagccccctgggccatcatggatgccaagcttcgggtaagtcttacagtgaagggtaagtccgtccccttcttaatcaatacggaggctacccacaccacattaccttcttttcaagggcctgtttcccttgcctccataaccattgtgggtatgacagccaggcttctaaacctcttaaaactccccaactctggttccaacttggacaacattcttttatgcactcctttttagttatccccacatgcccagctaccttattaggttgagacattttaactaaattatctgcttccctgactattcctggactacagccacacctcattgctgccttttccccc

SEQ ID NO: 11020 - DNA, 514 bp, Homo sapiens
  MAP TO AP001067.1; EXPRESSED IN FETAL LIVER, SIGNAL = 0.95; EXPRESSED IN HELA, SIGNAL = 0.46; NT HIT: AL163300.2, EVALUE 0.00e+00; SWISSPROT HIT: O75690, EVALUE 8.30e-02
gaccagggtcaggcagggggctggggcacagcagctgggggtgccgcaggggagctcacagcagctctctgggcagtcgtccacctgccaggagttggtgcaggcgctggagcagatggacatggtggaggcggccatgctggagtggggaggaggtgagctgggggaggtgtgtgagtgagtgagtgtgtgtgtgagtgtgtgagtgagtgtgtgtgtgagcctgttggctgctggggcttttatatgcccagggcctgtgttttcccagcaggagactcagcaacgccctccacttccgtgttggtgtttggagccgggaggaccctcattatttctgcttcctttgccatgacttgtcctcactctgctcctaacactcggctggtcctgggcaggaccggcgcccctggctgagcctgtcccccgggaacaccaggagggaaggtgtggcctctctggggctgacctggtgacttccacctggcaggtcccgtgactgtgcccagcgtga

SEQ ID NO: 11021 - DNA, 528 bp, Homo sapiens
  MAP TO AF002993.1; EXPRESSED IN HELA, SIGNAL = 0.92; EXPRESSED IN FETAL LIVER, SIGNAL = 1.6; NT HIT: AF312032.1, EVALUE 0.00e+00; EST_HUMAN HIT: BI666650.1, EVALUE 0.00e+00; SWISSPROT HIT: P02461, EVALUE 9.70e-01
aggccgtcgcagccgtagtggtagtagaggtagtggcccgagagcagcgccaggcggacagggccgcggctcggcggggacaggcccacgtggacgtccctcagcggctccagggcggtgggcgggaacggatgtcccatgccaggcacagcgtcctcctagcggcgcggagcgacctcaggctccaacacttcctttcggctccgggtcttgggccagctgccgcaggaccggcgcgcagactggggacgcgctccccgggcctcgttgatcaccgcaggccgcaataggcagccaccgaccggcaccgaccgaggagctcccacaatgctccgccgcgccccgccccgcccctcccctcccctcccctcccctctcctcccctccgccgtgccagctagcctgcctgcgggcctcattacgcaggcgcgagctccgcccggcagggcagggctaggggttggcctttgccttgcgcccgcctcggagctcgcctgtttcttgccctccagccccgctcctgcatag

SEQ ID NO: 11022 - DNA, 514 bp, Homo sapiens
  MAP TO AF001549.1; EXPRESSED IN LUNG, SIGNAL =  19; EXPRESSED IN FETAL LIVER, SIGNAL =  14; EXPRESSED IN PLACENTA, SIGNAL =  18; EXPRESSED IN HELA, SIGNAL = 3.5; EST_HUMAN HIT: BG256504.1, EVALUE 0.00e+00; SWISSPROT HIT: gi12644096, EVALUE 8.00e-04; NT HIT: D86974.1, EVALUE 0.00e+00
tccccttccaccctcagctccaccctcagcagatgataatatcaagacacctgccgagcgtctgcgggggccgcttccaccctcagcggatgataatctcaagacaccttccgagcgtcagctcactgcccttccaccctcagctccaccctcagcagatgataatatcaagacacctgccgagcgtctgcgggggccgcttccaccctcagccgatgataatctcaagacacctcccttagctactcaggaggctgaggcagaaaaaccacgcaaacccaagaggcagagggcggctgagatggaaccacctcccgaacccaagaggcggagggtcggtgacgtggaaccgtcacgcaaacccaagaggcggagggccgctgacgtggaaccatcatcacccgaacccaagaggcggagggtcggtgatgtggaaccgtcacgcaaacccaagaggcggagggccgctgacgtggaaccatcatcacccgaacccaagaggcggagggtcggt

SEQ ID NO: 11023 - DNA, 501 bp, Homo sapiens
  MAP TO AC008015.5; EXPRESSED IN HELA, SIGNAL = 1.3; EXPRESSED IN FETAL LIVER, SIGNAL = 0.98; NT HIT: gi14784688, EVALUE 4.00e-69; EST_HUMAN HIT: AL525695.1, EVALUE 7.00e-69
tggacctcatcaggccacggattgtgtgaatcagcagaaaataggactttcctaagcaaaacaggaaggaaagaaaggatggagtgtgaaacagatgaacaaaaacagggctctgatgagaacatgtcagaatggtgagatctcccttactaagtcaaagattttcctggttaatttttcccaaagtgcacatccatggtcttagtgggttctaccttctttcaaaccagccactctagtattgactttgaagccttccttgaatcaatcagtagtttagctttttaaggtaccattcatgagtctatttccctctgtcaggaaggctatatgtaatagaaacacagttgtttctaaaaactgtttaaaacgcgtacctcaaatgcaaaactaataattttattttaaaaaacaatttgctgcttattatgccatatagtttgtacataaatattgttgtttagaactcaggtctcagcagaggctggtgtgtgtgtgtga

SEQ ID NO: 11024 - DNA, 594 bp, Homo sapiens
  MAP TO AF165146.1; EXPRESSED IN LUNG, SIGNAL = 2.1; EXPRESSED IN HEART, SIGNAL = 2.8; EXPRESSED IN FETAL LIVER, SIGNAL = 1.7; SWISSPROT HIT: Q92524, EVALUE 1.00e-108; NT HIT: gi14746669, EVALUE 0.00e+00; EST_HUMAN HIT: BG621561.1, EVALUE 0.00e+00
ggccctacgaagtgttgggcagattgtgggtgaagtgtttaaacagttaactgaagaaaaattcattgttaaagctaccaatggaccaagatatgttgtgggttgtcgtcgacagcttgacaaaagtaagctgaagccaggaacaagagttgctttggatatgactacactaactatcatgagatatttgccaagagaggtggatccactgatttataacatgtctcatgaggaccctgagaatgtttcttattctgagattggagggctatcagaacagatccgggaattaagagaggtgatagaattacctcttacaaacccagagttatttcagcgtgtaggaataatacctccaaaaggctgtttgttatatggaccaccaggtacgggaaaaacactcttggcacgagccattgctagccagctggactgcaatttcttaaaggttgtatctagttctattgtagacaagtacattggtgaaagtgctcatttgatcagagaaatgtttaattatgctagagatcatcaaccatgcatcatttttatggatgaaatagatgctattggtggtcgtcggttttctgaggg

SEQ ID NO: 11025 - DNA, 522 bp, Homo sapiens
  MAP TO AC005618.1; EXPRESSED IN FETAL LIVER, SIGNAL = 0.98; EXPRESSED IN HELA, SIGNAL = 0.75; NT HIT: gi14861871, EVALUE 0.00e+00; EST_HUMAN HIT: BI087139.1, EVALUE 4.00e-89; SWISSPROT HIT: Q9Y5E4, EVALUE 7.00e-30
gagcgcacagagcggggtggtggtcgcgcagcgtgccttcgaccacgagcagctgtgcgccttcgagctcacgatgcaggcccacgaccagggctcgcccgcgctcagcgccaacatgagccggcgcatgttggtgggcgacctcaatgacaatgtgccgcgggtgctgtaccccgcgctggggcccgatggctccgcactcttcgatatagtgccacgcgccgcagagtccggctacctggtgaccaaggtggtggcggtggacgcagattcgggacacaacgcttggctgtcctaccacgtgctgcaggccatcgagcccgggcttttcagcctggggctgcacacgggaacctgctggttgctgtgcgtgacggaggacagccgccgctctctgcgccgctacgcttcacctagtcttcgcagacagcctgcaggaggcactgccagacttcagtgacagtcctgtgccctctgattcccaagcaaagctgcagatttacctggtcgtggccttggcct

SEQ ID NO: 11026 - DNA, 531 bp, Homo sapiens
  MAP TO AL132777.2; EXPRESSED IN HELA, SIGNAL = 0.78; EXPRESSED IN FETAL LIVER, SIGNAL =   1; EST_HUMAN HIT: AA355033.1, EVALUE 4.80e-02; NT HIT: AB024687.1, EVALUE 1.00e-105; SWISSPROT HIT: Q9UIU6, EVALUE 1.00e-16
ggggaacacaggcacacctgcgactcaggaacgcaagtagtttttttggctgtgttgttgttggggttaaacataaaagatgtctccatacaaaatatatctatatatatatttacttggagaggtaaaaacagatgttctaagatgtactaagttacactttcaaggagtagagcctgggaatctgtagttttaggtgcccaaggtaattctgaaccagaattgggctaaatgattgtatggaagtgttgcttctttatagatactgtacctgagaaaaaaacgtgtgtgtaactttttttctttccctctcacttccatcagtgataatcagtactttattttttttaggtaatatctcagtaagctcaagcacttcagatggaagcacatttacaagtgagtctaccacagtccagcaaggaaaggttttcttgagctctcttgctcccagtgcagtggtatacacggttcctaatacaggccagactataggatctgtgaaacaggaaggcttggaaaggagcctgg

SEQ ID NO: 11027 - DNA, 509 bp, Homo sapiens
  MAP TO AL356460.1; EXPRESSED IN FETAL LIVER, SIGNAL =  20; SWISSPROT HIT: P02248, EVALUE 1.00e-34; NT HIT: X04803.2, EVALUE 0.00e+00; EST_HUMAN HIT: BI000312.1, EVALUE 0.00e+00
ttggagttcggtcgggggagtttgaatatccggaacagttagtggggaaagctgtggacgcttggtaagagagcgctctggattttccgctgttgacgttgaaaccttgaatgacgaatttcgtattaagtgacttagccttgtaaaattgaggggaggcttgcggaatattaacgtatttaaggcattttgaaggaatagttgctaattttgaagaatattaggtgtaaaagcaagaaatacaatgatcctgaggtgacacgcttatgttttacttttaaactaggtcaaaatgcagatcttcgtgaaaacccttaccggcaagaccatcacccttgaggtggagcccagtgacaccatcgaaaatgtgaaggccaagatccaggataaggaaggcattccccccgaccagcagaggctcatctttgcaggcaagcagctggaagatggccgtactctttctgactacaacatccagaaggagtcgaccctgcacctggtcctgcgtc

SEQ ID NO: 11028 - DNA, 511 bp, Homo sapiens
  MAP TO U52111.1; EXPRESSED IN FETAL LIVER, SIGNAL = 0.97; EXPRESSED IN HELA, SIGNAL = 0.82; SWISSPROT HIT: P02458, EVALUE 9.80e-02; NT HIT: U52111.2, EVALUE 0.00e+00
actcaggcgcggcagtggagaggcaggaaggctgggtggggactgtcctgtgctggttgcctgcacgctcgaggccacttctgcttcctctcctcctcaaggaggttgtcctggccttagagctgcgatcctagcggtttgagcctcgagagctcctgcccgccccactcctgcagccagccaggaggagacgcctgccattcatgagcggggaccgagggacgcagcctgctgcctagcccctcctgggcccttgggccctttgaaggccggcgtccagcagagctggctggccaggcaggccggcattatgggcatgactcagcccaagcggaggttaatgagcagcgcccagcacagcagtgggacttggggtcaaggccacccccgcctgagcccacaggcctgcctggctaccaactggctcagctgccttcccgggcccccagaccagagatgccgggcccaggccgccactgcggcgggacacacttcctgctcctggcgtggc

SEQ ID NO: 11029 - DNA, 527 bp, Homo sapiens
  MAP TO AC013533.3; EXPRESSED IN PLACENTA, SIGNAL = 1.7; EXPRESSED IN FETAL LIVER, SIGNAL = 1.1; NT HIT: gi13646857, EVALUE 0.00e+00; EST_HUMAN HIT: BE258974.1, EVALUE 4.70e-02; SWISSPROT HIT: Q9Y2K6, EVALUE 8.60e-02
ggccacgctgggagccctactgcagcagggctttgactccccggccgtcctggctaccctggaggacgcggatatcaagtctgtcgcacccaacctgggccaggcccgtgttctgagccgcctggccaatagctgcaggaccgaaatgcagctgcggaggcaggaccgggggggcccgctgccccgggcgcggtccagcagcttcagccaccgaagcgaactgctccatggtgacttggcttctctgggcgctgcggctcctctgcagacagcatccccccgagctggagacccggctcgccgtccctccagcgcaccatctcagcacctcctggagacggcagccacctattctgcccctggcgtgggcacccatgccccacacttcccctccaactccgggtacagctctcccaccccttgcgccctgacagcgcgtctgagccccacgtaccccctgcaggcaggggtggccttgactaacccgggcccctcaaacccccttcacccaggccccagaacagcct

SEQ ID NO: 11030 - DNA, 518 bp, Homo sapiens
  MAP TO AL162171.1; EXPRESSED IN HEART, SIGNAL = 1.6; EXPRESSED IN FETAL LIVER, SIGNAL = 1.5; EXPRESSED IN PLACENTA, SIGNAL = 1.7; EST_HUMAN HIT: AI394652.1, EVALUE 1.00e-94; SWISSPROT HIT: Q16825, EVALUE 4.00e-30; NT HIT: gi13632491, EVALUE 4.00e-97
gtccccagcccagtgccttgaatggtatctctgcctcaacttccccagagttccaaaaagtctgctagtctgctgtgggtgtggttcgtttaagacagggtctcactttgtcacccaatgaatgccaccccttaagtaggcagagccatgcccatcctatagatgaggaagccgaagctcccagggtcactcagatagtgtggctaaagctaggtcattctagcggggatttttacaagctgtgttaaaaatgtcatcagaggtaagggccgatctcagtatttggttggagtaattagtccatttaaaaaaatctcattttgaactcattttttctagataacctctttgtgcccaaccagaacggatactactgtcactctcagacaagcttggatagagcccagattgacctcaacggtcggatccgtaatggcagtgtctacagtgcacacagcaccaactccttaaataatcctcagccctacttgcagccctcgccgatgtcgtccaaccct

SEQ ID NO: 11031 - DNA, 510 bp, Homo sapiens
  MAP TO AC017111.2; EXPRESSED IN PLACENTA, SIGNAL = 1.8; EXPRESSED IN HEART, SIGNAL = 1.3; EXPRESSED IN FETAL LIVER, SIGNAL = 1.3; NT HIT: U83615.1, EVALUE 4.80e-01; EST_HUMAN HIT: BG566273.1, EVALUE 2.80e+00; SWISSPROT HIT: Q00657, EVALUE 4.00e-06
ctcgcatgggagccctggtgatggtaaaaaccaagttttcatcaggactgttcaagtcactagtgcttagtaggtctgttgtaagagtgactttgccaccttctttcaaggacactcccttacttatcacatcagggaagacaatgtcaatgctcccgatggacacataaaagtaacgatctatgaggggatttattccatcagtcacatcaaatttaattaggtcccgaatgccctcttgccccaaatggacatactgaattaagtttctgtctacttcatcctgggtaaaattcatgcccagtgtgatattttcaaaggcaccagtaggttttcgtctctgtaataagccatgtcctggcccataacgaataatataaaccaaagatttgtcttctgaatctaaatctgttgccattaatattttgttgttgataatcttggtatccccaatttctatttctagtccattattgatagtcattctgggcgtctcatcatcaacaggga

SEQ ID NO: 11032 - DNA, 500 bp, Homo sapiens
  MAP TO AL157879.2; EXPRESSED IN FETAL LIVER, SIGNAL = 3.1; EST_HUMAN HIT: BI061650.1, EVALUE 0.00e+00; SWISSPROT HIT: P52591, EVALUE 2.00e-03; NT HIT: U21556.1, EVALUE 4.00e-91
ctgcagcacgtgcccagaggtcagaagtgagatacaaccagagatcccagatctcccggaccagatcctgcctcaaacgaaatgccagctccagctcccacagctctacggaaggcctcccggaactaaagcggaggagggggccagcctcatcccactgccagctggcccacagttcctcaaagacagtgagtgaggacggacctcaggctgtctcttcgggtcacacccgctgtgaaaagagggcagatacagcaccagggcagacactcgcccccaggggtggctcccccagatcccaggcctctaggccccacatcaacagtgcactgcacgttgaggacaaggccatctcggactgccgaccctcgcggccttcccacactttgtcctcacttgcaacaggggcttcgcgtgggcctcccgtttctaaagcacccactatggatgcacagcaggacagacccaagtcccaagactgcctgggcctactggccccc

SEQ ID NO: 11033 - DNA, 597 bp, Homo sapiens
  MAP TO AP001725.1; EXPRESSED IN HELA, SIGNAL = 8.6; EXPRESSED IN FETAL LIVER, SIGNAL =   3; SWISSPROT HIT: Q9Y316, EVALUE 3.00e-31; NT HIT: gi14730333, EVALUE 1.00e-125; EST_HUMAN HIT: BI460991.1, EVALUE 1.00e-125
tcacgggggtggggtcactcgcggtggctcggggaggccagctgggaggggagggggccgtgggggcggctcggctgaaccagccccggctgggcagcagcggggacgccgggggccggggccagggctttccgggcttaggtgaggccgccgtgggccccatcttccggcggtcgccggagtttgtggtgattgttgctgccgccgccacccccccggctgccatctcctcctcctgggccgccgcctcctcctcttcctcctcctcctgggccgggctgatcccctccccgctgccgcctcctcctgggctgggcccgcggtgtctcgtcccctcgcggagccgctcctgccgccgccgccgccgcctcctcattcatcctcgtgcaccataggcggcacaggcaccaagatgtccaaccgagtggtctgccgagaagccagtcacgccgggagctggtacacagcctcaggaccgcagctgaatgcacagctagaaggttggctttcacaagtacagtctacaaaaagacctgctagagccattattgccccccatgcaggatatacgtactgtgggtcttgtgctgcccatgc

SEQ ID NO: 11034 - DNA, 533 bp, Homo sapiens
  MAP TO AC004079.1; EXPRESSED IN HELA, SIGNAL = 1.2; EXPRESSED IN FETAL LIVER, SIGNAL = 0.97; SWISSPROT HIT: O43364, EVALUE 1.00e-46; NT HIT: gi14751286, EVALUE 0.00e+00; EST_HUMAN HIT: AW299721.1, EVALUE 0.00e+00
tccagaagggccccagagacgctaagggcttgctcaaagagcgtcttctcttcctcgtcctcctctactttctcggagtcctcaaggcttttacatttcccttcgctgttttggttttccttgcactgggtctgcctcttgtgcttcatcctccggttctgaaaccacactttcacttgtctctcagtcaaatccagcagcgctgcaatctccacccttcggggtctgcaaaggtacttgttgaaatgaaattctttttccagctctagaagctgtgtgttggtgtaagcagttctcaggcgccgcgatcccccgccgctgccatcggcgatttccagggattctgcggaaagggaaaccaacaagagacacacgcacagttggaggtggaggggtccgagcggggttattccactggagaataaatatagcagaaaagatcaactgcaacaaaatggccgcccctggatgcagtagagctattgtgctgcctttcctgggagcccagcctgggcagaccccgtcccctccat

SEQ ID NO: 11035 - DNA, 521 bp, Homo sapiens
  MAP TO AL096712.14; EXPRESSED IN HELA, SIGNAL = 0.92; EXPRESSED IN FETAL LIVER, SIGNAL = 0.93; SWISSPROT HIT: P44604, EVALUE 4.80e+00; NT HIT: gi14783109, EVALUE 4.00e-29; EST_HUMAN HIT: BG029939.1, EVALUE 2.00e-29
gctcagcagcaggcaagagtggagcaactagagaagactttccaggaagaggaacagcatcttcaggtaccacacagaagggaagggcaagagtggtcttcaggggtggggcaggcacttcatgagtctctggccagagttctcagtttctgggccaggtaccaaattctgagcaccaaagacaggaaatggaatgggaacagtaaacttttgagataagggaaggggattgagtagagggttaaggcttcagcatgctgatgagatcaggagccagagttagagtgccaagatagggtaaagtgaccagcagagccagccagggcataactcatcccaggaggcaaagctgaggcaactcagaaccaacatgaattcagggggaagttaggtgaaggtcaacatgccacaaaaccacagtatagtccaattgaatcaatagttgtcttcaagacttgtgtatctttgctctgtggccaaggccaaatcacttagtctcagggcaggtacaggtcagctgg

SEQ ID NO: 11036 - DNA, 526 bp, Homo sapiens
  MAP TO AL035665.29; EXPRESSED IN FETAL LIVER, SIGNAL = 1.6; NT HIT: gi14770835, EVALUE 0.00e+00; EST_HUMAN HIT: AV659075.1, EVALUE 0.00e+00; SWISSPROT HIT: P54842, EVALUE 2.00e-05
tcgccaactccggcttcagggaggcgggctccaccagcgacagcccctcctctcccgagttctttctgtgagtcgtggccggtcctggcccccgcccttgccccggcccggactccctgtcccacgtccctagtcccagactaccccggaccctgtccctgccgcggccccagccttgacctgtttgacttgagcgagagggaggaagggcgcgcgggccgcgggcgacgggcgggtgcgcgggcgggcaggggaccttggctaaggcgagagtagcgcacgccagcgccgcctcctagactcgagcagagccggagagagagacgagagggtgggaggtcccggagtaacttctctccaggctgaagggcggcgaggcatagtcccgagaagtcaccaaggccatctggagactcctggctttctgaactttgcgcgttaagccgggacagctgctttgctgcccggagagtagtccgcgccaggaagagagcaacgaggaaaggagagggactctggcgtcccg

SEQ ID NO: 11037 - DNA, 524 bp, Homo sapiens
  MAP TO AL024497.5; EXPRESSED IN PLACENTA, SIGNAL = 1.5; EXPRESSED IN FETAL LIVER, SIGNAL = 1.1; EST_HUMAN HIT: BI059827.1, EVALUE 5.00e-11; SWISSPROT HIT: P39189, EVALUE 2.20e+00; NT HIT: AF224669.1, EVALUE 3.00e-05
tcacccctacaacccacagcccactgaaattactcaaactagccagtcctaaactgtttcctctgcccttccctttcccacagaaaccccactaaaggatatggcccaggctttcccttcctccttctgcatcctgaccaaacccagtgcttccccatgcgccccatcgtgggaaatgtaagtaataaaattacttacatttaatgtaagtgccccccctcctcttgggaaatgtaagtaataaaaataatctttcgatggcattggcctctccatgttgtcactcagtcacctccataaattaaaatcccctggtacaactgataaactcccaatttgtaccattaactcttcaatccattcggcaggaagtggctaaaactatttcaatacataagtagatgtcaagaattatgaaaggtctgagattttaccctatgtgcaagctaacatggtagctagcctccgtttcgtgaatacaggaagaagactcaaggatacaaggtttgggggcgcttggtgag

SEQ ID NO: 11038 - DNA, 564 bp, Homo sapiens
  MAP TO AC010485.4; EXPRESSED IN FETAL LIVER, SIGNAL = 4.5; NT HIT: gi14763015, EVALUE 0.00e+00; SWISSPROT HIT: P46778, EVALUE 8.00e-63; EST_HUMAN HIT: BG614048.1, EVALUE 0.00e+00
gcatcagagttcttgggtgaccaggttcattgtcaatgagcagtaatattttgaaaggaatcttcttttctgagcagtaggtctcaacagtgggtttaaaatattcagtaaaccaccctttcagccggaactgccatcttccagtaatttgccaaaatgacgaagacaaagggaaagaggagaggcacccgatatacgttctctaggccttttagaaaacatggagttgttcctttggccacgtatatgcgaatctataagaaaggtgttattgtagacatcaagggaatgggcactgttcaaaaaggaatgcctcacaagtgtcaccatggtaaaactggaagagtctacaatgttacccagcatgctgttggcattgttgtaaacaaacaagttaagagcaagattcttgccaagagaattaatgtgcgtattgagcacattaagcactctgagagctgggatagcttcctgaaatacatgaaggaaaatgatcagaaaaagaaagaagccaaagagaaaggtacctgggttcaactgaagtgccagcctgctccacccaga

SEQ ID NO: 11039 - DNA, 559 bp, Homo sapiens
  MAP TO CHR17.1; EXPRESSED IN ADULT LIVER, SIGNAL = 1.1; EXPRESSED IN FETAL LIVER, SIGNAL = 0.74; EXPRESSED IN HEART, SIGNAL = 0.48; EST_HUMAN HIT: BE178056.1, EVALUE 1.00e-109; SWISSPROT HIT: P26414, EVALUE 1.40e+00; NT HIT: U34879.1, EVALUE 0.00e+00
ctttcctgacctggaagcagtatctccctgatactgaaccccacccagaagctctctggggctgccattcctgggagtacacaggatagtcccgtcattcttcttgggtgggcggagctgctgcagcacctcagccctggcctgcatgcttttaggaactatgagcagattgtgaaggcacaccgggacaacccccatgaaggggaggaccaggtctctgaccaggtcaagttcaacgtgtttcaaggcatcatggattccctgttccagtccttcaatgcctccatctcagtggccagcttccaggagctgtcagcgtgtgtcttcagctggatcgaggagcactgtaagcctcaggtatggggcaacaataggcacagggtctgcggttttctctaccatcaagcaaagtggcccaagccatcagctgttgagaaaagcgtggcagctgcttttagatcttaagggcgtttctacagctttgagggccctggtattttcccttttctttgctgtctaacccacatcttcatgttacggtttcattcggcaagtgtga

SEQ ID NO: 11040 - DNA, 540 bp, Homo sapiens
  MAP TO CHR12.1; EXPRESSED IN ADULT LIVER, SIGNAL = 0.88; EXPRESSED IN FETAL LIVER, SIGNAL = 0.87; EXPRESSED IN LUNG, SIGNAL = 0.98; NT HIT: gi14768676, EVALUE 0.00e+00; EST_HUMAN HIT: BG574240.1, EVALUE 0.00e+00; SWISSPROT HIT: P34926, EVALUE 2.00e-01
agggttgtggaactggagagtgttcacaaccatagggaatccacccctgaatgggcctcccatgttcagtggcacccacacctcaccccgctgaccctggtgtacatatactatctcaggccaacttggactgacctggcatttaatcccagcctggctgcaggcacacgcttctgggtcacaatacagtcggcagtcacaaccacattcttcccgtgacaggcggatggctcgaagttcttgcttctcttcagcatcaatacggtggaccccagaagccctcagcagggcccgtcgccgtttggtgggcagaggctgcaggaagaagtaatcatccacctccacattttccacatcaatatcttcatctgacacatcatccagcgtcaggccatcagcctccaccgactccactgtcccattcttggtcagctgccaagagacaggaaaggttagcctcatagacatgagcggcatgcacctcctcagtgaccatcccagagcagcactgtcccttgaaccttctgcaatcatgggaat

SEQ ID NO: 11041 - DNA, 599 bp, Homo sapiens
  MAP TO CHR7.1; EXPRESSED IN FETAL LIVER, SIGNAL = 0.42; NT HIT: gi4758153, EVALUE 1.00e-127; EST_HUMAN HIT: BI820934.1, EVALUE 1.00e-126; SWISSPROT HIT: O60443, EVALUE 4.00e-35
tacctggactcggaaattggtcttctatgagtacatcgccaagggtgagggataaaaactggtacttgggtctctgccagcaccagaatctcttcttttttgtcaccagacttagaagctgtaacttatcagagtcattcagatttgatactgcaatcaggtcaccatcagcatcaacttctctaagaaaattcctggttgctttggcaaacattttgaaagctccagattatctgaaaaagtaaagttatcctaaaatcaaataagaagttactattttgtggcttttttccctaaaattactgtatttctccctattcacaacagttcacatgaaagaatatcttcttcctagaagaccctctagtttgactttagctgataataaagaactcaaatagagatattgaaagaacatatatataccagtctggatatgctaggttacgcttcagaaacaatccctaagtcttagtggtttattacaataagggtttatttgttgctcatactacatgcacaatacaggggtacaagagagttttgtttattatggttattcagggatccagactgaagggaaagccagcatcttgaac

SEQ ID NO: 11042 - DNA, 501 bp, Homo sapiens
  MAP TO CHR19.1; EXPRESSED IN FETAL LIVER, SIGNAL = 0.39; EXPRESSED IN LUNG, SIGNAL = 0.78; SWISSPROT HIT: Q99742, EVALUE 1.00e-08; NT HIT: U51628.1, EVALUE 3.00e-45; EST_HUMAN HIT: AI916513.1, EVALUE 0.00e+00
tgctgctatggtgagaccaggagagaggaaggatatgcataggcctggcaagggagatggtggctgagccaatccaggtccactgggggtcccttacctgtgagagacccagatagatggagactgtctctgagatgtagaggaattttccttcctggttcaaggcgaacacaaagccatccagggactagagccgggagagacagggagggggaaggagaggacccggtgtccctctgtccagccgccaagtggtaagaggttctgaaacctgggtctccacctgaggtggactgttttggtggggagggggcttcagtggtcctcggaaggggcagggagtggagggatcttgagcattcgccttcccagtccaggtaccccccacaatagatggatgctgaagaggctgctgttctccagaggcggccgctaggtggtagcaaggagcggcaggcagggaaggggcctcactcacctgcaagatgtgacctcccaggt

SEQ ID NO: 11043 - DNA, 528 bp, Homo sapiens
  MAP TO CHR9.1; EXPRESSED IN FETAL LIVER, SIGNAL = 1.1; EXPRESSED IN HEART, SIGNAL = 0.59; EXPRESSED IN ADULT LIVER, SIGNAL = 0.79; SWISSPROT HIT: Q92574, EVALUE 6.00e-30; NT HIT: gi14738494, EVALUE 7.00e-96; EST_HUMAN HIT: BE731805.1, EVALUE 1.00e-95
cccgcttgttctttgctatcagagttccgtggctggcactgagttgacactctgaagtatttaattcagttgattacagtttgcatttcttgactttcattgcattttacaggtggaagagattagaaactcatgatgttgtgatcgagtgtgccaaaatctctctggatcccacagaagcctcatatgaagatggctattctgtgtctcaccaaatctcagcccgctttcctcatcgttcagccgatgtcaccaccagcccttatgctgacacacagaatagctatggtaaaaagtgtctttggtacttatctgttttgcaactttgtctctggaaaacattatttgtctttgttgattttcttttctggagtaagacttagttcagttcctagggatttttcccaaaatatcttaaatttgcatgtccctccattttcttctaattaatttctccttcaagtttaatttagatgtccttggtctgctacctgattgtatgccaacagagttggtgacgtgtctcca

SEQ ID NO: 11044 - DNA, 535 bp, Homo sapiens
  MAP TO CHR6.1; EXPRESSED IN LUNG, SIGNAL =  38; EXPRESSED IN ADULT LIVER, SIGNAL = 5.6; EXPRESSED IN FETAL LIVER, SIGNAL = 5.9; EST_HUMAN HIT: AV730970.1, EVALUE 0.00e+00; NT HIT: M21533.1, EVALUE 0.00e+00; SWISSPROT HIT: P13747, EVALUE 1.00e-53
aggctggtgtcaaggttttgtcctcttctcctactataattgtcctcttccttctcaggatggtcacatgggtgctgctggagtgtcccatgagagatacaaagtgcctgaattttctgactcttcccctcagagcccccaaagacacacgtgactcaccaccccatctctgaccatgaggccaccctgaggtgctgggccctgggcttctaccctgcggagatcacactgacctggcagcaggatggggagggccatacccaggacacggagctcgtggagaccaggcctgcaggggatggaaccttccagaagtgggcagctgtggtggtgccttctggagaggagcagagatacacgtgccatgtgcagcatgaggggctacccgagcccgtcaccctgagatggagtaaggagggggatgggaggtcatgtctcttctcagggaaagcgggagcccttctggagcccttccgcagggtcagggctgaggcctgggggtcagggccccttacgttcccctcttttcccagag

SEQ ID NO: 11045 - DNA, 511 bp, Homo sapiens
  MAP TO CHR7.1; EXPRESSED IN FETAL LIVER, SIGNAL = 0.93; EXPRESSED IN LUNG, SIGNAL = 1.7; EXPRESSED IN HEART, SIGNAL = 1.1; EXPRESSED IN ADULT LIVER, SIGNAL = 0.69; EST_HUMAN HIT: AW629723.1, EVALUE 1.00e-124; SWISSPROT HIT: P17024, EVALUE 7.00e-16; NT HIT: gi15304226, EVALUE 4.00e-66
agcttcttctggggttttggtactcatattcaatgttctggtctttccacttttttcctaaaatacagacacagaaaaatagtcctgaagcagtataaaattgtgaaaaaattattagattctgtgcccatgatttactgcagccatgcctcatttattcatcaaggtatttcctgtctatgttcaaaatcactcaacagcattcatgagctagaaacactggtttgctaatgcactgacggaaggaatattgtcatccttacctatagaggtcaggttcctgaaagtttccagcatcacttccctgaagagattcttctgggaaatatccagcaatgtccactcttcctgggtgaagttcacagccacatcctcaaaggccactgggtcctgaaacatctcacatgtgtagaggaagatgggtgagagtgacagcactggaggcctagactctattcccaagaagttctcaggatgctgtggactccaaacatttattccctgcttcggt

SEQ ID NO: 11046 - DNA, 549 bp, Homo sapiens
  MAP TO CHR2.1; EXPRESSED IN FETAL LIVER, SIGNAL = 0.42; EXPRESSED IN LUNG, SIGNAL = 0.62; NT HIT: AF009474.1, EVALUE 1.00e-114; SWISSPROT HIT: Q06278, EVALUE 1.00e-27; EST_HUMAN HIT: AA948015.1, EVALUE 2.00e-91
ctagttggcatgcttcctttcaagggtctgggagagtcgggggtgttcctggggtgttccgtgtttttcgctatccatgacgcagtgagtgcagcacgacaggagagaggcctgcatggacccttgacccttaatagtccactgaccccggagaagattaggatggcctgtgaagacaagttcacaaaaatggtacgtttgcatggtagaaaaaaaatagtgatcataaaattctgaatttttggcctctgttcttgtggtaagttttcgtgaacgcactgctgtggcttttcttgccagaaaaggtgacgggaaacctgggggcatttgagcagatgtgcagaggggtccttgaacttgtacccctcgggttgcattttttcatcagcctgcccctgcttggctccattctatactatttgacaaaagaaagttcattcccattagttttatgttcctctcctgttttgctcccttcctaggacaccttggtcaggaatagaagttcaggaactatgccctgaacctaggacacccagtccaggaata

SEQ ID NO: 11047 - DNA, 565 bp, Homo sapiens
  MAP TO CHR7.1; EXPRESSED IN LUNG, SIGNAL = 1.3; EXPRESSED IN FETAL LIVER, SIGNAL = 1.2; EXPRESSED IN HEART, SIGNAL = 1.3; EXPRESSED IN ADULT LIVER, SIGNAL =   2; NT HIT: AF326737.1, EVALUE 8.40e+00; EST_HUMAN HIT: BG959507.1, EVALUE 0.00e+00; SWISSPROT HIT: P23467, EVALUE 7.00e+00
tttgaaagtccctccaaaccttaagattccaatatgtaaacattttcctgtggtgcacattaaatccttacaaaagactttctctcataaagacaatgaaaacaaatggttagcctaagggaggtgaaccaatcttcagaaaaccctaagagactcccctattttcttgcttgtttgctcgttagagaactaatctcctataaaacaggaatttattaatatttctttgtcctctgctatactggccgactttgggaatttgcacacagcacactttatcttgctaaatataatagtctgtctggcattcttcctttgtgagaaatccttattcacttgcataaattatgtgtaaagatctgaagcatactttcctttcttcaatacagactattcccagaagtagcctgacacatgccaaacatctgctcccacatgcagctcaatacatgatattgatatgtattatcactgggtgaattctaaatacaaagccaatttagcacactcctgaacaattccctccttctctcccggccaagctgcagggagctcaaggaaatca

SEQ ID NO: 11048 - DNA, 566 bp, Homo sapiens
  MAP TO CHR1.1; EXPRESSED IN LUNG, SIGNAL = 1.3; EXPRESSED IN HEART, SIGNAL = 1.8; EXPRESSED IN FETAL LIVER, SIGNAL = 1.7; EST_HUMAN HIT: BG822263.1, EVALUE 0.00e+00; SWISSPROT HIT: Q9UJU3, EVALUE 5.00e-79; NT HIT: gi15301654, EVALUE 0.00e+00
actgaaggctgaaccacacctctcatttctacagattccctccagtgtggactctctgatggtagatgagatgtgacctctgactgaagcccttacaacagacatcacatatgtaaggcctctctccagtgtggactctctggtgtgtgtgaaaatgtgaggcctgactgaagcccttcccacactgctgacacgtatagggtttctctcctgtgtggaccctctgatgggcactgagaccagcactccaactgaattctttcccacattcctcacatttaaatggtttctctccagtgtgaattatctgatggacttgaagatttgacctctggctgaaggccttaccacaagtgtcacatttatatggtttctctccggtgtggactctctgatgggcttgaaggtgtgaggcctgactgaatcgcttctgacatgcatcacacttgaatggtttttccccagtgtggacgctctgatgggcttgaagatttgaagcctgactgaaacccttaccacactcttcacatttgtagggtttctctccggtgtggactctctgatga

SEQ ID NO: 11049 - DNA, 560 bp, Homo sapiens
  MAP TO CHR11.1; EXPRESSED IN FETAL LIVER, SIGNAL = 0.55; EXPRESSED IN LUNG, SIGNAL = 0.86; EXPRESSED IN HEART, SIGNAL = 0.85; NT HIT: gi14767330, EVALUE 0.00e+00; SWISSPROT HIT: Q13702, EVALUE 1.00e-60; EST_HUMAN HIT: BE299731.1, EVALUE 0.00e+00
gtccaaggctcagagtccaggctgagcaccacctgcccaccgtcgctgtgtgcagttcgctgtggtccagatcgacacggcccgggagctggaggatgccgacttcctcctggagagctacctgaacctggcacgcagcaacgagaagctgtgcgagtttcacaagaccatctcctactgcaagacctgccttgggctgcctggtaccagggcaggtgcccagctcggaggccaggtcagcctgagcatgggcaatgccttcctgggcctcagcgtcttccagaaggccctggagagcttcgagaaggccctgcgctatgcccacaacaatgatgacgccatgctcgagtgccgcgtgtgctgcagcctgggcagcttctatgcccaggtcaaggtgggcctgcaccccagggggacagcagtggagggttttggggctcccctctcatgaggcacacaccctgtggcactacctcattcagccctccttttagggagggctgaggagagtgagaatcagagagcaaaaaggcttatccaggaaggtaacaacttggcca

SEQ ID NO: 11050 - DNA, 577 bp, Homo sapiens
  MAP TO CHR17.1; EXPRESSED IN FETAL LIVER, SIGNAL = 1.2; EXPRESSED IN ADULT LIVER, SIGNAL = 0.9; SWISSPROT HIT: P33523, EVALUE 1.40e+00; EST_HUMAN HIT: AJ230790.1, EVALUE 0.00e+00; NT HIT: AF274007.1, EVALUE 2.20e+00
ttaacgctggctgatttgtgccagctgactctgaaaagtctgaagaagaggctttgatttggtgtcactaagcgaggaaagggctgtctgagtcgctggtgtccctccaggtctgccctggccgtgaaggccccatcttcttcggagatgagcagcacggctttgtgttcagccacaccttcttcatcaaggacagcctggccaggggcttccagcgctggtacagcatcatcaccatcatgatggaccggatctacctcatcaactcctggcccttcctgctggggaaggtccggggaatcatcgatgagctccagggcaaggcgctcaaggtgaattcagagatgaggtgccggggcggcagggggccctgcactgcatgagccgctctgtgctgaggttgaggcctggagaccgcgtggcgtcttcccctctgcttacagccagtgcactgtgtgaattgtagtctcttggcttcagagctggaggtcgtgaggagcctcccaggccatcccgcctgctttgctggtctctcttgtgcccgttgtcctggttctcgctcagctctggtttcttt

SEQ ID NO: 11051 - DNA, 595 bp, Homo sapiens
  MAP TO CHR6.1; EXPRESSED IN FETAL LIVER, SIGNAL = 0.97; EXPRESSED IN HEART, SIGNAL = 0.83; EXPRESSED IN ADULT LIVER, SIGNAL = 1.5; EST_HUMAN HIT: BF855277.1, EVALUE 3.00e-68; NT HIT: gi14782101, EVALUE 2.00e-68
gctgttccttggagcacttccaggaagtgttaatagatatatcacaaaacttaaaaataaatacatttgggaaactctgcatattgccttttcccttttatttatttcccagctgagatcttgctttcaaatgtatcttccctcttaaagagttatgtgtgatatctgtaatgaggctctgataagtaatgcagtaaagaatttgtcttaggaagatactaatttcactctgtggaacagtgttccaagggtcagcaagttcagaacaggcagagatggtggcttttatgggcctcctttttgttttccaaataccctactcacctctctgcttctgttccagggctcaggaggaaagtacagggctgctgagcggcctccggatctggcacacacagctgctcccaggcgggctccagggcctcatcctcaaccccattttccgccagaacctccgcattgcccttctgggtgggtatgtcacttctctctcttcctaagctagggcaggggaactgctgcttattaaaccactaattaaactttgggagggggagctcctgggggcctccccagaaccttgtggtctccacgt

SEQ ID NO: 11052 - DNA, 510 bp, Homo sapiens
  MAP TO CHR17.1; EXPRESSED IN ADULT LIVER, SIGNAL = 0.88; EXPRESSED IN FETAL LIVER, SIGNAL = 0.99; EXPRESSED IN HEART, SIGNAL = 0.79; NT HIT: X05196.1, EVALUE 0.00e+00; SWISSPROT HIT: Q60925, EVALUE 2.10e-02; EST_HUMAN HIT: BF314278.1, EVALUE 0.00e+00
actgactcccgcgtaaacacgacagtgacaggcaccatgaggcggagctacaggaaggagcatcagggccgtcactgagtctccaccttgccgggggggctgtcccccgaccctcccgcacagcagtctcacctgaagggcattcaggccactgatctgggagtaaggcaacgaggcccggtaggtctccgtggtcttccaccagagcggtagccccagcacgatggccaccgcagcgaagaagagggcggcgcgcttgccccgggccacctctgagggcatggggaaccgactgaggcgctggaaacgggctagggtaccggccccatccccgacgcggagaagccccaaccaccggcctccaggggcccgcgttcattgggatctccgtgcgaagggacccggcccaagcctgaagggaatctcgtctgaagagacccccgagccccccgtccgcgggacctctcgcacaccacaatccccacccctgctattcctcccttgccatca

SEQ ID NO: 11053 - DNA, 544 bp, Homo sapiens
  MAP TO CHR7.1; EXPRESSED IN HEART, SIGNAL = 1.2; EXPRESSED IN FETAL LIVER, SIGNAL = 1.5; EXPRESSED IN LUNG, SIGNAL = 1.1; NT HIT: gi15300548, EVALUE 1.00e-115; SWISSPROT HIT: P47755, EVALUE 2.00e-37; EST_HUMAN HIT: AV713475.1, EVALUE 1.00e-115
ctcaaagcagaaaacccaccaaacccacttgaacagtgtttttagaggttgcattttttttcaccagtagctggaagttatattgggagaaaatctgatctgcactggatgagagtaatgtcattgtctgtatagtcaactcatttgaagtattaatagttgtaccatatggttaaaatatatgcttggagtaggattgttttatagttttaaggaagaagcttaaatgagtgtaattatgatgtatcaatattgaaatgctgtttttttattttttttctaaattcattccatcatcaaaggtattgataacagaacatggcgacttgggaaatggaaagtttttggatccaaagaacagaatctgttttaaatttgatcacttaaggaaggaggcaactgatccaagaccctgtgaagtagaaaatgcagttgaatcatggagaacttcagtagaaactgctctgagagcttacgtaaaagaacattacccgaatggagtctgcactgtaagtcatcagtagcagctttgtgtgtgtgtttt

SEQ ID NO: 11054 - DNA, 544 bp, Homo sapiens
  MAP TO CHRX.1; EXPRESSED IN ADULT LIVER, SIGNAL = 0.99; EXPRESSED IN HEART, SIGNAL = 0.79; EXPRESSED IN FETAL LIVER, SIGNAL = 0.94; EST_HUMAN HIT: AA804794.1, EVALUE 5.00e-48; NT HIT: gi14758860, EVALUE 4.00e-45
ttcctgtctggcaaaaatgggttaccaatgtcaccttaaaacatccattactcacttccatagttctgaggggaaaaaagttaaaaaaataaaattttaaaaatccatccacttctataattttgaataaaatacaagttataaacttcagggatctttgtgtcaaagcaaaaagatatataacaactattaacttaaaaaaatatatacatacttacactaatgtcactaagaacattagatgcctgttcatgctttagatttcctttaattacatgatatgacaactcatagagagcttgctggaaatctgttgaacataagagaaataatgtaaggatacagtctcttgaacatgaaaagtaaatctatatatttcctacgtctcagaattattataaacatcaataatgaaaaatataattctaatgcttttcctctagcaattttttcttttattttcacaaaaacacaaaattaaaaggttagaaaaatgttaaccatctctccactactataactacagcttgaacattcctttcca

SEQ ID NO: 11055 - DNA, 551 bp, Homo sapiens
  MAP TO CHRX.1; EXPRESSED IN FETAL LIVER, SIGNAL = 0.61; EXPRESSED IN HEART, SIGNAL = 0.71; SWISSPROT HIT: P20831, EVALUE 1.80e+00; NT HIT: AF046145.1, EVALUE 0.00e+00; EST_HUMAN HIT: AL554003.1, EVALUE 0.00e+00
acagcaaccacctgaccatctatttgcaagaatgcccaagaaaataaattttaaaaggccacttaaagccatttctattgaatatcacattagaaagaatacgctatttttaaaactttcttcttacctagtggaggttgaagtaagtctccttccttttcacatgtcccaacaggttgtatgtctggggaatcgacaagcctccaaaaatcatttctgttgtcactaccatccagtcgtaaccgtaacctggccccagtaattccaataaccgtagcaatacatactgaagtggcattgcgagggtcacgggcttccaatttcataccaactttgaaatcattcacaggtggaatctgagactatatatataaataaaatttggttaaaatgcatcaactataagagaagacacatggacagctatgtcaccagaatacctgaggaacattttaaataacagtcacagtggatgatgagtgaggtcagagctgtaagagtcaaggaaaagatcttcaaaattctctccttggcttgacatgcagcataaa

SEQ ID NO: 11056 - DNA, 591 bp, Homo sapiens
  MAP TO CHR18.1; EXPRESSED IN FETAL LIVER, SIGNAL = 6.1; EXPRESSED IN LUNG, SIGNAL =  13; EXPRESSED IN ADULT LIVER, SIGNAL = 8.5; NT HIT: gi13645149, EVALUE 0.00e+00; EST_HUMAN HIT: AI815888.1, EVALUE 0.00e+00; SWISSPROT HIT: P09896, EVALUE 2.00e-54
acctcttctttcttgccgtgccgatagcgctcacgcaagcatggttaacgtccctaaaacccaccagactttctgtaagaagtgtggcaagcaccaaccccacaaagtgacacagtacaagaagggcaaggattctctgtatgcccagggaaagtggcgttataacaggaagcagagtggctatggtgggcagactaagccgattttccagaaaaaggctaaaactacaaagaatactgtgctaaggcttgagtgcgttgagcccaactgcagatccaagagaatgctggctattaaaagatgcaagcattttgaactgggaggagataagaagagaaagggccaagtgatcccgttctaagtgtcatcttttattatgaagacaataaaaatctcaaggagagtcttactgagcaccagctctgtgccaatcgttactgtggggctttttgtgcaagtggaggtgttctacaaatggatttcaaaatatttccttgaagactgaaaagtgggcccaaatgggaaatgtagactggaaatgtgcttcctttggctttatgggtgggaggtacatttgagtccttggctggt

SEQ ID NO: 11057 - DNA, 537 bp, Homo sapiens
  MAP TO CHR19.1; EXPRESSED IN ADULT LIVER, SIGNAL = 1.3; EXPRESSED IN FETAL LIVER, SIGNAL = 1.3; EXPRESSED IN LUNG, SIGNAL = 1.2; EXPRESSED IN HEART, SIGNAL = 1.9; EST_HUMAN HIT: BF945362.1, EVALUE 3.00e-09; SWISSPROT HIT: P38250, EVALUE 1.70e-02; NT HIT: gi14785864, EVALUE 1.00e-105
accacaatcgctaggacacccatggcctccatcaccttctgcagggcggcaggagggctcaggcggggtccagccggcctccccagaccccaggctcctcccagctgcacctgggctccctctgggcctcagctcggatctcttggcttccccccacctgccactggccgatgctttccacgcgctggccgaagggccgctgcagcccggtgcacagcttgaaggcgtcgctgcggatctcaatgaggttgttgaccagggcgcacagcgccgccagggggaaggcggacgagaagagcacaacgtagccgaactgcacgaacatctcctggtagtcctggaacgtgtcctgcgagtgggcgggcctcagacctggaagcctcttccctgggacaatctttctcccattgagcccgcctccctcagattatcccatgtggacccagggcctgtccccatcctcagccagcccagaggcttcctgtatctggctaggccttcctctcctgcagcatcccaacatcaatggccctgtta

SEQ ID NO: 11058 - DNA, 539 bp, Homo sapiens
  MAP TO CHR20.1; EXPRESSED IN FETAL LIVER, SIGNAL =   1; EXPRESSED IN ADULT LIVER, SIGNAL = 0.67; EXPRESSED IN LUNG, SIGNAL = 0.59; NT HIT: gi14732668, EVALUE 0.00e+00; SWISSPROT HIT: P14635, EVALUE 1.00e-42; EST_HUMAN HIT: BE512849.1, EVALUE 0.00e+00
tcaaatgcccatggaaagtcctaatattaacatgcagcctgactagaaataaagaacaactttatcccttccccatgtagttaggtataatacaggtcagttgaattcaacgtgcttggtcagcagcagtgttccccctaatgtacccatacggagaggtttctcaagaaacctgtacctctccaatcttagatgctctccgaaggaagtgcaaaggtagaggccgacccagaccaaagtttaaagctcttagaatcttcatttccatctgtctgatttggtgcttagtataagtgttgtcagtcacaaaagcaaagtcaccaatttctggagggtacatttcttcatatttgcttgcaataaacatggcagtgacaccaaccagctgcagcatcttcttgggcacacaattattctgcaatgggaatttcaatagggtgaataaaatgtttgaaaaggagacacagagctatgatgaaggagaggtagaaagacattctcccatagcaaaatcttaatgacaccatatcccccaagaa

SEQ ID NO: 11059 - DNA, 559 bp, Homo sapiens
  MAP TO CHR2.1; EXPRESSED IN FETAL LIVER, SIGNAL = 0.93; EXPRESSED IN LUNG, SIGNAL = 0.59; SWISSPROT HIT: Q14896, EVALUE 1.00e-03; NT HIT: gi4507720, EVALUE 0.00e+00; EST_HUMAN HIT: T19674.1, EVALUE 1.00e-67
gttgccactttcccattttgaaataaatgaaaataatgttttgtcagttattttcatcagaattgaaaacatttattggttatgatcactatagatgcccccaaagtcattctgagaacaagcctagaagtgaaacgaggtgatgaaatagcacttgatgcaagtatttctggatcaccttacccaactattacatggataaaggatgaaaatgttattgtaccagaggaaattaagaagcgtgcagcacccttggttaggagaaggaagggtgaagttcaagaagaagaaccatttgtcctgcctctgacacagcgtttgagtattgacaacagcaaaaagggagaatctcagctacgcgtccgagattctctccgacctgaccatggtctgtatatgatcaaagttgaaaatgaccacggtattgcaaaagctccttgtactgtcagtgtgttaggtgagtcattaaaactacactttccaatggaaaaaggttttagtaaaacataaaaataaaaagtttgggagagagttaaaagaaatgggacatagcttcagc

SEQ ID NO: 11060 - DNA, 517 bp, Homo sapiens
  MAP TO CHR19.1; EXPRESSED IN HEART, SIGNAL = 4.2; EXPRESSED IN FETAL LIVER, SIGNAL =  58; EXPRESSED IN LUNG, SIGNAL =  31; SWISSPROT HIT: P02792, EVALUE 5.00e-11; NT HIT: X03743.1, EVALUE 0.00e+00; EST_HUMAN HIT: AV711530.1, EVALUE 0.00e+00
cttgtgagccctcttaaccgctggaaatagaggcgcacctcgtgcagtgcccacaacacgcggcagtccacaccgctgcgtggtcttagggacgtatagctgtaagagctaggacagggtgcggagagtgataaatacaagctgtcacatgtctttgtggcctgggcctctgacccccaacgactcttgggaaatgtaggtttagttctatgtgccgagtgtgtgtattctgagccatttctcccttctatatagaagccagctgaagatgagtggggtaaaaccccagacgccatgaaagctgccatggccctggagaaaaagctgaaccaggcccttttggatcttcatgccctgggttctgcccgcacggacccccatgtacgtacccgctgcatccatggctacccaaccatacccctcaagcctctgctccctttgggcaaatttccttcagagcctcatttcacacctgtcacattttaatctgcaactggctgctctctccccctctttt

SEQ ID NO: 11061 - DNA, 525 bp, Homo sapiens
  MAP TO CHR7.1; EXPRESSED IN HEART, SIGNAL = 0.87; EXPRESSED IN LUNG, SIGNAL = 1.3; EXPRESSED IN FETAL LIVER, SIGNAL = 0.95; NT HIT: gi14749180, EVALUE 0.00e+00; SWISSPROT HIT: P08243, EVALUE 2.00e-38; EST_HUMAN HIT: AI278536.1, EVALUE 0.00e+00
gccattttaagccattttgctcttatatgcttattcttacaggttgatgatgcaatgatggcaaatgcagcccagaaatttcccttcaatactcctaaaaccaaagaaggatattactaccgtcaagtctttgaacgccattacccaggccgggctgactggctgagccattactggatgcccaagtggatcaatgccactgacccttctgcccgcacgctgacccactacaagtcagctgtcaaagcttaggtggtctttatgctgtaatgtgaaagcaaatatttcttcgtgttggatggggactgtgggtagataggggaacaatgagagtcaactcaggctaacttgggtgtgaaaaaaataaaagtcctaaatctaaaccattgctgtagtcatttatgttcatgcagtctcttcataagaggtaactagaactgttttgctgtatcacagtaaagtggagggtaagctaggaaaagggaaaatgatcagatgtctgcaagaactcacagccctctcctg

SEQ ID NO: 11062 - DNA, 546 bp, Homo sapiens
  MAP TO CHR17.1; EXPRESSED IN FETAL LIVER, SIGNAL = 0.43; EXPRESSED IN HEART, SIGNAL = 0.73; NT HIT: AF291845.1, EVALUE 2.10e+00; SWISSPROT HIT: P38675, EVALUE 1.30e+00; EST_HUMAN HIT: BI013816.1, EVALUE 4.00e-89
ttgggagtgggaaagagatggcccttcaattccagactcctcattttgggtcttattctcctccctatagacacacggacagcagtcccaagaaaagcagtccctttgaggcggctgggaaaccactcacgtgctctgggaggacagagctgagcctggagcaaggggggaggggaaagaagataatgaatgggcacatccaccctgatctgtgatctgtagctaggattgagcaaacctcagctaaattcttcagaggcagaaagagagagacactcaaagaacaacataactagaggacagggctgggagacagaaggggcaaaacaggaaaacagctcatttctagtaagtgactttaaactcagctgaggtcctggttggttctctggcttgaggaaagagaggaagtaaggagttgcgggagcgcacacacacttctgtgcgtgtggaacggtctcacccagacgacccccctcccccaaaggaaatcgagatattcctctagggctagaggggacaactggttttgtgggacaggaggaa

SEQ ID NO: 11063 - DNA, 518 bp, Homo sapiens
  MAP TO CHR7.1; EXPRESSED IN HEART, SIGNAL = 0.52; EXPRESSED IN ADULT LIVER, SIGNAL = 0.53; EXPRESSED IN FETAL LIVER, SIGNAL = 0.55; EST_HUMAN HIT: AL571866.1, EVALUE 1.00e-114; NT HIT: D90334.1, EVALUE 0.00e+00; SWISSPROT HIT: P14210, EVALUE 1.00e-29
tgtattggtgggtgcttcagacacacttacttcagctatgactgtggtaccttatatgttaaaataattttgtgtatccattttgcataatatgctactcggacaaaaataccaggacgatttggaatggcacatccacgaccaggaacaatgacaccaagaaccattctcattttatgttgctcacaaacaagtgggccaccataatccccctaggagtaagacatacaaaaacaaagtattattaggaattaaaaaaaagctcattaacataatcatatatagatttgcatctcagagatatatacagaaaaagagaataactgcaactgaaatatgaagatataaaaattagtgtactagacatttgttgactttctactgaattagccaagactgagataagtacaaagtttaaagtgttctattatgtgtggtattctcctaaaaatgacttgccttttccaaaagagtcaaccatccttttaagtgtgctttgcctttgttggatgcagact

SEQ ID NO: 11064 - DNA, 563 bp, Homo sapiens
  MAP TO CHR4.1; EXPRESSED IN ADULT LIVER, SIGNAL = 0.78; EXPRESSED IN FETAL LIVER, SIGNAL =   1; SWISSPROT HIT: Q14103, EVALUE 1.00e-27; EST_HUMAN HIT: AA304460.1, EVALUE 2.00e-91; NT HIT: AF026126.1, EVALUE 0.00e+00
tcaaaatttagcagagcctggaacacaaattattcaggaaataattcctgaacctacctctatcttcataaaacgtattggggcaagaactattcttccttcctatactatcaaaatggggaaccacaaataggcaaactcattgtatcaaactatccatatgttaatattttatattattaactgatcagaacacgtaacacactaccttatctacactctccgattctttaaatagcacaaagccaaaaccccttgatcgccctgtgataggatctaacttcagagtgcagtctacaacttcaccaaatttggaaaagtagtccttcagatctttctttgtagtgtcccagctaaggcctcctataaacattttcctgtaaagacaaaaagcagtattaaaatgcttaaaaaaaattgccttaaatattatccacatcaataacacaccttttccaaactgcaccagtttactgggcagtatattaaaacatcattcttcctacataaccacacatcaggaacatcctattccaaaaagctggcttattactgctgctccc

SEQ ID NO: 11065 - DNA, 600 bp, Homo sapiens
  MAP TO CHRX.1; EXPRESSED IN FETAL LIVER, SIGNAL = 0.43; EXPRESSED IN HEART, SIGNAL = 0.48; SWISSPROT HIT: P22105, EVALUE 6.00e-13; EST_HUMAN HIT: BE088973.1, EVALUE 4.00e-52; NT HIT: gi13649009, EVALUE 1.00e-102
ggaaaaatgggcagagaatgttaccttcactacaaaagcacttttcttattaactaatgacaccttattccaatgtaacatctttcacttgagtaactcaaagcacttgaaagcagaaaacataaggaatactgaagtaataagaaaggaaataacacaagaaatacgtagaatgtcatcgacaaaagaagaaacctaccagttcacaaaactttaaaacttgtaaccaaccctccttctcctcccctactccaacctcaaattctactaaatgccttgtgattgactcactagactgctcttaacttcaactaatccaacttactttggttaaagtatggtggtacttaccaattgtgcagtggtcgccctcccatccagggctacactcacattttccatctttgcattggccatgctcagtacaatgagaatgacaggagcgttcctcacatgttggtcctacccagccttcttcacactggcaaattcctcttgagcagactccatggctaccacactccatggtacacagctctgtggggaattcaaagaagacatattaacatattttgttaaaaccagcatccattcttccaa

SEQ ID NO: 11066 - DNA, 519 bp, Homo sapiens
  MAP TO CHR3.1; EXPRESSED IN FETAL LIVER, SIGNAL = 1.7; EXPRESSED IN LUNG, SIGNAL = 3.7; EXPRESSED IN HEART, SIGNAL = 1.3; EST_HUMAN HIT: AU128338.1, EVALUE 0.00e+00; NT HIT: gi13514808, EVALUE 0.00e+00; SWISSPROT HIT: O15523, EVALUE 2.00e-11
tgataggtggctatggaggcttctacaatagtgatggatatggaggaaattataactcccagggggttgactggtggggcaactgaatctgctttgcagcaaagtcacccttacaaagaagctaatatggaaaccacatgtaacttagccagactatattgtgtagcttcaagaacttgcagtacattaccagctgtgattctcctgataattcaagggagctcaaagtcacaagaagaaaaatgaaaggaaaaaacagcagccctattcagaaattggtttgaagatgtaattgctctagtttggattaaactcttcccctcctgctttagtgccaccccaaactgcatttataattttgtgactgaggatcgtttgtttgttaacgtactgtgactttaactttagacaacttactactttgatgtcctgttggctcagtaatgctcacgataccaattgttttgacaaaataaatttactaaacttggcctaaaatcaaaccttggcacagaggta

SEQ ID NO: 11067 - DNA, 527 bp, Homo sapiens
  MAP TO CHR19.1; EXPRESSED IN FETAL LIVER, SIGNAL = 0.84; EXPRESSED IN LUNG, SIGNAL = 1.5; EXPRESSED IN HEART, SIGNAL = 1.1; EXPRESSED IN ADULT LIVER, SIGNAL = 0.59; NT HIT: gi14766677, EVALUE 4.00e-94; SWISSPROT HIT: P70459, EVALUE 4.30e-01; EST_HUMAN HIT: BG746619.1, EVALUE 6.00e-94
ctgagatccgctaccgaaagcagccgtggagcctggtgaagtcgctcattgagaagaactcgtggagcggcattgaagactatttccaccatctgggtagggacagaaggccggctggggcgtgggttgggggatggcctggccaggtatggacatccagagccccctctcttttacgcagagcgagagctcgccaaggctgagaagctgtctctggaggaaggcgggaaggatgcccggggcttgctatccggcctgcggcggcggaagcggcccctgagctggcgggctcacggggacgggccccagcacccagatcctgacccctgtgcccgggccggcattcacacctcgggtacgttccgttggggccgggttggggtaggcggaggatcgggggtcctggactgggccatctgactccaagctgctctcctgcaggctccctcagctcccgcttctccgaaccatctgtggaccagggccccggggcaggcatccccagtgccctggttctcatcagcatt

SEQ ID NO: 11068 - DNA, 505 bp, Homo sapiens
  MAP TO CHR7.1; EXPRESSED IN FETAL LIVER, SIGNAL = 0.47; NT HIT: gi14751802, EVALUE 6.00e-87; SWISSPROT HIT: Q14168, EVALUE 2.00e-19; EST_HUMAN HIT: AW946743.1, EVALUE 8.00e-87
ttactcgggaggcttcattgagcccaggagttcaagggtacagtgagctaagattgcaccactatactctaccctgggtgacagtgagccccggtcttaaaaacaataataaaataattattatttattgtactttaccaaatttgtaaaaacaaatctatgctaagtgggtacaagtcaagtgatatttaactatcaagacagctaagccattactagacagaattgcagagatttctttcatgtatataaaagttgactttgtattcccatttcctttttcatttagaatttgatcgtcatgaaatccagatatatgaggaggtagccaaaatgcctcccttccagagaaaaacattagtattgataggagctcaaggtgtaggccgaagaagcttgaaaaacaggttcatagtattgaatcccactagatttggaactacggtgccatgtaagttttctgtgttttccttgctatgcaattggcaggaaagagtatgggcat

SEQ ID NO: 11069 - DNA, 534 bp, Homo sapiens
  MAP TO CHR7.1; EXPRESSED IN ADULT LIVER, SIGNAL = 1.5; EXPRESSED IN FETAL LIVER, SIGNAL = 1.7; EXPRESSED IN LUNG, SIGNAL = 1.2; EXPRESSED IN HEART, SIGNAL = 1.8; SWISSPROT HIT: P82963, EVALUE 6.50e+00; NT HIT: AJ235271.1, EVALUE 5.10e-01
tgatacagcgtggtccaaacactgcatcctcaaactcaatgatttctgttatctgcgtcgcttctcccttgtgtcaacataaataagggaaagctgtctgaatctattaaaaatggtcagtctaaagctgcagttgaattctactgcacctactgcatttttgatcctgaaagaaatatttgtgaaatgccaataccatccaaatatggcccataataatagaatctcaagcatatattttttaaaaacaaatgcttatgtagaaattgcaaatgttttcagaccaactgtgccttcattaaatttatagagaacattatcattttattaataactgtgatatctatttgaaaaaccaacatgattctaaagacagatttatactttttatttcttactgcattcagttttaatgaaggttctggagcttctcagtaacagtgaaattgtatttaaatggggcctttagggtgttcaagttacagattaattaacttgatctggtaagggttttgggggcactgtagttcttga

SEQ ID NO: 11070 - DNA, 588 bp, Homo sapiens
  MAP TO CHR7.1; EXPRESSED IN FETAL LIVER, SIGNAL =   1; EXPRESSED IN HEART, SIGNAL = 1.1; NT HIT: gi15616630, EVALUE 2.20e+00; SWISSPROT HIT: P36291, EVALUE 9.80e+00; EST_HUMAN HIT: BG281064.1, EVALUE 5.30e-02
ccatcaaaacagaacaaagcagtgaagaaaaacactgatacccaaaggaaagcccaatattttaacggatcttctctctagaaatccattacattaaaaagacttgaatagaattgagctaaaagaatattactggatgagaactctttccccccactaacgtaacagcagcagcaaaatctcacatgagcattcatgtgtacctactcacttcaatagtcattagctcttttggagtaattgtctctggaagtggtgtttccttacataaatctatgtgtgctcaatcctggatcactgaagtcactggaatcagttatctgccattttatccagatgaccaacaggcagttgttaaatgatgcagttgaagtaaccatggactagtgccaaattcaaaccaatgacctagtggtgagcaatccagtgagccatgtatccaccaatgcatattttaaataaatcaaccagaatgtgggctgtcaaaattcccaaagataaatcaaagagacaggtgtcactgcttcaaactatagatataaaattggtacatgctattaactaatatctgaatcccaaggaagacca

SEQ ID NO: 11071 - DNA, 592 bp, Homo sapiens
  MAP TO CHR5.1; EXPRESSED IN FETAL LIVER, SIGNAL = 0.58; NT HIT: gi14748618, EVALUE 2.20e+00; SWISSPROT HIT: P23220, EVALUE 3.30e+00
aattccaggcatgagcaatcaatttaagattctattaggaaagcaaaacaatgagattatttcaattattgagttaacaatgagatttcaccatctacattctagccatgagtaagacatttatttgaatcagataaggagatataatgtcatttgaaggaggcccagtacatttaataacagagataaatgaaactgacaatgatctcatactttataaatctaaacaaaggaccaaggttagacacagggatcctagtggttgatgagttagttaaaatgccgctttttaccctatctattggagaccagacaggatttttgttttcttcctctaaacaaggaggttaagaaagaattaatccaattgcatttaaaacaaagtgcaggagcaagaaacaaccttgaaccttccttactcaaatagcagctctgttggtaatttaatcactaactgagttgtgtaacttgcctatgacaaatggtaaaatacctacaatgtggaaatctgccagagtaattccttcacaggaatgggagggaaaggctcagccagctcacactcataccctgcctccctatgctcagtgtc

SEQ ID NO: 11072 - DNA, 538 bp, Homo sapiens
  MAP TO CHR14.1; EXPRESSED IN FETAL LIVER, SIGNAL = 0.4; EXPRESSED IN LUNG, SIGNAL = 1.7; EST_HUMAN HIT: BG686267.1, EVALUE 0.00e+00; SWISSPROT HIT: P23083, EVALUE 1.00e-54; NT HIT: X62106.1, EVALUE 0.00e+00
ctttcatttctcagccccagcacagctgcctcctcccttgggtttctgacaccctcaggatgtgggttttcacactgtgtctctcgcacagtaatacacggccgtgtcgtcagatctcagcctgctcagctccatgtaggctgtgctgatggacgtgtccctggtcatggtgaccctgccctgaaacttctgtgcatagtttgtgccaccactgttagggttgatccatcccatccactcaagcccttgtccaggggcctgtcgcacccagtgcatatagtagccggtgaaggtgtatccagaagccttgcaggagaccttcactgaggccccaggcttcttcacctcagccccagactgcaccagctgcacctgggagtgggctcctgtggagagaacacagaagtggatgagatctccctggactggactcaatctctttctcatcactgggactagggagcctcttacctgtggctgctgccaccaagaagaggatcctccaggtccagtccatggtgaggaacggagctctcag

SEQ ID NO: 11073 - DNA, 568 bp, Homo sapiens
  MAP TO CHR16.1; EXPRESSED IN FETAL LIVER, SIGNAL = 7.1; EXPRESSED IN LUNG, SIGNAL = 9.8; NT HIT: gi14775945, EVALUE 0.00e+00; EST_HUMAN HIT: BG502201.1, EVALUE 0.00e+00; SWISSPROT HIT: P02248, EVALUE 2.00e-30
catgtaatactttgtgctgggcactatttttataccaattaaaagaatctaaattgattccaaaagaaacttatttatctaatttaggcagtttgaccaagcttttcatataataaagagttctatagattgagaagctatctgcagtggagccgccaccaaaatgcagattttcgtgaaaacccttacggggaagaccatcaccctcgaggttgaaccctcggatacgatagaaaatgtaaaggccaagatccagggtaaggaaggaattcctcctgatcagcagagactgatctttgctggcaagcagctggaagatggacgtactttgtctgactacaatattcaaaaggagtctactcttcatcttgtgttgagacttctggtggtgctaagaaaaggaagaagaagtcttacaccactcccaagaagaataagcacaagagaaagaaggttaagctggctgtcctgaaatactataaggtggatgagaatggcaaaattagtcgccttcgtcgagagtgcccttctgatgaatgtggtgctggggtgtttatggcaagccact

SEQ ID NO: 11074 - DNA, 568 bp, Homo sapiens
  MAP TO CHR7.1; EXPRESSED IN ADULT LIVER, SIGNAL = 0.59; EXPRESSED IN FETAL LIVER, SIGNAL = 0.34; EST_HUMAN HIT: AW590917.1, EVALUE 5.00e-70; SWISSPROT HIT: P39195, EVALUE 1.10e-02; NT HIT: M82856.1, EVALUE 4.00e-08
atggcttgagtccaggagtgcaaggccgaagtgagctgcaatggcttcactgccctccagcctgggcaacatagcgagactctgtctttaaaaaaggttatttttaagtggaataagttacggtagtacctgccatgtacattaagctttcagttggttagtttcttcctctcctatttagatgttttgaagttaagcctaatgaaagcaattcaaaaaccactaaaatacatttattttaatatttgcatcacatttaatttgtgtaattattgatctcttataccttggacattcattttttaaatgtagtattttaaatgtaatatttttgcactattaatcacttaaaatattgtgttatatcatgtctaggaaattcattataggcctttctaagagagaaggctttgtgataaaagccagctgcccagacatttccaaaccctcctcacccatcccccagcatgctacagaagcagcaggctggcagaggtccagatttcctaagtgatgggattgttcccccggccaggaatgagaggaatctgcctagattggagatggc

SEQ ID NO: 11075 - DNA, 551 bp, Homo sapiens
  MAP TO CHR19.1; EXPRESSED IN FETAL LIVER, SIGNAL = 0.63; EST_HUMAN HIT: BI763623.1, EVALUE 4.00e-18; SWISSPROT HIT: P51869, EVALUE 2.00e-11; NT HIT: gi14765713, EVALUE 3.00e-18
tcagaaagtggggaggacactgtccaaagaccacatactcttcctagtggaatgaaaaaatactaacatttactaagcacctactttataccaagccattgattcacattatctcatttaattctcacacaatgactatggggaaggaattatgatgcccatttttttgattaaaaaaaaaagtgaagctcagagagatggtcagtttcccggaagcacatggcccatccgtggcagagctcccataggccagagttgtctaatgcctgggagttccctttctcctgccaccatcttgctcctagagcagctggctccatcttcccaagaagggtcacactcactcttggcagttgctgttgtagctgaagacacatttctgaagactgtccagggtcatgaggctgatatgctcaaacatatcaagggagaccgctgagccctctgccagatgccgccatttagcctggaagagagatacatggtgactgtgcatggaaaccacagagagggagtcagcctaacaaggacccgactgcgttttcactaca

SEQ ID NO: 11076 - DNA, 543 bp, Homo sapiens
  MAP TO CHR22.1; EXPRESSED IN FETAL LIVER, SIGNAL = 0.35; EST_HUMAN HIT: BF309456.1, EVALUE 0.00e+00; SWISSPROT HIT: Q00587, EVALUE 2.00e-61; NT HIT: gi14778719, EVALUE 0.00e+00
ggtaggcatggactagcagctgtgagcagccagagctgatgcccggcccccaggggggcagaggcgccgccaccatgagcctgggcaagctctcgcctgtgggctgggtgtccagttcacagggaaagaggcggctgactgcagacatgatcagccacccactcggggacttccgccacaccatgcatgtgggccgtggcggggatgtcttcggggacacgtccttcctcagcaaccacggtggcagctccgggagcacccatcgctcaccccgcagcttcctggccaagaagctgcagctggtgcggagggtgggggcgcccccccggaggatggcatctccccctgcaccctccccggctccaccggccatctcccccatcatcaagaacgccatctccctgccccagctcaaccaggccgcctacgacagcctcgtggttggcaagctcagcttcgacagcagccccaccagctccacggacggccactccagctacggtgagggcctgggccatcttggcccacttttcagaggctgag

SEQ ID NO: 11077 - DNA, 500 bp, Homo sapiens
  MAP TO AF207550.1; EXPRESSED IN HELA, SIGNAL =   1; EXPRESSED IN PLACENTA, SIGNAL = 1.6; EXPRESSED IN LUNG, SIGNAL = 1.3; EXPRESSED IN HEART, SIGNAL = 1.9; NT HIT: gi14760095, EVALUE 0.00e+00; EST_HUMAN HIT: AU148318.1, EVALUE 1.80e-01; SWISSPROT HIT: P17971, EVALUE 1.40e-01
tcgagatgccttcacccccggtgccgggggcaggggttgctgggccaggggcagccagcccactgctgctgcccgagcaaaaggcagccacgtggccaggcctgccgccatcgtgccactccccaagcccagggagacttagtgagggtggcgtttaggagaatgtggctgtctccaggatggtgggggcttggagacaccttgagccacccaaacaaggaaactgggggtgtctagagaggccaagaggaaccaggaggaagaactaaagagatgggaaggagtctgggggacatttacagaacctaggaggggcctgggcaatgttctgagggactgagaagggccttggggacatggagaagagcagaaaaggggtgtggggatggggccaagaaggagctgagggagggtttagagagactgagatgattctaaaggagtcagcctgtgcctgagaggtgtctgggggcgtctagaggggccaagaaacacgtggg

SEQ ID NO: 11078 - DNA, 502 bp, Homo sapiens
  MAP TO AL031121.5; EXPRESSED IN HELA, SIGNAL = 1.7; EXPRESSED IN LUNG, SIGNAL = 1.2; EXPRESSED IN HEART, SIGNAL = 1.2; NT HIT: gi14165457, EVALUE 4.80e-01; SWISSPROT HIT: P40552, EVALUE 6.00e-06; EST_HUMAN HIT: BF942821.1, EVALUE 4.50e-02
gccagaatgctgccaatgcctcttactatctcctgcttaaccgggctgtctcctcgtggccagcaacgggcaaggagatagtctctctgtcaattcagctacttatctgacataaattggaattataacacatgtattaagtgcctttagtgcctcaaaacacaaaatcaggaaaccggaatataaattattttgcaaatattaaatcccatagtgatactacaaaagaatgacctttttgtggcttaaagcacaagtatcaggtgtgcatttgaaaataaaatctgcttcctcccatgagtttagtagggccacgtccactgcttcctctcgtgagtttagtagggccacgtccactgcttcccatgagtttagcagggccacatccactgcttcccatgagtttagtagggccacatccactgcttcccgtgagtttagtagggccacgtccgctgcttcccgtgagtttagtagggccacgtccgctgcttcccgtgag

SEQ ID NO: 11079 - DNA, 531 bp, Homo sapiens
  MAP TO AL121757.2; EXPRESSED IN HELA, SIGNAL = 3.8; EXPRESSED IN LUNG, SIGNAL = 2.1; EXPRESSED IN HEART, SIGNAL = 1.6; SWISSPROT HIT: Q64205, EVALUE 9.80e-01; NT HIT: AF237778.1, EVALUE 2.00e+00
atctcctgcgggctgagggcttcagagactattttccctattttgagaccttggtgacaggacatggtgcctttcaggcagggttgactctgggtggagaactagggccaagtgaaggaggtcagagagcagatccaaagttggagtagggtgggaagggcggcagaggatttctttctggagctggttcccacagaacggggagcagcaggggaattcccctcccccaccccaccaccacctcctccacctacagcgccctggtcatgcactcaacagatgtctgtctagcccccactatgcaccaggcactggactgggcagcaggaatttggtttacaggaagattaggactcagagagcataaatcactggcccagggtgactcagtctgtccatgtgaaagtgaacttggtgatttccaagtctatggcttggtcagtacagaaggagtggtgtcctgctttggagagaagaccccgcagcatcctggccctcctgcttcattgtccctggccaacaggtgccaca

SEQ ID NO: 11080 - DNA, 507 bp, Homo sapiens
  MAP TO AC000076.2; EXPRESSED IN LUNG, SIGNAL = 1.4; EXPRESSED IN PLACENTA, SIGNAL = 2.4; EXPRESSED IN HEART, SIGNAL = 1.2; NT HIT: gi13375851, EVALUE 0.00e+00; SWISSPROT HIT: Q9P2Y4, EVALUE 4.80e-02; EST_HUMAN HIT: BI252266.1, EVALUE 0.00e+00
tgggagcaggcctgggtgagacggcactcccagaagacgggcagggatgcagcagagagccagcagcagggaaagggcacagggcggaggtcaagctctgctggagttgggggagctggttctgctcagcgcagagtccaaaacaagcgcatcttgcccagctatggggtctgaagtcatctggggacaccactctgctctgactggggactatggggcgctcaagccacacaggccacttcatcatgaggggcagcattgttcccacctgggctgtgttcagaacccaggagaaagtggtggctctcctggggtctccggggcctccaccacctcctgtggggtacctaaggacacctcctggtctccctctgtctccaaaacctcctcctctgttttctggggttttggacctcctggatgagctgggtctggtctctgggcaggaggattagctgactccgacagtctagggacaggtgtgggggctgcctcctctggctggga

SEQ ID NO: 11081 - DNA, 562 bp, Homo sapiens
  MAP TO AC005736.1; EXPRESSED IN HEART, SIGNAL = 1.5; EST_HUMAN HIT: AI814444.1, EVALUE 0.00e+00; NT HIT: gi14778092, EVALUE 0.00e+00; SWISSPROT HIT: O60503, EVALUE 2.00e-42
gcagcatcggacggtctcccacagacgagattgccaacctggtgccttctgtccagtatgtggacaagacatctctgggttctgacagcagcacgcaggccaaggatgcccacctgtcccccaagagaccgtggaaggagcccgtcaaagccgaagaaaggggtcgatttggcaaagccatagagaaagacgactgtgacgaaacaggaatagaagaagccaacgaactcaccaagctcaacgtttcaaagagtgtgtgaggcggcgcccacccgctgcccgaggtgctctgtttgtcgaaacacagtaatatttgtatttggctgttgtgctttccaagcgccacagttgccctccccggacgtggtgttatgtggtcatttcagccctaacttctgtgtggatcacagttattcagggttcattttcatccattcttccctttcgctcccttccctggaaaccccgctgcctctgggtcatccgttcagcacgtggtggagaacaagtgccttcagggctggcctcggcctcgagtctcgggacagaggccgccagtgga

SEQ ID NO: 11082 - DNA, 527 bp, Homo sapiens
  MAP TO AL133476.4; EXPRESSED IN HELA, SIGNAL = 0.74; EXPRESSED IN LUNG, SIGNAL = 1.1; EXPRESSED IN HEART, SIGNAL = 2.2; NT HIT: gi15298905, EVALUE 0.00e+00; SWISSPROT HIT: Q05152, EVALUE 2.90e-02; EST_HUMAN HIT: BI041219.1, EVALUE 0.00e+00
gctcagggcgtgccaggtgggcccgaggtgggcaggccggctggtggtaccagctcatgcagagctcccaggtctacatcgatggctccattgagggttccaggttccctcgtggtagcagcaacagcagcagcgagaaaaagaaaggggcaggaggtgggggacctccccaggctccaccaccccgagagggagtagtggagggggctgaggcctgccctgcctctgaggaggccctgggccgggaaaggggctggcccttctggatggggagcccccctgactctgtgctggccgagctgaggcgcagtcgggagagggaagggcccgctgcctcgccagcagaaaatgaggaaggggcctcagagccttcacctggaggcatcaagtggggacacctctttggctcccgaaaagcccagcgggaggcccggcccacaaataggtgagagcctgcccatggtagggatggagggagtagggagcctgctgtaagccagggcacgggcagagcccatcctgggcag

SEQ ID NO: 11083 - DNA, 512 bp, Homo sapiens
  MAP TO AC005746.1; EXPRESSED IN LUNG, SIGNAL = 2.3; EXPRESSED IN HEART, SIGNAL = 1.6; EXPRESSED IN HELA, SIGNAL = 0.54; NT HIT: gi14772624, EVALUE 7.00e-65; SWISSPROT HIT: Q13207, EVALUE 3.00e-16; EST_HUMAN HIT: BG827190.1, EVALUE 1.00e-64
ttcggtcaagcgagtggggctggcgctgtctggagccgggctgcggcctagcggcgcccccgcacgctcctcgctcaaccgctcaggctccgggtcgctgtccgcggcgcacgacttctcctcagctgcggggagagggcgcgcggattacaggggcctgggcggaggccgacgagcaggatcagggacactcgggaagggctgctctcggggaggccgagtcggaggagctgctggagtcgggcaaagggcagctgcaggtcacctaatccaagaccccagatttacagtggaaggaacccagccctggagaggaaaccctacagctatagaattacacggcgcccaaggggccaggctcggagtccggccggatcttctggctaccggggaccgccctcgtaggggagtcccgggacggaaaccccatcccagacactcgccgacgtttccttcctggcctttcaggttagcgggtggctcagcaaaagaccagcccagcgacctgagga

SEQ ID NO: 11084 - DNA, 500 bp, Homo sapiens
  MAP TO AC000093.3; EXPRESSED IN HELA, SIGNAL = 0.55; EXPRESSED IN HEART, SIGNAL = 2.2; EST_HUMAN HIT: BF061628.1, EVALUE 0.00e+00; SWISSPROT HIT: P13224, EVALUE 1.40e-01; NT HIT: L20860.1, EVALUE 0.00e+00
gctggtgctgctgctgtgccgcctgcggaggctgcgggcccgggcccgcgctcgcgccgcagcccggctgtcgctgaccgacccgctggtggccgagcgagccggaaccgacgagtcctgaggagagaaccggtgcgtcctgaggagagaaccggcgctgggcaacacgggcctgcaaactcgacaggaccctgcccgaggggccctcgcgccaacctggaccggtccccgcctcctccgctgcccaatctctcagacccaccccacctgcaggcccagaccacgtgggacagaactcctgcccaccctaccccgagggaggcgaacccgcacttccaggcttgggaggaccatggggcacaatgcggtccagaccctgctgcgtctcccttccaaactctggtgctgaataaacccttctgatctggtcttctctgcacgactgacctggaaattcccctcgccaaactcaggaaaaggccccaggaggcggttcaagg

SEQ ID NO: 11085 - DNA, 573 bp, Homo sapiens
  MAP TO AC010320.7; EXPRESSED IN HELA, SIGNAL = 1.6; EXPRESSED IN HEART, SIGNAL = 1.9; EXPRESSED IN LUNG, SIGNAL = 1.4; EST_HUMAN HIT: AW862303.1, EVALUE 2.00e-87; SWISSPROT HIT: P13682, EVALUE 9.00e-21; NT HIT: gi14754622, EVALUE 9.00e-40
gaaaaatgccaaacagtgacgctggaaagacatgaatgttatgatgttgaaaatttttacttaagggaaatccagaaaaatctacaggaccttgagtttcaatggaaagatggtgaaataaattataaagaagtgccaatgacctataaaaacaatcttaatggtaaaagaggtcaacatagtcaagaggatgtagaaaacaaatgtattgaaaatcagcttacattaagctttcagtcacgtctgactgaactgcagaaatttcaaactgaagggaaaatttatgagtgtaaccaatctgagaagacagttaataacagttccctagtttcaccacttcaaagaattcttcctagtgtccaaaccaacatttctaaaaaatatgagaatgagtttttgcagctgtcattacccacccaacttgagaaaacacacattagggaaaaaccttatatatgtaaagggtgtggcaaagcctttagagtgtcttcaagtcttattaaccatcagatggtacatactacagagaaaccttacaaatgcaatgaatgtggcaaagcctttcatcggggc

SEQ ID NO: 11086 - DNA, 506 bp, Homo sapiens
  MAP TO AL049869.5; EXPRESSED IN PLACENTA, SIGNAL = 1.4; EXPRESSED IN LUNG, SIGNAL = 2.3; EXPRESSED IN HEART, SIGNAL = 1.4; NT HIT: L26336.1, EVALUE 0.00e+00; SWISSPROT HIT: P34933, EVALUE 4.00e-15; EST_HUMAN HIT: BG772858.1, EVALUE 0.00e+00
tgcgattgccctggtcgttggcgatgatctccaccttgccatgttggaagaccccgacgcacgaataggtggtgcccaggtcgatgccgatagccgggccacgggcagacatcctgactgaaaggcgagcgacgttaggacgggaaaaccagggagatgaactccgcggagtcaactaacggccacctcgaaccaagcaccacgggcactaccagcaactcagctccccgcgcccagttcccggttcttatagccgcctctgggaactcccagacccaatccgctcccgggaccgccctcacaaactcttccagctccaccacaggcttgcctaggtcggagtgactggcccgtgacccaacagatttcaagttggacgaggggcgggactccggcccccgccaggagacagaggggcggccgttatgtaaatgaggttcctccctgactctcggccgccaggccgtggtgcctcgcgcgcctcctgctgctggctggcgttaggc

SEQ ID NO: 11087 - DNA, 556 bp, Homo sapiens
  MAP TO Z79999.2; EXPRESSED IN HEART, SIGNAL = 1.7; EXPRESSED IN HELA, SIGNAL = 0.5; SWISSPROT HIT: Q9Z2V6, EVALUE 6.90e+00; NT HIT: AF245699.1, EVALUE 8.30e+00
tccaggctaccccaggcaggaatttgctctcttgttggatggatgtcctgagtttcttaagtcaagctgatttaatgtgctttccattgaaactctaaatggatattttgttgcatttttgggaagagggatgcatatagaacaacaacaacaacaacaaatcaaagaaatagaagtttcatgtaaacccaaaaataatatattaggaatatacacctgggttctagttcagcctcggtccctgactctggccttgggctgctgcggggaatgatgataatagcagctagcattgattcagtgcctgcagtgtactgggcactgttctcagctctttatctgtatcattgtgctgacttttcataacagccccatcaactgcataaatgggccccatccccgtactcagagtcctgcctatcactgatctcagcttccccgcaggctggatgatctccaggttgcttccagcgctgcccatcctgggttggtgcacaggagagagccctcccagttcctccctacctacttgggcagccttggggtgtcctgtggg

SEQ ID NO: 11088 - DNA, 515 bp, Homo sapiens
  MAP TO AL121790.2; EXPRESSED IN LUNG, SIGNAL = 3.4; EXPRESSED IN HEART, SIGNAL = 3.3; EXPRESSED IN PLACENTA, SIGNAL = 2.2; EST_HUMAN HIT: AW449787.1, EVALUE 0.00e+00; SWISSPROT HIT: P23512, EVALUE 4.00e-20; NT HIT: AF303743.1, EVALUE 0.00e+00
cgtaggggcccaggccattcatggaggccgcctgctgcgcacccatggcgcccatgccgctcgggctcagcgccgtacccatggccgtcacgccggccgcagtcatgctgttcatggcgcccgccgagccccccggcatgccggctactgcgccgggactcaggccggcccctaggcccgggttggcataggacatgttgaaggacgccggggtcatgttgccgctcgtagtcatggtgttcatggtcatgtaggtgttcatggagttcatggagcccaggcctgagttcatgttgctgaccgggacggaggagtaggcctggagtggagacagcgagtgaagaagccccggagggcggggttagtggtgggcactggagggcggccgtccgggacctaacccgggggcaagtgcagagcactttgcagaacacgggacgcccccacccggggcaaatggctaagcgccctccccagaccgagcaaagatgtcttgcacggcagggggaaaatcc

SEQ ID NO: 11089 - DNA, 517 bp, Homo sapiens
  MAP TO Z84479.1; EXPRESSED IN HELA, SIGNAL = 0.2; EXPRESSED IN HEART, SIGNAL = 1.7; NT HIT: gi15805042, EVALUE 7.70e+00; EST_HUMAN HIT: BI014807.1, EVALUE 1.00e-14; SWISSPROT HIT: Q92793, EVALUE 1.40e-01
catgggtgaggtgcgcgatggcgtggccgtgctggacgccggcagctacgtccgcgccgccagcgagaagcgcgtcaagaagatcttggagctgctggagaagcaggcctgcgagctgctcaaccgcttccaggactagcccccgcaggggcctgcgccaccccgtcctggtgaataaacgcactccctgtgcctcagacctcctggcttgctgctgctggtcgggcgaccctcatccttccaggtgccccatgcccagccagtttccgctggggccttgacacccactggggcttgggctttggtacaaggtcaccagggagtgcctgtccgcccctgcatccccaaccagctccatcctgcctcagcagctgtctcggccccaatcccactgcccgagctccagcagcaaggatcaggacgtcccaagcccttgaccccacaggagaccccgtctcccacccaacctcacaaggtgctcctaggaggaggtggggcagacaccagcaagccggca

SEQ ID NO: 11090 - DNA, 524 bp, Homo sapiens
  MAP TO AC022149.3; EXPRESSED IN HELA, SIGNAL = 4.6; EXPRESSED IN HEART, SIGNAL = 1.5; NT HIT: gi4504766, EVALUE 0.00e+00; EST_HUMAN HIT: BG770882.1, EVALUE 0.00e+00; SWISSPROT HIT: P05556, EVALUE 4.00e-88
tcacccgtgtcccatttggcattcattttctccttttcaaatttagcaaactcccttctgtcatgaattatcattaaaagcttccatatcagcagtaatgcaaggccaataagaacaattccagcaaccacaccagctacaattggaatgatgtctggaccagtgggacactctggattctccacaacatgaaccatgacctcgttgttcccattcactgaatacgtaaaatagaaccaacagtcgtcaacatccttctccttacaatgggacacaggatcaggttggaccggctggggtaatttgtcccgactttctaccttggtaatgttaaaataggaacattcctgtgtgcatgtgtctttcttttctcctttattgaaggctctgcactgaacacattctttatgctcagcacagacaccaaggcaggtctgacacatctcacacgtttgcccttgaaacttcggatctgtacacttacagacaccacactcgcagatgccccggccattgcagatctg

SEQ ID NO: 11091 - DNA, 511 bp, Homo sapiens
  MAP TO AC008891.4; EXPRESSED IN HEART, SIGNAL =  19; SWISSPROT HIT: P23327, EVALUE 9.00e-63; NT HIT: gi11424080, EVALUE 0.00e+00; EST_HUMAN HIT: AW162689.1, EVALUE 1.80e-01
tgggacctgtggcctgggagtaggtgcccatattccttggagacatcttcatcctccttttcacggtctgggtggctccagaaatgatgcccattctctgtggaaacatccttgttctcatctggatggtctctagggctgtggaggtggtggcgaagctctgctgatgcctcctcggagagcccggcgactccagtgctgttgttccggtttctgaagcctagcccatcccctctgagctgctgggtcatggccggggggaggagcaggctggccaccccagcccagaggacagaagcgtgcagccatggcctatggtggcccatggggacggacaggcagcactggctccagctgcctctgcggcaatgtggacaaacgttggggtctttgtccctttggggttggtctctttttttctctgtgtctctcctttgtcctttcggtctctgtccaccttcctctggtccttgctgcctggctctggacacccctctgaggctgtctccgg

SEQ ID NO: 11092 - DNA, 500 bp, Homo sapiens
  MAP TO AC013648.3; EXPRESSED IN PLACENTA, SIGNAL = 2.5; EXPRESSED IN HEART, SIGNAL = 1.3; EXPRESSED IN LUNG, SIGNAL = 0.98; EXPRESSED IN HELA, SIGNAL = 6.5; EST_HUMAN HIT: AW996549.1, EVALUE 0.00e+00; SWISSPROT HIT: gi1351901, EVALUE 8.00e-16
gcggcctcggtggatgtgtctgcgccgaaggtggaggccgacgggagcctcccctccatgcagggggacctcaaggccactgacctcagcattcagcccccttccgctgacctggaggtccaggctggccaagtggacgtgaaactcccagagggccctgtgccggagggagccggcctcaaagggcacctgcccaaggtgcagatgcccagtttcaagatgcctgaaatggacctcaagggcccccagctagatgtcaagggccccaagctggacctgaaaggccccaaggcggaagtgacagcccccgatgtggagatgtctctgtccagcatggaggtggacgtccaggccccgagagcaaagctggatggtgcgcggctggagggggacctgtccctggccgacaagggtgtgacagccaaagatagcaagttcaaaatgcccaagttcaagatgccatcattcagggtgtcggccccaggcgagtccatcgaggc

SEQ ID NO: 11093 - DNA, 511 bp, Homo sapiens
  MAP TO AC003663.1; EXPRESSED IN HEART, SIGNAL = 1.3; EXPRESSED IN LUNG, SIGNAL = 1.4; EXPRESSED IN HELA, SIGNAL = 1.1; NT HIT: gi16164407, EVALUE 0.00e+00; EST_HUMAN HIT: BF361132.1, EVALUE 0.00e+00; SWISSPROT HIT: P10105, EVALUE 2.10e+00
cccagggctgcctctctccctcagacctgctctcggagcccgcggccctccagggcacacagtctgactggtcgtccgcccaggttccagagctagatgccatcaaggagtccctgctgtacttgtacatggacaggacctggatgccctatatattttctctgcccttggaggctctgaaatgtttccgcatcaggaacaatgagaagatgctgagtgacagccacggcgtggagaccatccgggacatcctgccagacaccagccttgggggcccatccttcttcaaaatcatcacggccaaggctgtcctgaagctgcaggccggaaacgccgaggaagccgccctgtggagggatctggtccgcaaagtcctggcatcctacttggagacagccgaggaggcggtgaccctgggcgggagcctggatgaaaactgtcaggaggtgctgaaatttgccacccgggagaatggcttcctgctgcagtacctggtggccatccccatgga

SEQ ID NO: 11094 - DNA, 535 bp, Homo sapiens
  MAP TO AP000030.1; EXPRESSED IN HELA, SIGNAL = 0.57; EXPRESSED IN HEART, SIGNAL = 3.2; NT HIT: gi14766840, EVALUE 1.30e-01; EST_HUMAN HIT: BI226939.1, EVALUE 1.00e-108; SWISSPROT HIT: P98174, EVALUE 1.10e-01
tcctgcgaggctccgtcagcgcggcccggggagatcgcccgcaggcagcggaggcgcggcgggccgggggacgaccagggagcccctaacaaagcagctttgggagggccggaggcctctgcctccctcggcgataggtccgcgaagctgcctgtcatctcgcataggtggaggtggccaatggcgtgcacagacggagctctagttggcgcgcgcgcgcggctcggcatcggtgggattggtcggaggtaaaggattttcctgccacctaaggcggagaggaagggggatcgaaacgggggaggcgaagagtcaaaaaatgttgtgcctgggacaagtggtctggcgcgggaggcgtgtgcctggctctagggggagacaggaacttttttacgagagaaaaaaatcctaacgcaatcccttcccgtggatgctagaggatgttagaccctgagcagcctccaggtagggcatggtggccttcaccagagtccaggactcccagggttcacttaccgtgcccagcaagcgaact

SEQ ID NO: 11095 - DNA, 513 bp, Homo sapiens
  MAP TO AC008655.3; EXPRESSED IN HELA, SIGNAL = 0.98; EXPRESSED IN HEART, SIGNAL = 1.3; NT HIT: Z11585.1, EVALUE 0.00e+00; SWISSPROT HIT: Q14003, EVALUE 1.00e-18; EST_HUMAN HIT: AW898499.1, EVALUE 1.00e-20
tcttaggcctggcggctcccgtcccacagcagaacccgtggaccctgctggggggccctgaaataggacacagggaacaggagggtggggggaggtggtctaggaaacagcaaggggccagaaatgtttccaaggaaagaagctgcccatctgctgcgtctgctggggccagctcttctccaactgcctctgttcctttctctccctttttgctagctttagaggggagaatgggattctggaagtgatggagccacagggctgagacacctggattttgcccagagtttgggcccaggaggctggggaagggggcactggaagggtcttctggatgttatggccaacctgatgcctaggtcacctctccccctctctctccctccctgccctgcagtatgtggccttcgcctccctcttcttcatcctcatctccatcaccaccttctgcctggaaacccatgagggcttcatccatattagcaacaagacggtgacccaggcctccccgat

SEQ ID NO: 11096 - DNA, 512 bp, Homo sapiens
  MAP TO AC005849.1; EXPRESSED IN HELA, SIGNAL = 0.75; EXPRESSED IN HEART, SIGNAL = 1.4; EST_HUMAN HIT: BF932257.1, EVALUE 1.00e-127; NT HIT: gi14766264, EVALUE 0.00e+00
tgctggaggaggccctggtgcctggcgagtatgaggagccctactgcagtgtggcctgtgccggacccagccccaccgaggcccgtctccgcctgctgggcctctgccagggcctgggcatcgatgggcccagctaccctgttgcccacttcctgtctcacttcaaatagcactggggtcagggggcagggaagcagtgctgggtggaggcactgtggtgccctctgctccctggagctcttcctgcttctctccccatcaccatgccccagccccagcctggcccgctgcaatgcctaggtctgttccagagcagcagggcaatttagacaccaaggcatcctggactcaagggcctcttgccctcccgaaggccccagtccagcctacagcttccccagcattctagccttggagaaatgacaatggccacacacacacacacacacacacacacacacctctgacgccagctccccaggtgggagtgggcccaaacccagcccctcctg

SEQ ID NO: 11097 - DNA, 500 bp, Homo sapiens
  MAP TO AC010731.1; EXPRESSED IN HELA, SIGNAL = 0.99; EXPRESSED IN HEART, SIGNAL = 1.3; SWISSPROT HIT: P54596, EVALUE 6.00e+00; NT HIT: gi14735662, EVALUE 0.00e+00; EST_HUMAN HIT: BG618866.1, EVALUE 0.00e+00
tgccctttgtttgaaagccaacatctgatttaaaaatgaatgcatcctgaaagagatatctaatgatatcagttgattgcattctgttatgaaagttatttaaaatgttccagtttgaatgaactatttttggtttgcaaagtcccaaacaacatagcctcatagttctgcttgttgaaactaatgtactgaattgtctaaggttccagaaaaaggagcccgctttgttattcattttgctctccactgaaacacttccaaatggcttcaaagttgtcaacatgaaaccaacgtcacttctactagtgaaaaagaacacgtgctgtcgttttcctgtaggggaagaagtaatgaaaagaataaaaattaaaacaaaacttttacttaaagaaatgaaatgcatttaacagaagagaaaatggggaacctatggagccattaaacatttacataaaacagtaaaagttttttttaccaatgtgggctccctccaatctacc

SEQ ID NO: 11098 - DNA, 507 bp, Homo sapiens
  MAP TO AC013625.3; EXPRESSED IN HELA, SIGNAL = 2.3; EXPRESSED IN HEART, SIGNAL = 1.2; EST_HUMAN HIT: BI905943.1, EVALUE 1.00e-124; SWISSPROT HIT: P15121, EVALUE 7.00e-63; NT HIT: M84454.1, EVALUE 0.00e+00
atgtatggttccgggcgggggtctggggagtgcggcagccatggcgagccaccttgtcctcaccgacagcaccaagatgcccatcctggggcttggcacctggaagtcccctcctggctaggtaaccaaggctgtgaaggtggcgatcgatgtcaggtactgccatattgactgtgcctacatgcaccagaataagaacgaggtaggggtggccattcagaagcagcttagggagcaggtggtgaagcatgaggctcatcagcaaggggtggtgcacataccataagaaggtcctggtgaaaggagcctgccagaagacgctcagcaacctgaagctggactacctggacctccaccttattcactggctgaccgactttaagcctggaaaggaatttttcccattggatgagtcagacaacgtggatcccagtgacaccaacattgtgaacacatgggcagccatggaagagctggtggatgaagggctggtgaaagctattggca

SEQ ID NO: 11099 - DNA, 596 bp, Homo sapiens
  MAP TO AL139228.1; EXPRESSED IN HEART, SIGNAL = 1.2; EXPRESSED IN HELA, SIGNAL = 0.62; EST_HUMAN HIT: AL599900.1, EVALUE 0.00e+00; SWISSPROT HIT: Q9NP90, EVALUE 1.00e-31; NT HIT: gi11421991, EVALUE 0.00e+00
cctgccctgcagtgtcccagatctggagggttacaaagcgtccatctacctccagatctcgatttaagaactctacccctatggtgtgaaaagcctgggagtcaaatttgttggttacgtaacggttcataagcgaacttttcccaactccaccatcacccaagagaatgacctttaagagcagggatttcccactcatttttgcagcaccagaagggaaggagtttgtaaccaagagaacctgaaaataaaaggaaaagtaggagggaaaacagttaaacctgaaactgaaatcaacttcatagcaaatttctctgaattataaggccttctcattcaacttctctgatttatgctcattaattgatgtagtacagcagaagaaataacactaattttgcataaggggaaaaataggtcttgtttttctgaggtcttttgttgtgccaggaaaatggctgagtgccatgggtaaatggactagcagatggtcctgtaatttggttcagttctgacccaattctaggagaggaagcctagaacaggaatgccactcaaatgtgtgacaactttagcttccggtttggacagttcca

SEQ ID NO: 11100 - DNA, 503 bp, Homo sapiens
  MAP TO Z92544.1; EXPRESSED IN HELA, SIGNAL = 0.79; EXPRESSED IN HEART, SIGNAL = 1.2; EST_HUMAN HIT: BE266527.1, EVALUE 2.00e-96; SWISSPROT HIT: O14186, EVALUE 2.00e-05; NT HIT: gi16165043, EVALUE 2.00e-96
agccccgtcacttcccctgcatcgacctcctgcctgcaggccagtcggagagcgtgcgggacgtgcagttcagtatccgggactacttcaccttcgcctccacctttgagaacggcaatgtgcagctctgggacatccggcgtcccgaccggtgcgagaggatgttcacagcccacaacggacccgtcttctgctgcgactggcaccccgaggacaggtgtggcatgggggtgcaggggcagtaggttgacagtaagctctcactgcctcagatccatgagacagtccggagcagcagagcgggggggtcccctctctgcaggaaaggccactgagggtttgggtggaccttcttcccacaggggctggttggccactggagggcgcgacaagatggtgaaggtctgggacatgaccacgcaccgtgccaaggagatgcactgtgtgcagaccatcgcctcggtggcccgtgtgaagtggcggccagagtgccgccaccacct

SEQ ID NO: 11101 - DNA, 540 bp, Homo sapiens
  MAP TO AL031715.2; EXPRESSED IN HEART, SIGNAL = 1.8; NT HIT: gi14776523, EVALUE 0.00e+00; SWISSPROT HIT: O95180, EVALUE 2.00e-35; EST_HUMAN HIT: BI439093.1, EVALUE 0.00e+00
accctgcagccaagggggagcgctggggccaggcctcctgccgggctgagcacctgaccgtccccagctttgcctttgagccgctggacctcggggtccccagtggagaccctttcttggacggtagccacagtgtgaccccagaatccagagcttcctcttcaggggccatagtgcccctggaacccccagaatcagagcctcccatgcccgtcggtgaccccccagagaagaggcgggggctgtacctcacagtcccccagtgtcctctggagaaaccagggtccccctcagccacccctgccccagggggtggtgcagatgaccccgtgtagctcggggcttggtgccgcccacggctttggccctggggtctgggggccccgctggggtggatgcccatgcaaaaccctgcatggaccctgacttgggtcctgtcgtgagcagaaaggcccggggaggatgacgggccaagccctggttctctgcccagcgaaacatgagtagctgccgggccccacgagcctccgtccgttctgg

SEQ ID NO: 11102 - DNA, 513 bp, Homo sapiens
  MAP TO AL035681.13; EXPRESSED IN HEART, SIGNAL =  22; EST_HUMAN HIT: BE083046.1, EVALUE 0.00e+00; NT HIT: AB026898.1, EVALUE 0.00e+00; SWISSPROT HIT: P10267, EVALUE 4.00e-03
tatccgggagggaggtgggggggtcagccccccgcccggccagcctccccgtccgggaggtgaggggcgcctctgcccggccgcccctactgggaagtgaggagcccctctgcccggccaccaccccgtctgggaggtgtgcccagcagctcattgagaacaggccaggatgacaatggcggctttgtggaatagaaaggggggaaaggtggggaaaagattgagaaatcggatggttgccgtgtctgtgtagaaagaggtagacatgggagacttttcattttgttctgtactaagaaaaattcttctgccttgggatcctgttgatctgtgaccttacccccaaccctgtgctctctgaaacatgtgctgtatccactcagggctgaatggattaagggcagtgcaagatgtgctttgttaaacagatgcttgaaggcagcatgctccttaagagtcatcaccactccctaatctcaagtacccagggacacaaacactgcggaaggccgc

SEQ ID NO: 11103 - DNA, 576 bp, Homo sapiens
  MAP TO AL121594.3; EXPRESSED IN HELA, SIGNAL = 0.63; EXPRESSED IN PLACENTA, SIGNAL = 0.53; SWISSPROT HIT: O88822, EVALUE 8.40e-01; NT HIT: gi15616630, EVALUE 5.50e-01
aggagacagctgtgttaagcgttcactataacacattctttaaactttgttatatttttgaaaaatttttaaataaaatgttgataaaaagggaaacaggaaggctgtagcaacatggaatagtagaaaaaggaatgaatgacagggttagaagacctgttacagacaccctcctctttaaaaatgttgtatgctttgtagtttctttattgatggtgaataggacaacaatgtatttgtagtaatattgaagaaggtaattttttgtgattacaacagttcttaactttccttgtctgatttctgccttcaggaagtaagcctttaataaagcagaattgtaaggtctttttattttacattcaagaactgaattttgagagtaaagagttaaagcgtgtaggcaataacatttcagcatgtatctcatgtactgatataaatatatgcatgtgcccagagggctccggcatcgccaggtaaatggcctgacagtatacatttgtttggcatattaggctgttagccttaaagaaaaaaaaataaaagatacacagccaccttgggaagaaaaat

SEQ ID NO: 11104 - DNA, 524 bp, Homo sapiens
  MAP TO AC000040.4; EXPRESSED IN LUNG, SIGNAL = 0.39; EXPRESSED IN HELA, SIGNAL = 0.43; EST_HUMAN HIT: AW166849.1, EVALUE 7.30e-01; NT HIT: L77078.1, EVALUE 5.00e-01; SWISSPROT HIT: Q12263, EVALUE 3.30e-01; EST_HUMAN HIT: AW166849.1, EVALUE 7.30e-01
gtgggtctgtgcttctagccagctctcactctaaacctaaatactgctcggagctctgctcactgaaataattttccttccccactgtgctccagggtcaccctgagtcgggcaattgtgctccagctgtccactttcaggggtagcaggagatcatgcagctccatcagtatgttcagctgaagttggttcttcctcagttggtgtaagagacaccttgagaagccgtaggcatggctcctggggtcgggggaggcagtgcctggtgagttggagacacctgctcaccttacatgtaccttacagacatgcctggacgccgtctctcatgcaccatttccatttgacaatacattgctgctgcccacacccaatctaccctgggtctcaggggatgaaaaggggtcttctgggtagacagatgtggtgagggaactccaagttggagcacagtcacgttgcaaaaggacaggggtgtgggggcctggtttcgcgtaagacctggctgcaaagttggacaatga

SEQ ID NO: 11105 - DNA, 568 bp, Homo sapiens
  MAP TO AB014084.1; EXPRESSED IN HELA, SIGNAL = 0.98; SWISSPROT HIT: O43516, EVALUE 5.50e-02; EST_HUMAN HIT: BI460225.1, EVALUE 8.00e-35; NT HIT: AB031010.1, EVALUE 4.00e-85; EST_HUMAN HIT: BI460225.1, EVALUE 8.00e-35
cagagcctgacttgagacccggaggctccttgagtgcagagccctgtccaggtgctgggagcagagggagagcctcggaggtcctggttggtgagaaaggggagcggggtccggtcctctgtcctcgtccctgtggccacacgggggcgccgccgcgctgctctcgcattctgattgagcgctctcaggcactgggtgagggctgagtggggcagaaggggcggagcctgaggtcatccacgcgggaatggaggttcctcctaagcagccctggaatccacagactcaggctagatttgcttgtcttgcaacgtgaggcaattgtggagcagcaagatctggctctagaattctcaccgcgaatgcggttcttatagaatccaacctgaatgagaggccagggcctgagctgactgccctgggcacacctggctttgatggggttgccaaaatgtaactggcacttacagaaatttcaatgattgtcgaaaagtccatataattatatacaatttcatttctgatgtctctggctgtgcctttgaaagggcataaagagccatggaaa

SEQ ID NO: 11106 - DNA, 526 bp, Homo sapiens
  MAP TO AC005547.1; EXPRESSED IN HEART, SIGNAL = 1.1; EXPRESSED IN LUNG, SIGNAL = 0.49; EXPRESSED IN HELA, SIGNAL = 0.82; EXPRESSED IN PLACENTA, SIGNAL = 1.1; EST_HUMAN HIT: AA992796.1, EVALUE 7.40e-01; SWISSPROT HIT: Q02360, EVALUE 3.70e+00; EST_HUMAN HIT: AA992796.1, EVALUE 7.40e-01; NT HIT: gi14746548, EVALUE 2.00e+00
gggatcccagatatgcactgtgtgaccgaccctagtaaaagccctccctccaaggaccctggacactcacacaaaccatttaattcctctccttcctcccaagccaagcatcacagcattcaacaggtaggactagcaagctcaggccaaggtcacagtgtcctgagcagggtgggctaggggaccttttgcacgatgttttcctttgggctgtgggaccacgtcatctggccagagagcaaaggctttcctagtagaagttaccctctgagcttgtgacatcgagggccctgcctctgggcagatcccccaagcatccgtgcagggctgcctgagaagctggaccagctctgacacagccagtgggatgttccacagcctcccagggcagaagggcttgtgggagattcgcttaaacgtgaccgatttcctctcgctggttatctgtggaaggtggaagaattaccccctggtcattagggaatcaccctttcacagcagcagagcgtgtgtgacctggatgatt

SEQ ID NO: 11107 - DNA, 592 bp, Homo sapiens
  MAP TO AC003956.1; EXPRESSED IN HELA, SIGNAL = 0.45; EST_HUMAN HIT: BG248085.1, EVALUE 8.00e-72; NT HIT: gi14766383, EVALUE 5.00e-72; EST_HUMAN HIT: BG248085.1, EVALUE 8.00e-72; SWISSPROT HIT: P40149, EVALUE 6.00e-04
tggagacaggggtgaagaactctatgaccccagctgaggccatcccagacgagctgcagggccagccaatccccatacaggtgagcaagcccagcctggatcagcacagctgccttcctgcctaacccaagtgcagactcatgaatgagcccagccaaaaccacagctaccacctaccttataggtggatcttgagaaatcagaaatgcatttttagccattgagtttggggatggttgttacagggcagtagctatctgatacacctattatgcgtctggttgggttcaaagcgctttatgtgaaaatgtgtatcaagtacaataggtgcccactagaccttcctcctccttcgtgtgaagctgggtaacagggtgagggggttcctgggggaaggagggaaaggaagaggctcaggcccacctgctaggacaatgacatccgccttcttcagggccgcactgcggttctcccggatgtggagggggtggttgcggcctaacagcccccgtgccatccctccaaggaagcagggaacacccaaggtctccacggcagccctgggagtccaggcagagcagaggtcagtgtg

SEQ ID NO: 11108 - DNA, 593 bp, Homo sapiens
  MAP TO AC008831.7; EXPRESSED IN HELA, SIGNAL = 0.6; SWISSPROT HIT: Q04993, EVALUE 9.90e+00; EST_HUMAN HIT: BF963308.1, EVALUE 3.30e+00
tggttgctggattcctaagctgtactcacattgcttgccttttgtctgcaactcctgaggtggtgacaccttgtcaacagtgtcacaacccaatatgggccaaccttttaccttgtcaccttgcagactgatgtttttgaaaatacgtcgacaacacagatgcttgcagggcagttgtggaggtgaggatgtgtgtagacgtgtggttatagtcatgctgaggaaaaagcttatttatacagataaataaaatgaaacatcacagaaaaataaacatgtaattttttttggacttgaataacttgacaatttcaaaggaataaaagcagcagagctatgaagacaaccaagcaagttactaagcatttaaacaaaaattgaatatttgtacaaagtagcatgaaaaataagcgtggaatagagttagggtttatatggggcttctaagtagagggctgagaaacaaatttctcttgatactcttcttggtttcaaagggtgcccagattatcccagaggcctccatgtgctccgtctctgtccctctcactgctgtttttgacctgggcttccctcctctgttgcctgtgtga

SEQ ID NO: 11109 - DNA, 562 bp, Homo sapiens
  MAP TO AC004205.1; EXPRESSED IN HELA, SIGNAL = 0.61; EXPRESSED IN PLACENTA, SIGNAL = 0.51; NT HIT: AJ000742.1, EVALUE 7.00e-19; SWISSPROT HIT: P03332, EVALUE 1.00e-15; EST_HUMAN HIT: BG431393.1, EVALUE 1.00e-08
tgggctgagttaatgtccatcataggcattcttttttcaggggaagaaaggagcatgacgcacagggctgctatgaccatttgggagtgtgagcatcctcccggtcaaaacgtccctgcagccaaacagaaatttcctactcaagattcccagtgggataataacaacatagctcataggaggaatatgagagacctgcaagaaatgataataaaaggaattagagaatcgttaccctgcacccagaatatgaccaaagcttttaatatacagcaaggaaaagatgaggggcttatggaattttttaacaggcttaaggaacaaatgaggaaatatgctggtttagatggaggagacccacttggacaaggaatgttaaagcttcacttcgtcacaaatagctggccagatgttaccaagaaattacaaaagacagaaaattggaaggactgtcccacagaggaactcttaagggaggcccaaaaggtgtatgtacgaagagatgaagaaaagtaaaaggacaaggcaaagattatgctgttcttacagcagggaactcccc

SEQ ID NO: 11110 - DNA, 506 bp, Homo sapiens
  MAP TO AC009145.4; EXPRESSED IN PLACENTA, SIGNAL = 1.1; EXPRESSED IN HEART, SIGNAL =   1; EXPRESSED IN HELA, SIGNAL = 0.94; EXPRESSED IN LUNG, SIGNAL = 1.1; SWISSPROT HIT: P46593, EVALUE 3.60e+00; NT HIT: D90914.1, EVALUE 1.90e+00; EST_HUMAN HIT: AW366786.1, EVALUE 7.10e-01
tgaatatcgagaccaagggctgacatgttaaaaagggaagtagggagacacaaaaggcatttccggtcgttttgatgacaacatggcgctggtatatcatggggcagggccaggaatcctggataccctacagtgtgcagtacaaagacgtgtacagccccagatgctaatggtgcctgagtcaggtgacacagggcatgacctgaagatgaaaacgaaccaccagaaagaacaagagtccctcccttgccaccgagaagtaatgctctaatgtctccagctggctggtgtgagcaggaatcatcctttgggtagggtggggatgttggaaggttcccctgcggtacccttcagcacacgataacctgtctgctgcagaatccacaaactgccccgggattgtcagaaggttcactaatgagctgtggtgaggctggataaagctttcaaacgaatgatgtttgtaaaattatattaataacaatgctctatcccagtggggaaca

SEQ ID NO: 11111 - DNA, 553 bp, Homo sapiens
  MAP TO AC018514.6; EXPRESSED IN HELA, SIGNAL = 0.91; EXPRESSED IN PLACENTA, SIGNAL = 0.7; EST_HUMAN HIT: BG194282.1, EVALUE 2.00e-01; SWISSPROT HIT: Q10350, EVALUE 5.20e+00; NT HIT: U86521.1, EVALUE 9.00e-03
aaatggggctgtgtgaaaactaatctaatcttaatatttaagcagtatttttctccagggcaagccagtcatcggaagaacaacacagccaccctaaagagaaagatgagctgcgaggcactgatggcatgcccactgatgtgtatcaagtgcacgtcccgctgcggaaagagacacgtgttcctccaaaaggcactctgctttttaactctcaggtctcagacaacaaaccaaagacactcctgagacttcagcaggagtgccccagacagtgcatgagcatgtacgatccattccttattttctctatgtcatttccctgcagagtcaaaacaatgcattcatttaaagtccatttattccaaattttgttctatgaaaaaagggtatatgtgtgggagggggtgggagctggaggcgggggtgtagttttgtgtttaaggaaaaaaaaaaaaaaaacacaaaaactcaaaagtactggtaagtccaagaacattaaatgactatataactggaggaatcaggttttaacccctcttctcctgactcgctg

SEQ ID NO: 11112 - DNA, 502 bp, Homo sapiens
  MAP TO AC008620.5; EXPRESSED IN HELA, SIGNAL =  22; EXPRESSED IN HEART, SIGNAL =   9; SWISSPROT HIT: O42248, EVALUE 5.00e-29; EST_HUMAN HIT: BE296876.1, EVALUE 0.00e+00; NT HIT: gi14732184, EVALUE 2.00e-93
tctgttgtttccatccctccttaagcgtccttagttgttgttaacccactcatgaccttgacacttagtgaattatccagtgtgttaaacgggctgcgggttcctcactgatttttcttctgttttacctcctttagataagaccatcatcatgtggaaactgaccagggatgagaccaactatggaattccacagcgtgctctgcggggtcactcccactttgttagtgatgtggttatctcctcagatggccagtttgccctctcaggctcctgggatggaaccctgcgcctctgggatctcacaacgcaagtagctgctcacttagctctggggccttgggaagaatctgggcagaagtgaggtggatgcaattggctggtttcccaggggagatccagtccatttgggaactggaaagcagagcacacctacagaagatgtttggcctccctcactttaaataagttactcagcattgctgaggagtgtggctgaaca

SEQ ID NO: 11113 - DNA, 508 bp, Homo sapiens
  MAP TO AC002237.1; EXPRESSED IN HELA, SIGNAL = 0.44; NT HIT: AF240786.1, EVALUE 3.10e-02; SWISSPROT HIT: Q07889, EVALUE 2.80e-02
tttgttcccaggctatttcgttccccaactggtccaagggtctgaggataagaaacactcccaggctcccctccccagcctaagacaacttcatcatgccaggcgggccctggtgccagctgccccttgctgtcacctccacagtcctttgagctccatgggtctggccacatgtgtccccatatctcatagcattcctctcaaggtgccgggcctgcacatggcagacccggagccccatgcttctctcctggaggaggaaagtgccagtagggtgacctctgctcatccgtcagagttcaatttagacatcacctcttccaggaggccctccccagctgaaccaggtacctctcctccaagctcccacagaaccccatccttccccattcccaagggaaactgggaggtaacctggcatctttgtttgaccagtgactggtatatgcagttggtactccaaaaattctggctcacggaaggagcatgcttctcaacaaatccagcc

SEQ ID NO: 11114 - DNA, 596 bp, Homo sapiens
  MAP TO AC000373.1; EXPRESSED IN HELA, SIGNAL = 0.8; EXPRESSED IN PLACENTA, SIGNAL = 0.42; NT HIT: AE000058.2, EVALUE 1.40e-01; SWISSPROT HIT: P27241, EVALUE 3.40e+00
gggctttaggttgaagagggaaacttccatggcaaagacgcaaaaacaagagggaaaggaaatgaaggacacaaagacacagttcactgttttggctgagacccagaactccttagctcagaactactaacagcaaaggtggcagagataccatggtagagtctgcaaaatgcaaacttactagaactggcaatcttcaacacctaggcaggatggcagcaactaaagctcacaaaacactagaaaagtatgttatcagagttgaggagatgctatgtggacatgggggaggagaagaacaatttcaaggtctgaatgagacaaaggccagagcatcagatctgcagttacttgtcaactcactgaatggtgagggatgcaaaggcacaggtgtgcacactagcaaggttcagaagtgaattttgacaattgtgtgttagagatgataacagttcaactgagatgacaaggaaattgcttatagatgtccacatgaacttaccacatcagaaaacaatacatatgtatacctttgaaaccacattttccaaccctactcactttcccaggcttgatgccacctctgtgttttcctc

SEQ ID NO: 11115 - DNA, 564 bp, Homo sapiens
  MAP TO AF107259.1; EXPRESSED IN LUNG, SIGNAL = 0.74; EXPRESSED IN HELA, SIGNAL = 0.61; EXPRESSED IN PLACENTA, SIGNAL = 1.2; EST_HUMAN HIT: AI573286.1, EVALUE 3.00e-03; SWISSPROT HIT: P39086, EVALUE 4.00e-15; NT HIT: gi13646496, EVALUE 3.00e-55
gacatgggcctaatgacacccaactctagggttatatatgtaataatataatcacacttgctatgtaaatgaagcacaatagaaacactagttagtactgctattactaagacatgaaatttaagaatctagcacatcaacttctatctgcagaaaaaagaaagagagataaaaaactggatgtaaaagaacatgcttagagaatcacttcatcattcacctacttgtctttgcaatttagtaaaaatgcctgaacaatgttcatttgttattttatttatttattgttaaggaggttaccttttcagttccttcctctttgagactaataatgtccagatcaaaatccttcctcaagccattggttttattaaaggtgatatgcccagtcaagccatcccaccgggcctgtggacaagaagaaatgtggctgttattgttaaacatttatcataattcctgagaccatcaaaattataatacctcaaattcatcacagtatccaattatttgttttcatcatgctgttataaaccattgcattggttcagcgacaagatagca

SEQ ID NO: 11116 - DNA, 564 bp, Homo sapiens
  MAP TO AC004511.1; EXPRESSED IN PLACENTA, SIGNAL = 0.88; EXPRESSED IN HELA, SIGNAL = 1.3; NT HIT: AF240786.1, EVALUE 8.40e+00; SWISSPROT HIT: Q43776, EVALUE 8.10e-01; EST_HUMAN HIT: BF027934.1, EVALUE 5.10e-02
gacactctggcaaggagaccctccacttccctgccccagcctcctcttccctgccccagacctcctccaggcatgaggtctcctgaccttgagctcctgacaaagcctgaggtacctgacagtgggggtggggagcatagacgtatgtccttttcacctcagtgccacgttcagcacagcatggtacatgtgagactggcctgccactagcttgttgtgtgacctgggacaggtacttcagtctctcagccacagagtccgcaaaggtggggtgaactccagccccagaggccagatcagaactcaggtccacggtttttatccagcgaaaggacctcagggcatctggctcaactctggggaaactgaggtcagaagggttgacagggagcttctggtacctcttctggtaaacagggaagttggaaggggcactggtgggaagctggctgtactaaaccaagtgactgccctcatcaccctgacagccttaacccttggtcaaagtcaccaaacagctacccatgaagagactgcagtgacggccacctgagttttccatgt

SEQ ID NO: 11117 - DNA, 538 bp, Homo sapiens
  MAP TO AC068323.6; EXPRESSED IN HELA, SIGNAL = 0.64; NT HIT: gi14729797, EVALUE 1.00e-116; EST_HUMAN HIT: BF362628.1, EVALUE 0.00e+00
ttgcccatgatatggaactgttataattcactcatatttttatttaacttttaaacatagaaattattttgggcctttctgagttctctgtgttggtgattttgttactttggtttttattccattgatgtttttataggtgaaaccaaaaagacagtcattttaaccatcttggatgactctgaaccagaggatgacgaaagtatcatagttagtttggtgtacactgaaggtggaagtagaattttgccaagctccgacactgttagagtgaacattttggccaatgacaatgtggcaggaattgttagctttcagacagcttccagatctgtcataggtcatgaaggtgggttcctttttttgttaagcatattcattttcttttctatggatgttgtcttttgtctagttctttaaaacttgatagtttttccctttcattattttgttgaactgtgtgtgtgttaatctgcatagaacttctttgggagaaggctttataatgaactgtttagccagatttaggagccttgca

SEQ ID NO: 11118 - DNA, 569 bp, Homo sapiens
  MAP TO AF131216.1; EXPRESSED IN HELA, SIGNAL =  24; NT HIT: gi4506608, EVALUE 1.00e-124; EST_HUMAN HIT: AW001401.1, EVALUE 1.00e-126; SWISSPROT HIT: P14118, EVALUE 3.00e-46
gcaagggtacagccaatttccaaatgccagagaaggtcacttggatgaggagaatgaggattctgcactggttgtttggaagataccatgaatctaagaagactgatcaccacatgtatcacagcctgtacctgaaggtgcaggggaatatgttcacaaacaagcagattctcatggaacacaaccacaagctgaaggcagacaaggcccacaagaagttcctggctgaccaggctgaagcccgcagctctaagaccaataaagcaagcaagctccgtgaagagcgcctccaggccaaaaagaaggagatcatcaagactttgtccaaggaagaagagacaagaaaaaaagcttcccctttttctgcacatcctggccactgtgattacatagatctgccattaaaataaaacaagccttaaaaaaaaaagaaaaaaaaacaggactgccctgagaaaactaggacgtatggtcacgccaagtggagtcccttcatggggatatggcgttgagatgcacaggcctgccaggagctgtttcataaggattcagtgcttttcttgcacagg

SEQ ID NO: 11119 - DNA, 515 bp, Homo sapiens
  MAP TO AC008685.6; EXPRESSED IN PLACENTA, SIGNAL = 0.6; EXPRESSED IN HELA, SIGNAL = 0.51; EXPRESSED IN LUNG, SIGNAL = 0.56; EST_HUMAN HIT: BF676265.1, EVALUE 7.20e-01
tcttcattctcaccccaagcaggatatggtacacaaaaccaatggtgtgctgaggagtgtgggtgggaagaagggcagaattctgccatgctgagctctcaggtgtagcctacctagtggttctggtgcaggtgcagctggaagagacacacactccacgagcccctcaaggaagatggccacgcccactttctctccctctctctccagagttatcacctgctttggagctggcggcatccttgggacagaaaactgtcctgccctgcctgctggttacattggatgacaccatctgctacaaagccaactccaaaaatagaacccagaactcgtctggaaaatgtgggctagacagcacaccgtcaaataatgcaattataggaacaaagagatctggtccaattgttggaacttaaaccccatcctgctctccattccaacactagctctgctatttatcatcacaaagccattatcttgattaccccacaggtgccttgttggtcacaaga

SEQ ID NO: 11120 - DNA, 533 bp, Homo sapiens
  MAP TO AC000028.1; EXPRESSED IN PLACENTA, SIGNAL = 0.6; EXPRESSED IN HELA, SIGNAL = 0.56; EST_HUMAN HIT: AL560115.1, EVALUE 1.00e-79; NT HIT: AF413077.1, EVALUE 9.00e-80; SWISSPROT HIT: Q99490, EVALUE 1.00e-10
atggtggcactaggaaatggcagtgtcagaacacaaggtaggtgacatttcaggagaggcaaggagatggctactatagctgtcctttcctccctggagatccccttttctctgctcagaccttgggaagttattgtttggtttcatgactcccttatttggagaccaggctccctccagaagggtactataatccaagtggccatttccacaccttaccaagttctcacccatgttgggcaatatcccagtagcctcctcagggcctcccttgaaagcagtgctttcctaacccctccttaccttgtgtccccaccagtgccaaggccaggcctcctcgtccctccccgcgaagggaactcagctgcccatggagacggctcacagcctggaaactgttctcatcctccaggctgaagacgaagatcacagcatctgcccagcctgagaacttgcggggagtgagggagcaaatggaaagtcagacaggtctactcctctggacccaatccagatgaagacctgggaaacca

SEQ ID NO: 11121 - DNA, 532 bp, Homo sapiens
  MAP TO AC004496.1; EXPRESSED IN HEART, SIGNAL = 2.4; EXPRESSED IN LUNG, SIGNAL = 0.4; EXPRESSED IN HELA, SIGNAL = 1.9; SWISSPROT HIT: P27884, EVALUE 1.10e-01; EST_HUMAN HIT: BI826182.1, EVALUE 0.00e+00; NT HIT: X82205.1, EVALUE 5.10e-01
tcatctgtctgcctgtcctgggattgaccctcgctcctctgaagaccagcctgaaagccttaaaactggtcagatgatggatgagtctgatgaggactttaaagaactctgcgctagctttttccaaagggtgaaaaaacatggaatcaaggaagtgtcaggagaaaggaagacacaaaaggctgcctcaaacggcactcagataagaagcaaattgaaaaggaccaaacaaactgctaccaagaccaaaacccttcaaggccctgcagagaagaaacctccgtctggcagccaggcccctaggactaaaaagcaaagggtaaccaaatggcaagcaagtgaaccggcccactctgtgaatggggaggggggtgtgcttgcctctgctccagatccacctgtgctccgggaaacagcacaaaacacccagacgggtaaccagcaagaaccatcgccaaacctttccagagagaaaaccagaggtaatttgtactcttttaaaccaggggctggaaaacttcctggaaagggc

SEQ ID NO: 11122 - DNA, 584 bp, Homo sapiens
  MAP TO AC006290.1; EXPRESSED IN HELA, SIGNAL = 0.49; EXPRESSED IN HEART, SIGNAL = 1.2; EST_HUMAN HIT: BF829514.1, EVALUE 1.00e-12; SWISSPROT HIT: P49053, EVALUE 6.50e-01; NT HIT: gi13937343, EVALUE 2.00e-22
tatcatctcctcccctcctggatattatgaaaaatgtaacagagggtgtacaccttctgcgatattggaggtaatatcatccctttgtctaataagaagaagtaatatcatcttcttctcccactgaatattattaacaacatcacagggggtttacacaccctgtgatattgggagtaatatcatcctctcgccccctagatattaccaacaatatcacaagcagacgtacacctcctatgaacaatatcacaggaaggagtacaccccctacgatattgagagtgatattatccccttttttttctagatattttgaagaatatcacaggggagtatacaccccctgcgatattggaagtaatatcattccctacccttccggatattacaaacaatatcacagggggtgtacaccccttgtgatattgggagtaatatcatcccctaccaccctggatattacaaacaatatcacagagggtatacaccttctgtgatattgggagtaatatcatcgtcttccttccctggatattacaaacaacatcacaggggggtttacaacccctgagatattggga

SEQ ID NO: 11123 - DNA, 542 bp, Homo sapiens
  MAP TO AC005953.1; EXPRESSED IN HELA, SIGNAL = 0.63; EXPRESSED IN PLACENTA, SIGNAL = 0.9; EXPRESSED IN HEART, SIGNAL = 1.3; EXPRESSED IN LUNG, SIGNAL = 0.73; SWISSPROT HIT: O19011, EVALUE 3.00e+00; EST_HUMAN HIT: BF035327.1, EVALUE 3.00e-99; NT HIT: AF181897.1, EVALUE 1.00e-75
tcaagtgaaaggaagagtcacgtgtctctcattttaaattaaaagctagaaatgattaagtttagtgaagaaagcaggtcgaaagctgagataggctgaaagcgaggcatctggtgctagttagtcaagttgtgaatgcaaacaaaagttcttgaaagaaattagaagtgctactccagtgaacacacgaatgataagaaagctaaacagactcattgctgataaggagaaagtttgagtggtctggatagaagatcaaaccaaccacaacattcccttaagccacggcctaatccagagcagcccctaactctcttcaattctatgaagcctcagcgaggtgagaaagctgcagaagaaaagttggaagctagcagagtttggttcatggggcttaaggaaagaagccaactccataacataaaagtgcaaggtgaagcagcacatgctgatggagaagctgcagcaagttatccagaagatctaagactattgagaaggtagacacactaaacaatagattgtgtttctttgtttgggtt

SEQ ID NO: 11124 - DNA, 522 bp, Homo sapiens
  MAP TO AC000396.1; EXPRESSED IN HELA, SIGNAL = 0.47; EXPRESSED IN PLACENTA, SIGNAL = 0.49; SWISSPROT HIT: P25823, EVALUE 2.10e+00; EST_HUMAN HIT: AI625419.1, EVALUE 1.80e-01; NT HIT: AF145485.1, EVALUE 1.30e-01
acattattgaatccagcccgccctgagcctgtttaccctgcttcctctgttccttcccgtgggaaacgtgggaaccgcagtgcaggctccgcccgcactctcctcctgctcccagtgcctccagacaggctctggtgcttctgtgaggccccgcccctcctgtttctaggggcctaagtgtaataagcctccgtcccacagtcattcctatggctgtgtctcccccaccagcctaaagcaaaccctgggaacccttcaaacacctgcagtgcagagtcctttctccatgttatgtggggccgctctggtgtcccagcccctgtgaatgaggtcacgacgccagctcagccagtcctggaagccatcgtgagagctgctctaccgctcaagccaatgtgtgaaatacggcattttggatacatcatcaccagtgagccaagctggacgctagttaaagcggtgaggacaggttttattcagcagcttctcagagccagggacagactggttccatgccacttt

SEQ ID NO: 11125 - DNA, 502 bp, Homo sapiens
  MAP TO AC016620.5; EXPRESSED IN HELA, SIGNAL = 0.43; EXPRESSED IN LUNG, SIGNAL = 0.85; EXPRESSED IN PLACENTA, SIGNAL = 0.75; SWISSPROT HIT: Q9UKP5, EVALUE 7.00e-29; NT HIT: gi14727533, EVALUE 1.00e-90
gagtcgttgtgagattggaggaaatcacgtatgtgacatgcttagtacagtgcatagcatatggaggtatttaaatgtcctttttaaagaataggaacatttatataatgttttaattgagtacagataattcgctaatttttttattaacgtgttttaaccctgtaaatggagaagtgtccatttacttttagctcttggtaataatgataactaatatttaaaatgattctctttggtaagttctttgtttatttttcttttagcatggtgttattgctacagaagatgaagagtattttatcgaacctttaaagaataccacagaggattccaagcattttagttatgaaaatggccaccctcatgttatttacaaaaagtctgcccttcaacaacgacatctgtatgatcactctcattgtggggtttcgggtgagtgagtgtgcagcttttacaaagcgtattgtactggattgctgctttttctttcttctggcaa

SEQ ID NO: 11126 - DNA, 594 bp, Homo sapiens
  MAP TO AC004174.1; EXPRESSED IN PLACENTA, SIGNAL = 0.64; EXPRESSED IN HELA, SIGNAL = 0.67; SWISSPROT HIT: P11369, EVALUE 1.00e-22; EST_HUMAN HIT: BI004145.1, EVALUE 3.00e-16; NT HIT: U50871.1, EVALUE 1.00e-29
gaaccgttgtatgacccagcaatcccttgtctgtgtatatattcaaaggaaataagaagagagatctacactttcatgttcattgtagtattattcacaatagccaagatgtggaataaacctaagcatccctcagcagatgaatggatagagaaaatgtggtatatatgcatagtggaatactattcagccttaaagaagaaggaaattctgttgtttgcaacaacatggatgaatctggaggaccttatattaactgaaataagtcaggcacagaaggacaaatacctcatggtctcccttctacatgaaatctacaaagtcaaactcacagaaacagagaatagaatggtggttaccaggggctggaagaaagggagaaaattgagaagatattggtcaaaggttacaaaaattacagttagacaagagagataattcaagagatctattatatgaaagggtgactataattaatgaattgtatatgtgaaaattgctaaaagagtagatctgagtgttctcatcacaaaaacatgataagtatgtgaggtaatggttcatgtaaattagcttgattttgtcattccatga

SEQ ID NO: 11127 - DNA, 553 bp, Homo sapiens
  MAP TO AC001517.1; EXPRESSED IN HELA, SIGNAL = 0.45; SWISSPROT HIT: O15049, EVALUE 2.30e+00; NT HIT: AL163303.2, EVALUE 2.10e+00; EST_HUMAN HIT: BE818465.1, EVALUE 2.00e-01
ctgagaccaaagtatccggcatttaagagaagcccccaatccctggcttggccaatttgtaggaactggccttcccagaggaattggaggtctaagcaaagccaaccattagcttccaaattgattttcaaaccaaaattggaacagttctcaaatgctcccaggatttggggctattaatacagaagaacaatgagaaggaaaaagtgagtgtgtaagaggtgatttatgactgaaaggaagttacagcctcggaaacttgtatgtaacccaatcacgaacccttctggagatgttccagggaagagatggagaatgtaaagggagagggtttccgagggatattaaaggttatgaaaggaggtaatgtgggttttgggcctgaaatgagcaaggaagaagctgatcatgttgaacatttcataaccacagcaggtttttgtgcagctgtcatcggtgcctgagacaccccatgagcctttccttttatttatttcttaccattagtccatcaccagacaggttaaatggcaggaagagagtgtccccacaa

SEQ ID NO: 11128 - DNA, 592 bp, Homo sapiens
  MAP TO AC004193.1; EXPRESSED IN HELA, SIGNAL = 0.57; EXPRESSED IN PLACENTA, SIGNAL = 0.78; NT HIT: AF055066.1, EVALUE 0.00e+00; SWISSPROT HIT: P38776, EVALUE 6.60e-01; EST_HUMAN HIT: AA757099.1, EVALUE 4.00e-12
tcagaggcttggaaatgaccctatatcatctattttcaattgcctcactctatcttttgaaatctcaggtaattcatactcctaaaaaaatctcatgttcatacataggacaaggtagaaaaggtaatattcctgttttaatttgctagggctgccataacaaagtaccaaaggctgggtgacttaaataataaatatgtgttgtctcacagttccagaggccacaggtgcaaggtcaaggtgctgcagggttgatctcttctgaggcctctttcctttgcttgtagatggccacttcttctgccttctcaacatagggcttcaacatgtggattttggtggcgtaggaacacaattcctcttgtaacagtctggatcgtctttgacaatggatgttctaaaaaataaaagagagtaatagacagtacaaccctttggctgaaatctttctcttggttttctaaaattttggtcttgcaatagaaaaaacaagaaagagaaccaaagtttagttcttcccggaaggtgaggcctcctccctaagtctgtgtaatcccagacactaagacatggtgctgtgcagttctccaaa

SEQ ID NO: 11129 - DNA, 513 bp, Homo sapiens
  MAP TO AC002471.5; EXPRESSED IN HELA, SIGNAL = 0.6; NT HIT: AF232254.1, EVALUE 0.00e+00; SWISSPROT HIT: P21359, EVALUE 9.00e-65; EST_HUMAN HIT: BF885238.1, EVALUE 0.00e+00
tgtcacggaagaaatgttggataaagagtaatttgtcaagtctcaactaatttaggtttaattcatgctttgcacaaaaattttgtgtttaggctgttgaaagcttcacaagaccattgttaagaggcgaatgtcccatgtgagtggaggaggacccatagatttgtctgacacagactccctacaggcatggatcaacatgactagcttcctttgtgcccttgggggagtgtgcctccagcagagaaggaattctggcctggcaacctatagcccacccatgggtccggtcagtgaacataagggttccatgatttcagtgatgtcctcagagggaaacgcagatacacctgtcagcaaatatatggatcagctgttgtcgttaatggtgtgtaagcttgagaaagtgggacttcaaatacggaccaatggtaaggacctggtgggtctagaattgagtcctgctctttatctgatgctatttaacaaattgaagagacgcatcagcaagtt

SEQ ID NO: 11130 - DNA, 567 bp, Homo sapiens
  MAP TO AL023494.12; EXPRESSED IN HELA, SIGNAL = 0.71; EXPRESSED IN PLACENTA, SIGNAL = 1.3; EST_HUMAN HIT: BG771811.1, EVALUE 1.00e-124; NT HIT: AF335484.1, EVALUE 1.40e-01; SWISSPROT HIT: P44783, EVALUE 5.40e+00
caggcagaatcttacaggtgcatctttatttggcaaagagcagtagaagaaaacagtttagtgtggctgtgagaatagcaggaaaaatacgcagtattttccatcttgttactacacacttgtcaaaaaagctagttttttaaatacaaaaacttgattggagataggaatgataaacatttcatttatattagttgggattttcattgaattttttttctttttttcagttgtccagtaagaaagaaaaggataactgaagcagagctctgtgctggtcctaatgactggattctttgtgcacatcaggatgtagaggggcatggagtaaatcccagtgttagtggcctttccatacctgggatattagatgttatttgtgaagaaatggatcagacaactggagaaccacagtgtgaagttgcccgaaggaagcttcaggagattgaggacaggtaaatgggcagtgtatatagctggttttttgctgttctcttgtaataactctgctcatataagctagttctgtttatcatttggtgataccttgatccttagcctctcaga

SEQ ID NO: 11131 - DNA, 523 bp, Homo sapiens
  MAP TO AC004178.1; EXPRESSED IN HELA, SIGNAL = 0.51; SWISSPROT HIT: P35410, EVALUE 5.00e-23; EST_HUMAN HIT: BF883760.1, EVALUE 7.30e-01; NT HIT: S78653.1, EVALUE 3.20e-02
caaccctctctggaaagctggattgggacaatgagactgagacctcaggacatgtgaacatgagccatacgggaggtgagtggttggtggacaggcaggtggtcttctccctgacagtgctggtggccctctgtggactggtaggcaatgatgtgatctgctggcttctctactcacaggtctggagcagcccctatgtgacctacatccttaacctggccactgttgatatggtcaacctctcctgtgtaactgtgatcctgctggagaaaatcctcatgctgtatcaccaggcggcattgcaggtggctgtgtttctggatcctgtctcctatttctccgacacagtgggtctctgtctcctggtggccatgagtattgagagctttctctgtgccctctgtcccacctggtgctgccaccgcccagagcacacctctgccatggtgaggtgggccctggccctttctttgtatgcagttagccaggtctgtgagtactgggagaagtgcttggcatgtga

SEQ ID NO: 11132 - DNA, 527 bp, Homo sapiens
  MAP TO AC018844.2; EXPRESSED IN HELA, SIGNAL = 1.3; EXPRESSED IN PLACENTA, SIGNAL = 0.7; EXPRESSED IN HEART, SIGNAL = 1.5; NT HIT: AL163227.2, EVALUE 7.80e+00; EST_HUMAN HIT: R88001.1, EVALUE 2.00e-53; SWISSPROT HIT: O51157, EVALUE 2.90e+00
aatgaggcataagcagtggggagaagaatgcatcttattaaatttagtctgatattagaataggattagaaggatcctttggggtttggagcttattaataaacagttgcatgatattaaactataaagacagaaaaaaaaaacccaggtcattattctgatatttcctccacaacataaagccaatgaatgagctgcatttagaggaggcagacaatatatttaagcactgtaaatatcaacattagtacttagcctccatgcaatctaatttactctctaacacaatccatcataactgaagtatgtttttgcttatagggatcacaaaaactcacttgatttattgcaatattcccccccctcctgtgttctccgggaaatttcagccatacgtgaatctctttcttcggggaaaaagagactcttgtcaccagggcattcacgaacacaaactcacttttcactctagaggaaaggtatcataaaaagagagtttaatcaattgccacatcaggactttggtt

SEQ ID NO: 11133 - DNA, 531 bp, Homo sapiens
  MAP TO AF031075.1; EXPRESSED IN LUNG, SIGNAL = 2.8; EXPRESSED IN HELA, SIGNAL = 9.1; EXPRESSED IN HEART, SIGNAL = 1.7; SWISSPROT HIT: P51617, EVALUE 8.00e-66; NT HIT: gi14768298, EVALUE 0.00e+00; EST_HUMAN HIT: BE276817.1, EVALUE 0.00e+00
atttggccctggttctcttctagaaggctggggtggggacttacaggggctttggcccaaagaggccttggtccctctcctgggaacccgtctccccagctaccttccacggctgtgggccgggatcctgggccactcccccagctcgattctcctgccgtgtccccctgaggacagccggcctccctgaggggtgctgggtccagagggcagcttggagtcaagtgccaggagcgcagggcagcagagaggccgcctaggctctcgtcactctccacgggctggttggggcctctctgcagctgctctgctgcctgggcactggctcctgatggcgctgccaggggctgccatggagcagccccactgtgggctctgccagtgctggacacgtaggagttctcctgcggggaaggggggatgcagctggcggcctccgaatgcccgggcacccccgccaccactgcctgcagcttctctagcctctcgtacacctgcaagtggaaaagagggactctcagggtgagatgg

SEQ ID NO: 11134 - DNA, 512 bp, Homo sapiens
  MAP TO AB000381.1; EXPRESSED IN HELA, SIGNAL = 0.59; SWISSPROT HIT: Q99445, EVALUE 2.00e-53; NT HIT: AB000381.1, EVALUE 0.00e+00; EST_HUMAN HIT: BI194158.1, EVALUE 4.60e-02
tttatcacagcgtgggagtgtagaatgtgtacatggagctaattatggttgaatgtgaggtgtatgtgcctcaatatttacaagcagaaaatgtgaaatcaattattttcattgctgcttctttttttaggcataaattctcgtgaactacttgtttataagaactgtacaaacaactgcacatttgtatatgcagctgaacagcctcctgaagccccaggaaaaatcttcaaaactaatagcttctactgggtttgttgttgtaatagcatggtttgcaatgcaggaggacctactaatcttgaaagggacatgttacccgatgaagtaactgaggaggagcttccagaaggaactgtgaggctgggggtatcaaaactgttgctgagttttgcctctatcatagtcagcaatatattgccatgaggaccccaccttggagggtctgaccatcttcacctgttccgcagagaaatgttgctctccattattcccttctaagccagagaccc

SEQ ID NO: 11135 - DNA, 576 bp, Homo sapiens
  MAP TO AC000355.1; EXPRESSED IN HELA, SIGNAL = 0.49; SWISSPROT HIT: P40813, EVALUE 2.50e+00; NT HIT: AF019413.1, EVALUE 2.20e+00
tccatctggaaactgcactggataaggagcagggatacacagcagtggctggaaagaaattactcaagtacgaaatcaggaaggaacctcattaacaccccaccaccttttgtaaagtcaataatacactgtccagtatgaaacccagccaagatctcagctgttgactgttcagtgaaagaggaacatgaaagtgacagaaggacattcattccagaaaccctgagaatccagcagcccctacctggtctccagctccatgacttgccaccgccctcactgctccagtctaaattccacaccttcagagctagagtcagagtttccagggtggcaggagtggagtgaaccagggggatcccagcatcctcctcaaatgtagggactaagactggcggggaaaaggggcagggtcctttggggattgtaatgcacccaaggggaaatcccagagatccaggttcagtcctctggccctccccagctagcctgatgtagctccatcttcactgaagttcctctggtgataacacatcatgttgaagaggatatttagggcttcctgagacaaagctg

SEQ ID NO: 11136 - DNA, 562 bp, Homo sapiens
  MAP TO AC004471.2; EXPRESSED IN HELA, SIGNAL =   1; NT HIT: L77570.1, EVALUE 0.00e+00; EST_HUMAN HIT: AI692666.1, EVALUE 0.00e+00; SWISSPROT HIT: P12111, EVALUE 1.20e-01
tcaaggggccaattaaacagcaaacagcttggcaaggccctggggtgtggtgtgggcacgagtgccttgtgccagtctggccccagcacagcccctttctccagtgactcctggtatggtcaacagcttctggcccaggcctgggccccgagaaggctggagtcctctgctgggtgtacagctgccctgcaggctctgtgaagcgtctatgagcccagcccaggcctggctctaaaagaagtccgaagctttgcgccgggcagggagctgcagcaggttgtccgtgatggaggccgggtcctgtgtgagaggggtgcgtgtggcagagccaggcgccggtgtgcttgtgggggtctgcagcccactggccggggtcttgaggtgggtggagcgtgctggggatggtgtgtagctggcccgcagggcccggtctgtgtacttgctggccgtcctgctcacaaggcgctgtagggctggcgacatggctgggctcaggcctttgggggtgaggctggggtggaggaatgggtgagagaggcagggttaggtgggctgagagctg

SEQ ID NO: 11137 - DNA, 511 bp, Homo sapiens
  MAP TO AC008685.6; EXPRESSED IN LUNG, SIGNAL = 1.1; EXPRESSED IN HELA, SIGNAL = 0.42; EXPRESSED IN PLACENTA, SIGNAL = 0.71; SWISSPROT HIT: O60813, EVALUE 6.20e+00; NT HIT: U07563.1, EVALUE 0.00e+00; EST_HUMAN HIT: BG654971.1, EVALUE 0.00e+00
aaaaccattattttccccgctgctctgtagtaccccttttgtcatcaatcaaatatctgtttatgtaagatctttctgggtgttagaaatgcttgttccccggtgctgtaaagaaatagcacttgaacataaatttaatttcctcagcaaggccatttttactttctgcagaaagggtacactcaccagcagttttgccatgacagtacaccgaacaaaggagacagggtcatttataacctgatgcgtccaccctactgctgtgtccagtttccattggctggaacgggacctcacattctatgtttgtcccgattggctagcaacttagaactttttaaaacaggcaaaggcagaggagaacaaaagaaggaggaagtaacttgtggaatgctgagaaagggaaaagcacctctaaataaggaagaggaacaagctatgacctaatgccctcttggaccagtataagcatgccagggcaaatatttaggctaaactgtgggagctaaga

SEQ ID NO: 11138 - DNA, 547 bp, Homo sapiens
  MAP TO AC004490.1; EXPRESSED IN HELA, SIGNAL = 0.69; EST_HUMAN HIT: AW967980.1, EVALUE 1.00e-128; SWISSPROT HIT: Q61572, EVALUE 4.50e-01; NT HIT: gi6678731, EVALUE 1.30e-01
ggccgtgaggtttatgtgacatggccgggccaccctccgtccgcagtggaagggcaccacgcagcccatgaagctgaacacgcggccgtccactggactcctgcgccatatcctgcagcaggtctacaaccactcggtgaccgaccccgagaagctcaacaactacgagcccttctcccccgaggtgtacggggagacctccttcgacctggtggcccagatgattgatgagatcaagatgaccgacgacgacctgtttgtggacttggggagcggtgagtgtcgcccgccatgcccggctcctgtgcacttccaggccacacgctctgtgcctgccccatgcctgcttggagaagagtttatcagggacttgcgacgttggcgtggacagtgcttccttctcccagcgcctctgtcccgctgtggggccgttcctttccccagccctgaccgggctccacccagaggggagaaatcgcaggaacccagtggctcccagaccaggcccatcctcccaggtgcccggagactctgctttcgtcctgct

SEQ ID NO: 11139 - DNA, 503 bp, Homo sapiens
  MAP TO AC002309.2; EXPRESSED IN HELA, SIGNAL = 1.1; EST_HUMAN HIT: BG282192.1, EVALUE 0.00e+00; SWISSPROT HIT: P78395, EVALUE 2.00e-40; NT HIT: gi5174640, EVALUE 0.00e+00
ctccctgaacttccttgctggcaaccatcagagcctctggcccagccttaggcgctccatgctccctgaccccagctgcatcctgctcaggttcccagggccccacaccaagctgctaggtcacccttacctggggcgaacctcctgggcaaggagcacatcaagtccatcaagcacagctttgaaggtctccaggtgaagatgttgtcccttcatcagcactcccagagggaggcaggtgaagggccaggcctgcaccattgccttcagggtctggctgtgtctcccgtcaaaggctgccatgaagagtggcgggaagagctccctgggcagcaactccagggcggcaatggccagggcctcatccttcagcaggctctgccctgccagctccacaagtctccgtgggcttgtccacacactcatgctgatgtatcggctctgaatggaaccctgaggaaacatacagggaacaaggcatccctttcagcccaagcataagc

SEQ ID NO: 11140 - DNA, 561 bp, Homo sapiens
  MAP TO AC004030.1; EXPRESSED IN HELA, SIGNAL = 0.42; EST_HUMAN HIT: BF799428.1, EVALUE 1.00e-67; SWISSPROT HIT: Q15811, EVALUE 4.70e-01
tttcccggatagtcatctgctctgtctgtccatacatctgtctccttagctgctggctagagactctgtctcccgagcagaggtctgacaaatgttctaatgttctgccctccctgctcccctacaggcatcacgggcagttactcggtgtctgagtctcccttcttcagccccatccacctacactcaaacgtggcgtggacagtggaagatccagtggacagtgctcctcccgggcagagaaagaaggagcaatgggtgagtctggaacccgtctctgcagaggccaggctgaggtcagacagcccctattagggccacaggaagttcaagcaggactcaagcctgacctgggttcaagcactacccccacccctggccgtgcctcagtctcctgcagatgtcaggtagaagatgataaacttggtgtccttgtatctctgggcttctgcttggagaggccatataagctggggtctttgtccccatcaggaggtcatctccaggatcaaagaccaaaggaccaactctgcttggaggaggaggacactggcaatttgt

SEQ ID NO: 11141 - DNA, 511 bp, Homo sapiens
  MAP TO AC007883.3; EXPRESSED IN HELA, SIGNAL = 0.44; SWISSPROT HIT: P32656, EVALUE 1.00e-06; EST_HUMAN HIT: BG194947.1, EVALUE 0.00e+00; NT HIT: gi13386023, EVALUE 0.00e+00
tcccttagatcacaacctttcttcacctattttaattagccttataataccagtgtattcttttcatttttcaacagggatgtgtatggggtgttgcttacagattgccagtaggaaaggaagaagaagtaaaagcataccttgacttcagagaaaaaggaggctacagaaccacaacagtcattttttatccaaaagatcccacaacaaaaccattcagtgtattgctatatattggaacatgtgataatcctgattatcttggtcctgcacctctggaagacattgctgaacaaatttttaatgcagctggtccaagtggaagaaatacagaatatctttttgaacttgcaaattctattaggaaccttgtgccagaagaagcagatgagcatcttttcgctttggaaaaattagtaaaggaacgtttagaagggaaacagaacctcaattgcatataatttagtcttcagagaattaacttcagtgcacaatgacaatatgatttgga

SEQ ID NO: 11142 - DNA, 592 bp, Homo sapiens
  MAP TO AC016629.5; EXPRESSED IN HELA, SIGNAL =  36; NT HIT: gi14755659, EVALUE 0.00e+00; EST_HUMAN HIT: BE275192.1, EVALUE 0.00e+00; SWISSPROT HIT: P29316, EVALUE 3.00e-53
gcataaattcctattctgcttgagttctagtcaaataagctaatattatacttactagaaacgtaaaatcttaaagcttatagatttgattctaattaagttgtcattcttatgaaaaacattatttttttatgctgaaaagatacacatatatttagagttagccagctggactcagtttaggtgatcccaattttgttacaacatcgaaagcatcataatcaggagcaagtcgaacatatgccttcttctctttatcaggacaaatcagggtggtgaccttggccacatcactgtcatagagcttcttcacagcctgtctgatctggtgcttgttggctttaacatccacagtgaacacaagcgtgttgttttcttctatcttcttcacggccgactcagtggtcagcggaaacttgatgatagcatagtggccaagcttgtttctcctgggggtgctcttccgaggatatctgggctgcctccggagtcgcagtgtcttgggccgcctgaaggtgagtgacatgcggatcttcttttttgcgtgtggctgcggacacctttcaacactgccttcttggcctttaaagcc

SEQ ID NO: 11143 - DNA, 572 bp, Homo sapiens
  MAP TO AC009087.4; EXPRESSED IN HELA, SIGNAL = 8.4; SWISSPROT HIT: P25705, EVALUE 9.00e-77; EST_HUMAN HIT: BF683523.1, EVALUE 0.00e+00; NT HIT: gi4757809, EVALUE 0.00e+00
ccaaacaggctgtcgcttactgtcagatgtctctgttgctccaccgacccccctggtcgtaaggcctgtcctggtgatgtgttttacctatactcccggttgctggagagagcagccaaaatgaatgatgcttttggtggtggctccttgactgctttgctagtcatagaaacacaggccgatgatgtgtctgcttacattccaacaaatgtcatttccatcactgacagacagatcttggaaacagaattgttctacaaagatatccgctctgccattaacattgggtctgtctgtgtcttgtgttggatctgctgcccaaaccaggactatgaagcaggcggcaggtaccatgaagctggaattggctcaggatcgtgaggttgctgcttttgcccagtttggttctgacctcaatgctcccactcaacaactattgagtcgcggtgtgcgtctaactgagttgctgaagcaaggacagtatcctcccatggttactgaacaacaagtggctgttatctgtgcgggtgtaagggggtatcttgataaactggagcccagcaagattacaa

SEQ ID NO: 11144 - DNA, 565 bp, Homo sapiens
  MAP TO AC004090.24; EXPRESSED IN HELA, SIGNAL = 0.45; NT HIT: U34879.1, EVALUE 4.00e-05; EST_HUMAN HIT: BF911052.1, EVALUE 1.00e-05
aatgcatggaaatggaggacttgggacttaattctccagaaccatctgtgccccgtgtccttaggaaagcctctacataaccccagggctccggttcttcagtctgaagattgctgctcttcacacatcctttgtctctccaattcttatctgtgtctgaagcacttttttctctctcaacactttctctaccttcaaatttcagagaagacagctgccaaccaaaaagaaggggcctcagtaggcctctacctaccggtccttatcaatgtcatcaccattgctgaagcctttaccacctccacttccgttcccatcacagcctccttgatttccaaactatggttgtccactttaagcacttccttctctattacttgataaatgattaattgattatccaacatggactttggttctgtctgctaccttagagaggcccaaggagtcctttgaagacatggaagagacacatgtgtgtaagtgtatcggcaaaggggcgtttatgacatcagcagtattgttactggaaaggggtcccaatccagacgccaagataggcttc

SEQ ID NO: 11145 - DNA, 542 bp, Homo sapiens
  MAP TO AC004144.1; EXPRESSED IN HELA, SIGNAL = 1.4; EST_HUMAN HIT: AL524744.1, EVALUE 1.00e-115; NT HIT: gi14767154, EVALUE 8.00e-77; SWISSPROT HIT: P47709, EVALUE 3.40e-01
gagaaaggttcacgctggagatatgtacctggaagttgtttctgaatggtattgaaagccaagagtccagatgggctgtgtgaaatgtccgtgtcgctccctgcagtgagtgagcactcagccagttgcctgactgtccgatatccttcaagctaggggacgatgatgtggcagatggcttggccttccacgccaagcgcagctaccagccccacggccgctgggcagagcgggccggccaagagcccctcaagaccatcctggatgcccaggacctggattgctactttacccccatgaagcccgagagtctggagaactccattctggattcactggagccacagagcctggccagcctgctgagtgaggtacacacttccaccgcagcctggcccatagccccggcaccgtgacggccccagggcctggcgccttaggctgactcccactccatgggggcagggaggattacatgagatggtgaagggcaggagggtgagccccaggtctgttgcacagcaagacttcccaaggcagac

SEQ ID NO: 11146 - DNA, 568 bp, Homo sapiens
  MAP TO AC003045.1; EXPRESSED IN HELA, SIGNAL = 0.76; EXPRESSED IN HEART, SIGNAL = 1.2; NT HIT: AL163213.2, EVALUE 1.00e-26; SWISSPROT HIT: P08547, EVALUE 1.00e-31; EST_HUMAN HIT: AI694411.1, EVALUE 4.00e-46
ggaaagctaaagcaaaccaaactcaaaattagaagaagaaaagaaataataagaaacagagcagaaataaatggatttgaaataaaacaatacaaaagatcaatgaaacaaaagttggtttattgaaaagataaacaaaattgacaaaactttagccagactaagaaaaatagaggacccaaataaataaaatagatgaataaacaaaataagagacattacagctgataccatagaaattcaatgatcattagtggctactatgagcaactatgttccaataaattggaaaatctggaagaaatgaataaattcctagacacatacagcctaccaagattgagccatgaagaaatccaaaacctgaacagaccaataacaagtaaagagttggaagccgtaacgagaagtctcccagtgaggaagatcctgggacccaatagcatcactgctgaaatctaccaaacatttaaagaagaactaataccaatcctactcaaactgctccaaaaaatggacaaagagagaatacttctaaactaattctgtgaggccagtattaccctga

SEQ ID NO: 11147 - DNA, 529 bp, Homo sapiens
  MAP TO AC002497.1; EXPRESSED IN HELA, SIGNAL = 0.42; SWISSPROT HIT: P15306, EVALUE 2.20e+00; NT HIT: U29149.1, EVALUE 5.00e-01
tgcccttattccctgttctgcccaccctgttctccttgctgtaccttaaacatgtcagacactcttctagccagaaagttctttcctgagataatcgctagcctcaccacttcatttccttcaggtctctgttcacacaggaccttttcagaaaggctttttctctgaccacactgcttaagtagcagcttccttcactctttttctcctcaccctgccataaaggcttcacagcccttgagtgcaatggcaagctatcatagtgattaaagacctgattccgtcccctcccacctgtatgaagttcagctagctattcaccctccctttgcttcattttctcacgtggcaccaattgtagcccacatgattgctgccccaccctctcctcagtcaccattccagagtgctctgatggcttcacactgctagtacctgcaatctgtagccagaaaatgtcatctggccccaggagcatgttcaacctatgtgctaagcaggacagaagagccaaggagtcaaaactcca

SEQ ID NO: 11148 - DNA, 527 bp, Homo sapiens
  MAP TO AC005005.1; EXPRESSED IN HELA, SIGNAL = 0.8; SWISSPROT HIT: P78741, EVALUE 3.80e-02; NT HIT: AB032551.1, EVALUE 3.00e-39; EST_HUMAN HIT: BE392325.1, EVALUE 2.90e+00
agagtgggcccagcaaccccctccccaaagactcttcctcagagagagaagctgaggtagagcacaccatccaccctggaagaatggctaacctcagagctaagccccagccacctttcttgggagagggccccctcaccggaagccggggtcgctcttccaggtaggctgagctgaccaaggggaggatgacagggtggatgtagaagaggaggtggtgactggggctggggcttcttgggcctgaaggttggggctcaggcacctgccaggccctgtactctgtgtgccaagccttgggagggccatgtcaggggctgggggaacacagggagagcgattcggggagtggcttggggaacggctgggtgatcggggtggcttgggcagaggtgggggcacagtctggcctgagggggccccaggccggaaggtgggggacagaagtccaggggagtgagtgccaggctctgaaggaccctggcccacatccaagggcaaggtctggggtggccgtggcaaaacag

SEQ ID NO: 11149 - DNA, 548 bp, Homo sapiens
  MAP TO AC005587.1; EXPRESSED IN HELA, SIGNAL = 0.37; EST_HUMAN HIT: BI020419.1, EVALUE 0.00e+00; SWISSPROT HIT: O95047, EVALUE 2.00e-56; NT HIT: gi15300431, EVALUE 0.00e+00
ctgggctggtgggacccttgtccacaattgtagtttcatatatgtgcatcctctgtgctatccttcagatccaatcaagggaagttcagaggaaagccttccgcacctgcttctcccacctctgtgtgattggactcgtttatggcacagccattatcatgtatgttggacccagatatgggaaccccaaggagcagaagaaatatctcctgctgtttcacagcctctttaatcccatgctcaatccccttatctgtagtcttaggaactcagaagtgaagaatactttgaagagagtgctgggagtagaaagggctttatgaaaaggattatggcattgtgactgacagtgacctaggaagttacatcattgagcggttcttaacccatctctgcactggtgggacctctgccctcaatggacatgagaattatctgagacatttatttaaaatggagctatctcctgccctacctttaaatgactgatttcagcagatgtgggatgaaattctagaaattgatctcttcaagttgtgctgcagcca

SEQ ID NO: 11150 - DNA, 521 bp, Homo sapiens
  MAP TO AP001724.1; EXPRESSED IN HELA, SIGNAL = 0.5; EST_HUMAN HIT: AV705610.1, EVALUE 3.00e-06; NT HIT: AJ229041.1, EVALUE 0.00e+00
tggaggaaggggccatgagtcaaggaatgtgggtggctccagaaggggggaatgtcaaggacatggatatccccccagagcctctagaaggaacacagtcatggcaacagcttggtgttagcctggtgagatctatggcggatctgactcacagaaatgtaagaaaagaaatcggtgttgttttaagccactaagtttgtggtaatttgttatacagcaataggaaaccagcacatatggtgtttgtggtatttgtcatcactgtaatattggtaattactgaaatcatgtgatggttaaaaaaacacagaccctggagccagacagactgggtcaacctcccaccatcccactcactagccaggctccttgggacaagttaacctaagagactcactaagtttccatcccctcatctgtaagaaggtggtcatcgtgcttacccccagggttgtactgagaataacatgaaataatatgaggaaagtatttagcacaggggctggcacagagggggcctt

SEQ ID NO: 11151 - DNA, 588 bp, Homo sapiens
  MAP TO AL080317.11; EXPRESSED IN HELA, SIGNAL = 0.85; NT HIT: gi14756840, EVALUE 0.00e+00; EST_HUMAN HIT: BE967481.1, EVALUE 0.00e+00; SWISSPROT HIT: O60673, EVALUE 1.00e-105
gggtgttttattttcaaaagctccacgagtggttttagttaaatcactagccaatgcattatccttctcaggattactattacaaggattattttgtataaaattatcttttgtggatccagtctcactacttttggtagaagtctcctgatgacctgcaagtttccttttattcaattttaaccgggatggtttattgccaggttgtaatttatatgtgacaggagatagtttctgtggtctagtaagacagttagaaagaacaacactgggaaaaaacatatagtgtgctgcttgctggctgaggcttggcttttctgttttatgttcttgaaattcttcatacctaattttaagtttatttagtccactttcatcagcagtgctattaagagaatgcaccatagttctattctcccctgagcatgacagtaattcacaattttcagtaaatgatgaagggaataaactactcagagctgtgctgtttcctttttcatttccttcagaggatactttattttttgaatgatttaagtcagaaaagttgaaagaatttttgcccaatgtattctcgttagggtgacg

SEQ ID NO: 11152 - DNA, 527 bp, Homo sapiens
  MAP TO AL355075.2; EXPRESSED IN HELA, SIGNAL = 0.26; SWISSPROT HIT: Q9JI74, EVALUE 4.00e-10
catggggctgcaagcctggcaggaagtgaactctatgtgtgtgggggacaagatttctacagtcactccaacaccctggcttcaactctcaggtataagcttctaggagtgggcagggtgtggcaggccctaaggtgggcagggagagaaattgctggcctagccaaccacggatgcccagagtccctcttccaatctcttgtcctactgtgtccaggtgggagcccagtcaagaggactgggaggagatggctcctttgtcccaggctcgaagccttttctccttggtggcactggatggaaaactttatgccctgggtggaagacacaatgatgttgccctggactctgtggagacctacaaccctgagctcaatgtctggaggtaagcaggcaagggggcatctgggagagattaggagacttggaatagaaggagagttgaagatgctagttgccttatcttgtgtcctgttctcccttaggccagcacctgcacttccagcaccatgttttgcccacgcagc

SEQ ID NO: 11153 - DNA, 529 bp, Homo sapiens
  MAP TO AC006515.7; EXPRESSED IN PLACENTA, SIGNAL =  17; EXPRESSED IN HELA, SIGNAL = 9.7; EST_HUMAN HIT: AL535482.1, EVALUE 0.00e+00; SWISSPROT HIT: Q50659, EVALUE 3.30e-01; NT HIT: AB028891.1, EVALUE 6.00e-56
aggagtcgggcagggggatgcaatagaggggaaagggccccatttccctcctctccgtcttcggagctgcgatcccaccctcagtccaagggcttaaacatctgcttttcggaactggaagcgcagcacaaaccttgcttttcaaaggcgctggggtctctcggcggccccatctcgggaagaggaactaacgataactacagcacgaagcacaccggccgagtccccggcgggaaaggcacccgcgcgcgcggacacaggacggacacagggaggagcggagcgggtcacttggtcgccacccccgaagtgacggccgcggcggcggcggcagcggcggcggcggcggcggctgcggtggtccctgcgggcactgcggcgggggtggctgcggtggtgctggcggtggtccggcgctgttccatgccgttgggcaggaagccggcgatgatgggcaccggccagatgagggcggccacgctccacaccacgatgaccagggtcatgaagcaggccaccagcgtggact

SEQ ID NO: 11154 - DNA, 500 bp, Homo sapiens
  MAP TO AL136096.2; EXPRESSED IN HELA, SIGNAL = 0.22; NT HIT: AY011601.1, EVALUE 0.00e+00; EST_HUMAN HIT: BE693792.1, EVALUE 7.00e-01; SWISSPROT HIT: P21554, EVALUE 4.00e-94
gcgtcatcctccactcccgcagcctccgctgcaggccttcctaccacttcatcggcagcctggcggtggcagacctcctggggagtgtcatttttgtctacagcttcattgacttccacgtgttccaccgcaaagatagccgcaacgtgtttctgttcaaactgggtggggtcacggcctccttcactgcctccgtgggcagcctgttcctcacagccatcgacaggtacatatccattcacaggcccctggcctataagaggattgtcaccaggcccaaggccgtggtggcgttttgcctgatgtggaccatagccattgtgatcgccgtgctgcctctcctgggctggaactgcgagaaactgcaatctgtttgctcagacattttcccacacattgatgaaacctacctgatgttctggatcggggtcaccagcgtactgcttctgttcatcgtgtatgcgtacatgtatattctctggaaggctcacagccacgcc

SEQ ID NO: 11155 - DNA, 502 bp, Homo sapiens
  MAP TO AL022329.9; EXPRESSED IN HELA, SIGNAL = 0.33; NT HIT: AL161582.2, EVALUE 3.10e-02; EST_HUMAN HIT: BE904530.1, EVALUE 1.80e-01; SWISSPROT HIT: P18667, EVALUE 4.60e+00
ccctgcctccaactggatctgcatccccagccagaagaatcctataaaatggtccatctgattttgtcactctcctcttggaaaccttccactggctttctggtgccccgaggatagcttcaatttcccactgtggctccaggtgctgcagaatcaaggccggctgatctctctgacctgcctctccctcctctcctcctttgtctggtggctgtccatctgggctccgctgatctgacctttctctaatctggaactccctcccctaagtgaggccagtctgaacaacttcagggtgggagattgcctgggcatcttgttccagtgcagatttggcttaagtctgtggtggggcctaagatgtcaatgtttctgctgtgttggcaccacctgggggcttgcaaggagtgcagattctcaggccctgattggacctctgaatccgaatctgcatgttggcaatttcagcacataagtgtctgggggtgctggtggcaagcac

SEQ ID NO: 11156 - DNA, 540 bp, Homo sapiens
  MAP TO AL137853.3; EXPRESSED IN HELA, SIGNAL = 0.84; NT HIT: AF360695.3, EVALUE 1.30e-01; EST_HUMAN HIT: BG002752.1, EVALUE 0.00e+00; SWISSPROT HIT: P01550, EVALUE 8.70e+00
tggccgagggccacaaaaagtttagctaagggaggcttcagtgagaagcagcacccccttggggacacagcctgcactgtggaaatgccacctctctccccttgcctgagtgaagagctgttagatccagaattgcatgttctcataacccccagcctgagagagaaaacagagtctgagctaaagtttgaggaggatgagcgatggattatgatggaggctgagggagagtgggaggaagagaaactgtcagacagggaaaagacttttctgatggcagatgagaagaacagcctggcagatatttttgaagaaagagaacaagcaaacacagcagtggtggaggatggatccgattgcttagctgctgtcttgaggacttttggccacctatctcttggtcagatttgttgccctgatgacccacagccagccaaggaccagttggctactgttcccaaggatatacccctggattgcgattgtgttcttacaggtgaggatattctcggtgaggtggcaaacagaactgctcagggg

SEQ ID NO: 11157 - DNA, 518 bp, Homo sapiens
  MAP TO AC008120.15; EXPRESSED IN HELA, SIGNAL = 0.36; SWISSPROT HIT: P49535, EVALUE 9.50e-01; NT HIT: gi7662469, EVALUE 0.00e+00; EST_HUMAN HIT: AA435747.1, EVALUE 0.00e+00
tcctgtttggtgttccacatgcctaattccattatgtaacttaaatcttcaaaaaattaattcttgaatgtgaatgaaaaagtatcattcagaacaattgcttcaagcaattgaaatttgtttttaaagttgatttgtatatatacaattcatttttttcaaaacccccaaagttcttgatatgtatattcacataatattcctccttatttaaatagtaagtcttgtaggttgaaagccaaggaatcttcagtgatcgtttactgcaatccatcaaaaaaaatagtttgtttctcttatctggctataccctggttgttgaatgtgaatgggggtggggatggggatggggcagagtattgttctgtcctccagtaaatgtattgaatgtgtgtaagggctgaatccctggtatagtgttgggaatcattgtaatggtgttgggtgtcattaagggaacatcatcaggtgacctcctcatagctagtgtgtaatctgggggacaggcggtccgaaga

SEQ ID NO: 11158 - DNA, 534 bp, Homo sapiens
  MAP TO AC005343.1; EXPRESSED IN HELA, SIGNAL = 0.66; NT HIT: gi14757500, EVALUE 4.00e-54; EST_HUMAN HIT: AL533986.1, EVALUE 6.00e-54; SWISSPROT HIT: Q9ZSQ4, EVALUE 4.40e-01
cggatctgcggaggagcgtctgctgggcgagaacaacacgccgatccccatcgccgtcggcggcgccctggtgggactgggcctcctcgttctcatcgcccaccttgtcggcaggaagaggagtcacccgcacggcagcaggcacagagctgctggggtctctgttcatccccctgggcttagggtcctgagacagaggcacactttctggcaaacatttctcaaatgtgcttcatcaaatgggatgttcatcttgcagcatttgccatacacggcagagtaactatggaaatgacggtgttaattttgctaactgggttaaatattttgccaactggttaaacattcgtatttaccaaaatagaactctaagggacggtggtagtgcttctcaacattggcactggctccattgtcattcgactttaaaatgtccggggttggtttcctcattctttgctgcactcagatttaagccttacaaagggagagtctccggccttcacgcttaggagcctgaaggtcggctcaccg

SEQ ID NO: 11159 - DNA, 510 bp, Homo sapiens
  MAP TO AC008022.1; EXPRESSED IN HELA, SIGNAL = 0.71; NT HIT: gi14783117, EVALUE 1.20e-01; EST_HUMAN HIT: BE699410.1, EVALUE 8.00e-10
ggggtccctgggggtctctgagaaacccattcagggatccatgaggtcaaaaatacttttataataatactaagatgcaatttgccttttccattttcattctcacgggtgtacagtgaagctttacagaggtcacaggacctatgacattgcaacaaacttaatgcaggggcagattttaggatccagttgtcttctattaagccagacattaaagagactcactaaagtgtgaaacagcaccactcttttcacagttttttttttttttttttggctttggaaagtatagttatttttcataaaatatgttacttatgttaacatgtaatgaggttattgacaatgaactaataaatattttagtaatttttgttttactttctgatatggcaaataatatagatattaccccataaacaaaggctctttggggtctgcagtaatttttaagaatgtaaggaggtcctgagaccagagagtttcagaaccgctgctctggtgctttgc

SEQ ID NO: 11160 - DNA, 511 bp, Homo sapiens
  MAP TO AP000344.1; EXPRESSED IN HELA, SIGNAL = 0.67; NT HIT: gi6680186, EVALUE 3.10e-02; EST_HUMAN HIT: AA916543.1, EVALUE 0.00e+00; SWISSPROT HIT: O10684, EVALUE 1.20e+00
tccagccacagccaacgtgtcttactgacaatttgctttttaaaaaattgcgctctaattttaagtgagcagcccctaattacagtgatttacgaggtacctggggactgtgtgatatttgaacatggcagagggctgagcagagatggcagagatggatgggcccggtgccactcattcagcaggtcctgctaatgccggagtgttggaccgaggtggagcctcccaatgcggccgggtatgctgggggaaacggagtcagaggtgggctgcacggcaggtcgacttgttcacagggggctggtgttttgcaaacgctgggtctgccttcgtgtagggtttgagctgggagagtagcactggtcactcctgcctgtctccgtccacccccacccccacctggagggcagtgcggtatcttagggcgtcattcttccagagccgcctgaggccagcagagaggaagtgctgtaggagccgtgagtgggcggcccggcctaccattgggagc

SEQ ID NO: 11161 - DNA, 534 bp, Homo sapiens
  MAP TO AL121656.1; EXPRESSED IN HELA, SIGNAL = 0.34; NT HIT: gi11024663, EVALUE 1.00e-20; EST_HUMAN HIT: BE731321.1, EVALUE 7.50e-01; SWISSPROT HIT: Q00918, EVALUE 5.00e-09
agccgccccgttcaccaaacaaggcaggcaagttgtgcgctccaaggtgccgcaggagacccagagcggcggaggctctaggctgcaggttcaccagaagcagcagctgcaggggtaagcccacacccccttccgcccgcccgcccgcctcgcgcgcaccgcccgcggagggacctgcggggtcagggccactcggagccccgcggtggccagggcggtcgcgcgcggtgggtcggctttctcctcccgcctccgcctgctctgggcgccgcgggaagaggggagtgcggggaagcccaggaacttttactgacgtgaaactccgagtgcattgttaccgagctgcgggtaaacacaaaaggcatttctgcctggggcgtaaccttctgcgcgcaaacccaactgcttctagaagatgggcgtaaacttgaggtcactacagtttaatccctcagcatcaattaaactctgcaactgagttttaattttggtctagctaatgaaaaaaatgtttcgagggcgggctagccgtaa

SEQ ID NO: 11162 - DNA, 514 bp, Homo sapiens
  MAP TO AC010422.6; EXPRESSED IN HELA, SIGNAL = 6.6; SWISSPROT HIT: P07205, EVALUE 8.00e-73; NT HIT: gi14759696, EVALUE 0.00e+00; EST_HUMAN HIT: BE889604.1, EVALUE 0.00e+00
tgcccaggatggccaggaagggtcgctctgggctctccaaggcctcggcaaagtagttcagctccttcttcatcaaaaaaccaccagccttctgtggcagattgacttctgccatggagctgtgggctctgtgagcagtgccaaaagcatcattgacatagacttcccctagcttgggaagtgaagcttggaaagcttctaatttggctggatcagcattagccttgttcccagaagcatcttttcccttccctcttcctccacatgaaagcggaggttctcccgcaggatgacagacccagcagctgggttggtacaggctttctccacttctgggcctacacagtccttcaagaacagaacatccttgcccagcagagatttgagttctacagcaactggctctgaggagtacttgtcaggcatagggacaccatcaggccaacctaggtggcttataaggactactgacttggatccattgtccaagcagaatttgatgcttgggacagca

SEQ ID NO: 11163 - DNA, 510 bp, Homo sapiens
  MAP TO AP000553.1; EXPRESSED IN HELA, SIGNAL = 0.53; SWISSPROT HIT: P52189, EVALUE 1.60e+00; EST_HUMAN HIT: BI831230.1, EVALUE 1.00e-113; NT HIT: V00574.1, EVALUE 7.60e+00
acggccgaccctctgcactggacaccccaacaactacccatccagctccagctccatgtccaactgccatagcagcctcatggccggctgtctgggctcccacagccgggacagtgacctaggtgcccaaggctcattgccacctgtgagggacaaactcctgctggagaagaacctcaagcggctgctacagctggagagggaaggggtgagagccagggccatggctgggtggggtggactcccatggagagcccagggctagggtcagccctggcttggctgctcctgaacacttcacagagtcaccctctttctgcagaaaggcctcagtcagtcctgctcccagagggactccctgctgtgggattcgctgggtagccagaccagctttcagtggacacaggagcagcccttgtcctggttctcagggctgctgggctcaagctctggcgtgcctgaagcatcagagccgaggcctggagaacaggagccaatcttccgcaagcg

SEQ ID NO: 11164 - DNA, 565 bp, Homo sapiens
  MAP TO AL035530.11; EXPRESSED IN HELA, SIGNAL = 0.28; EST_HUMAN HIT: AW968621.1, EVALUE 0.00e+00; NT HIT: AF314817.1, EVALUE 0.00e+00; SWISSPROT HIT: P03234, EVALUE 3.20e-02
cgtgccccgggtaggctctcgtttggaaagtgaggaggctgaagacccatttccagaggaggtcttccctgcagtgcaaggcaaaaccaagaggccggtggacctgaagatcaagaacttggccccgggttcggtgctcccgcgggcactggttctcaaagccttctccagcagctcgctggacgcgtcctctgacagctcgcccgtggcttctccttccagtcccaaaagaaatttcttcagcagacatcagtctttcaccacaaagacagagaaaggcaagcccagccgagaaattaaaaagcactccatgtctttcacctttgcccctcacaaaaaagtgctgaccaaaaacctcagcgcgggctctgggaaatcgcaagactttaccagggaccacgtcccgaggggtgtcagaaaggaaagccagcttgccggccgaatcgtgcaggaaaatgggtgtgaaacccacaaccaaacagcccgcggcttctgcctgagaccccacgccctctcggtggatgatgtgttccagggagctgactgggagaggcctggaagccca

SEQ ID NO: 11165 - DNA, 500 bp, Homo sapiens
  MAP TO AC010209.13; EXPRESSED IN HELA, SIGNAL = 1.6; SWISSPROT HIT: O43903, EVALUE 8.00e-11; EST_HUMAN HIT: BG171673.1, EVALUE 3.00e-09
tgaatggacagggccctaaaacccaacttgagatatattggcagagccaggatgtcttatttttaggatgcaagttatatgtaaataccttccttacaaattggaagattttgtatcattagttgcataattcaatgtgagttaaatttattatattaataatacaagaaacaaactgtcaatttgtagtgaggctgttggcaaatgctctgaattttatagatcacagacatcacatattgtaactgctaatgaattgtaactataaacctcacagtattacagctttactttttgttttcctttgggggcagatgcttcatggaaaacatgtcatggttcgcgttggtggaggctgggatactcttcaaggatttttgcttaaatatgacccctgtcgaatattacagtttgccacattagaacaaaaaattttagcatttcaaaaaggagtttctaatgaaagtgtacctgattcgcctgccagaacacctcagcct

SEQ ID NO: 11166 - DNA, 527 bp, Homo sapiens
  MAP TO AC005390.1; EXPRESSED IN HELA, SIGNAL = 0.54; NT HIT: AE007122.1, EVALUE 7.80e+00; EST_HUMAN HIT: BE880092.1, EVALUE 1.90e-01; SWISSPROT HIT: O96013, EVALUE 1.30e-02
cctctgtgaggggaggaagggcccggccctgtggccaggggccctgggaaagaaggaaaccgccccgagaggccaggggagcccgtggctgggccggagggctcgggacagttctgggcttgtaagactcccgccagggctctgaggggagagtgggaccagggggccctcaaaccctgtgcactccgccccctcgggctcaccctgttctagaccctgaggccctgtgccagccccactggggccccgcgaccaggcaccgcagcagcggaggctggtgcagactgtcgcccacaccccttgccacgacccatcacctcctggaggctgggcgacaacacgggtccgtgccgctggggcgaggggcccgcctgccaggcaccccgcccgccaatggaaaacaaccaatggggaagaaacccacggagccgctcaatccggcagccaatcacagccaccgctcaacctagcagccaatcacagccaccgctcaacccagtagccaatcacagccaccgctcaaccca

SEQ ID NO: 11167 - DNA, 514 bp, Homo sapiens
  MAP TO AC006162.1; EXPRESSED IN HELA, SIGNAL = 1.7; EXPRESSED IN LUNG, SIGNAL = 1.1; SWISSPROT HIT: Q14929, EVALUE 8.00e-13; EST_HUMAN HIT: AW440310.1, EVALUE 0.00e+00; NT HIT: Z48051.1, EVALUE 0.00e+00
gccagaggtccatccaggggcttttggatgtgaaccatgcaccagtggccaggtcccaggaacccatatttagaactgagggtcctatggcccagaaccaggcatctgtacttaagaaccaagcacctgtgaccaggacccaggcacccatcactggaaccctctgtcaggatgccagatccaactctcatccagtgaagccctcaagactcaatgtcttctgttgcccccattgttctttgacttttagcaagaaatcctatctctccagacaccagaaggcccacctcacagagccgcccaactactgcttccattgcagcaagtctttcagctcattttccaggctggtcagacaccagcagacccactggaagcagaagagctacctttgccctatctgtgacctctcctttggggagaaagagggccttatggatcactggaggggctataaaggcaaggacctgtgccagagcagccaccataaatgccgggtgatcctgggccagtg

SEQ ID NO: 11168 - DNA, 500 bp, Homo sapiens
  MAP TO AL079302.4; EXPRESSED IN HELA, SIGNAL = 0.25; SWISSPROT HIT: O95947, EVALUE 6.10e-02; EST_HUMAN HIT: BE962786.2, EVALUE 0.00e+00; NT HIT: gi14748454, EVALUE 0.00e+00
agcctttcccggggagctggcgcacctctgcaaggatgtggacggcctggggcagaaggtgtgcaggcccgtggtgctgaaacccatccccaccaagccagccgtgcccccacccatcttcaatgtctttggctacctctagccacgcggagagggcctcagcccccacctctggcctgcaggagtgtcgaggtccccgaggcgctctcctgtgaggaggtggctgggccacagtgtggcctcttccgtttgtgtgcgcatgggagtggagggcaggattggggcagggctcctcaggcagtgacccttcagccttgcagccttggaagctgggaggctggacctggttggcccctccccaggcaggccagggcccagcagcttgtcccgctgtccctgtgcagaccataggtactgggatgttgcccttccttgccttgcagtcaccccagaagccagagagacgcatctgtttacctgccacccactctgcgagccaa

SEQ ID NO: 11169 - DNA, 503 bp, Homo sapiens
  MAP TO AC021287.4; EXPRESSED IN HELA, SIGNAL = 0.68; SWISSPROT HIT: P48997, EVALUE 1.80e-01; EST_HUMAN HIT: AL589602.1, EVALUE 9.00e-59; NT HIT: gi14732352, EVALUE 3.00e-27
tcgaccggccacaaagacccagtgcacagaattcttcctcgcccctgtcaagactgaagttcccctagctgagaaccaaagaagtggtcccgactgtgcaggcagcttgaaagaagaaacaggcccgagctaccaaagggctccccaaatgcctgactcccaaagaggacgcgtggcagaagagctgatcttaagggagaaggtagaagcggtacagcctgggcctgtggttgagctgcaactgtccctttcacaggagagacataagggcgctagtggccctttagtggctctcccgggagctgaaaaatctaagtctcctgacccagaccctaacttgtcacatgacaggattgtccacataaattcgatccctactaatgagaaagcagaccctttcctgaggtccagcaagataatccagatctccagtggcagagagttgagagtgatccaggaaagtgaagcaggagatgcgggactgccccgggtggaagtgatcc

SEQ ID NO: 11170 - DNA, 516 bp, Homo sapiens
  MAP TO AL022313.1; EXPRESSED IN HELA, SIGNAL = 0.95; NT HIT: AE002536.1, EVALUE 4.90e-01; SWISSPROT HIT: P05143, EVALUE 2.00e-03; EST_HUMAN HIT: BI547641.1, EVALUE 0.00e+00
gtaaggcctcgcacccggcccggcggctgggagacacgaggcccagaaagaggcggggcctgcgggaactctcactgcaatctgggtcacggccaggcccagaagccgtcctcagagctcatttgcccggactccaccgtttcaagctgggacttggggctccccggaatcccgagcccctccatcttatctccctcagggtctccttcctcaggggcaccggctccccgcttatgattgtagtaacctccaccctggggaaggagagcgtactccccaattttcccctaatttgagggtgcccaacacccctttgaaccaccctccaggttggaccttccagaggccttggcccctctccagcgaccgggtgggagcctgaagtgggtgtggcctgcgtgcgccccgccccctgccagggtccgcgcgccccaggctcttcggccacgtgacagggatgccgcgcacacctgccgcccgcccgcgtgcgcttcaggagccgccaggtccctacgc

SEQ ID NO: 11171 - DNA, 504 bp, Homo sapiens
  MAP TO AC011298.2; EXPRESSED IN HELA, SIGNAL = 0.83; EST_HUMAN HIT: BI769003.1, EVALUE 2.00e-26; NT HIT: gi14765802, EVALUE 7.50e+00; SWISSPROT HIT: P98167, EVALUE 5.40e-01
gggcccttgttcaggcagggacctggagggggtgcaggatctgggagaccctgactcaagaggggccaggtgcagggagcaggtattggggtccggtacccaagagcgcaggtaggaggagcggagctcggatggaggctctgaagagctgggccagtctccagcgcccagggctggccgagcgtggccagtggatccgggtgtgtcacatgacgggatgatgccaggctgtggggcagggcccctgtggccatcctggctgtgcacctgggtggcagccagtggggcgggagctggggctgcagctgtggtgttcccagaggcccaggtgccctctcccacacgcctgggccctctgggttgtgggaaccggccagctcctgctctgtcccctcaggtgtcctgcaggcacagcatctcggggggcccaggccgatggcaggtcttaacgtgtccctctccttcttctttgccaccttcaccctctgtgaggcagccaggcgg

SEQ ID NO: 11172 - DNA, 502 bp, Homo sapiens
  MAP TO AL023753.1; EXPRESSED IN HELA, SIGNAL = 0.81; NT HIT: gi16168377, EVALUE 1.00e-10; SWISSPROT HIT: O95522, EVALUE 1.00e-20
cccggccttggacagttccctgctgttcgtctcttactcagggcctctggggagagtgcagaagctccagaccatatgccccagaagttctcatccacattccgcaagtccaacacttgaagtttccaccgcctgtgggtaaaagagaagagaggctccaaatttaggaaggatttgagcttttatccacatcccggacatcagcgactctcctccctgctgcttctcccactctctgtcttttctccatccctctttctccttgaaacctgcctggtccccactgctagtgtcttcaattgccactggcaggaggcaggttcctgatccttcagtggaccctgcatggtgagcagtcctttcccagaggagctggacaatggccaaggcctctctgagcttcctccccagccccatcagaagtctctgggccacccttgggcctcccactccttctgacccagctaaccctaccctggatgcctgagccctccccacctgg

SEQ ID NO: 11173 - DNA, 533 bp, Homo sapiens
  MAP TO AL022319.2; EXPRESSED IN HELA, SIGNAL = 1.9; NT HIT: AF095743.1, EVALUE 2.00e-06; EST_HUMAN HIT: BF879321.1, EVALUE 1.00e-08; SWISSPROT HIT: P25382, EVALUE 2.20e+00
tgtggggagctctggacgggcgcttcctgctggggtgtgtgtggaggggccctgaagagaggtacctgccagtctagcctcagactctggtgcccagccaaagtcaggcaggggccatgtctgttgcattcctgggtgcccagtgccagagtgggacctggcaataaggaacgaatgaaggcctagtgccagtggggtctggtgcagagaattggattttcatctcagcaacaatgtgtagggtaaaaagagctgggctttggagtcaggcagactgcagcttgaatccaccttctgccacttccaagctgtgtgaccaggagcaaattactgcccttctctgagcctcagtttccttacctgcaaaatgggaagatggccctaacttgctgtaccttcctcaagggaagtgaggtggcaggaggggatgtaacctccgggtggatgtgcccccatgtccctgtggatgtggatggagtgaggtgggacagggagaggagctctagggtcaagcccattccatcacccgctgg

SEQ ID NO: 11174 - DNA, 525 bp, Homo sapiens
  MAP TO AL022327.17; EXPRESSED IN HELA, SIGNAL = 0.35; SWISSPROT HIT: P10161, EVALUE 4.00e-04
ggaggcactgcaggccaaggcaaaggagcagcataggtggcctggaggctgcgggcatggagcccccacctctaaccacagtcaggactgggtgaggctgggaacaagagggaggaaagctggacagaggcactgagcctgagtgagcggggccgctccgcccgcacgcctggagtagccccttcctcggtgccgacgaggcactgagccccatgggagagcagggcaggcctgggccctcagcgggaccgagcatggtcacagagcaggatcggtgtcctccatagaccccgctgcactggcggcctgcagctccaccctcgcccagtgaccaggtggcaaagcatccacatggcgggcggccaccaaagtccccaggggcgggcgtggctcacctgcctccacaggagctcgaagttgccgatgtcacagctgcggtccacggccaccttgatggtgtcctcctgcacctgtgcacacagctgggccgtgaccggcgtggacgggtgcatggtggggctggaa

SEQ ID NO: 11175 - DNA, 555 bp, Homo sapiens
  MAP TO AL035701.13; EXPRESSED IN HELA, SIGNAL = 1.1; SWISSPROT HIT: P33906, EVALUE 4.00e+00; EST_HUMAN HIT: BF977895.1, EVALUE 3.10e+00; NT HIT: AF233289.1, EVALUE 1.30e-01
cctggggtgagaaagctcaatggactcaaattggccatagcagaaagcacatttcctttaggcagaatgatagtgatgacaaatatgcagctcgtttattcttcattagttatttagtacacttagcattaacaccagttccttcgaaactcatcaaaatgtagcattgtctttatctgcaacaccctgactcagaggatgcccactctctctttccctctttgaagttggctatctgggctcctcagtatttggatatcaggtatcagcaggttcatctgctttgagatgtttctcttctatactggaggttctagagaagtgttagagagctactaaagtggtcagacaaggaggatttggtcatgatggagtccgcagagaggggatgagaagggaagaaactagacccaccgtgaataaggaaggacttgggccaggtgaaggtcatttctgagagtcaggtgctggggttgggtcccaacctaagtaagatgacagtgccagggcagagcagtaggggcagggagaggatgaagcaggggaagccctgcc

SEQ ID NO: 11176 - DNA, 501 bp, Homo sapiens
  MAP TO Z84483.1; EXPRESSED IN HELA, SIGNAL = 2.2; SWISSPROT HIT: Q15323, EVALUE 3.10e-01; EST_HUMAN HIT: BF572269.1, EVALUE 4.50e-02; NT HIT: gi15301770, EVALUE 0.00e+00
tgacgagtggggcatccagcatgaccgggttgtctgtacagcactggcccggctggctgcgactgtcgctgcctccactgctttcgctgtgaatggagcagacctcaggctcgctcaggtctgtgaggacgctctcactgctggtcgtgttcctcatccccgtgcctcccggtgacccatttctgtctcctcgagggagcagcgtgtagaggtcgtccacacgagaccacctgcgactggttctttggaaagtccatttgttgctgatacaaagatcttcctcatcggagtcgtcaccctgcagagcaccaaggaaaatgctcattagcagacagcgtggctgaagcaggaactctgggtgctctgagggcagccctgtgtggtcctccacctccctcccctctgtcctcccatgcacaggtgtgagcttcttgggcacctctaagctgtccttctaccacttgcactgtcttgtacatacccttcctcccagtggccaga

SEQ ID NO: 11177 - DNA, 522 bp, Homo sapiens
  MAP TO U80017.1; EXPRESSED IN HELA, SIGNAL = 0.91; NT HIT: U80017.1, EVALUE 0.00e+00; SWISSPROT HIT: Q13075, EVALUE 2.00e-98; EST_HUMAN HIT: AI820932.1, EVALUE 0.00e+00
acagggccagggacatccgccgatacctagagaccattctagagatcaaagcatttcccttttataatactgtctgtatattacggaagctcttttcacataatatgactcgtctgcgaaagtttatggtttactttggaaagaaccaaagtttgcagaagatacagaaaactcctctctttgtggcggcgatctgtgctcattggtttcagtatccttttgacccatcctttgatgatgtggctgttttcaagtcctatatggaacgcctttccttaaggaacaaagcgacagctgaaattctcaaagcaactgtgtcctcctgtggtgagctggccttgaaagggtttttttcatgttgctttgagtttaatgatgatgatctcgcagaagcaggggttgatgaagatgaagatctaaccatgtgcttgatgagcaaatttacagcccagagactaagaccattctaccggtttttaagtcctgccttccaagaatttcttgcggggatgaggctgattg

SEQ ID NO: 11178 - DNA, 526 bp, Homo sapiens
  MAP TO AC010271.5; EXPRESSED IN HELA, SIGNAL = 0.64; SWISSPROT HIT: Q60963, EVALUE 2.20e+00; NT HIT: gi15718683, EVALUE 0.00e+00; EST_HUMAN HIT: AA426355.1, EVALUE 1.00e-114
gggggactctggcctggatgacttctttctggacattgacacatctgcggtagaaaaggagcctgcacgggccccaccagagcctcctcacaacctcttctgtgccccaggttcttgggagtggaatgaactggatcacatcatggaaatcattctggggtcctaaaactgtgatagaggggatcgatccttcctcatgtcatcttcggtggcctggatccctgaatgcaactctgggtgtgtgtttttgtgggggctcgaagcagtgactatggcctcctttgttcccatttcagggttccacaaactgtcttgcatgtgtgtgtgtgtctggttaccccgaccttctgtgaaggtgggtcttcctgaattaatttatctattccaaatgccttaacgagactctgtttctgggagtctgattttccacttacacatttcttccacctttcctgctagttcccactcccctgtgaccactggggcctcagggaagataaagaaagctgggcctgtcgaaggatga

SEQ ID NO: 11179 - DNA, 501 bp, Homo sapiens
  MAP TO AC004032.7; EXPRESSED IN HELA, SIGNAL = 0.43; SWISSPROT HIT: Q9W734, EVALUE 1.60e+00; NT HIT: gi11466457, EVALUE 4.80e-01; EST_HUMAN HIT: BG260873.1, EVALUE 1.80e-01
tgcctccatgggccagaactcaatcacacagccacagctaagagcaaaggagactgggaaatgaggcctccttgtgtgccaagaagaaagcgattgtagtgaagaatccgtctctgccccagagggaatggacgaatgaacaaatggaatgatctctcacataccttccaactcaagatctcgtaaaattccaagtcctgctggtcctggaaatccgatgccaattgctgcctgccctgtttcatctccactgtcggaataactgaaggcaagggctcagggctggaaatgtgcagccccagggacagacagaaagagctgccagggcctgctggccccagataaaagcagcccgagagatctgggctttcctgagagacacctgtgtggaacagttctcactcctgcagagcaagggggaattgaatccatttgctcaggatgacttcatactgggttctacctgggatacagcagacttgggaaaattgggggcagccc

SEQ ID NO: 11180 - DNA, 506 bp, Homo sapiens
  MAP TO AL133354.8; EXPRESSED IN HELA, SIGNAL = 0.38; SWISSPROT HIT: Q01299, EVALUE 4.70e+00; NT HIT: gi14771753, EVALUE 0.00e+00; EST_HUMAN HIT: BG772915.1, EVALUE 0.00e+00
tgtgaagcaggtggcgcagtgcctgatgtgttcttctcatcaagcatttactactaatctagtgtgccagacgctctgctaggggctgagaatggagtgacggagaagccacagtcccccatctatcagaacgcaggcacataccagggcgcatacgtgagagcggcatttgcagtgcgagtgcatcgccgctcctgggcaccttcagaacacgcgtgggtttgggggagaagagctgggtcacttgccaggatttgctcgctgctgcactctgtactgccagcctcctggcaagcttatttcaccgtgagccagatcaaagccagaaggcagaggagcactggctggtgcatggtgacccgaagtcctgcgcccctctccaaccaaaactcgcaatgcttgagggagcagagctcctggaccagccgccagagcacctgctggtggagcttgttgtctggcttctggaactccccctggttcgccgcctgggtggcattgatgca

SEQ ID NO: 11181 - DNA, 500 bp, Homo sapiens
  MAP TO AP000517.1; EXPRESSED IN HELA, SIGNAL = 0.96; EST_HUMAN HIT: BI906732.1, EVALUE 0.00e+00; SWISSPROT HIT: Q02084, EVALUE 5.00e-06; NT HIT: gi14761275, EVALUE 0.00e+00
ggagagtgggcatcgccctggattatgaagggggcaccgtgactttcaccaacgcagagtcacaggaactcatctacaccttcactgccaccttcacccggcgcctggtccccttcctgtggctcaagtggccaggaacacgcctcctgctaagaccctgagccctgacatctgcccccagccccaaccctcagatgcttcacttctttggaattccaggactctcaatggggggacgggatgcctggcctaagcacctggagcaggggaccccatatccactggtagccacctccccattgctgtggccccctgaaatctcactcagtgctgttgctccatctactgccctaatggggctcttttcccacctcctgctggtttcccgagggaacttctgaccctggagtccatgagggctcctttcctttttgaccacgaccttggccctagctctgcactctctggaataagggcccgatgcagcattttcttgccca

SEQ ID NO: 11182 - DNA, 504 bp, Homo sapiens
  MAP TO AC007663.28; EXPRESSED IN HELA, SIGNAL = 0.46; SWISSPROT HIT: P18835, EVALUE 7.00e-01; EST_HUMAN HIT: BI919029.1, EVALUE 1.80e-01
caccagctctgtgcaaggcccttagataaagggcagcctggggctgacctcacacaaggataggaagccccaggtgagcaatgggtcagtactgggtcgacaccagatatccctgggcagaggccctggcccaaggatggggaagggaagaggacaagggatggggagtaagaaatgagggcccctcgcctccctgggacagcccaaggtgcagcctttcctcattcctggaggtttcaggatatccctgtgctgcatcctcccattgtacggtgagggggtgactgccaacccactcctcagatgaggcactgactgaggcaagtgccttgctggccaccttgcaaggccaggagacagtgcacacaatctggactccaagatctctgcccacccccatcttcatcaccactatccttatcaccatcatcatccccaggcgaccagagcagaccctgagccccagggatgacacagcagggaggggcagccactctgggctcc

SEQ ID NO: 11183 - DNA, 518 bp, Homo sapiens
  MAP TO AP001067.1; EXPRESSED IN HELA, SIGNAL = 0.84; EST_HUMAN HIT: BF792384.1, EVALUE 7.30e-01; NT HIT: AF133088.1, EVALUE 4.90e-01; SWISSPROT HIT: P02833, EVALUE 5.50e-01
ctgagcccagggagaggccgggccgggtgggtgtgggggattcacagagaagcacccccggggcctggagacgctgaggctggcaggagaaccccacaacagcagaccccgcacagcgggaagtcaggactgcctccgcccctggtgctgtcagcctggatgcagctcaaggccagagtcccgaagctcccaccccacgcggcacgttgaagttcttcccacagggtttgccagatatgcaaaaaagacctctgagagggcacattggtgactttatttgttgacagactgatcactcacatggggcaggacacagtgaccaccggctggccagcatggagatgagggtgtgggagagatgcatgcctggagggaatcggcatgaaagctcagcattgctggctggaggtgcagtggctatgggcagaggagactcagacagggctcagggctgcaaggattttcggaagtcagagatggccctggaacaactctggagaaacgggacctgcccgtca

SEQ ID NO: 11184 - DNA, 511 bp, Homo sapiens
  MAP TO AL033539.17; EXPRESSED IN HELA, SIGNAL =   1; EST_HUMAN HIT: BI828668.1, EVALUE 1.00e-91; NT HIT: AJ237666.1, EVALUE 1.00e-35; SWISSPROT HIT: P51858, EVALUE 9.00e-12
tctaggccgctctggcaccgtttatttaaactgtgcaaccatctggcccaggtgccgtagagattgatcagtagcacaaggccaccacaagcacaaccgccacccggccatcccagctatttcctccagcattctagacatcatggcgtccgagggtgggtccaacgggcttcgagtgttcgggagataatgcacacttcgcagtggatcttctcggggccccgagcgttgcccgcccattaggtggcgccggtcccctcgaacaggtcgctcaacaactcccgcccagcagccgcccttactgcgcgcgcgcagacttcggcgtctacttccggtgtggcccaggcggggtccgcagaaccagctatgtcggcctacggcatgcccatgtacaagagcggggacctggtgtttgccaagttaaagggctatgcccactggccggcgaggatagagcacatgacccagcccaaccgctaccaggtgtttttcttcgggacccacgagacgg

SEQ ID NO: 11185 - DNA, 501 bp, Homo sapiens
  MAP TO AC005803.1; EXPRESSED IN HELA, SIGNAL = 1.2; SWISSPROT HIT: P35499, EVALUE 2.00e-13; EST_HUMAN HIT: BE298432.1, EVALUE 0.00e+00; NT HIT: gi14771217, EVALUE 0.00e+00
ctgatccctccaccgcaggccagctcctcctcaagtgaggggcagagattcgaatgttctgacctcccccaggccaaaaggaggggcgacagggcccagaggaggtcagagcaacttgcaggttaaatcttggaggcaggggcctcagacccagcatggagcccctgagcgcaattcccatttcccatggtctgggaacgcaggcgctcgggcctgggtgtcagccccagtgtggccaaatcctgtcccccatcagggagccaggcacagtcccagattcaaagccctcctccctcactctgtgtgcaggcaccacgggggagctctggggactatgccgagactcagtgggccaccccgatgctgcctgctagacaagagactccttgacacctgggcgcacagtctgccctgggggaggggcgggaggccaggcagtgtctgaggggctgatgggcatcagccccatagtgggtccggcgtcccctgcctcgcccttct

SEQ ID NO: 11186 - DNA, 513 bp, Homo sapiens
  MAP TO AC004201.1; EXPRESSED IN HELA, SIGNAL = 1.2; EXPRESSED IN LUNG, SIGNAL =   1; SWISSPROT HIT: Q9QZZ4, EVALUE 3.70e-02; EST_HUMAN HIT: BG386787.1, EVALUE 5.00e-39; NT HIT: U53588.1, EVALUE 0.00e+00
aggtgcgaatcagccgcgagctgcgagagaagctggctgagcctggggcccgtgcggggagacgccgaggggggcgcatccccaccatgggctgcctggacctgcccggagaggtgaggctgggcgcgcgtcgcggagttgttggtggaagcgggaggttcccggggaagccgggaatggcacgtctggagccggaggccctgtggaagtttaggcaaaggatggggtggggagagaaaagcaaaggatgagggggcgaggaccctgggtcctcaaggtgagaggcgcccggaaggacgatggatggagttgacacttggtccacaggggaggaggctggaccgatgcctgagccttgtgagaggggctggagagaagagactggggaggcagagaaggggtaccggatagaacgcggagagccctggagtcgccgcgaagggcatgggaactgcagaagttttggcagggcagccgcaggcgcccgggaggaggagagctggcggaggggag

SEQ ID NO: 11187 - DNA, 545 bp, Homo sapiens
  MAP TO Z86090.10; EXPRESSED IN HELA, SIGNAL = 0.83; SWISSPROT HIT: P30558, EVALUE 3.90e+00
tgcagagctgcgtgaactgccatctatagctctttttgcaggcacctgacataagacagatacataagccaaagctctatctggtgtacttttgttcaggcccaggagcttaagataggaacaaagcatgttgtgtcaaatcaaactctagtggttacagatggacagatcctgtcatcagtaacaaaatttacagttgccagtaatggcctggctactgtctagtcaggtcctttgttgcatttagtctaccattcacacaggctactgatttttagagtgatcagaataagctagcctaccattacccaccaccctaaattggtttacataatggctccaacacaaaaacttctgccctcaaggactggattaaagaggtaggggtatgtgtgggtgggtacatgtgtaaattcatggttctgttctaggaccaccaaaattttacattggttatgttgtttcttagcattctctacattctaatgagatactagatgtagtccacaacattaaaccacaggacagaccatcaggaggcacga

SEQ ID NO: 11188 - DNA, 500 bp, Homo sapiens
  MAP TO AP000557.1; EXPRESSED IN HELA, SIGNAL = 0.56; NT HIT: AB051453.1, EVALUE 0.00e+00; SWISSPROT HIT: O32848, EVALUE 4.10e-01; EST_HUMAN HIT: BG774372.1, EVALUE 4.50e-02
agactgacggcgagcaggcggcgcgcatccgctatctgcaggcggcgctggaggtggagcgccagctcttcctcaagtacatcctggcgcacttccgcgggcacccggctttgtcgggatcaccggacccccaagctgtgcattccttggaagaaccgctgccccagacctccagcggctcttgccacgcccccaaacccgcctgccaactcggatctctagacagcctgagtgctgaagtcggtgtgcgctcccgctcgctaggcctggtgtcctctgcgtgctccagctccccagacggcctgctctccacgcacgccagctcccttgattgcttcgcacctgcgtgttcccgctcgcttgacagcacccggagcctccccaaggcctccaaatccgaggagcggccctcctcaccagacacctccacccctggctcccggaggctctcgccgccaccatcgccactcccgccgccaccaccaccgtcagcccacagg

SEQ ID NO: 11189 - DNA, 573 bp, Homo sapiens
  MAP TO AC004908.1; EXPRESSED IN HELA, SIGNAL =   1; NT HIT: gi14760087, EVALUE 2.00e-13; SWISSPROT HIT: P52742, EVALUE 6.00e-30; EST_HUMAN HIT: AI539590.1, EVALUE 0.00e+00
tgccatctatgcggaaaagccttcaatcactcttctgtccttagacgacatgagagaactcacactggagagaaaccatatgaatgcaatatatgtggtaaagccttcaatagaagttacaactttagacttcatagaagagttcacactggagagaaaccatatgtatgtcctctatgtgggaaagcctttagtaaattttttaaccttagacaacatgagagaactcacactaaaaaagcaatgaatatgtaagaatcatcagctgtagcgttaacactaaatacaccaaggacaaacatactacaggaatattatgtctgtaatcagtgtggaaaagcctttatttatatttaccactttgctcaacctaaatgaattcaaggtagagagaatccagatgtatttaatgtttatggcacaaacttcagactctaggctgaccatatacaacgtgagagaatgaaactatagatcaaaggaatgtggaggagtcttcatccacagctctgttaaataaatgggagaaatcacatcacgaaaattctgtgcctgtcgtcagtgtgaaaatgc

SEQ ID NO: 11190 - DNA, 532 bp, Homo sapiens
  MAP TO AF196970.1; EXPRESSED IN HELA, SIGNAL = 1.8; NT HIT: gi4507320, EVALUE 3.00e-79; SWISSPROT HIT: P05205, EVALUE 1.00e-05; EST_HUMAN HIT: R59251.1, EVALUE 5.00e-79
aaggtggggccaacgggatgtgcagagggtgggtgtcggaagtgtgaacaaaagagaagtcaaggatgactccaggagttccggtctgaacagctagaagggagggagctgatgatggggaagaccaaggagaggagtgggtttgggagattaattaaaagttggaacagtttggacagacagtaagggggagaggaggatttgaacctagtaatcctcactctagagcccatgctttttaatcaccgcatgaagtcattccagaaaaggggtggggtggggtaggtgttatccatcagctttgggatggaagccccatgaaggctggcccaaagatctcactacttacggtacccccgtccccctacccacccccaacaggaacaggaatattacctggtgaaatggcgtggatatccagactcagagagcacctgggagccacggcagaatctcaagtgtgtgcgtatcctcaagcagttccacaaggacttagaaagggagctgctccggcggcaccaccggtcaaaga

SEQ ID NO: 11191 - DNA, 582 bp, Homo sapiens
  MAP TO AC003108.1; EXPRESSED IN LUNG, SIGNAL = 1.3; EXPRESSED IN HELA, SIGNAL = 1.3; NT HIT: gi11432440, EVALUE 0.00e+00; SWISSPROT HIT: O43303, EVALUE 1.00e-110; EST_HUMAN HIT: AI909701.1, EVALUE 0.00e+00
tgcaccgaagacgttccaggacatcatcagcgtgtcacatacttataaataacccaataaatgcctgtgaattaagccctaaaggaaaagaacaggcaatggacttaattattcaagatactgatgaaaacacaaatgtgcccgaaattatgccaaagttaccaactgatttagcgggagtttgttcaagcaaggtttatgtgggcaaaaatacatctgaagtcaaagaagatgtggttttaggtaaatcaaatcaggtatgtcaatcttcaggaaatcatttagaaaataaagttactcatggacttgttactgtggaaggtcagttaacatccgatgagagaggcgcacacataatgaacagtacctgtgctgcgatgccaaagctgcatgaaccatatgccagcagtcagtgtatagcaagtccaaactttggaactgtgagtggactcaagccagccagtatgttagagaaaaactgcagtttgcaaacagaactgaataagtcttatgatgtaaaaaacccttctcctttattgatgcaaaaccagaatacgagacagcagatggacacacctatgg

SEQ ID NO: 11192 - DNA, 500 bp, Homo sapiens
  MAP TO AC011530.5; EXPRESSED IN HELA, SIGNAL = 0.89; NT HIT: gi15304769, EVALUE 0.00e+00; SWISSPROT HIT: Q01656, EVALUE 2.00e-23; EST_HUMAN HIT: BE888501.1, EVALUE 3.00e-03
ggatgccctcgaagtccgggttctcctcgtaggagtcgcgcccagcaccaccttcctcctcctcgtcgccctcctcctcactaaactggtagaagcccagcgggctgacctgcgtggcggccgagatgcgggctatctgggcccgcaggtagttggcctcgttgcccgggaagggtgggtagctgacgactggcgtgtccaggtagcctgtgaagaacttcttgatctttcgggcgttcacgatctgggctggagtgacgtggggcagccgcgtccatggcaggcccggctcgttgcacacaaagtacaggtacttgttggcgcctgagcggctctcctccttggggatcacgggcggcggcttccatacggacttagggacgatgtccacggccttctcctcgtcctcctcgccctcctcctcgccgtgcgcctccatgacctcgccaccttccgtcatctcctccacctcctcctcctctgcctcctcctcgccctcc

SEQ ID NO: 11193 - DNA, 507 bp, Homo sapiens
  MAP TO AP000884.1; EXPRESSED IN LUNG, SIGNAL =   1; EXPRESSED IN PLACENTA, SIGNAL = 1.4; EXPRESSED IN HELA, SIGNAL = 0.73; SWISSPROT HIT: P56750, EVALUE 1.00e-38; NT HIT: AL163252.2, EVALUE 0.00e+00; EST_HUMAN HIT: BF896868.1, EVALUE 4.50e-02
ttggagcagcgattgggtccaacaatagtcaatgcatttaatacacctgaagtcagaatgtccaagtaagtcattttcattcctaccaccagtaacaaattgaaactttcgtatcaatgtaaatctagacataaagcaagttctcctgcctcacatacttacagtttctagcaggactttataaaaaacattgaccatagtccatacttggagccaaaaggaggcattagacataactggtggaggtcttactaagcattgtcgtatttcttcgcttatctgtgtgtggcacacggtagccaggcactggatatctgtacccttgcttctttctgttgcagcagcaaaatccacaaagcagaccccctccaatgaagaggacagcagcgcttgcccagccaaggaaaagtgctgctcccagctctcgtttctgacctatgtggatggctgggttgtagaaatctctgatgattatattggctgtccagctcaccggaatcagaacga

SEQ ID NO: 11194 - DNA, 547 bp, Homo sapiens
  MAP TO AC008022.1; EXPRESSED IN HELA, SIGNAL = 0.41; NT HIT: AF142693.1, EVALUE 5.20e-01; SWISSPROT HIT: P18302, EVALUE 1.30e+00
  unsure 103
  unsure 212
  unsure 245
cctggtgtgcccccaagctggagcactatgacatctttcatttggaatttgaatcctaggtggaataacgctggaggcagttggccctgatacttcctgaccnaaggggacttgcagttgattcctgctatgtagtccctgggaaattccttcagagcctgggttcttcaaatttttattgggttttctgaaggatcccatatctctccaantgcgctcccctgtaggaacttaattagaattantcttcaaccaaagaatctgatatcgaaatgtgtctgagaagcaaaccaggtctttactgaaaactcattagaggcattccatcacctacgggaaagacaccaagctccgtaatacaagccccaagaccctccattactctgttccaggctgcctatctgcaccttctcgccctactccttaccttgcccttacatctctgcccttctgaattatttgaggtttcacataacctatgaggtttcatgcctcaatactcatgagtcccctctgtagaagccctccctgctcccatccagcccac

SEQ ID NO: 11195 - DNA, 525 bp, Homo sapiens
  MAP TO AL121985.13; EXPRESSED IN PLACENTA, SIGNAL = 3.7; EXPRESSED IN HELA, SIGNAL = 3.5; EXPRESSED IN LUNG, SIGNAL = 3.7; NT HIT: AB026898.1, EVALUE 0.00e+00; EST_HUMAN HIT: BG501905.1, EVALUE 0.00e+00; SWISSPROT HIT: P10267, EVALUE 6.00e-11
gcaggagttgctgatggcctcgcaaatcttaaccctgtcacttggattaagaccatcagaagtactatgattataaatctcatattaatcattgtgtgcctgttttgtctgttgttagtctgcaggtgtacccaacagctccgaagagacagtgacatcgagaacgggccatgatgacgatggcggttttgtcgaaaagaaaagggggaaatgtggggaaaagcaagagagatgagattgttactgtgtctgtatagaaagaagtagacataggagactccattttgttctgtactaagaaaaattcttctgccttgagatgctgttaatctatgaccttacccccaaccccgtgctctctgaaacatgtgctgtgtcaaactcagggttaaatggattaagggcggtgcaagatgtgctttgttaaacagatgcttgaaggcagcatgctcattaagagtcatcaccactccctaatctcaagtacccagggacacaaacactgcgaaagaccgcagggacctc

SEQ ID NO: 11196 - DNA, 539 bp, Homo sapiens
  MAP TO AC008456.4; EXPRESSED IN HELA, SIGNAL = 0.88; SWISSPROT HIT: O04425, EVALUE 1.30e+00; NT HIT: gi14722722, EVALUE 6.00e-13; EST_HUMAN HIT: AW850444.1, EVALUE 7.60e-01
gggagcttcagctggctgggagcttcagctggcaggtagctcaagagcccagcctctggagtcgaggagacctgggtttgagttccaactctactccctacacactgggtgatcatggccaatttatgtagactttttgtacctcaatgtcctcagccataagttgggttgatgatagcatcccacagaattattgggaggatgaaatgagataccgcactcaaagataaagcagaagcatttatagtgagagttcaggaaatgtgaacccttactatgagtttctgattctcatctccttttccttcctttctccacgctcacagtgggatgatcaaaagatagtggaaaatgaccattgtcaatgcttagaatttcagggctggaggaaaatatctggcttcacttattgcaaaagtaccttcatattccgcataagacaacttggtattatttccaacattgagagtaatattccactttccttctttggccacaaggtcaccatcaaaccctcaagcaaggctctggggacgtcc

SEQ ID NO: 11197 - DNA, 528 bp, Homo sapiens
  MAP TO AL033532.12; EXPRESSED IN HELA, SIGNAL = 0.23; NT HIT: gi13637712, EVALUE 1.00e-112; SWISSPROT HIT: O70528, EVALUE 7.40e-01; EST_HUMAN HIT: AA098901.1, EVALUE 1.00e-112
tctgaggccagagggccagggctggggtttcagaaagcagatttctggaccgtggtgtcccctgtcccattcttttgggacacataccagggcaccagggagctctgctggccttgtcagcatggccgtgagctactgagtgacaggaagctccctggcaatcacagcggagcctctggaatgtttcttccgaaaggaaatctgtgctttgagccttaccgccagtcagcctgagaactcacccacaaacaggccagagtggctgagaggaccacagatttcatctgcctcggaggggctatcctaacaatgcccaagttacctgtgatcctgttggaaatgctgaagagcctggaagtcctctgtcgttgcacaaatggttcccgataataccggtccccaaagcacatgcccagtagttctttgcgaactgtcttgttccagagtccatagatcagggggtggcagacagcgctggcaaaggacagccatgtggcccaagtctccaggctcggggagacggagctt

SEQ ID NO: 11198 - DNA, 529 bp, Homo sapiens
  MAP TO AL121845.12; EXPRESSED IN HELA, SIGNAL = 0.66; SWISSPROT HIT: Q66799, EVALUE 7.40e-01; NT HIT: gi14732499, EVALUE 5.00e-01
acgggcctctgcgcatcaaggaagagcaggtttcaccgtctcagtacggagggagcgagctgccttctgccaaggacggtgcagtacagaactctttctcagagcagagtgctggtgatgcctggcagcccacgggccgaaggaagaatcggaaaaacaaagagaccgtccggcacatcacacagcaggtggaagatgacagccgggccagctccccggtgccgtccttcctgccgacgtcggggtggccgttcagcagccgagactcaagtaagcctttcactcgttacgggggctcagctgccccagtgtgtccaggcctcacggccgcgtgctgtgcggaggcagtgacgcatgtccaggctcacactggtggctttctagggtcacttcctcttacaggaggttgtcgtgaccgctgggaatgcagccaatgcatctcaaagggcagggcatcaccagggcccttggagaccctgtgtatctgtccccatcagcacggcactggtgtcacccacacacgggggct

SEQ ID NO: 11199 - DNA, 509 bp, Homo sapiens
  MAP TO AL162261.1; EXPRESSED IN HELA, SIGNAL = 2.8; NT HIT: AF134858.1, EVALUE 4.00e-32; SWISSPROT HIT: P24271, EVALUE 3.60e+00; EST_HUMAN HIT: BE878133.1, EVALUE 1.00e-112
cggttcagaagggggacccgcccgaggggcagcgcgaggccctggcccctgtgccgcagccgccgccaccgcccgcccgcccgcccgcccgccgcgcctccccggatctcagactctccgggttccgaagcccccgccgaagaccctttggagctggtgtctgagatgggcgaattcagcaacgaggacatctgccgctacatcgaccgcagcttctccttctggaaggagaaggaggcagagctgtttgacatctgagcagcggaattcggaattcgcagttcaccctcgagcgtcttaacgtgggcctggacgcctgtctgacgccctccagaggcgtgaagcagcgggaagaacccaggactgtggccttgagcagcccggagggcccaggaccaggctgcctcagcctctgaggtcccatcgtgagcaggctgtgtggggcgttggtcggataggcagggcaggcacagaacaaaccaggtgtccccctctggccccgtggtctt

SEQ ID NO: 11200 - DNA, 528 bp, Homo sapiens
  MAP TO AF186997.2; EXPRESSED IN HELA, SIGNAL = 1.7; SWISSPROT HIT: Q92985, EVALUE 1.70e+00; EST_HUMAN HIT: BE242203.1, EVALUE 8.00e-44; NT HIT: AB018709.1, EVALUE 1.30e-01
ccagggccaaggccaggtatgcacaggtaatgcctgggcccagaaagcagcatctggctggggccgggacagcccagacccaactccccaggtgtcagccaccatcacagtcatggcggcccacccggaagaggaccatcggacgatctacctgagcagccctgactctgcagtgggggtgcagtggccacgagggcctgtgagccagaactccgaggtaggtgaagaggagacttcggctgggcaggggctgagctccagggaaagccatgctcacagtgccagcgagagcaagcccaaggagaggcccgccattccccccaagttgtccaagagtagccctgtagggtccccggtgtcacgttctgctggagggcccccagtgtcaccgctggctgaccttagtgatgggagctctggcggcagcagcattgggccccagcctccatcccaaggtcctgctgaccccgctccttcctgccggaccaacggtgtcgctatcagtgacccatccaggtgtccccagcc

SEQ ID NO: 11201 - DNA, 515 bp, Homo sapiens
  MAP TO AC012122.1; EXPRESSED IN HELA, SIGNAL = 1.5; SWISSPROT HIT: P02452, EVALUE 2.00e-04; EST_HUMAN HIT: BI756580.1, EVALUE 4.60e-02; NT HIT: gi14165453, EVALUE 3.10e-02
agggaggggaggccctggagcttcacgcgggaaccacagccaccactaagcctttctggcccgcccgccccatcgcagggagaggatgggggaggggcaggacgggtgcctggacagctgggttcctcccgcaggtgcttctgactccggcatggaggaagcgcccgctttctcggcccaggcccgcagccagggctgctccgccagctgcgccccaggtaagccgggccagcgtgggggagaagcggggcctgggctgcggatggggccgccctgacccgcatctccccccagggcaaaagccccgcaaggcagtatgagctggagccgccagcctgaggacctcttttaagatgacccgtacggacgctccggacctgctggtgtcgaccgtgtaccaggacatcaaggtggcgaccccgggacccgcttccaagcgctcgccatgtgagcgatccgtggcccggcctgctgagcccgcgcctttcaacaagcgccactgccccagcttcgac

SEQ ID NO: 11202 - DNA, 506 bp, Homo sapiens
  MAP TO AL031723.37; EXPRESSED IN HELA, SIGNAL = 0.88; SWISSPROT HIT: Q07092, EVALUE 1.00e-03; NT HIT: gi5174464, EVALUE 4.00e-26; EST_HUMAN HIT: AA234609.1, EVALUE 7.00e-38
tccgcaccaccacgatcagcttcgtgtccggggacatggcgtggatgcggcggggggcctctcgcgtcacgaagtagctgggggtcttctccatggtgatctgcccatccagggttcggggcatcagactcctgcgggacgggtgcaaggagagggggcctgagcctccccagccctagaccggcccccaggggcccgggaccaaggcccccttatgcccgggaagcccaggcctccagggcgagcaagtcttcctccctgctcgggcccacccctgctagcgtgcgcggctgggcagcctggaacatggactgtgagggtgcccagcccggcacctgcctgcagcccggcctgttccgccggcctgccccgcctgctgctgcactgaggattagggtgacggtcgctggtcgggaggcccaaatgctcctcaccacccacatatcttccctgtgcaatccctgccgtcctcgcttccagagccagctccctcccaccggacccac

SEQ ID NO: 11203 - DNA, 506 bp, Homo sapiens
  MAP TO AC009123.6; EXPRESSED IN HELA, SIGNAL = 0.66; SWISSPROT HIT: P34240, EVALUE 3.60e+00; NT HIT: gi14775529, EVALUE 1.00e-100; EST_HUMAN HIT: AW409885.1, EVALUE 1.00e-100
acccaccttccgcaccctccggtagtaaaggcccttgatggacggcgtctccatggggctggacaggagctgactccaagggctgtgggaaccatagtggtggtgtctgggatgcaggcccccgtctctggaaggcatgggcattgctgaagaccaccaggtaggaagcgctgggtttaccagtctgacacccaagggacaaagagcaagcaaaaggaagggaaatcagtcttggggcaaagagtcctggatgtcacgactgcagatgttcttacgtgtgctttcctgtgactgcatctgcatggcttgttcttttaacctttagttcaacacatatttattgagcacctactatgtgcttgggatacatcagtgaaaaaaacccttccctggtggaacctctaccgacatctcagaaggatgtctccagaatagacgttgcacggatgggggcttgagtaattcagtcctgagctggacaagtcggagcggtgccacttctgggc

SEQ ID NO: 11204 - DNA, 500 bp, Homo sapiens
  MAP TO AL136450.1; EXPRESSED IN HELA, SIGNAL = 0.8; EXPRESSED IN LUNG, SIGNAL = 0.95; SWISSPROT HIT: P49907, EVALUE 3.10e-01; NT HIT: AF316150.1, EVALUE 1.90e+00; EST_HUMAN HIT: AA303144.1, EVALUE 7.00e-72
ccggttcccttgtcggctccagctcctgccccgctttcagtcccagtttcagctcctcccttggctctcatccaggctcctgtgcccccttcagctccgaccttggttctcgctcccgtccccactccggttctggctcccatgccagcatccacgcctccagcggcccctgcccctccgtctgtgcccatgcccactccaaccccatcttccggcccaccttctacccccaccctcatccccgcctttgctcctacaccggtgcctgcacccaccccagcccccatctttactccagcccctacacccatgcctgctgccacgccagctgccattcccacctctgcacccatcccggcctccttcagtttgagtagagtgtgctttcctgcagctcaggcaccagctatgcaaaaagtccccctgtcctttcagccagggacagtgctgaccccgagccagccgctggtatatatcccgcctccaagctgtgggcagcc

SEQ ID NO: 11205 - DNA, 578 bp, Homo sapiens
  MAP TO AC002480.1; EXPRESSED IN HELA, SIGNAL =  11; SWISSPROT HIT: P19039, EVALUE 1.00e-86; NT HIT: gi16161358, EVALUE 0.00e+00; EST_HUMAN HIT: AU142704.1, EVALUE 0.00e+00
gcgacgttgccacgacgaacatccttgacagacacattcttgacattgaagcccacattgtccccaggaagagcttcactcaaagcttcatggtgcatttcgacagattttacttccgttgtaacgttgactggagcaaaggtgaccaccataccgggtttgagaacaccagtctccactcggccaacaggaacagtaccaataccaccaattttgtagacatcctggagaggcaggcgcaagggcttgtcagttggatgagttggtggtaggatgcagtccagagcctcaagcagcgtggttccactggcattgccatccttacgggtgactttccatcccttgaaccaaggcatgttagcacttggctccagcatgttgtcaccattccaaccagaaattggcacaaatgctactgtgtcggggttgtagccaattttcttaatgtaagtgctgattccttaacaatttcctcatatctcttctggctgtagggtggctcagtggaatccattttgttaacaccgacaattagttgtttcacacccagtgtgtaagccagaagggcatgctctcgg

SEQ ID NO: 11206 - DNA, 513 bp, Homo sapiens
  MAP TO AC007719.1; EXPRESSED IN HELA, SIGNAL =   1; SWISSPROT HIT: P42201, EVALUE 9.00e-06
gccaggttgactaagcgaaaaatgcaaaaaaaaaaaaaatgaaaaaaaaagaactttatgtctctgttacttagaaggttctatggggacttaaagagggtacattttacgttatgtcatctcttttctccctactttcacactcattcaaacatgttttacaaatgccaatttcctttgtaaatacatcaaatcataggaagctcaaaatgttcaaagcacagttttgttacaagtgcagcttgactatatctttaaggatttttatttatttatcattttaaagttatttcctgtggagaactacctacacctccaaatggaaataagattggaactcaaacttcatatggctcaacagctatctttacctgcgacttgggattcatgcttgtgggctctgctgtaagggaatgcctttcctcaggtctttggagtgaatctgaaaccagatgcctaggtacagatttttaatttgtttttgtcaaacttccccctgcccctcacccttga

SEQ ID NO: 11207 - DNA, 507 bp, Homo sapiens
  MAP TO AL138846.2; EXPRESSED IN HELA, SIGNAL = 0.65; EST_HUMAN HIT: BF745459.1, EVALUE 9.00e-90; SWISSPROT HIT: P32017, EVALUE 3.60e-02
tcatggtgccgcactgggaccccaagatctcggccagctacccccgcggccgccacagccccccagacgacttgggctccagcttctacccggagctggggccctacagctcccgggaccccgaagtgctgcgggagcatatgacccagctcaaggaagccgccatcggtgagcgccccccaccccgggcggccctgccccccagcctcacccttcctccttcccacaccccagctccctctggtcctgtcaccggccctttggtcccacttatccgccagcctggcttcttagctgttccctcccactctcatcctgggcccaccatgcgacaccgcccctccgtctagtattcagaccccccagctgggcccttccatccctaacatccagggcccttcccatagggcggaactgctaggagtttgcaccaggagagggaggcagagtcttcaaatttgttgggcgatgggaagtgaggcctggagtcctggcccgcaggttctg

SEQ ID NO: 11208 - DNA, 537 bp, Homo sapiens
  MAP TO AB016897.1; EXPRESSED IN HELA, SIGNAL = 0.65; EST_HUMAN HIT: BF688716.1, EVALUE 1.90e-01; SWISSPROT HIT: Q04207, EVALUE 8.60e+00; NT HIT: gi16163092, EVALUE 0.00e+00
gtgcagtgagcggcccttcctacggaaattggtgaaacacttgactttctgtttcttaaatactttaagggcataaaatcacatgtactgctttgaaagtagaaatcccagatgtattgagtcagaacttctgtaagtgagccgaggcacaggcagcatgaaaacagtcctggcgggcatcgacaggcccgggcgaagaacttctgctttacacccttccagttaacaacatatcccttatattaattgtgtgggtatgttattattctatagaaacatatataacaaattcttatgtaattatactgtgatcattaatcatataattttatgaatcgtgtatgttcttattttatagaaacttaaccaggatatacaggcgtttcattcttcttctcgggtgctcttaagagattatcaggatgagtatcaggaccgtgtttctgaaatagtgaccgcggtgcaaagaacacagcagagtgccgagaccctgctaggtaggagggcgcctttcaccgaagccgggccagtccacac

SEQ ID NO: 11209 - DNA, 553 bp, Homo sapiens
  MAP TO AL035587.5; EXPRESSED IN HELA, SIGNAL = 0.41; SWISSPROT HIT: P10266, EVALUE 2.00e-80; EST_HUMAN HIT: AI625404.1, EVALUE 0.00e+00; NT HIT: M30520.1, EVALUE 0.00e+00
tggaaatgcaggtggaggaaacgaaaattaaaccataaaaaatagaaataagaaaagacacattaaaaacattaaatgactttcaaaaattgctaggagatattaattggattcagccaactctaggcatctctacttatgccatgtcaaatttgttctctatcttaagaggggatccagaattgaatagtaaaagaacattaactccagaagcaactaaagaaattgaattagttgaagaaaaaattcggtcagcacaagtaaatagaatagatcacttagccccactccaacttttgatttttgctactgcacattctccaacaggcattattgctcaaaatacagatcttgtggagtggttcttccttcctcatagtacaattaagacttttacattgtacttggatcaaatggctacattaattggtcaggcaagattacgaataataaaattgtgtgaaagtgactcagataaaatcattgttcctttaaacaaggaacaggttagacaagcctttatcaattctggtgcatggcagattggtcttgc

SEQ ID NO: 11210 - DNA, 502 bp, Homo sapiens
  MAP TO AC007003.1; EXPRESSED IN PLACENTA, SIGNAL = 2.5; EXPRESSED IN HELA, SIGNAL =   4; EST_HUMAN HIT: AA078195.1, EVALUE 1.00e-91; NT HIT: gi14780938, EVALUE 5.00e-72; SWISSPROT HIT: P14324, EVALUE 8.00e-21
caggccagtttgtccgtcatcagtctgtcttggtgggaaagacaggaactctggaaacagatttgggttttctcagcccctggatatccttgggcaagctgcatgtcttctggtgactcacttttctcagttgtggtatggaaatatcccgcttccccagttgtgaggaccgacgagaattactagtcaggtggaggggcttagcacggtgcctggtgcctggtaaacctttacctggtagccattgctgttattcatttatttatttattttacacaataatttacttattgagagccttctctccccgcccttgcagtctctaggtcactttttccacttgtagattttgtgcccaagccccagaaagatggctgggggcaggggctctgcgtactattcgatgagacccataacgtggctgtaactgtctttctcatactgcaagaacacggctggcagatccagctcctcgtatagtgccttcacccgggccaccttc

SEQ ID NO: 11211 - DNA, 521 bp, Homo sapiens
  MAP TO AC011904.3; EXPRESSED IN HELA, SIGNAL = 0.63; NT HIT: gi13937343, EVALUE 0.00e+00; SWISSPROT HIT: Q92107, EVALUE 3.00e-11; EST_HUMAN HIT: BI860607.1, EVALUE 0.00e+00
agctgggggctcggcttgtcctggagggggcagccctggggttgcagtaccacctgtatgggttccagatgcccagctcctttgcatgtcgccgagaaccttgccttggtagtataacctgcaatctgtcccgcccctctgagaagaccattttcctaaagaccatgtttggagtcagcggtttctgtctcttgtttacttttttggagcttgtgcttctgggtttggggagatggtggaggacctggaagcacaaatcttcctcttctaaatacttcctaacttcagagagcaccagaagacacaagaaagcaaccgatagcctcccagtggtggaaaccaaagagcaatttcaagaagcaggtgagaaggacacgctctcttcctgtcactgatgtttgtgtcctgatgatctcctcccggggcaggtccctcacctttctgggaagtacaacttctgcatgttacaaagtaggtaaccaggttctaggcagatgtgttctgaccgccactcccaaccc

SEQ ID NO: 11212 - DNA, 528 bp, Homo sapiens
  MAP TO AL109912.4; EXPRESSED IN HELA, SIGNAL = 0.91; NT HIT: gi4506482, EVALUE 0.00e+00; EST_HUMAN HIT: AI372971.1, EVALUE 0.00e+00; SWISSPROT HIT: O60673, EVALUE 2.00e-98
gcaccatagttctattctcccctgagcatgacagtaattcacaattttcagtaaatgatgaagggaataaactactcagagctgtgctgtttcctttttcatttccttcagaggatactttattttttgaatgatttaagtcagaaaagttgaaagaatttttgcccaatgtattctcgttagggtgacggtgcatatgtataaaaggggaatccttttcgatttttctaatgtttgtatattttctacttggtacttgtcttgtaacagatggaatatcttcttcataatcaaaaatactactttcacaggaagatactgggaggatctctttcttactattctctttatgagaattttctgaatgaacagtactgcttaaagatccagggtatttcatagaataagtgctttcgtttgtaaaagaagtgactgagttatctagacctttttctgtatttttgtttgtctgtgaaaggtcttcaattaaatcttccttgttcaaaacatgggaagaaagggcacttg

SEQ ID NO: 11213 - DNA, 500 bp, Homo sapiens
  MAP TO AP001254.2; EXPRESSED IN HELA, SIGNAL = 2.8; NT HIT: gi4557887, EVALUE 0.00e+00; SWISSPROT HIT: P05783, EVALUE 2.00e-69; EST_HUMAN HIT: BG335159.1, EVALUE 0.00e+00
gggctgctccatttgcagggcatagcgggcctccacctccttcaggctgttctccaagctggccttcagatttctcatcgagtacaggtcgatctccaaggactgaactgtatgtctcatccccatgagtatcatctcagcagctccaacctcgatgaactgtgtggtgaccactgtggtactctcctcaatcagccgagactagtatttgtccagctcctctcggtttttccgagccagctcatcgtattgggcctggatgtctgccatgatcttggtgaggtcctgcaatttgagggcatctacttccacggtcaacccagagctggcaatctgggcttgtaggccttttacttccacttcgtggttcttcttcatgaagagcagctcctccttgagagcttccatctctgtctccagctgcagttgagtgacattggtgtcatcagcgatcttgtggagcccatggatgttgctctccacagactggtgcatggcca

SEQ ID NO: 11214 - DNA, 529 bp, Homo sapiens
  MAP TO AC010856.2; EXPRESSED IN HELA, SIGNAL = 0.77; NT HIT: gi12734120, EVALUE 2.00e-96; SWISSPROT HIT: Q15822, EVALUE 1.00e-17; EST_HUMAN HIT: BI916691.1, EVALUE 1.90e-01
  unsure 111
  unsure 341
  unsure 368
ccgccacctccaaggcaatggtgggagctggcggcgtgagggaggcacggggttcagcatctgggatcctccctctccggctctcaggatccctgttaggctgagctgctncatgcctgactccgtggtgtgtaacatgccacgtgccaataaacgtcctcaaagcggccagctacatgtgctctcttgctatttattccatctaaggaccatgactgaggaaagtgggccttcacgagaggggcctgggctgcccaagctcacactctgcggtaaggtggttccccgctaagttggtggggccacccaggctggcgcctctcccaaccccaacgcaccgnaagagtcagcatcctcagaccgcaggntggtcggcaatgtagtgcacaccttccagtgccttctgcatgtggggtgatagcagcagctcaccctcctgcagcagagcctcagccttgggacctgaggccccagagtgcaggtggccgtggctgcagagggtgcccacagagggggccacatgacctgc

SEQ ID NO: 11215 - DNA, 557 bp, Homo sapiens
  MAP TO U58675.1; EXPRESSED IN HELA, SIGNAL = 0.5; NT HIT: X80391.1, EVALUE 0.00e+00; EST_HUMAN HIT: AI084964.1, EVALUE 5.00e-05; SWISSPROT HIT: P47881, EVALUE 6.00e-42
ggcgggttggaggagggaggtccagagtggtaatgttacctgtgcttacgcctgcaaataaagttattcaggtaaatgtagcgacagagtaaacaagtgtagtgtggcctaaggagcgcaaaattccttacttgtacagagggaacgtggcagagggccgggcaagtagaagggggtctgtttctttttcttgagtaaataaattattgggaggagtgattcttttcctccctggatgtttctttgcaggaactcatgcagccagaatctggggccaatggaacagtcattgctgagttcatcctgctgggcttgctggaggcgccagggctgcagccagttgtctttgtgctcttcctctttgcctacctggtcacggtcaggggcaacctcagcatcctggcagctgtcttggtggagcccaaactccacacccccatgtacttcttcctggggaacctatcagtgctggatgttgggtgcatcagcgtcactgttccatcaatgttgagtcgtctcctgtcccgcaagcgtgcagttccctgtggggcctgcct

SEQ ID NO: 11216 - DNA, 516 bp, Homo sapiens
  MAP TO AL121760.1; EXPRESSED IN HELA, SIGNAL = 0.77; SWISSPROT HIT: Q9Z1S5, EVALUE 1.10e-01; EST_HUMAN HIT: BF959778.1, EVALUE 3.00e-03; NT HIT: gi7657053, EVALUE 8.00e-03
cctgggtgcccagagactcacagacacacagacatccaaagacacacacagaggacacttggacacccagagatacatccagacatacacatagacacacaaaggacgtacagacacacactgctcactgcctgtgtggtccaggcagcttgcccaaactctctgagacccaatcgcatcatctttcaaaagggcatcacaatcctagcttgtgaggacagggaggaataacgaggaaaatggctgcgtgtgctcagacaccttcattcatccagccagacaatattattgagcatctactatgtgccatgtgcctcctccgagctgagaacaggaagctaacaaggacctaccctcaggaagctcacagtctccttcggaagacaataaatacaggaacaaagcaacagctaagagtgactcggaagacaataaatataggaacaaagcaacagctaagagtgactcggaagacagtaaatacaggaacaaagcaacagcgaagagtgactcgga

SEQ ID NO: 11217 - DNA, 505 bp, Homo sapiens
  MAP TO AC019284.4; EXPRESSED IN LUNG, SIGNAL = 1.4; EXPRESSED IN HELA, SIGNAL =   2; SWISSPROT HIT: P08640, EVALUE 2.40e-01
tggaagtgttgccatcgcctgtagactctccggactcaattccctctctccctcccgtgataatcctaatcggaatttttcagctgctcctgtctcctgcctcccatcgccactcccagtggctgcctcctggccctctgacccttcctcttgctcctgtcctagccctgaggtcttccgctccagggctcctggagtgcccaccccagcctctgttgtatatgtcactgtcatctcctctgctgctggcacttcctccccactccgtgctaattcctctaccaccaccttccctgcagctgctgtttttcctactaactcatcctgttggtgccaggtttcttcctcagcaacatctgaaaaggaggaggctttatttgctattgttttctcctcggctgtctccgaacctgccaacacctccctctcctctgcggctgtttctgccgtttcaccacctccgtgtagaacttccacagccacaacccttcctcctcccatgccc

SEQ ID NO: 11218 - DNA, 557 bp, Homo sapiens
  MAP TO AL136307.12; EXPRESSED IN PLACENTA, SIGNAL = 2.5; EXPRESSED IN HELA, SIGNAL =  17; SWISSPROT HIT: P14618, EVALUE 2.00e-76; NT HIT: gi14750410, EVALUE 0.00e+00; EST_HUMAN HIT: AL549690.1, EVALUE 0.00e+00
gggcccagcttctccattgctagagatgctgaagaaaacgattaagtctggaattaatgtggctcatctgaactctcatggagcccatgagtaccatacagagaccatcaagaacgtgcgcacagccacggaaagctttgcttctgactccatcctctaccagcccattgctgtggctccagacactaaaggacctgagatcccaactgggcccgtcaagggcagcggcactgcagaggtggagctgaagaagggagccactctcaagttcacgctggataatacctacatggaaaagggtaagagaacatcctgtggcgggactacaagaacatctgcaaggtggtggaagtgggctgcaagatctacgtggatgatgggctaatttctctccaagtgaagcagaaggatgctcactttctggtgacagaggtggaaaatggtggctccttgggcagcaagaagagtgtgaaccttcctggggctgccgtggacctgtctgccatgttggagaaggacatccaggacctgaagtttgggggcgagcaagatgtcga

SEQ ID NO: 11219 - DNA, 500 bp, Homo sapiens
  MAP TO AL163302.2; EXPRESSED IN HELA, SIGNAL = 1.3; EXPRESSED IN LUNG, SIGNAL =   2; NT HIT: AL163302.2, EVALUE 0.00e+00; SWISSPROT HIT: P02458, EVALUE 4.10e-01; EST_HUMAN HIT: AI906024.1, EVALUE 5.00e-08
ccccactggctctgcccatcaatgctcaaagcatggaaggggaagcctgtggacaccatgtctgctgtgcccatccctgctcaaagcatggaagggggcctgtggacaccatgtcccgtgcagacaccatgtctcctgcagacaccatgtcccctgcacacaggtttctgcatggagcctgcctgtcgtttgggaatgagtgaaccagggtggccgttgggtggctgagcccaggggatcagggcaggctgccaggcacgtggagagccctcccagactcagtttctcctttctgcccctgcctggctgcctctccaggccgcgtcggtggcccctggttccgtcctgcacagccacctcaccagctgtctttctttttgcagagcgcatcagcgaggaggtggggctgctgcagctccttggggaccccccgccccagcaggtcacccagacggatgaccccgacgtcgggctggcctacgtctttgggccagatgcca

SEQ ID NO: 11220 - DNA, 500 bp, Homo sapiens
  MAP TO AC011599.8; EXPRESSED IN LUNG, SIGNAL = 1.1; EXPRESSED IN HELA, SIGNAL = 0.37; EST_HUMAN HIT: R87221.1, EVALUE 7.00e-04; SWISSPROT HIT: P04474, EVALUE 5.30e-01; NT HIT: gi7662289, EVALUE 8.00e-83
caaagttgcgcagggcatggcccaacataccccacttgctatggcggacttgggggggatgggacggaagggcccgggactcaagttgcttcggcacagaaagctcccattctgcccctgctcagcctgtgtgtgttgccatccccaccagcagtcccaggaggggctaggcctcagcgcacaggctggcaccgtcctagccaccgaccttgtgtggcagcttcctatgctcataggccacggtggacctcaagctccgcgcttggaaggatgcagccacgcccacccgccaaggcccagcaagccacagctgcccaccctgaggggtcacccatggtactcacttgttgaagaggttcaggccgatgcggtagtgcctcttgcggatgacatcgttgctaaaggcaggcgagtcccagctgttgcgggcctccttgtggtaggtctgcttgctgagcgtctgctcccgcaggctgtcacgggacgatgactcggagctg

SEQ ID NO: 11221 - DNA, 502 bp, Homo sapiens
  MAP TO AC007111.1; EXPRESSED IN HELA, SIGNAL = 0.27; NT HIT: AB037727.1, EVALUE 0.00e+00; SWISSPROT HIT: P18871, EVALUE 2.70e+00; EST_HUMAN HIT: BF346767.1, EVALUE 5.00e-42
tggcactagccagggccgagctggagcgcttgggtgggggcggcgggggccccttctttcggggccgcacggcaaaggactggctgcggttgacgttcttgtcggcacctgcgggcgccctcactgagtggctgcggcccacgcgccgctggaccgtggcataggggccggcagccgcaggcaccagcagctcgtcccgctccggctcgctgtcggacgccgcatagcgattcaggctgtgggcccgcttcttgggccgccccggctccgcgtcggcctcagggggcaggcacagtgtgggcacagccgtcggcacgggtgggggcgcaggccccggggcagccggccccacctcgccctccacgggctggggcagcacgtaggcaaagccgcggtgcgtcggtgactgaggcagggagcggggtgacatggggcgctctgtcggcggcagcagctgcggggtgggcttcaccttggccgtagctggggctggaccatgagg

SEQ ID NO: 11222 - DNA, 513 bp, Homo sapiens
  MAP TO AL161669.3; EXPRESSED IN HELA, SIGNAL = 1.1; SWISSPROT HIT: P30729, EVALUE 6.30e-02; EST_HUMAN HIT: BI063111.1, EVALUE 1.20e-02
aagggcggtgagagggaccgccccaagacccgaacctggacgaagacctgcaggccacggctcaatccatcggggctggattgtctgtcctctgccagatgccccagcacagctgaaggcctgctccaggaacaacaggccccagctgccaggagccctcccttagagtcacctttgaagaggcagaacctggggccccaagcctggctgaacagagcaatttgggtcaacccctaccttccgcctggatcccacacccaccttccactcccggctgagccggacctgatagcctcatgctcagccctgattgcaggtctaatagggtcggagctcaggcagggcgtgtcctgcccgtgtccagctttacattcctgctgctccccactctccgccagcctccacccgacaagagctctccacctccatgtccccctcttcccaccccagtgtatcctcctctgggcaatccccctgacctcccctcctggtacctctgcgagccttgcaccc

SEQ ID NO: 11223 - DNA, 508 bp, Homo sapiens
  MAP TO AC002504.1; EXPRESSED IN HELA, SIGNAL = 1.9; SWISSPROT HIT: O35085, EVALUE 3.00e-11; EST_HUMAN HIT: AW028575.1, EVALUE 3.00e-06; NT HIT: AY038071.1, EVALUE 5.00e-44
agaggcgctaccgcaccacgttcaccagctaccagctggaggaactggagcgggccttccagaagacgcactacccggacgtcttcaccaggtatgcgcgtagggtggtcgcggtcgcagcggcagagagcgcacgcgggccccagggagggacagcgggctggcaggggccccggcctcggggcggacgcttggctcctggactctgtggaagagcgccctcccaacacacccacccttgctcacccaaactacccactcccccgacccccaccccggttcgggctttaagtttaggctggaatggtttatcttcttcccaaggtcgttgcagtttaatgttttcaaattacaagttttagttagagagaggaaaagaaacagcctctccaaagagcgcccgaaagcgccaccttggagacgcgcgcacagcagagggcacagacacaaggcctccggagctgcggtcccggctaggtccccggcgaggctcaggaagcgctgtccg

SEQ ID NO: 11224 - DNA, 523 bp, Homo sapiens
  MAP TO AC018725.1; EXPRESSED IN HELA, SIGNAL = 0.6; EST_HUMAN HIT: BF828444.1, EVALUE 0.00e+00; NT HIT: gi14764525, EVALUE 0.00e+00; SWISSPROT HIT: Q9UIE0, EVALUE 1.00e-101
gcccttgccagcaaatctgggaacaaactgcaagtgacttaacccagtctcaagactccatcataaataattctcacttctttgaacaaggtgatgtcccctcccaggttgaggcaggactatctataattcatacaggacagaaaccttcacagaatgggaagtgtaaacagtccttcagtgatgttgccatctttgatcctcctcagcagttccactcaggagagaagtctcatacatgcaatgagtgtggaaaaagcttctgttacatctcagctcttcgtattcaccagagagttcacttgagagagaaactctctaagtgtgacatgcgtggtaaggaattcagtcagagctcatgtctgcaaactcgtgagagagtccacactggagagaaaccattcaaatgtgagcaatgtgggaaaggcttcagatgtagagcgatacttcaagttcactgcaaattacacacaggagagaaaccttatatttgtgagaaatgtgggagggccttcattcacga

SEQ ID NO: 11225 - DNA, 513 bp, Homo sapiens
  MAP TO AC005585.1; EXPRESSED IN HELA, SIGNAL = 1.6; EXPRESSED IN PLACENTA, SIGNAL = 2.2; NT HIT: gi14778217, EVALUE 1.00e-105; EST_HUMAN HIT: BF871188.1, EVALUE 1.00e-104; SWISSPROT HIT: P13227, EVALUE 5.50e-01
taggggcaggcggatggatggtgaaggttgtagggcaggccggggaccaggttctgcatccaagatagccttggcaccatgcagcctgggcggggagcggcactgcagctcaccccgggtctcctgccagcgccgcagctgaatgaggtgttcgcgctcaatctggcgctctgtcacgggcaactccaccacctgcaggggcagtgacacaggcaagtggacaccaagaagaaggaccttccccttctgcctcccagcctgggcccccagtcttcctcagcatcccccagccttggccactaaacactgaccccaggaaggatgagggtctagtcccaagctgcagtcacgagccccacagctgagtgccaggtgagctggacacttgagacccaccgcctcagaggataaagctgcccacagcttcacgagtccacctgcctgactatggggctaaaggggtaagacccagacagacaaaaacctgctctctgccaacctgtcacccaccgc

SEQ ID NO: 11226 - DNA, 563 bp, Homo sapiens
  MAP TO AC023066.2; EXPRESSED IN HELA, SIGNAL =  15; SWISSPROT HIT: Q01105, EVALUE 1.00e-11; NT HIT: gi14745486, EVALUE 1.00e-109; EST_HUMAN HIT: AW975885.1, EVALUE 1.00e-109
tgatcattctgatgcaggtgctgatgagttagaagaggtcatcaaagatgatatttggccaaacccattacagtattacttggttcctgatatggatgatgaagaaggaggagaagatgatgatgatgatgatgatgatggtgatgaaggggaggaagaattagaagatattgatgaaggggatgaggatgaaggtgaagaagatgaagatgatgatgaaggggaggaaggagaggaggatgaaggagaagatgactaatagaacactgatggactccaaccttccttttttaaaattttctccagccctgggagcaagttgcagtctttttttttttctcttgtgctcagtcaccctgttcttcagctctcttttctctactccatggttctcaacttatttggggggaaataccttgagcagaatacaatgggaaaagagtctctacccttttctgttcgaagttcatttttatcccttcctgtctgaacaaaaactgtatggaatcaacaccaccgagctctgtggggaaaaagaaaaacctgctcccttcgctctgctg

SEQ ID NO: 11227 - DNA, 588 bp, Homo sapiens
  MAP TO AC006427.13; EXPRESSED IN HELA, SIGNAL = 0.38; EST_HUMAN HIT: BF799144.1, EVALUE 1.00e-126; SWISSPROT HIT: O73673, EVALUE 1.10e+00; NT HIT: AL163218.2, EVALUE 2.00e-25
tccctgctgcctatgtgcctgtaaaatcaaaaccaagttagttacttccaaggtacaataggagtacaggcattgggtaaatgctcccattccaaaagggagaaattggccaaaacaaagggctacaggccctatgcaggcctgaaatccagcagagcagtcattaaaccttaaaggtcaaaaataatctcctttgactgtatgtctcatatccaagctccactgacacaaaggatgggctcccaagatcttaagcagctccatccctgttgttctgcagagtacggcctctgtggctgctttcatggactggcattgagtgcctgcagcatttccaagtgtatgctgcaagctttcagtggatctaccactctggggtctgaaggatagtgaccctcttctcacagttccactaggcaaccccagatttcccctctgcactgccctagtagaggttcttcatgagggctcttcccctgcagcagacttctgccaggacatccaggcttttccatgcatcctctgaaatctaggtggaggttcccaaccttcacttcttgccttttgggcacctgaaggccccacagc

SEQ ID NO: 11228 - DNA, 506 bp, Homo sapiens
  MAP TO AP001067.1; EXPRESSED IN HELA, SIGNAL = 0.25; SWISSPROT HIT: P17589, EVALUE 1.20e+00; NT HIT: AL163300.2, EVALUE 2.00e-68; EST_HUMAN HIT: BF057369.1, EVALUE 8.00e-47
gtgggcaggcagcacacaggcttgcagcagacgggcacgcagcaggcctgctggcagggggaggaggcgcagcaagccggctggcagcacgagggcgtgcaggagctggtgcagcctgattggcaggggctgggctcacaggccgcctggcagcaggggctggacacacagctcactggggtgcagaccagggtcaggcagggggcggtgccgcaggggggctcacagcagctctctgggcagtcgtccactcgccaggagtcagagcaagcgctggagcagacggacatggtgcacgcggccatgctggggtggggaagacgtgagctgggagctgggggaggtgtgagtgagtgagtgtgtgagtgagtgaaggagggagtgagtgagtgaggtgctcagggctgtggggcttttaaatccctccctggcgtgtgttgtcccgacaggaggctccacaagcttctcttccttgttggtgtttagagctggtggctggagatgcg

SEQ ID NO: 11229 - DNA, 525 bp, Homo sapiens
  MAP TO AC008812.4; EXPRESSED IN HELA, SIGNAL = 2.3; EXPRESSED IN PLACENTA, SIGNAL = 1.9; NT HIT: AF209479.1, EVALUE 0.00e+00; EST_HUMAN HIT: AU140165.1, EVALUE 1.00e-36; SWISSPROT HIT: Q9NSA1, EVALUE 5.60e-01
ggcgttctgttgggggaggctggtcagggctgggcttagattaggttgtccatattcctgtacctgcccagccttcaaggtcttgagagtcagagtccttccttgactgtccacgccgggtagaccattcccctccccacttcccgagaccctcccccatccccatgagaacccaggagtcctggccccatctcctccagactaggagaagttggggctttagaactcagaacagaaggcaggagactggcttaactgagtgcctgttgtgtacctggcccactgtgaacactgagggcaatgatcacagttaccctgtgttctcatttcacagatgaggaaacttgctcaggcagggtcagtgactcaagcaaactcacaccacacaacgaccatctcaggcccaagaagccctggttccagatactcacccactgcagccttcagctgggtcagctcctggtagatctcctgctgcttagatttctctggaagctcacccactgcagccttcagccgggtcag

SEQ ID NO: 11230 - DNA, 515 bp, Homo sapiens
  MAP TO AC011686.3; EXPRESSED IN HELA, SIGNAL = 0.6; SWISSPROT HIT: Q14320, EVALUE 3.20e-01; NT HIT: gi14778732, EVALUE 1.90e+00; EST_HUMAN HIT: AI911676.1, EVALUE 0.00e+00
tgctgccaggtttggcccagaagcccttagggatgggtcactcaggcttctggcctgggtcacagagaaacggagatgcttttcccttggatattgactacaaaggccctggaacctctcagaaccatattagacagtgttttgccattaaaataaaaccaaagtgagaacactcagctcttcaggataaatgatcaaggcctaagaccttttaaaaataggtaacacttcattaggtgctacttggccccggccatgttgctggaccgtaggagatactgatccacacttccttttcgccggctcacagtccgcctctcattgtcgaacatgcgctgcaactgcagagccaactgtcggtcttcttcctcttgctgaagcttctgctccatctctcgcaggactgggtctgttggggccagacccacctccccactggtttgtcgcagttttttaagggagccattttgttctaagtgcttggtcttgcagtgtcttttccggcctcgacgcaa

SEQ ID NO: 11231 - DNA, 538 bp, Homo sapiens
  MAP TO AC006548.19; EXPRESSED IN HELA, SIGNAL = 0.53; SWISSPROT HIT: P32338, EVALUE 5.00e+00; EST_HUMAN HIT: BE962929.2, EVALUE 1.90e-01; NT HIT: X12690.1, EVALUE 1.00e-32
cacacccctgaaccatgtgcatctttacatgaaaccatgaaaatgtcagttacaggtccaggttaccctgagacataaaactgtagatgcagtccttgctcttctcacatagacaatttccttttcaactgcagactcatggctgtggctgcaccacatccaggctgggggtgactcaggtctcactcagggttggccataacctggaagccctcacaggacctgatgccacatgaccagggaggctgtgtgagaagagttttcgtaagcaccactcagaaaaacatcatgcaatgttatttcttatttgctttgtatcattaaccaaggaaattcttccctatgagatcctgctggttaatcttgtatatgtgagatgattatgatgcgattatcccagattgaacagttggtcaccaggaattttgtattcactgcctgaggtgtaacattcttgccccattgcctcttacttatgctgggctcttggctctaaatgtagagacccacatcattctccctgtgaggcccttggacg

SEQ ID NO: 11232 - DNA, 559 bp, Homo sapiens
  MAP TO AC004616.1; EXPRESSED IN HELA, SIGNAL = 0.72; SWISSPROT HIT: P98160, EVALUE 6.00e-08; EST_HUMAN HIT: AW467636.1, EVALUE 2.00e-07; NT HIT: gi14766611, EVALUE 0.00e+00
tttcgtgcagggtgatgcggccctccacgggggacacagtttgccacaccctcctgtcagggaagatccaggaaatttggggggctggggtccctttggccagacactccattgcaatggtgtctcccaggtagacagtgacgtcctggtagtgggaggctaggatttgaggttgctgcacggtgaccgaaagcaagaccaccatcctgtccaggccgtgcaggttgctggcggtgcacatatactggcctcgatcttgtacttgaaccttccgtatcactaaggtaccgttcttgagaacctcaaaccgttgtatcctggtattcggagtcataagagctcctggagaaaattaacacagtcagctttggcataaactgtgcccttttgataatgctcaaacgagcagtattagttaatctaattctccactttaacacccaggcagcaaaagcaaatgtagtaggtagaatgttttagtgtttttaaaagttttttttatatttattttattcgttagagatagggtcttgctgtctcccaggcgagagtgcagtgg

SEQ ID NO: 11233 - DNA, 526 bp, Homo sapiens
  MAP TO AC024584.4; EXPRESSED IN HELA, SIGNAL = 1.3; NT HIT: AL603643.1, EVALUE 1.30e-01; SWISSPROT HIT: Q9WVH3, EVALUE 8.50e-02
agggccgcgcctacgacactctgttggcagttgtcccagggagatcagcagtcccagatccggagagaccgttggggcctgtgagaccttcggaggccacgccaagaaaggggaagcatcatctttagaccctccttggtgcagccttgcccaggacccgggagccacgagtcaggtggcaaacaccgccttctgcttctccagcacgcgtaagtccctgggaatcttcgagcccactcagagggagccacagaagccccgacgttgcacagccctgcaggcaggggctgggggcatccttcactgagctggacgaaggggtcctgggagcggcctccggcccctgaggcctcactctctcgtagcctttgggaaggaatcgcggcatcctggataatttcgtggattcccgaggcagctcaggtgtccaccagcgggcatactgctgcctcaaagagttgggcaagatgctgttcggggtgaaggacattgcactgttggagcacgggtgcaaggccctggaggt

SEQ ID NO: 11234 - DNA, 564 bp, Homo sapiens
  MAP TO AL035701.13; EXPRESSED IN HELA, SIGNAL = 0.34; EST_HUMAN HIT: AW293948.1, EVALUE 6.00e-14; SWISSPROT HIT: Q08470, EVALUE 7.00e+00; NT HIT: AJ133134.1, EVALUE 3.00e-21
gctggcttgtcaggtcctgggttcccttagctgcagcttccagaagagtggagctttggaatcctgctcacagcaacaaaacagtaggagccaaaggaaaacctcccctttgccctctgaagttttgctgaaaaaaatcaactcagatgaattggagaaaaggcatacaaatttgttaatgtgcacatgaaggaaaaccacagagtgactaccccaccctccaatggagttaagaaatgtatgccatcctgaggttgcagaaagaatggcagcttggatcatggcaaaacagattctggtggcaaaatgcattatgggagggcaaggagaggaggcctggctagcaaaggtggtcttgttatataaataaaacttcacaggtatcagtcctcagaaagaatagatagtaagactctcattaatctttcttagacaaggaaaggcctcagacaaaacctagctgcatcagtgcagattgtctacagatgtaaatgtcccctacgaaaggcagctttgcagggttacttctgtttgcagggtctctgaacagccaccccacctcga

SEQ ID NO: 11235 - DNA, 526 bp, Homo sapiens
  MAP TO AC005052.1; EXPRESSED IN HELA, SIGNAL = 0.5; SWISSPROT HIT: Q9W6R1, EVALUE 1.70e+00; EST_HUMAN HIT: BI910906.1, EVALUE 8.00e-41; NT HIT: AB010151.1, EVALUE 1.30e-01
tgcggctttgccccagtacctgcccaggctaccagtgtccgctctcgaggggcggggctgcggggcgcaccgcaggctctgcgaggtcggcgcgagagaggccgtgggtgcccggttcgcggcccctccgagctgggccatggtcttgaagctgccgccgcggccgtcccagtgtccagcgttagctgcccttcccgggccccaacgggagaggaactggcgctggcgttggggaaggaagctgcttgagcaattgggttcggagggagggagcaaaggagaggaggaggaggaggaggaggaggagggagggagctaggggagggcccccgcgcaggccttggggggcgtggaggggtgtgagctccagccaagtccccagggcaagcccagctccacttccctgggtaccgccgcctctgcagctcccccgggtcgcgggcggtcccaccccaaacggccaggtgagctcggcagccccgcctccagcaccgaagggcgggcgcggggactggctgggagctcg

SEQ ID NO: 11236 - DNA, 517 bp, Homo sapiens
  MAP TO AC000357.1; EXPRESSED IN HELA, SIGNAL =   3; EXPRESSED IN LUNG, SIGNAL = 1.3; EST_HUMAN HIT: BI828769.1, EVALUE 4.00e-73; SWISSPROT HIT: P16275, EVALUE 4.20e-01; NT HIT: gi13375665, EVALUE 3.00e-73
tggccagctggtccttctgcttggctttctcgtaggtgcctagcagctcagacacctcggatatttgattctccagggctgccaccctctgttcttctacctgagattgctgacggagttgatcctctgcaagagctgtctgcaaaacaagggaacagacaaaaatgcatccacaaaagccccacagcaaactctgagaaagcaggagaggggagcaaaagggtcacaggtttgggatggcctggcaagaatgctaactagggatttttcggttgattcaggagctaacaaaagttcctattacctgcttggattctgcaagacacatattatactgaacaatatgaagcaccttggtacatctgctattgttctgctttccacctaaccacatataatgtgtgttactgttgtttctcaggtgcttcctcaaatcctattaagaaatcatacagcattcttttccttatccaatattcctggaagttcaaaactgcgctggatctccctctccaca

SEQ ID NO: 11237 - DNA, 522 bp, Homo sapiens
  MAP TO AC006208.3; EXPRESSED IN HELA, SIGNAL = 0.87; EXPRESSED IN PLACENTA, SIGNAL = 2.8; SWISSPROT HIT: P46804, EVALUE 1.90e-01; NT HIT: gi14735644, EVALUE 5.00e-38; EST_HUMAN HIT: BG385868.1, EVALUE 7.00e-38
tggtcatcgccaagacccccgggacgggaggcagcccccagggctcctttgcggatggccagcctgccgagcgcagggccaggtgagatcaagcacagctctcaggggccccgggggcatgggtctggcatgtgtgtgatctcagcatctgcggctagtgtgggctgggagttgctgcgagagctgggccccctccccccctgcccctcgccccccccgggcctccctctacatcaccaccccaggtttggtgccaggctgctccttatctcagtgctgtagaagaagcccaggaaagctgtcctctcacaaaatgggttggcccagcctcttgccacccatgaagggcaggccaagggggctgccccacctttgcctgcccagtgggagagcaacaggctgcagcacaccgaggccaggagagctgtcaccctggctgctgtgctcctctgggcccaagcatggcctctgggcactacctcctccagggtcacagtcccacggatggctctgtgggccagg

SEQ ID NO: 11238 - DNA, 501 bp, Homo sapiens
  MAP TO AL021997.1; EXPRESSED IN HELA, SIGNAL = 0.63; EST_HUMAN HIT: BI253396.1, EVALUE 9.00e-56; SWISSPROT HIT: P17028, EVALUE 2.00e-04; NT HIT: gi14760679, EVALUE 6.00e-56
tgcagttcaaggctgcaatgatgctatgatcgtaccactgcactccagcctggtcaacagtgaggtaaagggatatagtgtttgcaactgactctcaaatagattcaggaaaaaaaaatactgcatatgtgtatgtatgtgtgtgtatacatatacatatgcatcttggggggggggaatgcacttccttgtacgagtgtgtacacaacaatgggacttcatcaaacaaatgttaacaactggcaaatttggatgaagagttttacgggagttctctattcttctaatacttctataaattaggagttatttcaaaataaaacgttaaaaataaaccgatacatgtcccccttttcttctcccacatcaccacacacattctcttcccacctgttgtcctgtgtctccacttcctgtctctagattctccagcactgtcactgcctcctctccactctccagaggatatgtcttcacacagggctggagctccttgggcag

SEQ ID NO: 11239 - DNA, 501 bp, Homo sapiens
  MAP TO Z97183.1; EXPRESSED IN LUNG, SIGNAL = 1.3; EXPRESSED IN HELA, SIGNAL = 0.99; EXPRESSED IN PLACENTA, SIGNAL = 3.3; EST_HUMAN HIT: BI488588.1, EVALUE 0.00e+00; SWISSPROT HIT: P24032, EVALUE 5.00e-71; NT HIT: gi15809015, EVALUE 0.00e+00
ggcgcttctctgtacagctcatccacttcctcatccgtaaaccgatcccacatggttatcagcagctctctcaggtaatcttcctgaataatgcctgttgcttcttcatcaaagcaagcaaaagcatttccaatgacatcttcaggatctgtgccatttaacttctcaccaaatatggtgaggaacatggtgaaatcgatgggccctggtgcctcattcattatggcatcaaggtatgcatcggtgggattcttccctagggaaacaagcatatcatgcaaatcttctttgttgatgaaaccatctctgttctgatcaatcatgttgaaggcctctttgaactcctgaatctgtgactggtcaaacatggcaaacacgttggatgttgtgcgctgagggagctttttggtggtcttggtcttgcctttttgctccacatggtggttgtttaattccagcgccaaacaccagaagtgggctgccctgcgccagacgatgagg

SEQ ID NO: 11240 - DNA, 550 bp, Homo sapiens
  MAP TO AC007869.2; EXPRESSED IN HELA, SIGNAL = 0.4; EST_HUMAN HIT: BF515242.1, EVALUE 2.00e-10; SWISSPROT HIT: Q9NPC2, EVALUE 3.00e-24; NT HIT: gi14747556, EVALUE 1.00e-115
gttcgacgccctcgagtcggaccacgagatgcgcgaggaggagaaactcaaagccgaggagatccggatcaaggggaagtacaacatcagcagcgaggactaccggcagctggagctggtgatcctgcagtcggaaccgcaccgcgccggcgtccagtggaaattcgccggctccttctactttgcgatcacggtcatcaccaccataggtaagggctgggcgcgccgctgggctcccgcgccccgggaggagtccggggaggcggctgagcgcgccgcgccgggctgggtgcagggcgtcgagggttaaacgcagcctcccttgggggccttcccgcagcgccccctcctctctagggagccccccctccgcggcgcctccgagcctcacccttcggggaccccacccggtgctctccaccgcgctggtgtctgggccgggcgtgcgagccccgagcgagtgtgcctgagccgggagggcggaggcgccacttttgcgaagagagtggagcgctaagaataatcccatagcagacacccacccacccac

SEQ ID NO: 11241 - DNA, 501 bp, Homo sapiens
  MAP TO AC005754.1; EXPRESSED IN HELA, SIGNAL = 1.1; EXPRESSED IN PLACENTA, SIGNAL = 1.4; EXPRESSED IN LUNG, SIGNAL =   1; SWISSPROT HIT: Q9Y5E7, EVALUE 3.00e-90; EST_HUMAN HIT: AI954625.1, EVALUE 1.00e-115; NT HIT: AF152495.1, EVALUE 0.00e+00
ctggtctcccggtccagggccgtgcttatcaccagagtgtaaaagttctcaacagaaggtttcaagaaaaaaggaagatcatcttggatggagcacaccatccttccgttgtctccggagtcaggatctgaaacgctgaatacagcaatgagggtgtcctgcaagttttctgggatctgattgataagtgtcgacatagttagttccggaggattgtcattcaaatccatcacttggacaaataccacacaagttccagataggcccccaccatctgtcgcctgaatatttactgtgtatgtctggatggattcgaaatccagtttctgtcttaaaagcagttctcccgattttgcacttaatcgaaacgttttgcgaatgtcttcagatgcttgggaaaatgcataagatatttctccattagttccaatgtctaaatccctggcagagacgatggcaacctgggatccaacggggctgtcctccgggatctgcacctca

SEQ ID NO: 11242 - DNA, 520 bp, Homo sapiens
  MAP TO AC012467.9; EXPRESSED IN HELA, SIGNAL = 0.38; SWISSPROT HIT: P54223, EVALUE 3.00e-07; EST_HUMAN HIT: AI034449.1, EVALUE 3.00e-71; NT HIT: AJ272267.1, EVALUE 2.00e-71
gtcccggggcaagaccaaccacccgctgcactgcgcattcctggaggccacgcagcaggccggctacccgctcaccgaggacatgaatggcttccagcaggagggcttcggctggatggacatgaccatccatgaaggtagtggtctcccttctctttttaaaaaagcactaccccctaccccagcccccacccatcttggcccgtggctccaggctcctggctccagcatggtcaggaggcatgggcagactgaggctggcacgaccgggaagagatctggcttagtatacccctccaagagtacaacccggagccctgagagtgacccaggatggtgaccctgggcgttctctgcacctctggcccctgttggtgtggataacagagaatcagctctctggacagagagcctaactcctctagggacttgcacatggggaaactgaggcacagagtggtgaagggccttgctcacagcaggacagaggcgagccagggctgacccggggcttctgcct

SEQ ID NO: 11243 - DNA, 525 bp, Homo sapiens
  MAP TO AL121901.10; EXPRESSED IN HELA, SIGNAL = 0.64; EST_HUMAN HIT: BF242350.1, EVALUE 7.40e-01; SWISSPROT HIT: P35637, EVALUE 7.00e-04
gtgagatgggcggtccaggctctactgacaaaagtgctgtgatcagtcaaggatccttaggtcacaaaggaatgactacccctggacaattaagtcagaaggttataaagagccttggctactctgaccacaagtggatgacccaatctggccatacaggtgtgggtgatatgagcttctcaggcagtggtcaaccttcagatgcttcttcaggaaatgctgttgtgtctggggtggcttcacctggcagttacggtcagtatggggctgagtcatctgatggtttgggtcaatctagggcaggactaataactgatcatcctgggactgggaaaaatgatgattttggtcagtctgaggcagggttaatgagttatcagactggtggtaggtcatctggttacggtcaaactggggataggtcatatgagtatggtcagcaaggaaacaagtcatttggagggtatggtcagtctggggtggagtcaataaacagcctgagcctgggtcatctggtggcttggg

SEQ ID NO: 11244 - DNA, 502 bp, Homo sapiens
  MAP TO AC002477.1; EXPRESSED IN HELA, SIGNAL = 0.78; EST_HUMAN HIT: BG176852.1, EVALUE 0.00e+00; SWISSPROT HIT: O15541, EVALUE 6.00e-51; NT HIT: gi5902157, EVALUE 0.00e+00
tgcccctcagctcctcctggatcttctggctgcgctcaaagatggcttgtgcatcgcgctctttctctgtgtccagctcatagacagctgtcgctcccatatcctctggtcccacgggtttcgccgaacgggtggatttataaaccacgccgagactctcgggctcattttcctcttcctcttcgctgctcaagtcgccgtaagccgccttctgtttaccactgtcacgggtcttctgtatcattggattgtgggtcacccgcttcttttccggtcgaaccacagtgcagccttcgtcgctactgctgccgctttctccgggctctgggtcgcaggccgggcgctttctgcgtccagcagcccctttccgcccaggctttttgaaaaggaaggtgcacacctgatccaccgcctttcctggagaaagctgctctgccattttagagtcctgagctccgaaacagccgtggctgcctgggttgcacttggcccctgcacgtca

SEQ ID NO: 11245 - DNA, 510 bp, Homo sapiens
  MAP TO AL136231.3; EXPRESSED IN HELA, SIGNAL = 1.5; EST_HUMAN HIT: BI464052.1, EVALUE 1.00e-101; SWISSPROT HIT: P18833, EVALUE 5.50e-01; NT HIT: AF326500.1, EVALUE 4.80e-01
gggcgatgcccaggaaggacgggttcaagtccatgcggtcctcctcgggcagcggaggcgcgggcgactgcgaggggcccgccgcggccagggggaaggagccgcggcggtgaactgggctctccgatgcacggagccgggcgcaggtggggtccacggccgtggcgcggctgctgagcagggactggaactcaaacctgctgccgccgccaccgccgccatgggctgggctgccggggctgctgctgctgctcgaagcggagacgcccagcggccgtccctccatgctcctccggggacttggcatcgcagctggcggcccggatcccgggacctggccggaccaaacagaggcttcccggccctgcagcctcttccgcttccgcactaccatcccggaggggcggggagaggagccggcgagagcgcgattgtgacacctggtggagacgtgggagggagttggaatttccaatgtgaggagagcagaggggaggatgttggcgttgg

SEQ ID NO: 11246 - DNA, 516 bp, Homo sapiens
  MAP TO AC005478.1; EXPRESSED IN HELA, SIGNAL = 0.66; EST_HUMAN HIT: AL519465.1, EVALUE 0.00e+00; SWISSPROT HIT: O14682, EVALUE 2.00e-13; NT HIT: gi15318393, EVALUE 0.00e+00
ttatatcggcgcgggcagggggtaccaggatctgtacgttggactgtttgatgacttcctggcagatctcgataaccgacctcatcagcaggaacttggcggccgtcatgagttcgggaaagctctccaagcgcaccacgatgcgggaagtgtaggcgaagtccagacatgtccccaaataccttggagctgatagtgtgcatctccagctcccggctgcccccgccccgccgcctggtgctgccgtcgcgccccctacatcagccgacccccgtccggcagtccgcccggtcccaactgggcgctgaacaccgactcaaagtactcgctgcaggcggccagcacggcgcggtgcgctgggaagctctcgtcgcctacccgcaagagcacgtcgcagaagcgcccgccgtttttgcgctgctggttcaggttgtgcagcatctccgtgctgtgtctgctcacctggtatgtgtagcagccagacgggccgcacgaagcgtcgttcacccgctccat

SEQ ID NO: 11247 - DNA, 559 bp, Homo sapiens
  MAP TO AC005663.1; EXPRESSED IN HELA, SIGNAL = 0.76; EST_HUMAN HIT: AW139431.1, EVALUE 0.00e+00; NT HIT: gi14777116, EVALUE 1.00e-85; SWISSPROT HIT: O00192, EVALUE 5.00e-24
tggcacagccagagatgggcctcatggaagatggggtggttttgtggaagggaggtgagacggtctctccagcagccatagcagatgtctcacagaaacttgttttgctcgggattgggaaactgcccggtgacagcagtgagtgagtttgctgtcctgggagggttgcctgggtcctggtagccgctggctggggtttggcatttggctctgaattggttctcactgggctggtgcatgactctctgtgtccccaccatgctccgggccaagatacaggtgctctcagcccagcgctgctgggtgagtttgcagtcctgaagaaggtgtgatggggcagctcagaggcagggctggcggctgctgtgacgatgtccacgcgccccacttgcctgtgcagggcctacgaggacacagcagatgatggcggcgagctggcggacgagcggcctgcgttcccaatggtgacggcgcccctggcccagcctgaacggggcagcatgggcagcctggaccggctggtgcggcgctcgccctcagtggatagcgcccgcaagga

SEQ ID NO: 11248 - DNA, 513 bp, Homo sapiens
  MAP TO AL135749.2; EXPRESSED IN HELA, SIGNAL = 1.2; EST_HUMAN HIT: AI217516.1, EVALUE 0.00e+00; NT HIT: gi4758735, EVALUE 0.00e+00; SWISSPROT HIT: Q99966, EVALUE 1.00e-25
gaaagcccccaaccagcccctgtatgccatggtgttcctggagtcttagggcaatgagaccaggtactcctgaggagatagccacagtggtgctggcagcaggaattcagtgaacagcccccttcaccctcccttctccttccatcccatccagctccttcccagctagccactcacaaccccgccatgggcctcagaattgctaaagggacatcagaccatactacacatcattagatctcaatgaagaacacctctagttggcccgtctctttgtaagtaactttatttttatttacaacagaattggtggctttattcctccatctttagggacacttggcattagcagctagatggaaagtccgcagtgaagtcaaactcattctgccccagccacagctccggaagctcattggctcggtccaaccccagttccaccaccagcgacatcagcacttcctcatccactgggtccgaatcgatgatagcagggctctgggcaccagcaga

SEQ ID NO: 11249 - DNA, 512 bp, Homo sapiens
  MAP TO AL031133.1; EXPRESSED IN HELA, SIGNAL = 0.25; SWISSPROT HIT: P05445, EVALUE 2.00e-03; EST_HUMAN HIT: BG397809.1, EVALUE 0.00e+00; NT HIT: gi14784297, EVALUE 3.10e-02
gggctcgcatcgcgctctacagcgtcttcccgcgtgaccaggtggaccgcgtgatggccgcgttcccggagctctcagacctcgccaggctcatcctcctggtacagagatgccagagcgcgggggcgcccctgggcaagccctaagggaccaacacgcacttgcagggaatggcccagcctcgccttgcgtcttggacgggtggacctgtggttgccagcctggacctgagtgggcccatcatggtgcccccttttctttaaagatggtcagggaagcctgcttcctcctcctgagcggggttgtgggggcctggtggcacttggtgatcctcactgaggccggggcctgctgcggggaggtccacccacttccgtggagggaatgattttccatgtgcacggagactgcgggtccaagctgcagtagaacccacaagtgggtcacaaaatcaatttagtgggtcaccaccacaaacacagtggactgggacagggcaaagcgcaccctgt

SEQ ID NO: 11250 - DNA, 516 bp, Homo sapiens
  MAP TO AC015493.4; EXPRESSED IN HELA, SIGNAL = 0.3; SWISSPROT HIT: P29584, EVALUE 3.60e+00; EST_HUMAN HIT: BI830098.1, EVALUE 7.00e-66; NT HIT: AF220491.1, EVALUE 1.20e-01
aatgagtgcaggcgcagccggctgcacatggggcaattgaggtggttcaccaggtgactgttggctggtattgactttacttcatccacctgggtatcgctgctcccagtgcgcagggcagtcttggagctgaaaggagaagcaaaggcagggtttcaggaggcaggctcaagagcttgctctgcttctctacctctgaaagaactcttggttcctgaggggcagtctagtgtggtggtgaggagcctgagctgggcgctaaggtgcctgcgttctcaatctgtctccaccgtttttcagcggggtgacctcaggtaagccagttaacctctcggcctgtttccttgttataaaattagtacctatgtcatagagtttcttgagaagattaaaattgagtttaatacttgtacagtctaagagcagtccgtggtacacagccagtgtgctgagactgcttgttgttattaagcagaggaaaagcagcagagactggcgttgtcagctaggccttgg

SEQ ID NO: 11251 - DNA, 504 bp, Homo sapiens
  MAP TO AL033527.25; EXPRESSED IN HELA, SIGNAL = 0.44; EST_HUMAN HIT: BG204084.1, EVALUE 1.00e-110; NT HIT: M19720.1, EVALUE 0.00e+00; SWISSPROT HIT: P12524, EVALUE 1.00e-13
tcatgcagggatccagggggtctgctcgcaccgtgatggtgaccggcttccgaatacccagagactgcctcttctctactgtcacaacatcaatttcttcattctctgtccgagaaaagagatcaagagaagaaacacatcccatgagaaacacaaacatagaccctacagctttagctgtctacgctggtgcttgggaaggtaggagacatttttccaatttagatatatacaaatcgaggtgagcagaaagctgattcatttgtaatgtggtaagggcacagtgaaggaaaggaggggacattagcaagaaggaaaatattctccaatttccttttgcacagcaaggcttagataagaacaaaaggcagacccaagccaacagcccccagtctgcaaaggctctcccctcccccacggaggggttggagagaaagagctaccggcctgggacaaagtttagctataaagatcttccccagtcgggctctttcatgccccatc

SEQ ID NO: 11252 - DNA, 503 bp, Homo sapiens
  MAP TO U65406.1; EXPRESSED IN HELA, SIGNAL = 0.58; NT HIT: gi14768356, EVALUE 0.00e+00; EST_HUMAN HIT: BG431020.1, EVALUE 5.00e-88; SWISSPROT HIT: P48048, EVALUE 3.00e-64
cctttcttccacatggcagcggagacccttctccagcaggactttgaattagtggtgtttttagatggcacagtggagtccaccagtgctacctgccaagtccggacatcctatgtcccagaggaggtgctttggggctaccgttttgctcccatagtatccaagacaaaggaagggaaataccgagtggatttccataactttagcaagacagtggaagtggagacccctcactgtgccatgtgcctttataatgagaaagatgttagagccaggatgaagagaggctatgacaaccccaacttcatcttgtcagaagtcaatgaaacagatgacaccaaaatgtaacagtggcttttcaacgggagtaaagcaaagtctctaaagctcctagtacctagaagcattatgaagcagtcaacaatttaggggtacgaaagtaggatgagagccttcaaagtctaccagcacaaagacccctgagccccgcaattgtgatccca

SEQ ID NO: 11253 - DNA, 522 bp, Homo sapiens
  MAP TO AC009516.17; EXPRESSED IN HELA, SIGNAL = 0.38; NT HIT: V00574.1, EVALUE 7.70e+00; EST_HUMAN HIT: BI831230.1, EVALUE 0.00e+00; SWISSPROT HIT: P97364, EVALUE 3.70e+00
gccaagtggtagacggcgggcacatgcccggcccagcctcagcaccgtacaccggcaccgtgtacggccgaccctctgcactggacaccccaacaactacccatccagctccagctccatgtccaactgccatagcagcctcatggccggctgtctgggctcccacagccgggacagtgacctaggtgcccaaggctcattgccacctgtgagggacaaactcctgctggagaagaacctcaagcggctgctacagctggagagggaaggggtgagagccagggccatggctgggtggggtggactcccatggagagcccagggctagggtcagccctggcttggctgctcctgaacacttcacagagtcaccctctttctgcagaaaggcctcagtcagtcctgctcccagagggactccctgctgtgggattcgctgggtagccagaccagctttcagtggacacaggagcagcccttgtcctggttctcagggctgctgggctcaagctctggcgtgcc

SEQ ID NO: 11254 - DNA, 501 bp, Homo sapiens
  MAP TO AC013648.3; EXPRESSED IN HELA, SIGNAL = 5.7; EST_HUMAN HIT: AW996549.1, EVALUE 0.00e+00; SWISSPROT HIT: gi1351900, EVALUE 5.00e-12
gccccaaggcggatgtgatgacccccgtcgtggaggtgtctctgcccagcatggaggtggacgtcgaggccccgggagccaagctggacagtgcgcggctggagggtgacctgtccctagccgacaaggacatgactgccaaagacagcaagttcaaaatgcccaagttcaagatgccgtcgttcggggtgtctgccccaggcaagtccatcgaggcctcgttggatgtgtctgcgccgaaggtggaggctgacgtgagcctcccctccatgcagggggacctgaagaccactcacctcagcattcagcccccttccgctgatctggaggtccaggctggccaagaggatgtgaaactcccagagggccctgtgcatgagggagccggcctcaaagggcacctgccgaagctgcagatgcccagtttcaaggtacccaaagtggacctcaagggtccccagatagacgttaatgtccccaagctggacctgaaaggcccca

SEQ ID NO: 11255 - DNA, 537 bp, Homo sapiens
  MAP TO AC006313.1; EXPRESSED IN HELA, SIGNAL = 0.51; NT HIT: X94742.1, EVALUE 1.30e-01; EST_HUMAN HIT: BG471129.1, EVALUE 3.00e+00; SWISSPROT HIT: Q95155, EVALUE 4.00e-43
ctgagcttctgccgctcccggaagatcaatagcttcttctgcgatatccctccactgctggccatctcgtgcagtgacaccagtctcaatgaactccttctcttcgccatctgtggcttcatccagacagccacggtgttagctatcacggtgtcttatggcttcatcgctggggctgtgatccacatgcgctcggtcgagggcagtcggcgagcagcctccaccggtggttcccacctcacagccgtggccatgatgtacgggacactcattttcatgtacctgcgccccagctccagctatgccctggacactgacaagatggcctctgtgttctataccctggtcatcccgtctctcaacccactcatctacagcctccgcaataaggaggtcaaggaggccctcaggcagacctggagccgattccactgtccagggcaggggtcccagtgattggtccagggaggctgggtaggtctgactatgaggggatgaggaaggtcggggcctctttctggccccgtcactgtcggt

SEQ ID NO: 11256 - DNA, 509 bp, Homo sapiens
  MAP TO AL136418.1; EXPRESSED IN HELA, SIGNAL = 3.6; NT HIT: gi15300019, EVALUE 0.00e+00; EST_HUMAN HIT: AI864905.1, EVALUE 0.00e+00
cgcaatcatggagcagcttggtgaaaaacaactgtccagacaagacatctgctgctgcaggctcctcaagtagaaaaggaagcagcagttctgtgtgtagcgtggccagtagcagcgacatcagcttgggttcgaccaaaacggaacggagatcagaaattgtaatggaacacagtatagtttcaggagctgatgtccatgaaccaattgttgttctttcatctgctgaaaacgtccctcaaacagaagtagggtcatcttccagtgcaagcaccagcaccttaacagcggaaacgggaagtgaaaatgctgaaaggaagttaggccctgatagttctgttcgtactcctggggagtctagtgcaatatccatgggaattgtcagtgttagttctcctgatgttagttcagtatctgaattaactaataaagaagcagcttcacaacgacctcttagctcttcagcaagtaacagactgtcagtgagttctttgttggctgctggggcc

SEQ ID NO: 11257 - DNA, 553 bp, Homo sapiens
  MAP TO AC004908.1; EXPRESSED IN HELA, SIGNAL = 1.4; NT HIT: gi15304226, EVALUE 6.00e-10; EST_HUMAN HIT: BG986299.1, EVALUE 3.00e-25; SWISSPROT HIT: P52742, EVALUE 3.00e-69
cacactggagagaaaccacacggatgtcatctatgtgggaaagcctttactcattgctctgatcttcgaaaacatgagagaactcacactggagagaagccatatggatgtcatctatgtgggaaagccttcagtaaaagttctaaccttagacgacatgagatgattcacactagagaaaaagcacagatatgccatctatgtgggaaagccttcactcattgctctgaccttagaaaacatgagagaactcacttaggagataaaccatatggatgtctcctatgtgggaaggctttcagtaaatgttcttaccttagacaacatgaaagaactcacaatggagagaaaccatatgaatgtcatctatgtggaaaagccttctctcattgttctcaccttagacaacatgagcgaagtcacaatggagagaaaccacatggatgtcatctatgtgggaaagcattcactgaatcttctgtgcttaaacgacatgagagaattcacactggagagaaaccatatgagtgccatgtatgtgggaaagccttca

SEQ ID NO: 11258 - DNA, 536 bp, Homo sapiens
  MAP TO D87009.1; EXPRESSED IN HELA, SIGNAL = 0.38; NT HIT: AF223676.1, EVALUE 6.00e-10; SWISSPROT HIT: Q9HNE4, EVALUE 2.20e+00; EST_HUMAN HIT: BG473533.1, EVALUE 1.00e-125
tgcaggctgcgacacgtgagcaggatattgacggaagtggcctttctttcttcttgactttgagcctggggtgactctgttcaaaatgtttgaaacgactggttttgaatttgaaatcatcccgacaaagagaacttcagcatctctatgtacatgctccaccccaacatagatcagatctggatcttcatcatcctcctccctttgtttggattctctcaaattcttctttggtgattccactttcttacacaaaaagatatctcccattttcaatttactttttgcttgaagccactggtctcttcaacttccagagctgtctttttacaaattgccacctaagtgcaaccatgtgacaatagtcaatatttatttcgaaagacaaaatcattactttattgtatcctcccttaaaacactgagataaccatcaacatctctattttacacgtcagaaatgaggcttgaaacattttaaatggcataataatttcaaatttacctgtctctcctcccctggtcttctgcagttg

SEQ ID NO: 11259 - DNA, 510 bp, Homo sapiens
  MAP TO AC002425.1; EXPRESSED IN HELA, SIGNAL = 0.33; NT HIT: AF141333.1, EVALUE 0.00e+00; SWISSPROT HIT: Q90267, EVALUE 2.60e-01; EST_HUMAN HIT: BE538152.1, EVALUE 0.00e+00
ccaccccagctgagttgccctgtgcctacccgtgtcccaggggccttctcctggctggcaccggggtcccatcatgcctcagagggcttggctccaggggttcctccagctggaggggtctctgctcaggagctgacagctcctcctcaggagggttgggggctgggggctcctcctgctgctcccaggccggagtccgacgaaaagagggccgggagcgacgctgtgaggagcttctcgagaggtgcacgcgactccttgggacagagacgtctaggagggacccggggagcggggcctgcaggaaagggggcacagaggaccatggggccggcttcgggattccactcgttccccccgagaccccaccaagagccctcacctcgctccagctgttggcagcacctcctctggcactgcccatggcctcagccgtctcggcttccccgactgactccggcgcagcttctgcaggggcctggtgtgttggctgctcctcctggcccctga

SEQ ID NO: 11260 - DNA, 544 bp, Homo sapiens
  MAP TO AC007608.2; EXPRESSED IN HELA, SIGNAL = 0.47; EST_HUMAN HIT: BF804481.1, EVALUE 1.90e-01; NT HIT: AJ303140.1, EVALUE 0.00e+00; SWISSPROT HIT: P55350, EVALUE 3.90e+00
agccatgcccacatctgcccagacctccaggacattctctgtgtatatgtcctccaggcagagcgtctctgctccatcataggtactgaggaagcgagactgagcagacaccgtggtcctcagcttggccatatacttcttgcatgtggcagctggaaggcagaagaagaggcagatgaaggtggcaccatggtgaagacgggacctaaccagacaatgggctgctgcgggggacgctgacataactgaagggataggagagccagcgggcgcccatcctggctcctccattcacaagctgtgcactttgaggacagtcaaggaaacttcctaaccctcagtttccacctctgtaaggtgggagaaatgttggtcactacctcacagagttttacacggatcaactaagatgacctatgtcaagtgcttagcacagtgtaagtgctcaacacaaagtaagtgctcaaaagacatcagtgactgccgttatcattactgacaccaggaggagttctagatgacgggaaggggctctgggctggga

SEQ ID NO: 11261 - DNA, 513 bp, Homo sapiens
  MAP TO AC006050.1; EXPRESSED IN HELA, SIGNAL = 0.74; NT HIT: gi14775924, EVALUE 0.00e+00; SWISSPROT HIT: O43390, EVALUE 4.80e+00; EST_HUMAN HIT: BG721463.1, EVALUE 0.00e+00
agcgagaagcggagcacacgcagaagacgaaacaaggaggaggagaagagaagaagaaccttggcgaaggaagagagtgaccaaactcgtcccggacgggaggagggcaggcccgcccagagggaatcggctgctttaagggaagccccgccccctggtggtgacgctccaccaggcccgtccgcgattggctgcggccagagggcgggatggggttgctaggcgaggaggggatccggcgggcccccgccgcccggagcgctgagccgcgggagcggagccggggttagcggcgctgctggaagatggcgagcggccgggacgagcggccgccttggcggctagggcggctcctgttgctcatgtgcctgctgctgctggggagctcggcccgggcggctcacatcaagaaggcggaggcgactaccacaactacgagcgcgggcgccgaggcggccgagggccagttcgaccgctactaccacgaagaggagttggagtcggcgctgaggg

SEQ ID NO: 11262 - DNA, 506 bp, Homo sapiens
  MAP TO Z95115.1; EXPRESSED IN LUNG, SIGNAL = 1.4; EXPRESSED IN PLACENTA, SIGNAL = 1.4; EXPRESSED IN HELA, SIGNAL = 0.93; NT HIT: gi4507666, EVALUE 0.00e+00; SWISSPROT HIT: O60704, EVALUE 2.00e-10; EST_HUMAN HIT: BI771016.1, EVALUE 0.00e+00
tggtgcccaccatcaccagctcctcctgctcaggccgcatggccccccgggggctccgcaggcccgccagcaccgcccggcactctagcacctgctgtcccagctgaaccgccagcaccaggaccagggcgcagccggctgccagcagcaccctccgcaccgacaggcgcatgctgggccggaggcagggtaggcctggcctgagggcccgcttctggggcttcagcgacaggttagcgggcagcccgccaggctcacatctggggagagagggggacatgcatagtcagggaggtctgtgagctgtgagctctccaataactgcaaagccctataactgcaaacaagaggctgctgacatgaatgcagagggcacctttcataagcactagctgtgtgcctggcaccctgctgggcacttttttcaattttttttgtttttttaaagagatggggtctcaccatgtttcccaggctgctcttgaactcgtgggcctgggtgatcc

SEQ ID NO: 11263 - DNA, 530 bp, Homo sapiens
  MAP TO AC006486.1; EXPRESSED IN HELA, SIGNAL = 0.4; SWISSPROT HIT: P08563, EVALUE 2.90e+00; EST_HUMAN HIT: BG391067.1, EVALUE 0.00e+00; NT HIT: gi16174919, EVALUE 0.00e+00
tgggggagaccatcgccatcattgagacatcccagccactggcgcttgaggacaccctgcagctgtgccaggctgcactgggggccagtgaagcaggcgggctcttgcagttggacacggccttcgtgtgacgcagctgaaaagcaacaacaaaagggtttggttgcaacagccagtgtgggtacctctggggagagaggacctcctctgacaaactggtctggtacccaccatgtgccaggatccaccctggcctctttttacccactgactccccagaacaacccttccaggcttctcttgtcatctttctctgcctgaggggaaactgaagctctgaaatgcgatgtgatctgtaccaggtcacccagctatgctgcaaagtgggttggccaaggccctttgcactgcatcaccctggtgcccagcaacatcaggtaaccttcactgagcaccaagcttatgccaggtctgtgctggccactctcatatacctcttcagatcctctgcttgtacccccagcccttgc

SEQ ID NO: 11264 - DNA, 579 bp, Homo sapiens
  MAP TO AP000546.1; EXPRESSED IN HELA, SIGNAL = 1.6; NT HIT: gi9966912, EVALUE 0.00e+00; SWISSPROT HIT: O73723, EVALUE 1.00e-64; EST_HUMAN HIT: AL515703.1, EVALUE 0.00e+00
cccactgctctgggtctcagccctgtgatcacctcagtagatattccgagcttggctatacaggcaacactgagccatagtttactattctttcatgcatttctatcagagagtcagcaaaggtagttgacaaagcccaagggagaatgttgagggtagttgatgacctggactttttcatacaggatgaagccattgataaatctatgtatgctacaaagtggtcaatatgacatggaatcactgaagactgggatattatggaaaggttcatggagcaagtggtttttaaatgtctttgagcagaatctgaggaccattattttttaatgacagaacttccactgaatacactagaaaatacagagcatttttgcagaaattatgtttgaattatttaatgtaccaggattctacattgcagttcaggaggtactagccttggaagtatcttggacatctcaacaagtgggtgaatatatgttaatgagtatagtcattgacaaaggagatggagtcacccttgttctcccagttgtagaaggttatgtaattgggagctgcatcaatcacatcctg

SEQ ID NO: 11265 - DNA, 541 bp, Homo sapiens
  MAP TO Z97205.1; EXPRESSED IN HELA, SIGNAL = 0.48; SWISSPROT HIT: P22793, EVALUE 1.00e-04
gcaggctcccctcctccacctgcaggctcctctcctccacctgcaggctcctctcctccacctgcaggctcttctcctccacctgcaggctcctctcctccacctgcaggctcctctcctccacctgcaggctcttcttctccacctgcaggctcccctcctccacctgcaggctcttctcctccacctgcaggctcccctcctccacctgcaggctcccctcctccacctgcaggctcttctcctccacatgcaggctctcctgcaccccaggtcactaccttggtttccttgggttcctccagcacttgctgcacatcctggccaggagtctcagtatctgttcttccctcagccaggtccttcacatcactggggcctcaagtcaaaggccatctcccaagacgctttccctgggaagtcaccaggttttgtctctagctgccctgctttgtccccttcctatgcattgttttttttttttttctggtttatgacagccttcctgcagaggacaatggctcctgggcagctgcgacct

SEQ ID NO: 11266 - DNA, 548 bp, Homo sapiens
  MAP TO AC005952.1; EXPRESSED IN HELA, SIGNAL = 0.26; NT HIT: gi15307531, EVALUE 3.00e-70; EST_HUMAN HIT: BG955036.1, EVALUE 0.00e+00; SWISSPROT HIT: Q9Y2A9, EVALUE 4.00e-20
tcctggtgggcacagcctccaacccgcacgaggcccgcaaggtcaaccggctgctggagctggaggcacagactcacggagacatcctgcagtgggacttccacgactccttcttcaacctcacgctcaagcaggtgcgctggactggggtcacctgatcggggccacctgtccttcttgtccaaattaccacccactcctgagggacccaggggaccagaagtcctcgtcagtccatcacagcccattctgcccctctgctgtcctcaccagcctcgtggagacccaaaatggtcttcttctaggagaggctagggggaagggcagaggagctaggttactagcacagagctcaagcctgatgatgcggattcgaatccaagctctgcctcttacttggtgttcgaccttggaggagttcattcacctctctgtgcctcacttttctcacctggaaaatgggatgtgaatgagtcccacccacctctaagggctactgtgaggtttacaggagatggagtttataaggcacccagaccagtgctgga

SEQ ID NO: 11267 - DNA, 509 bp, Homo sapiens
  MAP TO AL133415.12; EXPRESSED IN HELA, SIGNAL = 6.8; NT HIT: gi14742599, EVALUE 7.00e-68; SWISSPROT HIT: P02544, EVALUE 5.00e-18; EST_HUMAN HIT: AL538820.1, EVALUE 3.00e-68
cttccttctcccgcccggtgattggcagcctgccagaaggggcaggaaactttctgaaagtttggaggactggctctcattgtgcccaagggccttcaactgcacacaaagtggtagttttaagaaatctgtaacttgaaacggagcgtccttgggcaatgtgtggggacagaggaggaaatgcgaactgcaaggtctgggttctgggcggggctgcgccaccacagccacagccccgctctccgctgtctccctggcaggcctccccccggccacatccccaagggcgtggcagctctcgcgggggccgggggggcgttcccctctccctccagccccctcccgaggcccagctacttgcatgggcgcagccttacttctcccggaggcgcatgatgtcctcggccaggttgtcgcgctccacctcgacgcgggctttgtcgttggttagctggtccacctgccggcgcagctcccgcatctcctcctcgtagaggtcccccaggcgc

SEQ ID NO: 11268 - DNA, 534 bp, Homo sapiens
  MAP TO AP000344.1; EXPRESSED IN HELA, SIGNAL = 0.94; NT HIT: AB049468.1, EVALUE 7.90e+00; EST_HUMAN HIT: AL040378.1, EVALUE 2.00e-57; SWISSPROT HIT: Q61087, EVALUE 2.60e-01
tgtcatccacggcccagtgcagaggaacacaggtgttgccgtcaaactgccagggtccgatcccgcctccatcactcaccccgggagctccctttaagctaggagtcaacagcaaggatggaaacatgagtgctttttaaagtcctaaaagtttagaggccgactgtcaatttctcctgcacccctgggcacacaccgggagaactttgtctccaggatcaagtaagtgcctgtgagagagttgtgtccctcagattctgttcaccacaggtgacactcaatgcaaccccaaacctcttctgcacaatcccaaggggtgctgactaatccaacccaaaggctgtgatgtttggcagaggcagaaaagaaaaggccaggtgttccgggaaagatcaccttcaaataacacagcactctcatagcccagagagacagttcttactattatgccaataaacctggaaaagaccaaatccaatttgacacatatttcctgtttcgttttgatttcatgccccctccctcaacctccca

SEQ ID NO: 11269 - DNA, 511 bp, Homo sapiens
  MAP TO AL138479.2; EXPRESSED IN HELA, SIGNAL = 2.5; EXPRESSED IN LUNG, SIGNAL = 0.96; NT HIT: U43842.1, EVALUE 0.00e+00; SWISSPROT HIT: P12644, EVALUE 9.00e-16; EST_HUMAN HIT: AA333903.1, EVALUE 1.00e-61
gctcccggaagagccgaagctctgcagaggagatcacctcgttctcagggatgctgctgaggttaaagaggaaacgaaaagcagagttttcactggtccctgggatgttctccagatgttctaggcacagttaggaaggaaggggaaaagaaaaagcatatgaacttttttcaaagatggaagagtcaagagatagctcagggttgggcaatgaatggtgaattctgcttatgcaggggaaacctactgggggaaaataagcataccccttaatttgaaggagcagataagtggggcagctaacaaaccagcaaaatgtagctagcatttctcaagcaccaaagacagaaactatatccagcctccttgatatgtctaataatttctatgtgtcaactcctctatggcaccacaatcagactcctcttttaaaccccccaccttggctttgtgtccacagttttctttacaagtggttgtaaagaaaaagaggggccaacagagcacaggc

SEQ ID NO: 11270 - DNA, 517 bp, Homo sapiens
  MAP TO AC007676.19; EXPRESSED IN LUNG, SIGNAL = 1.1; EXPRESSED IN HELA, SIGNAL = 2.2; NT HIT: gi4507974, EVALUE 3.00e-08; EST_HUMAN HIT: AL046425.1, EVALUE 5.00e-08; SWISSPROT HIT: Q05481, EVALUE 6.00e-26
cccatgttgagcaaggtttgcaggataactgaagaccttcccacattcttcacattcataaggtttctcacgagcattaattttctgatgctttctaaggtctgtaagatggctaaatgccttcctaaacttttcacattgatcaggttcctcactagtatgaattgtttgatgtaccatgagttctgtaagatgactaaaggacttctgacattgcttacactcatatggtttctgtccattatgaattctctgatggagagtaacacatgagtgtttcctataaagctgcattttcccatcgctgattatttcacatcttgaatccaaatctagaagacataaaataaaaacattttattggatgagaaaatgtcaatgttattgtagaattaagagaaattctcacctattacagatgctaactcgaaaatacagttataaaatataaaaaatgaaaggagagctaaaaaaatgagtttgtgcagtggaatgcagccttacacacacaggcaca

SEQ ID NO: 11271 - DNA, 503 bp, Homo sapiens
  MAP TO AL035362.1; EXPRESSED IN PLACENTA, SIGNAL = 1.5; EXPRESSED IN HELA, SIGNAL = 1.4; SWISSPROT HIT: Q9WVB9, EVALUE 2.70e-02; NT HIT: AJ271791.1, EVALUE 0.00e+00; EST_HUMAN HIT: AV648781.1, EVALUE 4.50e-02
ggagaaccacagcgcctgcctggactctgtggccaagagtgcgtggccccggcctggggagccggaggccctgcccgactccttgcagctggacaagggcggcaatgccaaggacttcagcccagggctgtttgaagacccttccgtggccttcgctacgcctgaccccaaaaagacaactggtcctctctcctttggtaccaagcccacccttggggttcctgctccagaccccactacagcagcttttgactgtttcccggacacaaccgctgccagctcagcggacagcgccaacccctttgcctggccagaggaaaacctgggggatgcttgtcccaggtggggattgcaccctggcgagcttaccaagggcctggagcagggtgggaaggcctcagatggcatcagcaaaggggacacccatgaggcttcggcctgcctgggcttccaggaggaggacccccctggggagaaggtggcctcgttgcccggggacttca

SEQ ID NO: 11272 - DNA, 500 bp, Homo sapiens
  MAP TO AC004578.3; EXPRESSED IN HELA, SIGNAL = 0.33; SWISSPROT HIT: Q10018, EVALUE 2.00e-03; EST_HUMAN HIT: BI755032.1, EVALUE 1.80e-01
aggtctgaacggcgtcaggggtgtccgcagtggggatacaggtctgaacaacgtcaggggtgtccgcagtggggatacaggtctgaacagcagccaggggtgtccgcagtggggatacaggtctgaacagcagccaggggtgtccgcagtggggatacaggtctgaacagcgtcaggggtgtccgcagtggggatacaggtctgaacaacgtcaggggtgtccgcagtggggatacaggtctgaacggcgtcaggtggatgagcggggagaggcagaaccatccagcgtgacaaaggtcgccgttgccagcgttctctctcgttgctgagcacaccctcctctgttctggcagcatccagcatttccctgggttctctccaggacacccagctctgtgttcccacaaggatgtcagtttctcagtagtgccctccccaccaccgaggctcaggagacccttccctacggctccagggaagcccctgagtgctggcccaaa

SEQ ID NO: 11273 - DNA, 505 bp, Homo sapiens
  MAP TO AJ003147.1; EXPRESSED IN HELA, SIGNAL = 1.2; NT HIT: gi13648497, EVALUE 0.00e+00; SWISSPROT HIT: O15553, EVALUE 1.00e-94; EST_HUMAN HIT: BI024282.1, EVALUE 4.00e-67
tccgcagatgcccctccatccggagtgggccttgcccggggttctgttgccgagtccagattcgcagctgtcttttcctctagagtcaggagaatttctggatttgcgggcgccttctcccctgtagaaatggtgacctcaaggcttctaggtcgcatctttcccgagggcaggtacacttcgaagggcctgcactccttctgccccggggcgccccccgccagcccctgcagcctccccgcggagctggcgtttctgcgcagccggacctcggcctggcccccctctagcgccctgcaggggccggggcttctcccgcccggcagggccgggctccgggtccgaggcttgccctgcgcgtccaggccctccgaggccttctctctgcgtttgctcaggggcttcctcgacagccccctcccggcctcgggctggctgcaccgcaggctggcagctccgcccccgtacggccgagggccgttcccctcgttcccctcggggtggt

SEQ ID NO: 11274 - DNA, 524 bp, Homo sapiens
  MAP TO Z46936.1; EXPRESSED IN HELA, SIGNAL = 0.94; NT HIT: gi12743149, EVALUE 4.00e-85; SWISSPROT HIT: O15482, EVALUE 7.00e-12; EST_HUMAN HIT: AA382807.1, EVALUE 5.00e-85
tgggaccaaaggacgccacctccctaactagtgccaggtgtctaccggactcttgccacccccatgttgtcccctgccaccacagggtcagggccagccgctatgccgctgcaaccacccggcaggggctgccaagctggagcattttcgctagcaagggtcaaggcaggtgtgggactgcagggagagggctggctcgccccactgcagggcccagtcgctaaaagaagcatggacctgctcttccaactggcccctcaccctggctctccaggctcctgtcctggctccctttcaccctcccataggtggctcctgggagcggttcctcctctgcttccagtccccagagccaaggcctcacctacacttctcctcctgaagggactccagcaacagctgcaggtcagtcagagacctctcctttaggctgtgataggactcctggaggctgatgtggaacctcttggcttcttccagctctgcctttaccttctgcaacagcaggttttgttgctgggcca

SEQ ID NO: 11275 - DNA, 544 bp, Homo sapiens
  MAP TO AC005530.1; EXPRESSED IN HELA, SIGNAL = 0.39; NT HIT: AL163248.2, EVALUE 2.00e-89; SWISSPROT HIT: P70213, EVALUE 1.00e-15; EST_HUMAN HIT: BG995896.1, EVALUE 7.00e-66
tcagcttgctcacagcgggccatcttttaatccatattttagctaactaagcaaataaactattagaaccctttttaactccccaagctgcaacattaaatgcagagtccctatttagtggggccaaatcaataaattcagcctgacctaactctatgttccttccaccattatcccacacccttcatatccattctaatgcctgttctccagatttctgtttatataaattagaaaattcaagcagttcttttcgagtgtagtacatctcctcatgggtcacactctcaacctcgcctctaggggccctccaggaaatgatacctaacagtgtacaggcttgacttgagacagggcagagatgatagaaacaggtgaagagctagtggttgccattggaattaaaatgtgtgtgatcagagaagacatgggggttagtacctgacacaactgttttggtgatggtctgagtagaaatgtcagtgaccttggtgggcacgaaagtggcagagacagtggtggaggttgcagtggccccagaggc

SEQ ID NO: 11276 - DNA, 512 bp, Homo sapiens
  MAP TO AC008151.1; EXPRESSED IN LUNG, SIGNAL =   2; EXPRESSED IN HELA, SIGNAL = 3.2; NT HIT: AF254822.1, EVALUE 6.00e-19; SWISSPROT HIT: P39188, EVALUE 4.00e-15; EST_HUMAN HIT: AI061294.1, EVALUE 4.00e-18
tgcatgcagaatcccagccctctgaaagcttaggggaaacagctgtcccccagcctcaaaatagctgctcattactactggctgatgctatgcatggtgatgacagtggcaatggggttacacagggacaaatgtgtctcactcctcaggatgctggctgccgagtcgctgaaaacaaaaccaatttttccaggagggccaagggtcacaaaaacaggtaggcaagtatgtatgggctcaggagacacacccaagccaagaaggcattcccatttgtttttctttttcagacaggttcttgctttgtcgcctagactggagtgcagtgatgtggtcatggctcactgtagccttgacctcctgacctcaagcgatcctcccacctcagccttccaagtagctgggactagaggcatgtggctaattttctattttttgtagagacagggtctcactatgttgccccaggctggtcttgaactcctgggcttaggcaatcctctgccttggca

SEQ ID NO: 11277 - DNA, 509 bp, Homo sapiens
  MAP TO AL138846.2; EXPRESSED IN PLACENTA, SIGNAL = 2.7; EXPRESSED IN HELA, SIGNAL =   2; NT HIT: gi14761650, EVALUE 1.00e-53; SWISSPROT HIT: O43707, EVALUE 9.00e-42; EST_HUMAN HIT: BI907645.1, EVALUE 2.00e-53
ccaatgtcatggggccctggatccagaccaagatggaggaaagtgggtgcagctccatcaaaatgaaggggaacccagaggaccagctaaacctgaagcaatatgagcaaaacatcatggaccacaagctgaacctggacctgctgacgcagagcaccagctcctccaggaggtcttcatcttcaacaacaagcatatcagctacatggtggaacacatccgcacggctgggagcagctgctcaccaccattggctgcaccatcagtgaggtcaagaaccagatcctcacctgcaatacccagggcattggccaggagcagatgcaagagtttcaggtgtccttcagccacactgacaagagccatggcagggtgctggggctgaaggagttcaaggcctgcttcatcagcttgggatacaatgtggaggataacagcagagcaatgctgagttcaactgcaccgggagtgtggttgaccccaaccatagcagccttgtggcctcccaa

SEQ ID NO: 11278 - DNA, 552 bp, Homo sapiens
  MAP TO AC006541.1; EXPRESSED IN HELA, SIGNAL = 0.23; SWISSPROT HIT: P31276, EVALUE 5.30e-02; NT HIT: AE001073.1, EVALUE 2.10e+00
ggtggggatgggtcctcgtgacactcctgcgtccatggagctctgtgttgtggccatggccatgggttctggtcactctgtggtactgggagactcagcagccactgtgccttttggactctggatctccagtcctgtgggacagcaagcccaatgcccaggtgaacagaccccaggccccggaagcagtacactcacccacggaagcatgtggagtgcagacgggggcagaactctcactcccaccatgcccggtggactgggatgcacagacatggtccctggtaggccccagccctccctcccctcagggctgacctgtccgccatgtgcctggccacacctttcttgaacctggggatattttcagctctgccactgccctgggtgatgcacagttcctcgtttttccaggtcctcctcgaaactctgactctggagtaaggtttggtggacagagctctgttgcctcctcaggcccattgtgagttaggatctgttttcttgcctgccatcttccagagttgggctgggcacacaatgcgggctcag

SEQ ID NO: 11279 - DNA, 546 bp, Homo sapiens
  MAP TO AC006486.1; EXPRESSED IN HELA, SIGNAL = 0.89; NT HIT: X56682.1, EVALUE 5.20e-01; SWISSPROT HIT: P08121, EVALUE 6.10e-01
gtccgtctcagccctggccccagctcccagccaggcctaccaggcagcctcccgcagcccccacagccactgcaccgtgagccagaggaggctgtgtgggtggcccgctccagcctacgcctgctgcgccccccctgggaacctgagaccatgctgaggaagccccctacaggccctgaggaagagcaggcagagcctggggccaccctgccaccctgccctgctgccctggaccccaaacagcccgaggatgctgaggtctctaagatcagctttggtggcaacctgggtactcactgtgaggagggcgaggagaagcaccctccagccctgggtaccccagccctgctcccactgcccccaccccagctcctgtcaccaccacccaagtctccagcctttgtgggccccggccgccctggcgagcagccctcgccctgccaggaggggagccagggcggcagccgcagcagcagcgtggcctccctggaaaaggggacagcaccggcagcccgggcccgcacgccactgacagccgcccagcag

SEQ ID NO: 11280 - DNA, 512 bp, Homo sapiens
  MAP TO AL021182.1; EXPRESSED IN HELA, SIGNAL = 0.86; SWISSPROT HIT: O62732, EVALUE 5.00e-04
gtctcggcccccaacactgggcccatccaagtaaaacccagtaccaggcatgttgctaataccccaaactccatgccagtacccatggactgagtctccagggccaactcagcatcaggctgcatcccatagccccaggctccaggcttgcctggctgactcagtctctgggccactccacctccaggccaacaccaccagcagctctaggctctagaacaactccagcagccctgggcttcaggcccaccccaatgctagacaagcccccacagattcaggttctagtttccatcccagggccaggccagccccagcaaccctgggctgtagaccacatctgggctggccccagtggtcccaggcctcaggctggtcccagcaacagaacagcccccacagcccttgtcatcaggctagcacctatggacccagcctccaggtcagcctctgtggatataggctccaggccaacccagctccaacccagccccctgcaacccaaggcacca

SEQ ID NO: 11281 - DNA, 525 bp, Homo sapiens
  MAP TO AP000501.1; EXPRESSED IN HELA, SIGNAL = 1.3; NT HIT: X72861.1, EVALUE 0.00e+00; EST_HUMAN HIT: AL550664.1, EVALUE 0.00e+00; SWISSPROT HIT: P13945, EVALUE 4.00e-17
cggcaggggtggacagatggtggcagaggaaccacggtgtcccttcctccagatttagctaaaggaaacgtggagcatcccattggccatcctccccactctccaattcggctccagaggcccctccagactataggcagctgcccctttaagcgtcgctactcctcccccaagagcggtggcaccgagggagttggggtggggggaggctgagcgctctggctgggacagctagagaagatggcccaggctggggaagtcgctctcatgccttgctgtcccctcccctgagccaggtgatttgggagaccccctccttccttctttccctaccgccccacgcgcgacccggggatggctccgtggcctcacgagaacagctctcttgccccatggccggacctccccaccctggcgcccaataccgccaacaccagtgggctgccaggggttccgtgggaggcggccctagccggggccctgctggcgctggcggtgctggccaccgtgggaggcaacctgctg

SEQ ID NO: 11282 - DNA, 514 bp, Homo sapiens
  MAP TO AC007363.3; EXPRESSED IN HELA, SIGNAL = 0.23; NT HIT: AJ297357.1, EVALUE 3.00e-08; EST_HUMAN HIT: BE612449.1, EVALUE 2.00e-25
tgggccttttaatcttctttgccgtttctttgtttgaatgtactccagtcaccagcaaaactacatgaagaaaatttttaaaaatttaatcaattttattttacttaaattctttctcttttgactcatacttgcttcgatcatccacaaagtattctccatggcagaactaattttccctcttacagtcatgcatcacttaatgatggggctactctctgaaaaatgtgtcaacaggtgatttcatcattgtgccgatattgtagagtgtacttacacaaacctagatggtctactacaaacctaggctgtatgatatggtctattgcctcttaggtcaaaaacctgtacagcatgttactgtactgaatactgtaaacaattgttaacaactgataaatatttatgtatcgaaatatatctaaacataaaaaaggtatagtaaaaatacagtataaaagataaaaagtggtacacctttagaggacacttagcatgaatggagcttgcggga

SEQ ID NO: 11283 - DNA, 566 bp, Homo sapiens
  MAP TO AL121756.2; EXPRESSED IN HELA, SIGNAL = 0.5; SWISSPROT HIT: P08547, EVALUE 9.40e-02; NT HIT: X60660.1, EVALUE 7.00e-25; EST_HUMAN HIT: BI869615.1, EVALUE 5.10e-02
ttccatgtccgaggaccccccccagtatataccaacggcaaaaaacttgatggtatttaccagtatggtcacattgagaccaacgacaacactgctcagctggggggcaaataccgatatggtgagatccttgagtccgagggaagcatcagggacctccgaaacagtggctatcgcagtgccgagaatgcatatggaggccacaggggcctcgggcgatacagggcagcacctgtgggcaggcttcaccggcgagagctgcagcctggagaaatcccacctggagttgccactggggcggtgggcccaggtggtttgctgggcactggaggcatgctggcagctgatggcatcctcgcaggccaaggtggcctgctcggcggaggtggtctccttggtgatggaggacttcttggaggagggggtgtcctgggcgtgctcggcgagggtggcatcctcagcactgtgcaaggcatcacggggtaaggaggggacgggttctccccagaaagcccccatacacctccaaatgggggtgatcactccctgaagctggggttgccgga

SEQ ID NO: 11284 - DNA, 500 bp, Homo sapiens
  MAP TO Z97183.1; EXPRESSED IN HELA, SIGNAL = 0.4; NT HIT: gi16175092, EVALUE 0.00e+00; SWISSPROT HIT: Q14541, EVALUE 1.60e+00; EST_HUMAN HIT: AL048781.1, EVALUE 0.00e+00
tccccaccacttcctccctccgggggatttgatcccctatggccaccgctaacagcatcatcgtgctggatgatgatgacgaagatgaagcagctgctcagccagggccctcccacccactccccaatgcggcctcacctggggcagaagcccctagctcctctgagcctcatggggccagaggaagcagtagttcgggcggcaagaaatgctacaagctggagaatgagaagctgttcgaagaggtgagctttagcggggaagattgttgtaccccagggagggggatggctgactggttctcctgtcctttctttcccactaaccccacctcccctttctctcaaccccctcccttgtctctcttccccttccttcttcccctgaaccttctagttccttgaactttgtaagatgcagacagcagaccaccctgaggtggtcccattcctctataaccggcagcaacgtgcccactctctgtttttggcctcggcgga

SEQ ID NO: 11285 - DNA, 500 bp, Homo sapiens
  MAP TO AL353997.2; EXPRESSED IN HELA, SIGNAL = 2.8; EXPRESSED IN LUNG, SIGNAL = 0.98; NT HIT: AF061809.1, EVALUE 0.00e+00; SWISSPROT HIT: P08779, EVALUE 2.00e-24
agcacctcggtgaccgcctggcctcctacctagacaaggtgcgtgctctggaggaggccaacgccgacctggaagtgaagatccgtgactggtaccagaggcagcggcccagtgagatcaaagactatagtccctacttcaagaccatcgaggacctgaggcacaaggtgggtgactttggtgtatggagcactgagagaggctggggctatagtgtcccttgggatacctctttttagcaattgcactttacaaacagggagactgggcacctttggggagtagccaggatcatccagggaagtggtggcagagggtcccttttcagcatctctgtgcccggactggggctgttaccctgaatctcttatttcctgcaagggttcagctgcaagttccgcttccctgccttgggcccaggaagggggtgatcgggatggagtgcatccctgcataccctgagctggtggagaaggcatgccagccctgccagccagaag

SEQ ID NO: 11286 - DNA, 511 bp, Homo sapiens
  MAP TO AC010522.3; EXPRESSED IN HELA, SIGNAL = 0.8; NT HIT: U71363.1, EVALUE 0.00e+00; EST_HUMAN HIT: BE936830.1, EVALUE 0.00e+00; SWISSPROT HIT: Q9Y2P7, EVALUE 8.00e-28
acaggtgtgaggcctgggggaataaattgtatgacagtggaaactttcatcagcaccagaatgagcacattggagagaaaccctacagagggagtgttgaggaggcgttgtttgtgaagaggtgtaagttgcatgtgtcaggggagtcatctgtcttcagtgagagtgggaaggactttttgcccaggtcaggattactccagcaggaggccagtcacactggggagaagtcaaacagcaaaactgagtgtgtgtctccctttcagtgtgggggagctcactatagccatggagattccatgaaacattttagcaccaaacatatactcagtcagcaccagagacttctccctcgagaagaatgttatgtgtgctgtgaatgtgggaaatcctttagcaaatatgttagcttcagtaatcatcagagagttcacagtggaaaaagaccttatgaatgtggagaatgtgagaaatcttttagtcaaaagagcagcctcattcaacatcagca

SEQ ID NO: 11287 - DNA, 536 bp, Homo sapiens
  MAP TO AL031708.3; EXPRESSED IN HELA, SIGNAL = 1.1; EST_HUMAN HIT: BF237766.1, EVALUE 4.80e-02; SWISSPROT HIT: P43424, EVALUE 4.40e-01
gtccccgtgggcagaacagccatgctgtgacatggtgtacatctggaaccataacctggagccccttattccctgggtgtggagccccctctgtggccttgcagtgctagaactcagtcacagccagccctccacgatgtcagtggcctgtgtctggcccacggggtgtggccaaagcattcctaccagcaggttgagcaaaacgaccaagggtcagcccagccttcttcacatccatggctggctcccggccctgcctgctccccacataggcgtggtgcgtgtcaggtgtgaatttcctgaaggtactaagtgcccgggtcagcattgttgggtagtggtgtgaggaaagccacgggtggtggcatgatttataccctgggggatgccagtggggagcgtggctcgtgtctgtacccatgtgcctggtcagcatcccgacctcagtgctagccagtgtgggccttccttgacgggcactcagcggaagacactcgaggagcggcagctgcaggactcatgctccgcaccgatgc

SEQ ID NO: 11288 - DNA, 528 bp, Homo sapiens
  MAP TO AL034384.1; EXPRESSED IN HELA, SIGNAL = 1.5; SWISSPROT HIT: Q13495, EVALUE 3.00e-32; NT HIT: gi13629957, EVALUE 0.00e+00; EST_HUMAN HIT: BF928459.1, EVALUE 0.00e+00
gagcctggcttccagcaaggagtttgcttctagttgcagccaagttactggcatgtcacttcagatcccatcctcctccacagggatcagctattcgattccttccaccagtaagcagatagtgtcaccgagttcttcaatggcacagtccaagagccaggtccaggccatgctccctgtcgctctgccccccttaccagtgcctcagtggcatcacgcccaccagctgaaggcgttggcagccagcaagcaggggtctgctacaaagcagcaagggcccacccccagttggtctggtctgcctcctccaggactctctccaccttaccgcccagtgccatcaccacacccaccaccgctgccactgccaccaccaccacccccattcagcccccagagcctcatggtgtcctgcatgtcgtccaataccttgtcgggtagcactctccgaggctctcccaatgccttactgtcaagcatgacgtccagcagcaatgctgccctggggcccgccatgccctatgctcc

SEQ ID NO: 11289 - DNA, 520 bp, Homo sapiens
  MAP TO AL121594.3; EXPRESSED IN HELA, SIGNAL = 0.99; SWISSPROT HIT: O15091, EVALUE 1.00e-32; NT HIT: gi13649256, EVALUE 0.00e+00; EST_HUMAN HIT: AU124438.1, EVALUE 0.00e+00
ggccttggcaatcagattcgttgctttggtattctgtggagacattgttttaagagaaaacaacctctgctggttcctgatgccacagcggtctgccagaaacagcgagacataagagtgccctgggcctagcccaaggtatgggctcttccaaagcttcggaaagcttcgaataccaaacaaatagaaagtcattatgcagtgagatcagcaccagatagtgagagagatgttgaaaaaacccctcttctatggcaaaattaaagagattgggggtcggcggtgcagagtcgaagtggaactttttaaaaggtttgtgtttcttccttacagacaaatcaaggttctgcttttggggctacttaaaagcaagaaggcaggtgagttttctctattaaacaacaatccggggatgtccaacgtcgcaagccgcaaaccaggggacagagcaggaatcctctggtgcctcttacattccagttcatgaacctgaggaaaaagcacaagacggaacgcccag

SEQ ID NO: 11290 - DNA, 556 bp, Homo sapiens
  MAP TO AC008174.2; EXPRESSED IN HELA, SIGNAL = 0.98; SWISSPROT HIT: Q16236, EVALUE 4.60e-01; NT HIT: AL161556.2, EVALUE 2.10e+00; EST_HUMAN HIT: BF801352.1, EVALUE 2.00e-01
tccgttggcaaacccttccagtttagcaaaaaccatattaagaatatctgaagctacagcttttagtttatttggatgcatttcttttgtgcttggtgttttggaagacacaggagcaacaggttttgccttgcttttagtctcttctttattgtcctcctgaacccttctggaaactatgctggagattattttggtggatttggccattttctcaataattgaagcaaatgatgggttgtcaatgtcaagagactctgagatagcttttaatccacaacttgcaaaactggtatccatgtcaacaccacataattttgcaaggatataatccaaaattgctttagaaattaactgaatattagactgcaatgcagcagccattttctgattcttattggtcatctctctgctttgttgactacaagatagctgagaatgaagatgggtccccaggagcttgcttaacatttcatgtagtgtttccccaattctttctaacacttgcaattttgcattctctttaatatggtttccaccattgacactgtggtga

SEQ ID NO: 11291 - DNA, 500 bp, Homo sapiens
  MAP TO AL121774.3; EXPRESSED IN HELA, SIGNAL = 1.8; EXPRESSED IN LUNG, SIGNAL = 0.99; SWISSPROT HIT: P11277, EVALUE 3.00e-14; NT HIT: AF013179.1, EVALUE 1.00e-116; EST_HUMAN HIT: AI133449.1, EVALUE 5.00e-54
gccctgggcaggatgtgggagagccgcagccacaccctcgctcagtgccttggcttccaggagttccagaaagatgccaagcaggctgaagccatcctcagcaaccaggtagagaggcattcagggctgggacaggcgggtctctcagggcagtagctcttgtggtgagtccacaaatgtgctgtaagactcagggaccacattactcttgtcttgtactctgtattcactcatgggggaaatctttgtttctcattaggggccttttccagccttgtgtcccaaactacgccttgttcttgggtctatcagaggctagagaagcgcattttgccctgggtggttagccttccatgtggctttaggcacactgtttattgtgtgcccctggggtaggggtgggggcaaggcctggggagtagtgcctcctccctgtactactctagggggctcattcataccgtggcctgtgtggctgcacgtggtgctcccacttggga

SEQ ID NO: 11292 - DNA, 530 bp, Homo sapiens
  MAP TO AL160492.1; EXPRESSED IN HELA, SIGNAL = 0.52; SWISSPROT HIT: P47160, EVALUE 2.00e-04; NT HIT: gi16164331, EVALUE 0.00e+00; EST_HUMAN HIT: AU129351.1, EVALUE 1.00e-128
ggaccagggcatcaatgtgcgtgagaagtcaaagcaactggtggctctcctcaaggacgaggaacggttgaaggctgagagggcccaggctctcaaaaccaaagagcgcatggcccaggttgccactggcatgggcagcaaccagatcacctttgggcgaggctccagccagcccaacctctccaccagccactcggagcaggagtatggcaaggccgggggctccccggcctcctaccatggctgtgagtaatggaagtgcttctcaccctttgccagagcagcagcaatgggtgacaggcagggtgggtgtctctgggcttagggagtggtggccactgcagagctcgaacctgtcctcagtacccagcttttggtggcccaggcaaattgtccttggtctggattgagttttggttataaagggacttttagtcccttggctgctctggttcagggatctctaacgccctttgctgctctgggcctcattctgtacatctgggcagacggtgggcagaggcaggtct

SEQ ID NO: 11293 - DNA, 502 bp, Homo sapiens
  MAP TO AF236875.1; EXPRESSED IN HELA, SIGNAL = 0.98; NT HIT: AB018709.1, EVALUE 1.20e-01; SWISSPROT HIT: Q93097, EVALUE 1.90e+00; EST_HUMAN HIT: BE242203.1, EVALUE 5.00e-08
cgggacagcccagacccaactccccaggtgtcagccaccatcacagtcatggcggcccacccggaagaggaccatcggacgatctacctgagcagccctgactctgcagtgggggtgcagtggccacgagggcctgtgagccagaactccgaggtaggtgaagaggagacttcggctgggcaggggctgagctccagggaaagccatgctcacagtgccagcgagagcaagcccaaggagaggcccgccattccccccaagttgtccaagagtagccctgtagggtccccggtgtcaccgtctgctggagggcccccagtgtcaccgctggctgaccttagtgatgggagctctggcggcagcagcattgggccccagcctccatcccaaggtcctgctgaccccgctccttcctgccggaccaacggtgtcgctatcagtgacccatccaggtgtccccagcctgccgcctcgtcagcctcggaacagaggcggcccaggt

SEQ ID NO: 11294 - DNA, 501 bp, Homo sapiens
  MAP TO AL359399.1; EXPRESSED IN HELA, SIGNAL = 1.1; SWISSPROT HIT: Q00163, EVALUE 9.10e-01; NT HIT: AB033062.1, EVALUE 4.00e-51; EST_HUMAN HIT: BF807221.1, EVALUE 7.00e-04
gtccagggccacagtgcgtgggtggaagggccgcaggtgcgggggccgacgggcccggccttcctcacaggagctctccccgccagaggagctggaggcgtactgggggaagaaaagtggagctgccgagcccagtctcccctacacgcccccgcttccccgaccctccccagagcacagggccaatgctgcggtcactgtgatgaaaactacagcaggcaccaccaaccatgtcccaccaaacgctgggagcggaactgagtctcaggggaagaacttaagtgaccattcttagcaactttacaaggaaaacggtgtcaccccgcgctgggagggaacgggaagctcaaaagacaagcatgtgtgcccaggccagtggccaggactcacaccaagggccgtgtaaccccagagtgccccaaactccaccctccagccccagagaggggtccctaggaagcccctgcagaggtggtgcggctctcctgagcaccccagggc

SEQ ID NO: 11295 - DNA, 533 bp, Homo sapiens
  MAP TO AC007363.3; EXPRESSED IN HELA, SIGNAL = 0.39; SWISSPROT HIT: Q03376, EVALUE 5.80e-01; NT HIT: gi15027629, EVALUE 1.30e-01; EST_HUMAN HIT: BE612554.1, EVALUE 1.00e-30
cccaggctgacatccgctccaacaggtttctggaaggcagctcctgaaggatcttgcctttggatacctgaggggattacacagggtcagccgatttacacacaaccagcaggctgctttctttccttattttgcccccggtgaaaattaccttagttcagattttccttggaagtcggccgagctctctgtgcctggttgtacttctgggggttgcagaggaggcaaaaatcttggccaaggggacaggaggaaacagtgctccatggattgggctcctgtagagtcccacgagtctgtagaggcctaagatggccttggagtccttgccctggccagtgttctcattctcaagcctttttgtccaggacaacagcatgtgcattggcaaaggtgcaattgtgaagctcatagaagctgctcgccctgaccagaggagcccattgggcccctgttcctatccagtagcaagcaaaacagaacctacagtttctaagaacatgtggagagtggacgagtatcccccagcaggg

SEQ ID NO: 11296 - DNA, 501 bp, Homo sapiens
  MAP TO AC011802.4; EXPRESSED IN HELA, SIGNAL = 0.48; SWISSPROT HIT: Q61475, EVALUE 7.90e+00; NT HIT: gi14742623, EVALUE 9.00e-15; EST_HUMAN HIT: BG429668.1, EVALUE 2.00e-13
caaggtgccagcatggtcaggttctggtgaggggtctcttcctagcttgtagatggctgccttcttgctgtgtcctcacatgagagaagggggaggcaagctcttttggtcttttcttgaaaggacactaatcctataattagggtcttgccctcatgacctcatgtaaacctaattacctctccaagtccccatttccaacatatgggtctggccttcaaggcatcatttgggaggacatggttcagtttttagctgctactgaaagggatatttttcatggatgatgtaaattgtaatcccgcattgggaagagcttaaaccagatcatgtctaaggtttttctagtgtctagattctgtaatgttgctgttaatgtttttatcctttttttaatcagataaaccttcaaatccaaagaaagaaaatttgttattatcctccaatggttgtgatgaagtcaaattgacttttcctgatgatgactggaattcttcgaca

SEQ ID NO: 11297 - DNA, 579 bp, Homo sapiens
  MAP TO AL132838.1; EXPRESSED IN HELA, SIGNAL = 0.6; SWISSPROT HIT: Q9Y573, EVALUE 4.90e-01; NT HIT: gi14748479, EVALUE 0.00e+00; EST_HUMAN HIT: AU120072.1, EVALUE 0.00e+00
ccccacagaggggctacagtgcaaaacagagaggtccaccacgtcggtatacatacagtgtaatatcactgttgcatatttttttggtataatggactcatctaatataattcttgtgggagtcctcaaagttcggtctgtgatttcttcaccagttcgtatcctcctttgtaataaatttcgaaaaaatggggaccgtgcagaaataacagccttgtgggctttgagctcttcatctaaacagttctgatttccaccaaaagcttcaaccagttcagagtctgaagaaaaactaaggacgacatcataataacacatgtaatcaaagagtccacgcatatctacatcaagggaatttggtgttccaaattcttcactaagctgaacaaggatatcgacattttgaaaccttgagtcctccattccaaactctcctgtataaaggtagtgtaacaaagcagaaaacatgggcatatcaataccagctgtattgatgtccattattatctctgccccatactctggtgaggaagaaagcagtgttttaaaaaatggacaccttgctgccaaaatggcacg

SEQ ID NO: 11298 - DNA, 526 bp, Homo sapiens
  MAP TO AP000556.2; EXPRESSED IN HELA, SIGNAL = 0.3; SWISSPROT HIT: P39881, EVALUE 5.60e-01; NT HIT: gi14777593, EVALUE 0.00e+00; EST_HUMAN HIT: AW375581.1, EVALUE 1.90e-01
ctccgagtgccaaggccagcccccacaaccctggaagctgcggggagccccaggccaagttcctagaagcattctttgaagaacccccaaggaggcaatccccagtgtccaacctgggctcagaaggagaatgtccgagttcaggggctggcagccaagcccaggagcttgcagaggcctgggagggctgtagaaaggacctgctctttcagaagagtccccagaaccacaggccaccttcagtcagtgaccagcctggggagaaggaaaattgctaccagcacatgggcaccagcaaaagccctgctccaggattcatccatctacgcaccgagtgtgggcccaggaaagaaccgtgtcaggaaaaggctgcccttgagagggtacttcggcaaaagcaagatgcccaagggttcacacctccccagctgggcgccagccaacagtatgcatctgacttccataacgttttgaaggaggagcaggaggcactgtgcttggatctgcggggcacagagaggcgaga

SEQ ID NO: 11299 - DNA, 525 bp, Homo sapiens
  MAP TO AL079300.11; EXPRESSED IN HELA, SIGNAL =   1; SWISSPROT HIT: P08123, EVALUE 8.00e-02; NT HIT: AJ310932.1, EVALUE 0.00e+00; EST_HUMAN HIT: BG996821.1, EVALUE 0.00e+00
aggacccagtcggcattggcactgagcagagcccggtccaccaatgtccacagcaagacctcaggagacaagcctgtttctccccactttgtccgccggcaaaagtactgtcattttggggacggcgaagtgcttgccgtccagagaaagtccacagagagattagaacctgcttcctctcccctggcttctcggagtacaaatacatccccgctgtcgagggaaaagctgcccagtccttcagcggccctctcggagttcgtggaagggctccggaggaagagagcccagagaggccaggggtccacgctgggcctagaggactggcccactctccccatttaccagacgactggggcctccacactaaggaggggcagggctggcagtgacgagggaaacctctcgctgagggttggggcaaagtcacccctggaaatcgaaggggccgctggtggtctcttgaggtccaccagcctcaaatgcatctcttcagacggtgttgggggcacaaccctactcccc

SEQ ID NO: 11300 - DNA, 511 bp, Homo sapiens
  MAP TO AL023580.1; EXPRESSED IN HELA, SIGNAL = 0.64; SWISSPROT HIT: Q13516, EVALUE 3.00e-17; NT HIT: AB038698.1, EVALUE 8.00e-80; EST_HUMAN HIT: AI934885.1, EVALUE 1.00e-08
gctgtccgccgcctcacttcccgccatcggcaccatccggcctccccactcgctactcaaggcgccctccacgccgcccgcgctgcagctgggcagcggcttccagcactgggctggtctgccctgcccctgcaccatctgccagatgccgccgccgccgcacctgtccgctctctccacagccaacatggcccggctgtcggccgagtccaaggacttgctcaagtgagcagcgggcgggcccggctgccaaggaggagggagagcggcgggaggggccgcggtgccgggccgggagggaagagggaggctgcacgctcggcccacgggagggcaggctccggggcccgcagcctcccacgctgtctgagagatctcagactccacttgacccccggagggaaaggaccaaaatcaaaccgcaatttctaggtggtagcaaagggggactcgaaccagatgtcgtgtgttttgcatgcatgcttcttttccccatgccgcgccagtattt

SEQ ID NO: 11301 - DNA, 510 bp, Homo sapiens
  MAP TO AF030453.1; EXPRESSED IN HELA, SIGNAL = 1.7; NT HIT: gi15299631, EVALUE 0.00e+00; EST_HUMAN HIT: BG828685.1, EVALUE 0.00e+00; SWISSPROT HIT: P39880, EVALUE 4.00e-29
agccctgggatggctcctggccaggcccggaggggtgggtggtgactctggagaggggctgccccgtggcccgagggtcgctggaggggcacggaggggcctccaggctggacggagcaggagccccagagagaggggtctggctggggtagcaccagaggccctttccccagcagcacccccctcacgtccccgccgcttgttgtcttgtaggtctcggatccgcagagaactgttcattgaggaaattcaggccgggagtcagggccaggcgggcgccagcgactcaccctcggcccgcagcggccgggcggcgcccagctcggagggcgacagctgcgacggcgtggaggccactgagggcccaggcagcgccgacaccgaggagcccaagtctcagggagaggccgagcgggaggaggtgccgcggccggcggagcagacggagccgccgccctcggggaccccgggcccggacgacgcccgcgacgacgaccacgagggaggccc

SEQ ID NO: 11302 - DNA, 509 bp, Homo sapiens
  MAP TO AF176315.1; EXPRESSED IN HELA, SIGNAL = 0.33; NT HIT: X80282.1, EVALUE 0.00e+00; EST_HUMAN HIT: AI005066.1, EVALUE 5.00e-05; SWISSPROT HIT: P32306, EVALUE 1.00e-32
ttgaccaggcggcacagcaggtcgggcccgtagaagcggaaggtgatgtcccacagcaactgcggcagcacctgaaacactgccaccaccaggtcggcgatgcttaggtgcttcatgaagaagaagaggcgcgagtgcttctggcgtgtggtgcgcagccccagcagcacacacgggttcccgttaagcgccagaaggaggatagacacagcacagctacttcacgggcgacagggcctcgtgcaaccgagggggtccgacggtgcggttgccttcggcccacggcggagcggcgctggagttggatgcctcggcgctccagttggatgcgagcgcgccctccatgaccctggcggcatcggtgcgccccggccttcgagccctttacggcttggcgcggctgggccgcatcaggcgtgtagaagggtgtaggggcgcccggggctccactcctggagactccacgaacggatatgctgggtccaccgtgaaacaaaccgggagggccg

SEQ ID NO: 11303 - DNA, 500 bp, Homo sapiens
  MAP TO AL022395.2; EXPRESSED IN LUNG, SIGNAL = 1.8; EXPRESSED IN PLACENTA, SIGNAL = 2.2; EXPRESSED IN HELA, SIGNAL = 3.8; NT HIT: gi13643518, EVALUE 1.00e-118; SWISSPROT HIT: P20265, EVALUE 1.00e-37; EST_HUMAN HIT: BF515537.1, EVALUE 1.00e-115
cgtgtcctcgtccgagtgcgggtcgtggtgcgcgcctgggtggccaggcggaccctgcgggggcggcgggggcggcggctgctggtgtgggtgcgagtgcgggtgcgggtggtggtcggcatggtgtggctcgtcgtgcgcgtcccgcaggccgtggtggtgcagaccggccggctgcccgccggcgcccagcatgccgttcaccgtgaagctgggctgcgagtagagcaagccgccgttggacgctcccatggagggtgggaggtgcgctgcagccgccgcgctccgccatgccccgggtcccgggtggtggttagcggcgtggtgcaccagatgcggcggccgctgttgctgctgctgctgctgctgttgctgctgttgctgctgctgttgctgttgctgctgctgatgctgctgctgcagggcgcctggcccgtgcagctcgtctccgcggccgccctgctgcaccaccaccgagggcttgatgtccggctggccca

SEQ ID NO: 11304 - DNA, 502 bp, Homo sapiens
  MAP TO AL136001.1; EXPRESSED IN HELA, SIGNAL = 0.37; SWISSPROT HIT: P54258, EVALUE 6.10e-02
tgtcaggggcctgggctttgcatttccacaggttccaggtgctgctgctggagcggaggccacgctctgagcaccctgctctagaagaagagatgcagaaaagacaggcagggctgcagaaaaggtaggcagggctgtagggtggtccggaccaccgggcactgtcaaatggcagatgtccctccgctctgctctgggtggggctggggccggagtggattttataaacactctgggagggtcccacccagaactctcctgcgctgtgtggaaggagggccactggggagggtgtagatgggaagtgagagagaagaggggacgaggagacccctgggtggccaaggaaacacttttctgaacaatcaaaaataaaggaggggcaggcagaacgtggggacttggctggggctgcctaggttccctggactcacctcctggcactacactgcctggggagccagggggccaggagccagggagcgactggcacaccccacac

SEQ ID NO: 11305 - DNA, 502 bp, Homo sapiens
  MAP TO AC004794.1; EXPRESSED IN HELA, SIGNAL = 0.73; SWISSPROT HIT: P23246, EVALUE 4.70e-02; EST_HUMAN HIT: BF305306.1, EVALUE 1.00e-101
agtggatggggaggccagggcccgaacagggccactgcgaggggggccggacttcctgcggctggaccacaccttccacctggagctggaggccgccaggctcctgcgcgccctggtgcttgcgtgggaccctggcgtgagaaggcaccggccctgtgcccagggcaccgtgctgctgcccacggtcttccgaggtaggacatgcggctgcaggggaggaggggcagggacccccaaaccccaccgccaccccccgcagagtgcctagggggctgggctccgggcggaaggtgtggcctggagcagcgaggccagggtacatgaagcttcagagcacacccggctcaggcccccttgtgtcctcagggtgccaggcccaacagctggccgtgcgcctggagcctcaggggctgctgtatgccaagctgaccctgtcggagcagcaggaagcccctgccacagctgagccccgcgtctttgggctgcccctgccactgctggt

SEQ ID NO: 11306 - DNA, 509 bp, Homo sapiens
  MAP TO AL163248.2; EXPRESSED IN HELA, SIGNAL = 1.1; NT HIT: AL163248.2, EVALUE 0.00e+00; EST_HUMAN HIT: AI989639.1, EVALUE 9.00e-90; SWISSPROT HIT: P89202, EVALUE 1.60e+00
atggcaggggccaagtggtggcactcaactatcaaaggcaaggtgggcatacctgctgtaataaacagcagaggcaaagcagcaatcagaatagtctgactcatgtagagctctggcattggctaattaatcatggtgctcctagaagtgaaattgataggaagcctactgcattcttaatttatataagcagaaaacttctaggtcaaatggacaaaagactaatttgaattacaaatacagagaatcacggcccctcaatcaatttccagacttgagccagtttacggtttacttccccttgaggaaggaccccaccatattaccaacactttatgcagtgattctcccatccttccccaaggagacgtcatggtcatggaaatcactggtcttaccatgttccccatcatcctgaagcagctgtattgatagaatggtggattagcctttcaaagtcacaattccaatgccaactaggtgacaatactttgcagggctggggcaaa

SEQ ID NO: 11307 - DNA, 504 bp, Homo sapiens
  MAP TO AC011547.3; EXPRESSED IN HELA, SIGNAL = 1.2; EXPRESSED IN PLACENTA, SIGNAL = 1.4; SWISSPROT HIT: P11474, EVALUE 1.10e-01; NT HIT: gi9910551, EVALUE 7.50e+00; EST_HUMAN HIT: BG682359.1, EVALUE 3.00e-03
cctcgggctctctgggcctcagtttccccttctgcaacgcctcgggctctctgggcctcagtttccccttctgcaacgcatcgggctctctgggcctcagtttccccttctgcaacgcatcgggctctctgggcctcagtttccccttctgcaacgcaccgggctctctgggcctcagtttcctcttctgtaacgcatcaggccctgtttcggggatcaagtcggatgagtcagtgctcaagggcatgcaggcacttgacatttattaggcacctgctgtgtgctgagcgccggtggagcatgtggggagacctcagtggagccgacgggtgcttcgggggtgatcagggctggtggggaggagtcgtccggctggaaaggggtggcccatcccgagtggggactcatttcccctccgtgactgacggctccggggctccctgcgggtctccggctttcgaggacaggaagaaggcagccagggcaggggtgggggtcctcaca

SEQ ID NO: 11308 - DNA, 506 bp, Homo sapiens
  MAP TO AL035685.13; EXPRESSED IN HELA, SIGNAL = 0.26; SWISSPROT HIT: Q14721, EVALUE 2.00e-93; EST_HUMAN HIT: BG683156.1, EVALUE 0.00e+00; NT HIT: X68302.1, EVALUE 0.00e+00
acagcagccgcagcactcccccggttcctgagagggtcatggtacatccctagaacggggaggagtggactggggtcaccctccatgaagttgactttaagtgctcggagcttcaaagggttgttagttttcatggaactcttggggctctcgatgaagaaactagagtgctggctggcatcagggctggggttggcctccacaaacctaccaccactggcacccagagctccccgccagcccacttctggggctgtgctgcccccagtcttgctggggagtgatgtcaaagggctgtgggagaatctggtggcctcagggaagtctgtggcacagctaatgaaactatcaatgcttgacatacttcgcatgtcaatgaccccttctgtgcgagtgggcagaggggctacggggctggggatactctccatttcaagttcttcctttggtttgctctgtgctgctgactccttggtattgaggatgggttgggattgggtcttggc

SEQ ID NO: 11309 - DNA, 587 bp, Homo sapiens
  MAP TO AL139412.2; EXPRESSED IN HELA, SIGNAL = 0.52; SWISSPROT HIT: P56720, EVALUE 9.00e-03; EST_HUMAN HIT: BF974892.1, EVALUE 3.00e-77; NT HIT: AF006614.1, EVALUE 1.40e-01
cattgtgggccatcccgaggtttcttagcactgtggcctgctctcctggcacccagcacaggggcagggcctgcaggaaggcctccacggccagcgggaacagctggagctgggagtagcccaggcctagatcgttatagaggtgccctagagggaatagccagggtcactggtagccagaccagatataaatgaggctggtacagcccctatcgactcctccagggttccccaaacccagccctctgagtatcatcaggctctgtgtctccccagatcccatgccttccctgcccgaaggtctcacccagcagtcgcctctcagtgctcctctcggcaagcctccggcttttctccagcacctgcacaacttcccccacccgatgccgcccactcttcagcatacatcctgccgcagcccccagtgccagggctgcggcccgcagctgtctctcttgagcataggcctggcttgcttcctgcaggcagtgggctgctagctcaggctgtcccagagcctggtagcaggctcccatttttgcccaggcttctccctggtcaccctgtggctggtagtggcccagggc

SEQ ID NO: 11310 - DNA, 511 bp, Homo sapiens
  MAP TO AL022166.1; EXPRESSED IN HELA, SIGNAL = 0.2; SWISSPROT HIT: Q09738, EVALUE 1.00e-08; NT HIT: AF229643.1, EVALUE 5.00e-44; EST_HUMAN HIT: BF376302.1, EVALUE 0.00e+00
tcccgttgtccccacctaaagcattcttttcatttcattatgctttatgtgaccattttcaacctcttctccctctccccatttcttaaggttgaatggtcactggttagtattcatttttttcttccgacagacccatgggccatgctaaaataggttctttatatcaagatactagctgtcacataggtgttactgtcattgtccattccaagtaggtctgtgtgtcacttcaaaatccttgcctaatcatttacttttttttcagtaagtggtctggtaagactagtctttctctagaccctgtttgtgatagaacagtaaatacccttcactgtagagtaagtcctcaatggtagccttggtgatgatggcatcatcacagctgaaccactggtccttttgttgccggatgaagctggtatagtggccactttccaaagttccatggtgattaatcactgcaaacaaggaatacttattctcattgggcacacaatctgttggtggc

SEQ ID NO: 11311 - DNA, 503 bp, Homo sapiens
  MAP TO AJ239319.2; EXPRESSED IN HELA, SIGNAL = 0.7; EST_HUMAN HIT: BI821147.1, EVALUE 0.00e+00; NT HIT: gi14759217, EVALUE 0.00e+00; SWISSPROT HIT: P49682, EVALUE 1.00e-64
tggcagtgggtggcgttgaggcgctcgtcgtggtgggccgacaggaagatgaagtctgggagggcgaaaagcaggcagagcccccagacagccaggcaggtgagggtcacgcgggccgggggcccccggcggtagagctgggtggcatgaactatgttcaggtagcggtcaaagctgatgcaggccagcaggagggctcctgcgtagaagttgatgttgaagagggcacctgccactttgcagaggccagagccaaagacccactggacggcagcgtccactgcccagagcggcagtgtcagcaccagcagcgtgtctgctacagctaggtggagcaggaaggtgtcggtgctgctcagggctgtccgccggctcagcagcacggctgccaccgcgccgttgcccagcagccccagcagaaagaggaggctgtagagggctggcaggaaggcccggtcgaagttcaggctgaagtcctgtgggcagggcggggaggtacagca

SEQ ID NO: 11312 - DNA, 527 bp, Homo sapiens
  MAP TO AC002455.1; EXPRESSED IN HELA, SIGNAL = 1.8; EXPRESSED IN LUNG, SIGNAL = 1.9; NT HIT: U96078.1, EVALUE 0.00e+00; SWISSPROT HIT: P14417, EVALUE 5.00e-02; EST_HUMAN HIT: AL555624.1, EVALUE 0.00e+00
cttggtcgggtcagcctgggggctgagggcctggctgtcagccactcttcccagaacatatgtcatggcctcagtggctcatggggaagcaggggtgggcgagcttaggctagagcaagtcctgtgggagatggcagaggcctggtctgagaggcaactcggatgtgccctccagtggccatgctcccctccatgcgtctcccctgccctcctggagccctgcaggtcaatgtttaacagaaaccagagcagcggtggattaatgcgcaagggctcagccccccagccctgagcagtgggggaatcggagactttgcaacctgttctcagctctgcctcccctggccaggttgtcctcgaccagtcccgtgccatggcagcccacctgcttcccatctgcgccctcttcctgaccttactcgatatggcccaaggctttaggggccccttgctacccaaccggcccttcaccaccgtctggaatgcaaacacccagtggtgcctggagaggcacggtgtggacgtgg

SEQ ID NO: 11313 - DNA, 509 bp, Homo sapiens
  MAP TO AC004790.1; EXPRESSED IN HELA, SIGNAL = 0.62; EST_HUMAN HIT: BI825804.1, EVALUE 8.00e-47; NT HIT: gi15296404, EVALUE 4.00e-26; SWISSPROT HIT: P16818, EVALUE 2.40e-01
cagtgctcctgggaccgcactaacaggtccgagacggggtccaggtcctgcctgggccaatccgggaagagcttgccaatggcatcacaggcacctcggggaaggggatggtttggttcaggaccacccagaggcctgctgggcccactccaaggcctggctgaggccacagaagggctggccgcctgctgatgctccttcttgaagcccctcacctgctggcagtgagctccatgccctgtggctgagcagcagcgctgttgtccaccttcctgggcaagcatctgcagctatccatcttgctctccacctcctgcaggttgagggcagtggtgggggtagtgctcagggtcaggaaggagctgacccccaccatgccacccttctcacccttcctcttgccctgtttccaggcctcctcgcagtgttgctgggccacgtcaggaagtgctggaggacgtggcattgcaccaacaccaggcggccagccgtgtggctcatcccgcaaa

SEQ ID NO: 11314 - DNA, 519 bp, Homo sapiens
  MAP TO Z82188.2; EXPRESSED IN HELA, SIGNAL = 0.49; NT HIT: AJ006345.1, EVALUE 7.70e+00; SWISSPROT HIT: O14813, EVALUE 7.00e-03; EST_HUMAN HIT: W15338.1, EVALUE 1.80e-01
tgcttgggatccctggctgcacctcctaatgcactcggctccatcagctcctggctgcggtcctgcttcccaaatctgcagagcaggactcaagctggccctgctagggttggggcctcccttggagccgtcaaccatccaatagggcccagaatgaggtagagagatgagcccaagggtggggtaaggggctgaggttttgggggtgggcagtggcgaggggtccctggagaagaggggaacttgtgagcctggggccacacccaaagtgcctccttcactgggcccagcccccacccaagccgcatttctaatgaaggctttgttttgtaagaatttttaaatgctttaactagaaattggcaaactgcaacatctgccaatttctagcagtatatatcctgccaccatgacccatttcaagctagcatcgtgatgtctctgaacctgcgatcgggaagacatgcatgcagtcggctctggtgcaagctggctccagccaccattggctgtggggct

SEQ ID NO: 11315 - DNA, 522 bp, Homo sapiens
  MAP TO AC005609.1; EXPRESSED IN HELA, SIGNAL = 0.34; NT HIT: gi14861872, EVALUE 0.00e+00; SWISSPROT HIT: Q9Y5I3, EVALUE 1.00e-93; EST_HUMAN HIT: BI465306.1, EVALUE 1.00e-51
gcacagtggccgtggctgtcagcgccggctcaccgtgatccttcactagcaccagaaggcggtagcgcgacaagtcagcctcgtccaggacacgagtcgtgctgatctcgcccgtgtacagccccacgcggaacgggatgcgcgcgccgcctgctgccggctgcagttcataggacagccacgcgttgtagcccgagtcggcgtccactgcgcgcaccttcgccaccacatgacccgcacccaccaatcgcggcaccagctcactgactgcaccaatagtgccacccactcgaggcgccagcagcgccggcgcgttgtcgttctcgtccagcacgaacacctgcagcgtcacgttgctgcccagaggcggcacgcccgcatcccgcgcgctcacctggaactgcagcagctccagctcctcgtggtccaggggctgcagtgcgtacaccttgccgctctccgcgtgcactgacacgtagttcgacagcgcgcgctcgcccacccgccgttccaccagcgaat

SEQ ID NO: 11316 - DNA, 598 bp, Homo sapiens
  MAP TO U66083.1; EXPRESSED IN HELA, SIGNAL = 0.47; EST_HUMAN HIT: AI554897.1, EVALUE 0.00e+00; NT HIT: AF195953.1, EVALUE 2.30e+00; SWISSPROT HIT: P48269, EVALUE 1.00e+01
tgggaaatgggccccctcaggaaccaaatggcccaagttgggagggcacctctgggaatgtcacatttacatcttcggctactacctggatggaaggcacagggattcttagtagtctggtttactcagataatggtagtgtaatgtctttgtacaatatctgttactacgctctgttggcctccctctcagtcatgtctccaaatgagccctctgacgatgaggaggagtaggaaggctcctcagattacaagtgtagactctgtgaacagttcagacacactgcaaattcgtgaactcacaggccactaatggcccataaaagttgccattttctaatgagaaacacatttttggtcttaataaagaaaaacaaaattccatggaaataaataataaacaatttaaatgagaactgttgtctgtgtttttttttaaccttctatattatatacatctcattggcagaaaccaggggaggctggaaatcctgtccaagacaggctttggtccccattgtcctcgtttatttggagaagcagcattttcacacactcagcaaaggatgttgctaggaagtgtcgaggccaagcccagg

SEQ ID NO: 11317 - DNA, 532 bp, Homo sapiens
  MAP TO AL136365.3; EXPRESSED IN LUNG, SIGNAL = 0.98; EXPRESSED IN HELA, SIGNAL = 2.1; EST_HUMAN HIT: BE565812.1, EVALUE 7.50e-01; NT HIT: gi14742369, EVALUE 0.00e+00; SWISSPROT HIT: Q9LVN7, EVALUE 2.20e+00
cgttgccctccaatgggcacatctttgaacacaccttgagctcctaccccatctcgtcttccaaatggtctgtgggatcagcctttcgagtcccagacacgttgaggttttctgccgactctagcaacgttgtccccagtcccttggctgggcctctgcagccccctttcccccagccaccccggtacccgctgatgctgaggaatactttggcgagaagccagtcgagcccctttttgcccaatgatgtcaccctgtggaacaccatgacgctgcagcagcagtatcagctgaggtcccagtatgtcagtcctttccccagtaactctaccagcgtcttcagaagctcgcccgtccttcctgcccgcgccacggaagaccctcggatttccatccctgatgatgggtgtccatttgtgtcaaagcagtccatttacaccgaggacgactatgacgagaggtctgactcctcagactctagaacactcaacacatcatcttaaagtggtgctggatgggtggtggccaggtg

SEQ ID NO: 11318 - DNA, 535 bp, Homo sapiens
  MAP TO AL356019.2; EXPRESSED IN HELA, SIGNAL = 0.94; SWISSPROT HIT: P58181, EVALUE 3.00e-05; EST_HUMAN HIT: BG678216.1, EVALUE 7.00e-63; NT HIT: AF069333.2, EVALUE 3.00e-64
tgggtcaaagtggctggggcaaagtggctggggcaaagctacaaattaacatctcagcaaagcaattgtttaaagtacaggtctttttcaaaatggagtctcttatgtcttccctttctacatagacacagtgacagtctgatctctcttttccctacagtgtcaaaaattctagctgcattggattgcattggattctagcaaaataacacagagaaccacaatcaattcaaaatttggtaggacatattcccacctggtctcagattatctcatgtattttcctgtatacctcaagttctcgtctcagtaaaatccttgagatacgtagcaagcaattggattacactccaagagacttggattacactcatgtctttcttctttgtagacttaagacccatgaacaggtcagcaacacacatcgtgacagagtttattctcctgggattccctggttgctggaagattcagattttcctcttctcattgtttttggtgatttatgtcttgaccttgctgggaaatggagcca

SEQ ID NO: 11319 - DNA, 570 bp, Homo sapiens
  MAP TO U91328.1; EXPRESSED IN HELA, SIGNAL =   1; EST_HUMAN HIT: BF908355.1, EVALUE 2.00e-04; NT HIT: gi13644895, EVALUE 0.00e+00; SWISSPROT HIT: P22492, EVALUE 7.00e-30
ccaggggtactggtgcttccggttcctttaagcttagtaagaaggtgattcctaaatctaccagaagcaaggctaaaaagtcagtttctgccaagaccaagaagctggttttatccagggactccaagtcaccaaagactgctaaaaccaataagagagccaagaagccgagagcgacaactcctaaaactgttaggagcgggagaaaggctaaaggagccaagggtaagcaacagcagaagagcccagtgaaggcaagggcttcgaagtcaaaattgacccaacatcatgaagttaatgttagaaaggccacatctaagaagtaaagagctttccgggaggccaatttggaaagaacccaaaggctcttttaagagccacccacattattttaagatggcgtaacactggaaacaagtttctgtgacagttatctataggtttaagttgtgatgcagctgagttgaaaaggcttgagattggagaattaattcaggccaggcttcaagaccatcctgggcaacatagccagactaccatctataccaggggtcctcatttccccggcca

SEQ ID NO: 11320 - DNA, 523 bp, Homo sapiens
  MAP TO AL133286.5; EXPRESSED IN HELA, SIGNAL = 0.55; SWISSPROT HIT: Q99698, EVALUE 5.00e-88; EST_HUMAN HIT: AI114747.1, EVALUE 0.00e+00; NT HIT: gi4502838, EVALUE 0.00e+00
gcaggctttggggactgctgcagtctgagcgacaacttggagagtcgagtagtttctgcaggttggaccgaagaaccggtggctttgattcaaaggatgctctttcgaacagtgttgcatcttctgtcagtagatgttagtactgcagagatgatgccagaaaatcttaggaaaaatttaactgaattgcttagagcagctttaaaaattagaatatgcctagaaaagcagcctgacccttttgcaccaagacaaaagaaaacactgcaggaggttcaggaagattttgtgttttcaaagtatcgtcatagagcccttcttttacctgagcttttggaaggagttcttcagattctgatctgttgtcttcaaagtgcagcttcaaatcccttctacttcagtcaagccatggatttggttcaagaattcattcagcatcatggatttaatttatttgaaacagcagttcttcaaatggaatggctggttttaagagatggagttcctcccgaggcctcagagc

SEQ ID NO: 11321 - DNA, 574 bp, Homo sapiens
  MAP TO AP001687.1; EXPRESSED IN HELA, SIGNAL =  36; EST_HUMAN HIT: BF697702.1, EVALUE 1.00e-113; NT HIT: gi16173295, EVALUE 1.00e-111; SWISSPROT HIT: Q90835, EVALUE 9.00e-55
ccaaacaaggacagccacccgagttttcataaaggtacaaaacaattcctggagtaaggatggtacttttaacgaaggtgctgaagccactggcaatttataagggaaataaaaaaccacaccctacattaatattacataaaaatcaatcatagacttaaatattaaatatgccttggttcaagggatagaaagtcacagtaaggatggcaatgccagtggaaccaagctgcttgaggctctggactgcatcctaccacaaacttgtccaactgacaagcccttggtggtattggtacttttcctgttggccaagtggagactggtgttctcaaacctggtatgctggtcacctttgctccggtcagtgttacaactgaagtaaaatctgtcgaaatgcaccatgaagctttgagtgaagctcttcctagggacaatgtgggcctcaatatcaagaaagtgtctgtcaaggatgctcgtcctggcaacgttgctggtgacagaaaaaacgacccaccagtggaagcagctggtttcaccgctcaggtgcttatcctgaaccatccgggccagt

SEQ ID NO: 11322 - DNA, 569 bp, Homo sapiens
  MAP TO AL022333.1; EXPRESSED IN HELA, SIGNAL = 7.6; NT HIT: gi4557887, EVALUE 0.00e+00; EST_HUMAN HIT: BE744906.1, EVALUE 0.00e+00; SWISSPROT HIT: P05783, EVALUE 6.00e-77
ggcacctggagaccaagaaccggaagctggagagcaaaatctgggagcacctggagaagaagggaccccaggtcagagactggagccattacttcaagaccatcaggaaccagagggctcagagcttggcaattactgtagacaatgcctgcattgttctgcagatcaacaacacccatcttgctgctgatgactttagagtcaagtatgagacagagctggccatgtgccagtctgtggagagcaacatccatggactctgtaaggtcaatgatgacaccaacgtcactcggctgcagctggagacagagatcaaggctctcaaggaggagctgctcttcatgaagaagaaccacgaagaggaagtaaaaggcctacaagcccagattgctagctctgggttgaccatggaggtagatccccaaatctcagcacctcgccaagatcatggcagccatccgggcccaatatgacgagctggcttggaagaacggagaggagctggacaagtacttgtctcagcagattgaggagagcaccacagtggtcaccacgcagtctgccaaggc

SEQ ID NO: 11323 - DNA, 520 bp, Homo sapiens
  MAP TO U91321.1; EXPRESSED IN HELA, SIGNAL = 1.5; SWISSPROT HIT: P27177, EVALUE 2.50e-01; EST_HUMAN HIT: BF962170.1, EVALUE 2.00e-04; NT HIT: gi14786693, EVALUE 4.90e-01
tccgcattccagcccagaggaagcaagatggagaaagggagaaataacctctttcctctaacagcacagctgggaagttgtgggtatcactgctgctctcatcccattgaccatcctcatgttcataccttggtgcaagagaatctagaaacatagtctttattctaggcagttgtgtacctgactacgaacgaaaggagaacagatactggaagataaccagcaatctctgcagggaagaaagggaaaaaaatctgactttttcttttcttcttgtttttcaggtgaaaaaaaaaaaagatccctgagtaattgcaaatgctgggacagtttaccactccagggtgaagagtccataccaacatgtctgcctactacaggaataactggtctgaggaagacccagattaccctgactattcagggtctcagaaccgtacgcaggggtatttgaaaactcaaggttatccagatgttccaggtcctctgaacaatccagactaccccggcaccaggagca

SEQ ID NO: 11324 - DNA, 500 bp, Homo sapiens
  MAP TO AC005600.1; EXPRESSED IN HELA, SIGNAL = 1.1; NT HIT: L43619.1, EVALUE 0.00e+00; EST_HUMAN HIT: AI660209.1, EVALUE 1.00e-70; SWISSPROT HIT: P98161, EVALUE 1.00e-17
agccccacacacagcaggggtgacaggtgccaggactcggcaggacacagggtagagagcccagtcccagggcacagcaccaacagggcctgggccacgctccagagggagtccacacaggaagacacgagctgcggggaaggcgacaccagtgagggcgtacagctgagctgagctgagctaagacgccctccccggccgcgcagtcacctaccaggatggccagctgggcgtaggctaccccgagcaccaccaggcccaaggtgacccccaggagctctggcagagctcggcataatgtcttgccaaagacggaccactggcgcacgaagcgtagctgctgggcagcctgcggacgagaaatctgtctgcttgcagccctggggtgtgcgcccagccccgcgcccaccggcccagccctcaccttgaccaaaagcaggaagagcagcgaggccgccaggccacgggctgcggagctcagctgcgccacctggtcgaag

SEQ ID NO: 11325 - DNA, 542 bp, Homo sapiens
  MAP TO AF196968.1; EXPRESSED IN HELA, SIGNAL = 0.17; NT HIT: AF268872.1, EVALUE 2.00e-93; EST_HUMAN HIT: BF793569.1, EVALUE 2.00e-93; SWISSPROT HIT: P57772, EVALUE 1.00e-28
cagcaggccagggaagccagtgctaaccgctgccatctgacactggctgtgggggagcccagacctgctcagacccatgggtgccacatctaccatgtaaataagtgggggtgggatagctgggtgggattgggtacagtgggggtccccctgcccaggtgctggccctggctctgtgactgaccagctgagagaactgtggccacctgaccattctgggcatcagatgccttgtacagaaactacagaggttggcaccagaaggtctctgagggcctttctggctctcatcacaaatgtcaggccatggatcccagctgcccgagcaagaagggaaggggtgtggggccaggcaagggcatgctcacccgctccacaaggccatgcttgtgcttcagcttgtacaccttcagcctgggcaggaagctgtcggcgtagttcctgtcctctagcccgtggagcaggatgccatggaaggctagccggcacgtgttggtgtgaatgtccgcatctagcctggagccaatcaccaggcacagccg

SEQ ID NO: 11326 - DNA, 505 bp, Homo sapiens
  MAP TO AL031295.1; EXPRESSED IN HELA, SIGNAL = 1.7; SWISSPROT HIT: P34624, EVALUE 4.70e-02; NT HIT: gi14725143, EVALUE 1.00e-47; EST_HUMAN HIT: BG716861.1, EVALUE 2.00e-47
gcatcgacctggagcggctgcaatgccttaacgagagccgcgagggcagcggccgcggcgtcttcaagccgtgggaggagcggaccgaccgctccaaggtgggccgcctggggcttggggcgggcggggcagggtgcgtgtggggcctcgggccgtcggtctactcatttctgatgttaagaataacgacagcctggttgccaagcgcttttccgtgcctgtctcctgccagctctttgggaggcgagcagcgttgtctccccattttgcatatagggaaactgaggcctagagggaacggggacagttttgtcaagctacacagcctaacgctctattccagggctgtgtgggctagagaggatggtcgtgagggccgttggaccattggtgctaatggctgcctcatcatattacctggtgaagatgagcctagggagatgaaaggtggttcccatatagagcaaatgttctttacattgtggggtcgcaggcccctttgcta

SEQ ID NO: 11327 - DNA, 519 bp, Homo sapiens
  MAP TO AC007981.31; EXPRESSED IN LUNG, SIGNAL =   1; EXPRESSED IN HELA, SIGNAL = 1.1; SWISSPROT HIT: P50914, EVALUE 1.90e-01; EST_HUMAN HIT: BE531263.1, EVALUE 0.00e+00; NT HIT: gi11427757, EVALUE 0.00e+00
ctgccggtgcaccacctttgtagccggctcttggtgggatttcgagagtgacttcgccgaattttcatgtgtgtctggtttcttctccactgacccatcacatttttgggtctcatgctgtcttttctcattcagaacctgttcgatttctgccctgatgctctgctcaaaggagtctgctctgctcatgctgactgggaaggcagagccctggtccttgctggatcccacctggctgccagggccacaccacgtgagccaggtacaagttttggggaacacagggcagttgggcactgctgtgagccagttccggcttacatctactgcctccgcctgcagccctggaaggctgtgcatggctgggccccgctggccccgggctgtgcggctccactctttaccttcaggtactcctggatggcctcctcaatgtcccggtccacggaatcgtcactgtctgaatctagcaccaatgggccaaagtctgcagtttcctcctcccccacggggtcaaag

SEQ ID NO: 11328 - DNA, 534 bp, Homo sapiens
  MAP TO AL136124.3; EXPRESSED IN HELA, SIGNAL = 0.67; SWISSPROT HIT: O43734, EVALUE 1.10e-01; NT HIT: gi14743872, EVALUE 1.00e-72
ctccgcagcagtggcacgaggtaccctgcagccacctcgcgcgccgcctccgggagcgcgcctgcgcccccgctgccgcgcgcctcctcgtcctcgagccgctgcagaaggaagcgcagcgtctccacgcgctccgcggatgcctccccttggcacagcgccccaagcagggcccgggggtcccggctctgcgagagcagcgcttccgcgagcacccactccatttgccgagcgcccgcgccaccggcccgggctcccaaaggaaggcgccggcgtgtgcgatgcgtgcgcacaggaccggccggcccctacgtgcgcgtgcgccgacggagccgggcgcgcggccgcagagagggggatcccagcccggcttggtgcagctcagcttcccttgggttcctgccaccaaccctgcctagatagaacccacctggtctcttatttttaggagaaacgaggccttcgttaaaagttaatgtagtatctacaccagcttcatcgattcctgattggaggttggtctgcccaggaccc

SEQ ID NO: 11329 - DNA, 574 bp, Homo sapiens
  MAP TO AL050332.15; EXPRESSED IN HELA, SIGNAL = 1.4; EST_HUMAN HIT: BE793166.1, EVALUE 0.00e+00; SWISSPROT HIT: P79955, EVALUE 7.00e-17
gccctgagatggggagcacgactagctggttgaggaacagccaggaggccagcatggctaggatgagctgagcaagaagatgagacatgagatgtagtgaccctcctcgttttggcagatgcatcactccctcgccactcccaggttaaggcagatctaccgacagcccacaggccaaaaccggatgtggtaacccagcctgataacttgcacttcatccttcaattctctcttgctcctttctccctctacctccatctcgtggcaccctgcccactcctccccatttcccagttccagtgcccatgggtcctcacttctttctcacaggagacagggacatatcgagcattggtgacagtgagctcctcactccctggccctgcacggcgaatctcacactcgcccccttgacccttccgggttccagtggccagcaggtcccggacagtctcattgtagatctctacgtagcttgctacaaagctgtaggtccagccctgaccactcagctcctgagccacagagaagaggtgccgcagggcccgagggatcagcccctccaactgggggt

SEQ ID NO: 11330 - DNA, 589 bp, Homo sapiens
  MAP TO AC009290.1; EXPRESSED IN HELA, SIGNAL = 1.6; EST_HUMAN HIT: BF997434.1, EVALUE 1.30e-02; NT HIT: X82638.1, EVALUE 8.80e+00; SWISSPROT HIT: P03316, EVALUE 4.30e+00
  unsure 40
  unsure 45
  unsure 51
  unsure 153
  unsure 189
  unsure 195
  unsure 345
  unsure 353
  unsure 421
ggtggcctcttccattctctggctttaaatactttccatnatggntggtgntctccaccatgatgtctctcctgagcttgaatatctaataggtttctccaaattttcatctgtccaaaaaataactttggttttcccccaaaagacctaatncttctccttatctccctcatttttgcaaacgtaccnaaatcntgtgtgaacttactcaagctaaaagcctaggagtcattttaattcctcattccctcaccctgcaattcccaccattaaatctaccagaaagtctgataggtctttcctccagaatatattaattttttccccacttctttctacctgtanttactgtnggtcatttctcatactcttgcaaaagcctcctaatttaccctgtcttaccccacaataattcactggntgtcacaatagccaaacatattttgaaaatgtaaatcagatcatcagatttcctgctttaaatacaatgatgtcttccccttgttgaaaaaataaaacccaaacttactactgtgtggcctttgcaagatgagactcttgcctacctccttggctgcatgctctccca

SEQ ID NO: 11331 - DNA, 539 bp, Homo sapiens
  MAP TO AC008022.1; EXPRESSED IN HELA, SIGNAL = 0.45; EST_HUMAN HIT: AW977835.1, EVALUE 8.00e-04; NT HIT: AF220606.1, EVALUE 5.10e-01; SWISSPROT HIT: P34969, EVALUE 7.70e-01
  unsure 402
ggcatgatacttgaaaatccgcaactgtgatacagaatgttcataataagctaatgccatctacacctctttgtggaataagtagagggtaaaaatgcatttaataaataacacaaggatggaaaatacagctctctgaagacccaggtcttcacaccaatgttgttgcttgtgaacctagtccagaatgtctaactttgtagaatactagcactaattagaattcatagacatcaattatgtgattattcaagaactctctcaactcttaaatccatttttgtatgcatattacaacacaacactgagtcaagtaaaggcatgccaattctccaatgaccaaaaaaaaattaatcctgtagttccgggagacacaattgggaaaagaaagccctgtttccnaaagtgtcagctacaacgctgtttccaccagtggctggaatgcaagagtcttccatacactgatgaatgcagaaagcaattgctgcaaaaggtcatttcataaccactggaaatactgcctttctcccacccgaccc

SEQ ID NO: 11332 - DNA, 507 bp, Homo sapiens
  MAP TO AC012360.2; EXPRESSED IN HELA, SIGNAL = 0.23; NT HIT: AF118266.1, EVALUE 0.00e+00; SWISSPROT HIT: O02813, EVALUE 2.00e-17
gcaacgcctcagactcggggtccacccagttgcccgcacccctcaggatctccttggccatagtgatgctgctgatgaccgtggtggggttcctgggcaacactgtggtctgcatcatcgtgtaccagaggccggctatgcgctcggccatcaacctgctgctggccaccctggccttctccgacatcatgctgtccctctgctgcatgcccttcaccgccgtcaccctcatcaccgtgcgctggcactttggggaccacttctgccgcctctcagccacgctctactggttttttgtcctggagggcgtggccatcctgctcatcatcagcgtggaccgcttcctcatcatcgtccagcgccaggacaagctgaacccgcgcagggccaaggtgatcatcgcggtctcctgggtgctgtccttctgcatcgcggggccctcgctcacgggctggacgctggtggaggtgccggcgcgggccccacagtgcgtgctgggctacacgg

SEQ ID NO: 11333 - DNA, 502 bp, Homo sapiens
  MAP TO AC007098.2; EXPRESSED IN HELA, SIGNAL = 0.61; EST_HUMAN HIT: BF307519.1, EVALUE 0.00e+00; NT HIT: gi14726631, EVALUE 0.00e+00; SWISSPROT HIT: O14164, EVALUE 4.00e-03
gcggggttggagagtcagaaagtgagcatcaaactcctgatgatcaccttagtccaagcacagcctccccttactgtcgcaggactaaaagtgacacagaaccccagaagtctcagcagagctctggaaggacttcaggatctgatgaccctggaatatgttccaatacagattcaacccaagcacaggttttgttaggcaaaaagagactattgaaagctgagactttagaattgagtgacttatatgttagtgataagaagaaggatatgtctccaccctttatttgtgaggagacagatgaacaaaagcttcaaactctagacatcggtagtaacttggagaaagaaaaattagagaattccagatccttagaatgcagatcagatccagaatctcctatcaaaaaaacaagtttatctcctacttctaaacttggatactcatatagtagagatctagaccttgctaagaaaaaacatgcttccctgaggcagacgga

SEQ ID NO: 11334 - DNA, 524 bp, Homo sapiens
  MAP TO AC005414.2; EXPRESSED IN HELA, SIGNAL = 1.4; SWISSPROT HIT: P07210, EVALUE 1.70e+00
ccatgggcgaggtcctgtggacttggtgttgtgagaggcatctcacccaaagcggggcgtgggggccatgttgtagtaaggatccagaaggggtctgttcattggtagcacattacctttggagcacagcctggctgctgtgctatctggccccgtaagtgtacaaatgccattttcccagccaggggagcagtggaagagctatggaaaggctgtattgtgtatacagtgcgaagtaggcacgtcagcctgtttcagtgagctgtcggacacttcccaaagcaaaaccaccagctctgggcaaggcttgctaggttaagctgttgggaagccatgacagtcttctcattgcccaatggccgtgtgcttcagaggagggaagccgtgacagtcttctcattgaccaatggccgtgtgcttcagaggagggaagccatgacagtcttctcattgaccaatggccgtgtgcttcagaggagggaagccatgacagtcttctcattgcccaatggccgtgtgcttca

SEQ ID NO: 11335 - DNA, 535 bp, Homo sapiens
  MAP TO AC004531.1; EXPRESSED IN HELA, SIGNAL = 0.34; EST_HUMAN HIT: AU131069.1, EVALUE 0.00e+00; NT HIT: U85429.1, EVALUE 0.00e+00; SWISSPROT HIT: Q12968, EVALUE 7.00e-61
tgcctccgtttcccacagggggatgtgggccttgatgagggtcctgaggctggcctggggctcagccaattctcatcagtgacactggatctaggagagtggcaaggagattgcctgggtgataatgagtgtccaagtccatactgttgatgccaagtttcttctccagggcagccccctggagagccaccaggagaagtcagaggggatccaagggtaaatcgggctgcagcttcattcaactctgagtccacatcatcataaatatgtgaaagcgattcacaagaagatgcatcagagaaccaactcctagaagagatgctgctggcaggactaggactaagagaagactcccggtaggatggctcaagaggaagatagagatgatctctagaaggcctttccaaaaattcccgttctgggtcatttatctgtaggtcatcttcatgtgcatctaattcttgatgacagttaggagagatagatgtaatttgaatacttgggcactcaaagggtttgggaccacctaatgggc

SEQ ID NO: 11336 - DNA, 542 bp, Homo sapiens
  MAP TO AL031291.3; EXPRESSED IN HELA, SIGNAL = 0.93; SWISSPROT HIT: P28282, EVALUE 1.20e-01; EST_HUMAN HIT: BG396709.1, EVALUE 0.00e+00; NT HIT: gi14726355, EVALUE 0.00e+00
ctccagcccaccctccggtccagcccgcgccgccggcacctgtttccgggcgggcctccagaggccggcgcacaagatggcggctctggcggcctaaagaaggcggccgcggctcagccgtgggctctaacgcggggctgggggccggagacagacttcgcccaggtgacgggtagtaggggcggcgccgcttggcctcgtggggtgtaagacccacttgctgttgcccccggaccttgccgccacaccagccctgtcctggggcggaaccgaaggaaggtcgggccctgctgccccgccccgtccttcctccttcccgggcggtcactgtgcgtggctcacttttagagtttacttcaaccacgtggagcttccatggcggcctctcaggtcctgggggagaagattaacatcctgtcgggagagactgtcaaagctggggacagggacccgctggggaacgactgtcccgagcaagataggctcccccagcgctcctggaggcagaagtgtgcctcctacgtgttggccctgaggccctg

SEQ ID NO: 11337 - DNA, 506 bp, Homo sapiens
  MAP TO AC006070.1; EXPRESSED IN HELA, SIGNAL = 1.4; NT HIT: AF281036.1, EVALUE 4.80e-01; EST_HUMAN HIT: BF689278.1, EVALUE 1.80e-01; SWISSPROT HIT: Q10723, EVALUE 4.70e+00
gcagggccactctggcttggcagaggcctcctgatgaaaggttagtgccaggaaaggcctgcttcagtgaggctggagagcaacctgtaaaagagacagctcatccaagagcaggagcagtgtcaacgaatccaaatgcagcgcagaaaactcccgactcaacagacaccttttcaaagttgaaacatctcccaggctcctgaagcctgctaatcagatgtttgcatgcaaatgagtaaaaacaataacaaggaaagatgctgcatggcgtgccaacacccctagtgaaggactataaaagcccctctgtatcggatgtctttccaatgcaggtatactgagcttgcaacttcccagcaaggtcagcaccagcaccatggcagacggctgttgtcctggaaacaccacagccattccagctgtgcccaccatcaccacatacccagttaaaggtggatttcgacatgctctctgtttgcctagttcctgccacagcagaatgtggc

SEQ ID NO: 11338 - DNA, 511 bp, Homo sapiens
  MAP TO AC016572.4; EXPRESSED IN HELA, SIGNAL = 0.94; SWISSPROT HIT: P40794, EVALUE 4.20e-01; EST_HUMAN HIT: AL537342.1, EVALUE 9.00e-16; NT HIT: gi14775421, EVALUE 6.00e-16
ttgtctgcgcagtgcgtcccggaccgcgtagaacgctgcagcggctggagctggcggcctatgggctgggccccgcctacgcggcccactcgggcaccggcggtggcggggggggggtccctggcagagcgcgccgtggagcccaagccgtagtcgctggtggggccgccttcagggatgcgggtgacgtggcttttcaggcctacgtgaaggaaaatgcctgctcgccctgttcggtcgcgggcaaagcctgtgggaagcgatggaggaaagccggctcgcggaagaaaggcccctcagaacctatggggccaggagcagggaatgccccaggagcccccgctgcgctcccagacgctcaagcagaaggcagagcaggacccggagcctgaggattgccgggaaccatggaataagataattccagctttgcctgaagaacatgtgaaggaagaaacccagaagcatgaagcagccatcaaaaaacatgcctgcggaagccaccagggag

SEQ ID NO: 11339 - DNA, 501 bp, Homo sapiens
  MAP TO AC005618.1; EXPRESSED IN HELA, SIGNAL = 0.21; SWISSPROT HIT: Q9Y5E4, EVALUE 7.00e-10; EST_HUMAN HIT: BG822174.1, EVALUE 4.00e-33; NT HIT: gi14861871, EVALUE 0.00e+00
ggactctgagcgccgctgttgatcaactctaagcgaaaatcaggactccatccggatttccagttctgcggctacacaaaacccggcagataccacaaacctgctcccaggctgcagcaaaactcagcctctttcttctaaggaaaagatcaccatactttgcagggtggaagaaagaacctgatgaagcagcgcgcacagagatccttttgagaaaattccaaagcgaggcagcaatggcagctccaaccaaatgccagctccgcggaagattagtcctgctatgctcgctcctggggatgctatgggaggccagggccagtcagattcgctactcagtgcctgaagagacagaaaagggctatattgtgggcaacatctccaaggacctggctctggagccccgggagctggcggagcgccgagtccgcatcgtctctagaggtaggacgcagcttttctctctgaacccgcgcagcggcaccttggtcaccgcgggta

SEQ ID NO: 11340 - DNA, 523 bp, Homo sapiens
  MAP TO AC005332.1; EXPRESSED IN HELA, SIGNAL = 0.75; NT HIT: gi7662181, EVALUE 2.00e-03; SWISSPROT HIT: O60309, EVALUE 8.00e-11; EST_HUMAN HIT: AI000692.1, EVALUE 1.00e-39
tccccctagggaggcagaaccttctccagtccagcaagagttcccagctgagccaccagagccccctaaggaggctgaaccatctgcaacccagcaggaagcctcaagtcatcctctgaagtccactgaagaggtcagtcctccaccacaggggagataccagctcagccatcagagccacctgagaaggtcaaaccatctccagtcctacagcaggccccaactcagcttttagagccacctaaagaggtagaatcctctccagtccagcaggcagtccctgctcagtcttcagagccccctagggtgatagaaccctctctgacccagcagatggccccatctttgcctccagagttccctcagtaggtggaaccatctctaactcagcaagaggttccagctcagattccagagccctctatggaggcagaaccttctccgacccagcaggaggccacagttcaggctccagagccccctaaggaggtagaatcttcaagccagcagatggtcccagctc

SEQ ID NO: 11341 - DNA, 530 bp, Homo sapiens
  MAP TO AC007841.1; EXPRESSED IN HELA, SIGNAL = 0.41; NT HIT: AF163864.1, EVALUE 1.00e-20; SWISSPROT HIT: P36710, EVALUE 6.50e+00; EST_HUMAN HIT: AA593494.1, EVALUE 2.00e-23
ggcaaaggggcagcaagaaccttcttcacatggcggcaggagagagaagagcatgtgagagtgctagaaatactaccttttataaaaccatcagataccctgagaattcactcactatcatgagaacagcatggggagaccacccccataatccaatcacttccctccctcaacacatggggattacaattcaagatgaggtttgggtggggacttaatatcactgaactctctggggacaaagaattggggtaatggcgtgattccacttgagacctgaaggctttttctactggtataagcaaaagacccaatttatcacagcaaataagaacattaatgttacattaaccataagagaagactggccaaaatcaagataaaatatgaacggggagccacactcccagaaatcacaaaaagccacctactacactgacaacaaagagtcaaatgcagcagacctggaagccaaacacacaaaacagagcacacaggcaactgtggtgagagcacacaggcaggcagcg

SEQ ID NO: 11342 - DNA, 542 bp, Homo sapiens
  MAP TO AP000365.1; EXPRESSED IN HELA, SIGNAL = 0.65; EST_HUMAN HIT: BF840427.1, EVALUE 7.00e-26; NT HIT: gi16157884, EVALUE 5.00e-66; SWISSPROT HIT: Q02224, EVALUE 8.00e-03
tcggcttaggactccttgcatgtgttctatacccaacgtcttttctttgagagcctctctttcataacggagctcagtttccaggccactggatgtactctcagctttagaaagttgctgagaaagaatctgaatgtgagaattagtattttcttgtaaatgacaccattcattcactgtgctctggaaagcaagctgtaggtctcttttcaatgactgacattgatcatgatcacatagggcagcagccagtctacaacggtatgattccatttctgtttccagtcttggggtgctttgtttttccttctctagctcaaaattgagcattgtattctcatccatcagaacattaagctctttactataccaggttattgtttttgttaatgtttcctcattcagctttagagtcttttcaaggtcttcattgttttcctttataatttcaatatctttgaaatatttattttcagtttcccggttctgatgttttattgtgtctatttccagcctgagtctggcaatttcatcccgcatca

SEQ ID NO: 11343 - DNA, 510 bp, Homo sapiens
  MAP TO Z93041.1; EXPRESSED IN HELA, SIGNAL = 0.32; EST_HUMAN HIT: BF125079.1, EVALUE 7.10e-01; NT HIT: AF129756.1, EVALUE 4.80e-01; SWISSPROT HIT: P29400, EVALUE 1.10e-01
cgctcgcgtgaggacagcagtgccggcagcaccagggcacaggccccacagacaaggggcccggaggccgctgggggcattccacccacagacccgctctggacagtgtgcgccctcagaggcagggagggcgtctggaccgcagtctcatgtgggtcactcttgggggcctcgggcagcagcaactgaaggaggcagtgatgacctcaggcccacgtcctggaggtcttggggagaaagacaggaagtgttttcctagaaacactggtgtgcagagaggactgggtttcagctacatcatgtggcagggccgccctgggaggagcctcacggagacccacagacagaacgtgggggtgagggtgaagcagccagcatccacaatgggctccccaccccacagctccgccccgggacccccttcctccgaggcagtcaggctcctgcccccggcaccatccttccggcctcggtcaagactgcccggacaccacctccagggccttgctg

SEQ ID NO: 11344 - DNA, 504 bp, Homo sapiens
  MAP TO AC018843.2; EXPRESSED IN HELA, SIGNAL = 0.2; EST_HUMAN HIT: BE783517.1, EVALUE 0.00e+00; NT HIT: gi14730805, EVALUE 0.00e+00; SWISSPROT HIT: Q9CD58, EVALUE 2.70e+00
aagcccgctggttcttccgcaggaatgaggccagaatgtgcagtgcctcggccaggatgggctgtaggtcaagctgtagtggggatacggccaccagcgtaagcgccttgatggcgggcagccgggtgatctcattccgcaggcggtccaggaggagcagtaacgtgggctccaggtcatccccaagccggtcacccaggtggcctacaaggtggcccatgcaggaaatggcccgctccttcacctcctggtccaggtcagtggcacgaagtcgcgccagggtgacagcagacatctctccaacatatggctcaggatccagcatccgaggcctgtgcagcggccacagggcccgcaccagctcctgcagcaccaccagggcctcggctgcaatcttgtagaaagagtcagccacacaggccatcacaggtggcaggaggataggcaagtgtgggtggaaggcctcagctggttcggtgcccagcagcccctgcaagaaggcca

SEQ ID NO: 11345 - DNA, 545 bp, Homo sapiens
  MAP TO AC068323.6; EXPRESSED IN LUNG, SIGNAL =   1; EXPRESSED IN HELA, SIGNAL = 1.8; SWISSPROT HIT: Q9UPR5, EVALUE 1.00e+00; EST_HUMAN HIT: BG003773.1, EVALUE 5.00e-79; NT HIT: M68516.1, EVALUE 2.00e-12
ccagcttctggatttgctctttttggagctaatcagagtgaggcaacaatagctatttcaattttggatgatgatgagccagaaaggtccgaatctgtctttatcgaactactcaactctactttagtagcgaaagtacagagtcgttcaagtaagtatcccttagtgtgttattattattattagctctcagaatcctgaaacaatcagttttaaattttatttaatagaaaattctataaaaagtagtaaactctaactttgaaaatgtcctcttacaacagtttacctgtaaggtaactggaagccagacacatttttttcttagaaattatgttttaaaagtcagtagaaagtaagatgggaactttaaaattatctagcacactctattataacaaggttggtgtagtcttgaggctgcctctgatttctggatgagtggattcatccactggggttgctgtaacaaactgccataaactgggtggcttagaaacaacagacatttttcctcatagttctggaggctgggaagtgccacg

SEQ ID NO: 11346 - DNA, 526 bp, Homo sapiens
  MAP TO AC008022.1; EXPRESSED IN HELA, SIGNAL = 0.47; SWISSPROT HIT: Q15427, EVALUE 2.80e+00; EST_HUMAN HIT: AW779357.1, EVALUE 7.40e-01; NT HIT: AE004814.1, EVALUE 3.20e-02
acggcacaatcagcgggaggcagagaaagccgtgccattattaccaaagcctcctcgagcaaccagaagacatggaatcgctctctcaccttggccaaaagcatctctccatgcaaccagagcctagagctctcagaggtttttaaagagttgccagactgaaggcatttcgttccaggatctatttagctttcccaccttgttaattaactaattagggatgggaaagcaactcaccaatacaaagtgtcaggaaaatgctaagtaaatttgtccaactggtctaaatgtcaatgctaacttaagaaagggggcaagcgcgatgagactgagccgtccccagactgctgcaatccagagctcgctaatcgtagagacggagagacccgggcgccctgcagcagcagcctcccggcccagagccgagatggccggaaggatcttctggaagggaaacctggaccagggccaccccgggcacagggaacgcggctggcaaggcgcatcctcgccgctcagtctccgt

SEQ ID NO: 11347 - DNA, 507 bp, Homo sapiens
  MAP TO AL022315.1; EXPRESSED IN HELA, SIGNAL = 0.7; EST_HUMAN HIT: BG332236.1, EVALUE 3.00e-77; NT HIT: AY028896.1, EVALUE 2.00e-77; SWISSPROT HIT: P55198, EVALUE 1.60e+00
tttcttggccccggccctaccgatgttttaggctaggtaattctttgctggggactgtcctgtgccctgcagggcgtttgacagcatccctggcctctacacaccagatgccaataaatccccactaattgtgacaaccagaaatatttcctagacatggccagatgtttctagggggtcagaatcaccccccattgagaaccacagtcataacccaatgaagtaggtacaccgagcactaaaaggacttatccacgtcaaagagccagcaatggtggctctgggacacaggctggctggctactacattgcaaaagctgccccttcccttgcctccccgacccatctccccagggcctaccgccagctgcaggtcacggctgcgaagtacagccgagttcttctcctcactgagctgtgccaggcgcatggcgatcatgtagttctcatccttgagccgcagcagctccaggctgcccgcctcccagtcctcccgcagccgttgac

SEQ ID NO: 11348 - DNA, 532 bp, Homo sapiens
  MAP TO AL117391.1; EXPRESSED IN HELA, SIGNAL = 1.5; EST_HUMAN HIT: AA489717.1, EVALUE 0.00e+00; NT HIT: gi13644078, EVALUE 0.00e+00; SWISSPROT HIT: O14924, EVALUE 1.00e-97
tccacaggagaggctggccctaggtgcttgtttaggtcccagaacctgtcagtctgatgagcggcctcaaatggggggctcccttcggggtccggacagaagggcccagtccagggagcaccccagggctgggcacccctcccacccacaccgtcccacgcgctgcctccggggccgtgtctgctcgagctcccacccaggtccaccacaaggacccggttgctcttctcctcctggtggaagttcccaatgccgctgtcactgttgctgctggtgctgttgttctggtgggcatcggcgtccccgtccagaaaggcgcgggcccgcatgccctcaatcagctcacccatgtctcggtacaggacagagatgaactgcaggacggggagggaggacgccgggaattccagacagccattggtgtctgggtcggccgtgcactcaaacccaaaccgccgagcaatgccttggtggatcttgtgattaaacaagtctgggtccaccatgaacacgtggcaggaagtccgcaggg

SEQ ID NO: 11349 - DNA, 522 bp, Homo sapiens
  MAP TO AF121781.1; EXPRESSED IN HELA, SIGNAL = 0.49; SWISSPROT HIT: O95447, EVALUE 8.00e-15; NT HIT: AL163279.2, EVALUE 0.00e+00; EST_HUMAN HIT: AI554906.1, EVALUE 0.00e+00
catctggcctgcttccatgtttttaagttacaattcaactctattgctgataaattttgttgtgtaggagatgcatgtcttgggttgactaacttaagagttactagctatggagtcccacagaatactaaaaccatatagtaaaccagtcttccagaagataatggatgtttcagttgtaaagatgtaaatttgtatttgaagtgttatcattggctaatataaaatagattttttactagattagcaatcaaacaaaaatttaattatcgaaagtcaattaagtactaaaacacacacatacatacactccctctctcacacatttcaaaaataagatgcaaggcacataagcagcattatatcaaaccagaatgcattaggatattgattatatttaaataattatttttctttttccttctgtaggtgacgatggcttaatagaatttaccacagttactttagagtctccgaaagcatggctggtggaggcctgactgggaggcaggggatgcgact

SEQ ID NO: 11350 - DNA, 532 bp, Homo sapiens
  MAP TO AC009123.6; EXPRESSED IN HELA, SIGNAL = 0.93; EST_HUMAN HIT: BG491520.1, EVALUE 2.00e-04; NT HIT: AJ011020.1, EVALUE 8.00e-03; SWISSPROT HIT: Q92953, EVALUE 2.00e-12
cctccgggggctcctcagacaccgccagcgacacgtagtatggggagatggccaggatgtcgatgatgttcaggggcccctggaagaactgacacttgtcttgggcctggacaaaccgcaggcagaactccagggagaaccaggccacgcagatggtctccacgatgaaaatatagtagcacttccgagagcattcgccctgcggggagaagaggcaacaacgcggggtagagagtggacttgcaactgtgctggaaatcgggggacgacttcatgcccatgagctttgtgctgtaaacttagtcgtccaccagaacctccttttacacagttttccagttgtggctgggtacacagcagatcggctaggtcagagactgttctttctggcttcccttgccgctaggtgtggccaaatatgactaagtcctcacctccggactggaaacagaagtgatgcaaaccacctctggatctaactcttgcacactctttccatccttcctgtgagccgggacagcacaaatgggcc

SEQ ID NO: 11351 - DNA, 518 bp, Homo sapiens
  MAP TO AC006946.18; EXPRESSED IN HELA, SIGNAL = 0.47; NT HIT: gi14776795, EVALUE 0.00e+00; SWISSPROT HIT: Q60760, EVALUE 6.40e-02
cgccgcgctttctcctcctctggtctcgctgcttcctctccccctcgaatccagtcctggtttccccgccgccagcctccctccctcccggcgggactcgctccccgccccgccccgccccgcccccgcctcgcctgtcttcaccgcggtccgctcggttcaccgcctgccccctctccctgccgcccggcccggctcgcccagtccagtggctccagtccggatctcgccgccgcccggcccaggtgcgagtccccactgctggggaggcggcgggccccggctcccctcggccgcctagcccgcctcgcccgcccggggttggcggggagggaacagctgggcggccccagagcccctcggaggacaatgcgcccggcgctcggccaccctcgctcggtctcctccgcgtccggttccttcccgccgcccccggcagccgcccggctgcagcccctcttcctccgcgggggctccttccgcggccggagaggctccggcgacagcagcaccagcac

SEQ ID NO: 11352 - DNA, 556 bp, Homo sapiens
  MAP TO AC007281.3; EXPRESSED IN HELA, SIGNAL = 1.7; SWISSPROT HIT: P08004, EVALUE 1.40e+00; EST_HUMAN HIT: BF840220.1, EVALUE 2.00e-66; NT HIT: gi13357558, EVALUE 2.10e+00
gatgctgggccaccactgggtaatgtattgagataaaacacaaattgggggagggaggtattttggacagccacgttagggccctgatataaatcaagatttgcattaggaaataagctcagagaagatctgagaaaaagcaggagtgatgaggtttgtatgaaaatactatcaggcaaaatctgcaggagggcagtagaccctgacctaatacattattgtgttgtgaaaagttgttttatgaaaactcatgatctcagctaaagctttatcaggcttaaacaaagaacacatgttcctaattttaatatttataatgaaccaagtggactttttaataccaaacttatctatcaaatatttaaccaaattttgtgttcctatacgacgttcaaattaataggaaaaaatcctccagtaagctttttgagtgtatttaggtcttttccagtagagagaacatactgctttttggaggtagtaaaagttattcaagtggtgttcctttcaataaatttcttttcaacatccaagttgcaagccttctcttcagttt

SEQ ID NO: 11353 - DNA, 501 bp, Homo sapiens
  MAP TO AC008639.6; EXPRESSED IN HELA, SIGNAL =   1; EST_HUMAN HIT: BI711441.1, EVALUE 0.00e+00; NT HIT: gi13899234, EVALUE 0.00e+00
tttcctaccattgcaagaggctgctttagctaatgcaacagctggctaggttattgcttcaacaatataattcataatgcaaaagcagctcttttccaaacattttagagcaactcaagttgtttacatctcctgtaggtgattttcctataactttgtgccaattggtgtcatactatttggtaaaaatctacattaaatcaagacaactgcacttggttaaatttctgtcatacagagaattatagaaaaattacagctgatttgaacttatcatcattaagtatatacagggttttagaaaatgaatgcaaactacaaaaatggagttgtataattaaacattaaatagtccaagtaataaaagtcatagattaattgtctctcagttctagtcagatcctttaaatactgtgctcacgacttgagcattggttctttcatcggaagagtgcctatccttaaagttgggaaatttcagctcctttggagcaccgatca

SEQ ID NO: 11354 - DNA, 552 bp, Homo sapiens
  MAP TO AC004500.1; EXPRESSED IN HELA, SIGNAL = 0.76; NT HIT: gi11417364, EVALUE 0.00e+00; EST_HUMAN HIT: AW770109.1, EVALUE 8.00e-38; SWISSPROT HIT: O60383, EVALUE 1.00e-102
tgactctggtgtccccctcactgatcttatatttgaatgacacaagtgctcaggcttatcacagctggtattcccttcactataaaaggaggccttcccagggtcctgaccaggagagaagtctgtctgcctatcctgtgggagaagaggctgctgaggatgggagatcttcccatcaccgtcaccgcagaggtcaggaaactgtcagttctgaattgaagaagcccttgggcccagcttccttcaatctgagtgaatacttcagacaatttcttcttccccaaaatgagtgtgagctccatgactttagacttagctttagtcagctgaagtgggacaactggattgtggctccgcacaggtacaaccctcgatactgtaaaggggactgtccaagggcagttggacatcggtatggctctccagttcacaccatggtacagaacatcatctatgagaagctggactcctcagtgccaagaccgtcatgtgtacctgccaaatacagccccttgagtgttttgaccattgagcccgatggctcaattgcct

SEQ ID NO: 11355 - DNA, 597 bp, Homo sapiens
  MAP TO AC010332.6; EXPRESSED IN HELA, SIGNAL = 0.8; EST_HUMAN HIT: BG742506.1, EVALUE 0.00e+00; SWISSPROT HIT: Q06730, EVALUE 7.00e-27; NT HIT: gi14754652, EVALUE 0.00e+00
tgtggcaaagcatttcgagggtgttcaggccttactgcccatcttgcaatccatactgaaaagaaatctcatgagtgtaaagaatgtggcaagatcttcactcagaagtcttccctcaccaatcaccatagaattcacattggagagaaaccttacaaatgcaccctgtgcagtaaggtcttcagtcacaattctgaccttgcacagcatcagagagttcattcatgagagtccctacaaactgtatggcaaaaccatcatcatgagttctagcattaatcaacatcagtgagtccatactaagtggaaatcatataaatgaaatgtatgtgacacaggctttatcaaggcctgccaaatcactggacatcaccacatcactgtggaggatgaaagcacacagatgaattgtgtgtacttgggctattattcaaggaccattgctatagaacacgataggatttacacaagaagtaactctgtctctggttctctgatactaatctatgatattgcatgatgcagaataatgctaagtcaaaatatgttgaatctcatgacctgatgtatatcaaaggtgcaacggcttgtaaatga

SEQ ID NO: 11356 - DNA, 501 bp, Homo sapiens
  MAP TO AC010582.6; EXPRESSED IN HELA, SIGNAL = 0.2; NT HIT: gi16190702, EVALUE 0.00e+00; EST_HUMAN HIT: BE179105.1, EVALUE 0.00e+00; SWISSPROT HIT: P16473, EVALUE 1.00e-92
catcatggttgggggctgggtttgctgcttccttctcgccctgcttcctttggtgggaataagtagctatgccaaagtcagtatctgcctgcccatggacaccgagacccctcttgctctggcatatattgtttttgttctgacgctcaacatagttgccttcgtcatcgtctgctgctgttatgtgaagatctacatcacagtccgaaatccgcagtacaacccaggggacaaagataccaaaattgccaagaggatggctgtgttgatcttcaccgacttcatatgcatggccccaatctcattctatgctctgtcagcaattctgaacaagcctctcatcactgttagcaactccaaaatcttgctggtactcttctatccacttaactcctgtgccaatccattcctctatgctattttcaccaaggccttccagagggatgtgttcatcctactcagcaagtttggcatctgtaaacgccaggctcaggcataccg

SEQ ID NO: 11357 - DNA, 543 bp, Homo sapiens
  MAP TO AL035362.1; EXPRESSED IN HELA, SIGNAL = 1.4; NT HIT: AB058723.1, EVALUE 0.00e+00; SWISSPROT HIT: Q08865, EVALUE 5.00e-04; EST_HUMAN HIT: BE869510.1, EVALUE 2.00e-93
atgtgggcaccgggcagaagctcccaacttctggggctgatccgttatgcagaaatccaaccaacagatccttaaaaggcaaactcatgaacagtaagaaactgtcttctactgactgtttcaaaaccgaggccttcacatccccggaggccctgcagcctggggggactgccctggcgcctaagaagaggagccggaaaggccgggcaggggcccatggactctccaaaggcccgctggagaagcggccctatcttggcccggctctgctcctgactccccgagacagggccagtggcacacaaggggccagtgaggacaactctggtggaggaggcaagaagccaaagatggaggagctgggcctggcctcccagcccccggagggcaggccctgccagccccagacaagggcacagaaacagccaggccacaccaactacagcagctattccaagcggaagcgcctcactcggggccgggccaagaacaccacctcttcaccctgtaaggggcgtgccaagcgacgacgacagcagcagg

SEQ ID NO: 11358 - DNA, 512 bp, Homo sapiens
  MAP TO AC002056.1; EXPRESSED IN HELA, SIGNAL = 0.38; NT HIT: M77380.1, EVALUE 1.00e-112; SWISSPROT HIT: P10323, EVALUE 1.00e-15; EST_HUMAN HIT: BI831427.1, EVALUE 1.00e-118
cccggcccctgagaacatcctccttttggatccccaagctccactatctccactgctctgcccagggcccttctctagtgactgcttccccggtcccttttctagcacctactctcacagtggggatgagcggtgacagccaccggctgcccctgccatgtgcccctgtggacacgtgggtttgctcatctcactgcaaggaaagccctgacaattcacaccctcctcacatcccaaatgaagcccctgacaccccctcaaactttactacaaccacttgtgtttacagcagcaggagaccatgtcactgtggaaattgtcctcccagagccttccgacccctctgggcaggggaagagtggctcaggcagatagtgacctctgtgtccttctggacagggagacagcggcgggcctctcatgtgcaaagacagcaaggaaagcgcctatgtggtcgtgggaatcacaagctggggggtaggctgtgcccgtgccaagcgccccggaatcta

SEQ ID NO: 11359 - DNA, 518 bp, Homo sapiens
  MAP TO AJ251973.1; EXPRESSED IN HELA, SIGNAL = 1.2; NT HIT: AJ251973.1, EVALUE 0.00e+00; SWISSPROT HIT: P17490, EVALUE 2.80e+00; EST_HUMAN HIT: AW851851.1, EVALUE 4.60e-02
tctccagcaaggccaaggcgcaaaagagctctgggcctgtcccctctgccaagggccaggaggagcgcgccttcctcaaggtggaccccgagctggtggtgaccgtgctgggagacctggagcagctgctcttcagccagatgctgggtaagtcctgccgccccgccccgccccgcccctggctttctcctaaccagctgctggggaaggtgtggggaaagcgaagccccctccccttgcgccttcccggagggccctcctgttcacgatcaggctgtgatgggcattgcgcccagatgtgctgagctggcccacctccagatgcgcatggctcaagtgtaccttcttaaagacattacaggcgggaacccgggctcgactctggcctgcccgaggtgaggctggacaatgggatggggggtgagggggttacaggctctcagaaatagagccagaatcccaatatggcaaaacctgggactggtggaaacctccgttgtggtgtggcctgcgcttga

SEQ ID NO: 11360 - DNA, 503 bp, Homo sapiens
  MAP TO AC015599.3; EXPRESSED IN HELA, SIGNAL = 0.29; NT HIT: AB040918.1, EVALUE 4.00e-20; SWISSPROT HIT: Q13203, EVALUE 9.20e-01; EST_HUMAN HIT: BG468749.1, EVALUE 6.00e-20
cctgaccaccagctccccaggagttccaggagccatgctttcattgtgagttgcagggtgctatttgggacctccctacagagagctgcagccactttcataacctctcttggctgatatagtagttggccacaatttaaagctcaactttaaacttgtcatgtgccagaagaaagattcttcttggttagagttctggtagaggtcatgggtaaccctcagcacacacacctgaccaggccaacacagtcaactgtgcagccatcccggccacctccacaagactccaagcgctaacggccacacagggtcaccgttcctatctacaatggaggaggatggctcacttagaaggtattctttgcaaacagacatgagctcaaatcaaatgcgaggtgaccacagcatgatggttgtggacagggccacgcaccggcgctgcctttccttaccacagtattcacactccaggtctccataaaccttccggatccgctcacaca

SEQ ID NO: 11361 - DNA, 507 bp, Homo sapiens
  MAP TO AL162387.2; EXPRESSED IN HELA, SIGNAL = 0.37; SWISSPROT HIT: P15305, EVALUE 6.20e-02
tcatccacccattcattcaccccttcattccctccatacacatttactgagatgcactcatccacccattcattcacctcttcattcactccatacacatttactgagatgtactcatccacccattcactcatcccttcattccctccatacacatttactgagatgcactcatccacccattcattcacctcttcattccctccatacacatttactgagatgcactcatccacccattcattcacctcttcattcactccatacacatttactgagatgcactcatccacccattcattcacctcttcattcactccatacacatttactgagatgtactcatccacccattcacctcttcattccctccatacacatttactgagatgcactcatccacccattcattcacctcttcattcattccatacacatttactgagttcctactaagtgtcaggtgctggagaccaagcagtgaactcagcgaggggcaggtgaaca

SEQ ID NO: 11362 - DNA, 545 bp, Homo sapiens
  MAP TO AC011467.3; EXPRESSED IN HELA, SIGNAL = 0.67; NT HIT: AB040906.1, EVALUE 2.00e-68; EST_HUMAN HIT: BF223897.1, EVALUE 9.00e-50; SWISSPROT HIT: Q05481, EVALUE 1.00e-13
gcccctgccattgagaaataaagatgtataagccattattttacttgtcttttaaaaatgaaaccaggagttggcaatttatttctaaagtcactatgttatatagggaagcaggaagatctgcactgggtaaatgtaacagacttttctttcttctatgtgactctttgcattgggctcacctggggcactgcacacacttaacttactttaatttttcagaaatgtaatttgttctgtatgcttttatatgtctgtgaaaatgttagagcgtgtaatattttgctgtaacatcttgtgatgtagtttgtataattttataggttagatttgtaaagtacattcgtctgagtcagtaagtgaagtaatttattatttttatttctttcagttgtatgttcttattttgcccgagacctttggccaaagcagggcaaaaaaaattatttccaaaaagtgatactgagaagatataaaaaatgtggatgtgaaaatttacagttaagaaaatactgtaaaagcatggatgagtgtaaggtgcacaa

SEQ ID NO: 11363 - DNA, 538 bp, Homo sapiens
  MAP TO Z83850.1; EXPRESSED IN HELA, SIGNAL = 0.24; NT HIT: X64171.1, EVALUE 0.00e+00; EST_HUMAN HIT: AW965009.1, EVALUE 1.00e-124; SWISSPROT HIT: P05543, EVALUE 6.00e-37
tgcaagcttgtcccacctcaccaaatcttttggaaaccatgaatctttagccaattatgagcaagatgttcataccattgtcacccacctctctgaaagggcgctctccctagaaatttcctggactcattcacagagctgtgtgtccatcttggaagatccaatactattcacagctatgtccagtggagcagatcactgtggtatgagggacacctactgatgccagtaataagagaccatgagctcccctcagcactccacccaagtatctgagccctagactgaaaattgacatctgaaagtcttacctttaaagtgaatatagttcactaagaccatgatggtgtttggcttgaggtcttgaattagacccacaactttccctttggtttgcatctccacatgactgttaatctcctgcttggctgcagaaatgttggagaagtcggtagaaaagacttcagtctcatagagggtcttgacatcattcaagaactttgccagtggtttcagatgcttgccaatgaagagggca

SEQ ID NO: 11364 - DNA, 506 bp, Homo sapiens
  MAP TO AL031427.15; EXPRESSED IN HELA, SIGNAL = 0.98; EST_HUMAN HIT: AL557506.1, EVALUE 0.00e+00; SWISSPROT HIT: P22070, EVALUE 2.70e+00; NT HIT: gi16159568, EVALUE 0.00e+00
gccctgggcacagcaagatgaagttacatgttacaaatggcattttaattggatttgcttccctgtgccttgcttttacagttgcaaccaaggcaatgtcttactacctcagctcagaaaaccacctggacccagggcccatctacatgcgagaaaatgggcagctgcacatggtcaatctggctctggatggtgtcaggagtagcctgcagaagccaaggcctttcagactgttccccaaaggcttttctgtggagctttgcatgaacagggaagacgacactgcacggaaagagaagactgatcatttcatcttcacatacacccgagaggggaatcttcggtactccgccaaatccctcttcagccttgtcctgggtttcatctccgacaatgtggatcacattgattcccttattggctttcctgagcagattgctgaaaagctgttctctgctgctgaagccagacagaaattcactgagccaggtgcagggctgagggct

SEQ ID NO: 11365 - DNA, 554 bp, Homo sapiens
  MAP TO AP001729.1; EXPRESSED IN HELA, SIGNAL = 0.9; NT HIT: gi14780432, EVALUE 0.00e+00; EST_HUMAN HIT: BG253799.1, EVALUE 0.00e+00; SWISSPROT HIT: P48051, EVALUE 1.00e-108
ggcacagtttcccatcccgcatggagatcactgcatgggtggaaaagaccagggtctctgccctcttcttgggttgagagatttttacaaacatgcatcccaccatgaatgcattgacaatggaccccaacacagattggattaagagaagaataattccctctgggcatttatctgtgatgacccggtagccataaccaatggtggtttctgtctctattgagaataaaaaagcagagacgaacccgttgaggttggtaacacaaggagtccaggaggggtcctctatgtggtccatgtctccccgtatgtatgcgatcaaccaccagatcattccaaaaaagagccaggtcactgtgtaaaccatgacaaaaatcaataggttgaatctccacttcaggtccactaatgtggtgaagatatcggtcaggtagcgataggtctccctcacgttgccgtgatgaacattgcactttccgtctttcctcacgtacctctggattttccttttggtccgatctcggctgatgtgtcttggcaggtcatccctggcc

SEQ ID NO: 11366 - DNA, 538 bp, Homo sapiens
  MAP TO AL049869.5; EXPRESSED IN HELA, SIGNAL = 0.97; EXPRESSED IN LUNG, SIGNAL = 1.2; NT HIT: gi12738673, EVALUE 0.00e+00; EST_HUMAN HIT: AW362407.1, EVALUE 0.00e+00; SWISSPROT HIT: P24278, EVALUE 1.00e-104
cccagagccacccctcaccctcatcagaggtgacaggccccacttttactgaaaacagtgtcaaaatacacttatgccattactgtggggaacgttttgattcccgtagtaacctaaggcaacatctccatacacatgtgtctggatccctgccattcggtgtccctgcttccattctggaaagtaatgaccttggtgaagtgcatccccttaatgaaaacagcgaggcccttgaatgccgcaggctcagctccttcattgttaaggagaatgaacagcagccagaccacaccaaccggggtaccacagagcctttgcagatcagtcaagtatctttgatctccaaagacacagagccagtagaattaaactgtaatttttctttttcaaggaaaagaaaaatgagctgtaccatctgtggtcataaattccctcgaaagagccaattgttggaacacatgtatacacacaaaggtaaatcttacagatataaccgatgccaaaggtttggtaatgcattggcccagagatttcagcc

SEQ ID NO: 11367 - DNA, 543 bp, Homo sapiens
  MAP TO AL049555.6; EXPRESSED IN HELA, SIGNAL = 1.1; NT HIT: M83309.1, EVALUE 2.00e+00; EST_HUMAN HIT: X85568.1, EVALUE 2.00e-13; SWISSPROT HIT: P02362, EVALUE 1.70e+00
tgcaatgggagcttggggattgattctggcaagggtttgtctgtcaaatgctgtacattcgtaggggtgtctgggacctctttaggtgtctcacttccctgagaaccaatgatagttgaatttgaggagccagttgtacaactgttaacttccttttgctcaggtaaagtgggtttaaatactaaagaggaacgaagccgagaatgagtataaagggcattggccttcaaattctcaggattatcatagccctcaaatcggtcacctaaagctgatccatttgagtccggtgtagcttctgaatgatcatttaagtaggattcaattctccagttacgtaggaatgactttgtggtatgttcaagggttggcattcgttgttgcaaaaagcggatatggttatctgtcccattaaaagacctccgaacatttgaattcctgtctgcaagatttgttgtttttctctgcgcaagccgattggcaaaactctgggcaggtgtgttgtggtggcttacatagccttcccgtgatgaggacgccaca

SEQ ID NO: 11368 - DNA, 570 bp, Homo sapiens
  MAP TO U82670.2; EXPRESSED IN HELA, SIGNAL = 0.31; NT HIT: M77481.1, EVALUE 0.00e+00; EST_HUMAN HIT: BG030623.1, EVALUE 5.00e-70; SWISSPROT HIT: P34531, EVALUE 1.40e+00
cccagggcctcttgttgggcctcaagggcttcctcaggcttgcagtgcagactcctctgctcaagagacatgatgactctcgtcagggcagcaggcaggagtgtgggcaggagctgggcaatgaagacccacaggcctggggagagagggagtgtgtgagaggcctcagctgagaactgaaccttggagactctaacaaaggcctacttacagatcttctccttggtgctcctctgtggcctccagggaatcctgtcctctgggttggcctgtcccctgaaaacctgaaggaggaagtgagagggtactcagggtacagccggccagcagaggtcgattctacaggactgacagtagggaggtgaggccagactctgtggagtcctatgtgtcctgtggcaggtggggcccttggtgtgcattcagggcaaacattcactgctggcacaccctgtgcatcctctgctctgtgacctgaggatactgtctcagaccaaggcctcactgcctggttcctggagctccaggaagaggaatccacgggccctcagggtgcagaccgcaagcaca

SEQ ID NO: 11369 - DNA, 552 bp, Homo sapiens
  MAP TO AB016897.1; EXPRESSED IN HELA, SIGNAL = 1.1; NT HIT: AF360695.3, EVALUE 1.30e-01; EST_HUMAN HIT: BI043267.1, EVALUE 2.00e-01; SWISSPROT HIT: P25936, EVALUE 5.20e+00
ggttttcattctccctatcacccctgctatttcatgaatacacattttgttttagaactggaaccaatccaggttcatcttttctttgcttaagtgaaactaaactaatttcagatttcttgctgaaaaatgcctttgcttcccttacacaggatataatttaagaatacagtccagcaagatcgaaatttgtttttgaaacagacatgttagttccactggttacgatggaatataatgatgtctgagatgtgatttttttgccatttgaaaacctctcctgcgaactgtcaagggcccttagagtcagtaatttgggtgttgaaccctcagcctgtggcagattgaggagctctgttgtgtgttccccagtagatgcgactttcttcttctctttatgggggtcggcaaacctttttgggaaagggccagggagttaatattttcgtcgttgaaggccacgtggtctccaactcaatcatccagctttgcccttgaggaagaagcagccatacacagtctgtaaacaaaggacggggctgtgttccaggc

SEQ ID NO: 11370 - DNA, 507 bp, Homo sapiens
  MAP TO AL133485.1; EXPRESSED IN HELA, SIGNAL = 1.3; NT HIT: AF223939.1, EVALUE 1.00e-125; EST_HUMAN HIT: BG423041.1, EVALUE 1.00e-113; SWISSPROT HIT: P53533, EVALUE 1.20e-02
cagctcctgggcttccgcacactcctgggtgagctcgtccttctcaaattcccactgggatttctcctcacgctgctgttcctggaggtccttcagctcttggcggtagcgcccctccaggctttgcagagcgctttcacacctctcagtgactttctgacaatcagactgaaactgggcttctatttgagaggttcttctattacactctgtttccattttttccctaaatatagtcaacatacagcattattgaaactgccgccaactccagaagcaaacaaaaaccattttcccatgcactgagaaagctgctgagcaaacaactgaaatactccctaaaaatgctcttaacttactcctatgtgattcatttatactggaaagggatctcatttctgaaagctaagactggcagccataattcatttaaaagacttacctctctctggagttagggggaaatcttagaaactaatttctctggcacactcccggatgtatttg

SEQ ID NO: 11371 - DNA, 600 bp, Homo sapiens
  MAP TO AL034406.1; EXPRESSED IN HELA, SIGNAL = 1.7; SWISSPROT HIT: P08547, EVALUE 1.00e-09; NT HIT: AL163302.2, EVALUE 1.00e-08; EST_HUMAN HIT: BE618465.1, EVALUE 1.00e-12
cgccatcacgaaaacatgtggaagtataaaactcacaagacttacaaaacagtcatacaaaggagaaagagcaataatcaaatgacaacatgatggaattccatcaaatcataaagaaacatagagaataaggaaaaagcaaataatttataaaaccaattaaaaggaataaaaaacatgacaggcacaaaacttcacatgtcaacaataacctggaatgtaagtagattaaatgctacacttaagacatagatgggtgaaatacattaaaaaacatgatccaactttatgctggtaacaagaaactttcctttaaaaacaaatacagaatcaaaggggtgaaaaaaaagatatttcatgcaaatgaaaatcaaaagccagcaggagtagctatatttatatcagatacaacagactttaaatcaaaaacagtaaaaaaaaaagacaactcaagtgctattgataaaatgatcaattcagcaagaggatatcatgattctaaaaatataagcactcaacatgggagaaccatctatagaatattctatctaacaactacagaatattccttcttctcttcagcacatggaacagtctcca

SEQ ID NO: 11372 - DNA, 533 bp, Homo sapiens
  MAP TO AF225898.1; EXPRESSED IN HELA, SIGNAL = 1.2; EST_HUMAN HIT: AI127858.1, EVALUE 1.00e-127; SWISSPROT HIT: P37275, EVALUE 9.00e-44; NT HIT: U12170.1, EVALUE 1.00e-127
ctcccagctgcacttggcccattttccacctcgctgtcatgatgcttgtatttttggcatttcaatgtcatgtagctcccattgacctaatcatctgcacagcagagtgtagagcactacgttttttaatgtaaagaacaaaccaaattgcaatattatattacaaagagtttgggacctggaaatgttttaaaaatgaaactaataaccctcccctttctacaacatgaagtaccccaaaaaccgtataaggattttatttgctgaataccaccattttatttaacagaattcttattttgcaggtaaaagacctcatgagtgtggaatctgtaaaaaggcatttaaacacaaacatcatttgattgaacacatgcgattacattctggagaaaagccctatcaatgtgacaaatgtggaaagcgcttctcacactctgggtcttattctcaacacatgaatcatcgctactcctactgtaagagagaagcggaagaacgtgacagcacagagcaggaagaggcagggcctg

SEQ ID NO: 11373 - DNA, 510 bp, Homo sapiens
  MAP TO AL138735.2; EXPRESSED IN HELA, SIGNAL = 0.84; EST_HUMAN HIT: BF763201.1, EVALUE 0.00e+00; SWISSPROT HIT: P15934, EVALUE 1.20e+00; NT HIT: gi16174155, EVALUE 0.00e+00
atagccggtgctgggggctccatgggcttctgagacagcagctggcggagagcactgtcaggggctccatccatcactgctgactgagtgtgcagcacctgggccatattgttgacctgaattcgcaggttttggttggcaaacacctgggtgaaagagtccagcttgtgtaagacaccgctggtaagcttctgggtccggatctcgctggcctgggagtaggtgtattggtagccatcagtgggctcagcctgggctggtgccccccacatcatgtttgagttggccaggtttccacgtagctggacatggtttccaggccctgcatgacttccccaccctccctgcctcgaggtatccatttggccaaggtttttggagccaacaggcaagcccagaccatcccgtgtatcttgagggaagtggggggagattggcgaggcctgaggggcatccattccgccccctgtaactgcattcccatagttgtggttcagcccgctgtggacg

SEQ ID NO: 11374 - DNA, 552 bp, Homo sapiens
  MAP TO AC002286.1; EXPRESSED IN HELA, SIGNAL = 0.91; EXPRESSED IN LUNG, SIGNAL = 0.98; EST_HUMAN HIT: BE514365.1, EVALUE 0.00e+00; SWISSPROT HIT: Q9PW70, EVALUE 3.50e-01; NT HIT: gi14779957, EVALUE 0.00e+00
ccgcgagagcttcgactgcctcttcgagctgctggagcactacgtggcggcgccgcgccgcatgctgggggccccgctgcgccagcgccgcgtgcggccgctgcaggagctgtgccgccagcgcatcgtggccaccgtgggccgcgagaacctggctcgcatccccctcaaccccgtcctccgcgactacctgagctccttccccttccagatttgaccggcagcgcccgccgtgcacgcagcattaactgggatgccgtgttattttgttattacttgcctggaaccatgtgggtaccctccccggcctgggttggagggagcggatgggtgtaggggcgaggcgcctcccgccctcggctggagacgaggccgcagaccccttctcacctcttgagggggtcctccccctcctggtgctccctctgggtccccctggttgttgtagcagcttaactgtatctggagccaggacctgaactcgcacctcctacctcttcatgtttacatatacccagtatctttgcacaaaccaggggttgggggagggtc

SEQ ID NO: 11375 - DNA, 572 bp, Homo sapiens
  MAP TO AL133485.1; EXPRESSED IN HELA, SIGNAL = 1.3; EST_HUMAN HIT: BF372951.1, EVALUE 9.00e-87; SWISSPROT HIT: Q02224, EVALUE 8.00e-06; NT HIT: gi16162529, EVALUE 0.00e+00
accgctggaccacgctttcctgaagcttctcaatcttgccttgaagtctcaaaaccagaacattcagcccctcattttctattttgacctcatcgtaactcttttccaggctgaggaatgtttcagtgacttcctccattttcttcagctcatcctgcaacctgaaaacctctgcagtgagttctttgttattttctagtgcctcatcgtagcgtgtctccatcattctcagctcttcctgaaggcagtcattttctcggctcacatcttcatacaacagcttatatttgggagaagcctcagggattctctcaagcatcttcagtttcttttttagcacagaaacatcaaaaagtaggtcctgtttcttttcagaagctcgatcacagtccgcacataacatcattagctgttcctgaagctgactaatctgattcttcagctcccaggattcagtcctggtctcttcactgttttcaagctcagaaaaaccctctactgaagcttcagactcctctattttgacttcctgtctctgaacagagctcgtccctgtacttcccaggtcccgg

SEQ ID NO: 11376 - DNA, 551 bp, Homo sapiens
  MAP TO AC007957.11; EXPRESSED IN LUNG, SIGNAL = 1.2; EXPRESSED IN HELA, SIGNAL = 0.67; NT HIT: gi14777593, EVALUE 0.00e+00; SWISSPROT HIT: O88671, EVALUE 7.90e-01
gtggggctcaggctccctcctctcctctcgcctctctgtgccccacagatccaagcacagtgcctcctgctcctccttcaaaacgttatggaagtcagatgcatactgttggctggcacccagctggggaggtgtgaacccttgggcatcttgcttttgccgaagtaccctctcaagggcagccttttcctgacacggttctttcctgggcccacactcggtgcgtagatggatgaatcctggagcagggcttttgctggtgcccatgtgctggtagcaattttccttctccccagtctggtcactgactgaaggtggcctgtggttctggggactcttctgaaagagcaggtcctttctacagccctcccaggcctctgcaagctcctgggcttggctgccagcccctgaactcggacattctccttctgagcccaggttggacactggggattgcctccttgggggttcttcaaagaatgcttctaggaacttggcctggggctccccgcagcttccagggttgtgggggctggccttggcactcggag

SEQ ID NO: 11377 - DNA, 500 bp, Homo sapiens
  MAP TO AC007708.13; EXPRESSED IN PLACENTA, SIGNAL = 1.7; EXPRESSED IN HELA, SIGNAL = 2.4; NT HIT: gi16182008, EVALUE 0.00e+00; EST_HUMAN HIT: BG722080.1, EVALUE 0.00e+00; SWISSPROT HIT: P33240, EVALUE 2.10e+00
ccgacggttccccactgctcccaggagcggttacctgggcactctgtgcccctccttcctgttcgggcccaggccgaggacctgccagtagggctcagttgcctggagcccgttcagcccatcccccagttcactttgcctgtgggatctccccgttgctcctgcccgtggactgagtggcaggccatcctacaagcacccggacacttgacatcagtggtgtcaagacaactctaagaaggttttccgtgatcctgcaagccctgccttccttcctgggatcctgccttcaatttgattgcacaggtaccacagcaagccagtgctgtgtgctccgagttccagggcgtcctccagctcagccactgcactgagaacatggactctctgtggggcccaggagccgggagtcacccctttggggtccacaacacccggctgtccccagacttgtgtccagggaagatagtgttgagggccctcaaggagagcggggcagg

SEQ ID NO: 11378 - DNA, 512 bp, Homo sapiens
  MAP TO AP000347.1; EXPRESSED IN HELA, SIGNAL = 0.58; NT HIT: Z46906.1, EVALUE 3.00e-08; SWISSPROT HIT: P06602, EVALUE 4.20e-01
cccctgggagccagaaacccaatattatctaggacattttgtgtctcctggtgtcctgcaccaaggagacacttggtaaactggctaaatagaactgacttcaaatccaagcatcatagcattggagtcaatattaggatcacggaatctcaagtgtttgccctctgatcttccagcatcccagaaaggtcagcttacataccttccccaatggggagctcactacctccaaagatagtgggactgtgtttggttggcgagttcttcccaacattaagtgccaatttgcctctttgtaacacctgctgcaggtgggcctggcctcagatcctgcccactgtcaaaggccacagagcagagaaacaggggccaccccagatcctgtacctggccacaaattctctgagccacaaagaccacactgaaggaatgggaggaagacttcagctcaatggaagggctggtgccactcagcttgacggagggaggtcagcacaggccaactgtgggca

SEQ ID NO: 11379 - DNA, 543 bp, Homo sapiens
  MAP TO AF164115.1; EXPRESSED IN HELA, SIGNAL = 0.65; NT HIT: gi14750889, EVALUE 0.00e+00; EST_HUMAN HIT: R10381.1, EVALUE 1.90e-01; SWISSPROT HIT: Q92953, EVALUE 4.00e-46
cctcgatgccagtggctcccagtgtgggctacatattcctttgcagtctgacaatgccaccgacagtcctaagagctctctaaaaggcagcaacccactaaagtccagatccctcaaagtgaactttaaggaaaatagaggcagtgcaccacagaccccgcccagcacagccaggccactgccagtcaccacagctgacttttcgctcactaccccgcagcacatcagtaccatcctcttataagaaaccccctcccagggagacagacccttgctgggcactgaggtttcagcgccttgttagggaccttccaaagggctgtcccccaggtttcccaagcaaaaactgttccctttctcttcaagagagaggaggagcttcactgaaatagatactggtgacgacaaagacttcttagagctcccaggggcaagggaggagaagcaggtggactccaccccaaattgctttgcagataagcctagtgatgggagagaccctttaagagaagagggcagtgtgggctcttcctccccgcagga

SEQ ID NO: 11380 - DNA, 574 bp, Homo sapiens
  MAP TO AL079300.11; EXPRESSED IN HELA, SIGNAL = 0.48; SWISSPROT HIT: P36267, EVALUE 8.30e-01; NT HIT: AJ310932.1, EVALUE 0.00e+00; EST_HUMAN HIT: BE966129.2, EVALUE 3.20e+00
tggccgtgcttcttgccctctcttccttgtctctcctcactcgacccctactgctcctctccagccccctaggagtctacactacgtggcttgtattcctgttttaagctcaccagctgaggtttcaaaggcaccagaccatttcagaaaggtaggactcagctcactccaatctcaagacattagaccccatgacagccaggctaggcctgagtggctgtgctgggacatcttggcttccatgccttgtagaaggcattgctcctcaagggccccagggaaggcgagtggatcttgccctgtgccagcatagctgggaaccttcctggcttgggcccagcaaacctatggcctctgtacctgattgccagcactcacagactgtgacctccagatccccatttctgggcagctggctacttcgccatggaccccagcctatctcgcctttttgttaaagccaagatggcagatccttagttgccggcctgaaaggcctctgtttcccctctctccttcttgcgtttgcctaagtctccttccttcttctccatcaccaccgcccttctgggtc

SEQ ID NO: 11381 - DNA, 536 bp, Homo sapiens
  MAP TO AL117379.14; EXPRESSED IN HELA, SIGNAL = 1.1; SWISSPROT HIT: P80398, EVALUE 3.80e+00; NT HIT: gi14769835, EVALUE 1.00e-78; EST_HUMAN HIT: BF205331.1, EVALUE 2.00e-78
tccagtgggtcagcctccgcgtcccctgcgccctctcgcttggcgatagtggtccttcgaaaaccccatgttttcctgaactctttgctggtgggtttgatggccttaggtgcctcctcattgctcgggtcgcctttgtcgtccatacctagcggtaaagtgtaagcacatagtgaccaactgaccacagaacaaaaggtgacattgccgccaaacacgcgcagcaggggccacctccctacaaacagtggagctctacataaagcaagtccttctgaccagtgtttcctaatgtgtgctatgtgagatgattcaagatgatttgtaaagataattttaatatagttaaacaactaacgtttagacaaaaatacagctaacaaatcaaatgtacaatttcatcatttaactgctcaggacaaggcttcacaagccagacagtagggacaaataggaaatattggacagtatagcagggtaaggatgtgagtaaggacgtgagcaaggacgcgagcagctcggaggtggcacgagct

SEQ ID NO: 11382 - DNA, 516 bp, Homo sapiens
  MAP TO AC005004.1; EXPRESSED IN PLACENTA, SIGNAL = 1.8; EXPRESSED IN HELA, SIGNAL = 0.57; EXPRESSED IN LUNG, SIGNAL = 1.5; EST_HUMAN HIT: AW300856.1, EVALUE 0.00e+00; SWISSPROT HIT: Q92359, EVALUE 2.80e-02; NT HIT: AE006333.1, EVALUE 2.00e-03
tggtggccatgaagctgttggtgattgtcatctgcttcacagaccaggtttggtttacacaactcttccttcccattgtccacattagaaatggcactgtttcctggtaatgacaaccaaggacaactttttaattcttcacattctttttctttaggagttgcttctgttaatacagggtccacaaaggttaaaggttctggggtaactaatgtgctggtttctgaaacctcatcactggtcatgattttgtctacttcttggaattcaccgcatccagctgagagatctttactcacattgccatttttgtgtccttcattattatccgtcttagtcccattgaccttcataccttgtacttcggcggattttagcagagtttcagctgtaatctgtacatttccttctgaataagagaaataaatccaaattaatatgcagtaataaaaaatcacttggtctaccttcatgcattttattatgctatgctaccaagggcaacagaagacccaa

SEQ ID NO: 11383 - DNA, 514 bp, Homo sapiens
  MAP TO AP001713.1; EXPRESSED IN HELA, SIGNAL = 0.38; NT HIT: AF231919.1, EVALUE 3.00e-67; EST_HUMAN HIT: BG007646.1, EVALUE 4.00e-67; SWISSPROT HIT: O60287, EVALUE 9.00e-18
gggtggccaggagcttcacgaggacagggctgagcgtgtgcggcgggagggcctgctgctccagggccaggaaccagccctccagggtggggtgcctgaggatggccacaagcacctcctccagcgtctgaaaggcagtgacgaggcacagacgtcacatagagcacagggctaagacaggggcggcagctgccacgcaagtattcactgttgttagcgagacagagagcagaaggcccctttcctaatccattccatcctcaagcctacatttccatgcccccctcggggtgcccaaggcatcgcagccaagcccagccagagctgtcatccagttataccacaatcgcctgagacactccacctgccccggaaggactggactgtgacctggctggtgccccacccacatttgcgagcacgtgtctgaagaacccagcctgggtgaatttccagcatgggaaaagtgctctctatggtcactcagtgtggggggcgggccgtgcagaaacac

SEQ ID NO: 11384 - DNA, 514 bp, Homo sapiens
  MAP TO AC007957.34; EXPRESSED IN HELA, SIGNAL = 0.39; NT HIT: gi14777581, EVALUE 0.00e+00; EST_HUMAN HIT: BE732141.1, EVALUE 0.00e+00; SWISSPROT HIT: P13683, EVALUE 3.00e-07
acatgcgtgtgcactcgggcgagaaaccttacgagtgccagctgtgcgggggcaagttcacccagcagcgcaacctcatcagccacctgcgcatgcacacctccccctcctagaagccaaagacccgcgggcgccctctgccaccttgctccccgggaacccatggaaggagaagcgaggtgatgcagcagcaggggcaagaccctgggtccagtggaggctccgggtggcccctctggcccccactgcccacacccagagctttaatggacagtccgtaccaagcagagccgagaggagggaagccaggggtcccagcccgtctacctccccatcccacccaggcccccagctccccgcgggggccaccgcagggcctgtgggctgggtcacgtgggtctcgctgggacctggtccctttgttgcaggcggcttggagaaagggcagtgggacgctggccacggccagggtggtgtcgggagcaggcctcaccccgctggccgtgtctgtgtg

SEQ ID NO: 11385 - DNA, 529 bp, Homo sapiens
  MAP TO AC006138.1; EXPRESSED IN HELA, SIGNAL = 0.77; SWISSPROT HIT: P52641, EVALUE 3.30e-01; NT HIT: gi14752388, EVALUE 3.00e-73; EST_HUMAN HIT: BI045357.1, EVALUE 5.00e-73
gccgccacctcatgagcaccgtggccatgatggtcctggccacgggggagggggccaccgagggcacgatggaggccacagccatggaggaggtgaggatgctccctgtcccccatatgccttttggttgtcccatacaagcttttggggagtgggtgagagtcactactgttggtagctaggcagaacgtgaggtacccgtctctttgatgtcctagtatgcatagcagttcctactctatgcccttcccccaaatccccaagattgtctctgaaagacagttctcaggatgtcatggacaaggggtggtgagggtggcattgccctcagctatttcctgtctaactgttttgccatcgttcccacagacatgtcaaaccgccctgtctgccgacatttcatgatgaagggcaactgccgctatgagaacaactgtgccttctaccacccgggtgtcaatgggccccccctgccctagggaccatttgcctgccctgttcacacaacccctgtggactgcagcctcgc

SEQ ID NO: 11386 - DNA, 509 bp, Homo sapiens
  MAP TO AC011547.3; EXPRESSED IN LUNG, SIGNAL = 0.92; EXPRESSED IN HELA, SIGNAL = 1.2; EST_HUMAN HIT: AI125173.1, EVALUE 3.00e-71; SWISSPROT HIT: Q35920, EVALUE 3.60e+00; NT HIT: AJ271735.1, EVALUE 9.00e-86
gacgcctgtgcccctcatgggatgcctgtgttctcatgggatgcctgtgcccctcatgggacgcctgcattctcatgggacacctgtgccctcatgggatgcctgtacccttcatgggacgcctgtgtgtggttgccatgattactacctgagactgtcactacgacagttactattgttactacttgagaccatcattacaagactgaacgaagggacgaatgtagaaatgaaaacttaagacagaagaaactgttttaaaggaagggaccaggggaagaaaaagagagctccctgcttctagtgagcaaaggcagccccccaagcttctacagcccttcgtacttattgggtagaaagcagggggaggaaacgattggccagctgcttgattgttcacacgttcacgttattgctaacaggtttcagatttgcctacttgcaagaaacacttgtgcctggggcgtgactgccctcagcattccttctgggcggcagacgcagtttgt

SEQ ID NO: 11387 - DNA, 504 bp, Homo sapiens
  MAP TO AL157911.2; EXPRESSED IN HELA, SIGNAL = 0.63; EST_HUMAN HIT: AA632290.1, EVALUE 1.00e-104; SWISSPROT HIT: Q55766, EVALUE 6.10e+00
gactctgcccccacccgatgcacttctcttatgggcaatggagcaggttttagagttcggccttggaggctcatctatgtcaacccacttacggtatttatttttaaatattgatgttatatgtaatattcttaaagaacatttttcttttcaagtaaatatttttttcttttttttttctgtacaggttattagtaatgttcatcatgtctgctggaacagctatagcatcatatttcattccaagcactgttggtgtggttcttttcatgactggatttggtttcttgctgagtctgaacttaagtgatatgggtcacaaaattggaaccaaatctaaggatttacccagtggtccggaaaaacatttttcatggaaggaatgccttttctacatcattatattagtcttggctcttttagaaactagcttgcttcatcactttgctggcttctcacagatttctaaaagcaattcccaggctattgtgggctatggtttga

SEQ ID NO: 11388 - DNA, 543 bp, Homo sapiens
  MAP TO AC013691.3; EXPRESSED IN HELA, SIGNAL = 1.1; SWISSPROT HIT: Q13227, EVALUE 3.00e+00; NT HIT: gi13640329, EVALUE 1.00e-81; EST_HUMAN HIT: BG490840.1, EVALUE 2.00e-81
ggcccaggccgctacaatccacccgagtcaggctgaagctgtcgaaaaggccgaaggtctccacctcgcattggcacccggggaagcatggccgggttgtctgggccccactcacggccagcagcagcagcaggggccacggcatggtgggggctagaaagagagccacaggtgaggaatgaatgcaccagatggtctaaagccaccacacaggacatgagcccagtctagacactgttggaaggtgtcacagaccccgacctcctggaatgcttcctggaacactccccagagttcctagtcccagttcttctctggcctctgcctctccatttgtatggtaaggggcgtgaggccaggtggtgaattttcaactagaagcagcagatccctttcttaaacaagagcagcagatgaaggcgggcctggtctggctgaagtgagggggacctgaagccctcgacttctgcccaccatccctgcctagggtgttaggaaacccagtttgaaacccaccagactagacggtttctcgggctggcc

SEQ ID NO: 11389 - DNA, 501 bp, Homo sapiens
  MAP TO AL049869.5; EXPRESSED IN HELA, SIGNAL = 1.3; EXPRESSED IN LUNG, SIGNAL =   1; EST_HUMAN HIT: BG674907.1, EVALUE 0.00e+00; SWISSPROT HIT: Q06732, EVALUE 2.00e-13; NT HIT: gi13650439, EVALUE 0.00e+00
acctggccatgcctttgtgcatatcattgtgcagtcgcaactgacgctctcttaaaaactgctttccacatgtttgacaaacaaactgtttttccttagtatgaacagtatagtgttctcttaagtgacaccgctgataaaatccttttccacacagattacaaaaatgctttcgtctgtgatctctttcattttcttccatgatggcactcttaaacatatcttgatctaagcagctagacatatgttcaaccactagattttcagtttcaaaacgctggccacaattaggacatcgaaaagggcaggcagaatgtttaaataactgctttttttggatactgtttatctggtaatgattgtccctaaaatcatccagcatttcaacaaacatatctcttatttcggactgctcatcaggattctcttccaagtccattttctcctcagtatttcctaacccattcatggtcagatcttggggctcgccacatcgttgag

SEQ ID NO: 11390 - DNA, 500 bp, Homo sapiens
  MAP TO AL135749.2; EXPRESSED IN HELA, SIGNAL = 0.25; EST_HUMAN HIT: BE883361.1, EVALUE 1.00e-79; SWISSPROT HIT: P53722, EVALUE 6.00e+00; NT HIT: AF258841.1, EVALUE 1.90e+00
tgttctgccaactcctccaaggcttcctgtattttttggattctgctcagcactttttcattgggaaaaatgtcctttgccaaattgaaaagtttaaatgcttcttccaggtctccattcttagttgcttctttggcctctttcacatatctatagaaaaaaaaagaagaagaggagaaaggaaacattgaacattcagtctaagaatgctttagagttcattttagaatccaaactgcagctggacttttaatatcctcaattcaggatgggaaagattagcacacaagatgccaatgaaagctggcgtcacttgagacacaaacaaatatccaccagatgctgccagcaacaccttcaggcactagttgtggaaaatgaatgtgcaaaggttattggttccacagtattttttttttaattggcacccataagaagtatgaagtgatattttttgtaaaacaaacctctatgtgtaggggcatggaaacatgggaacc

SEQ ID NO: 11391 - DNA, 501 bp, Homo sapiens
  MAP TO AL008635.1; EXPRESSED IN HELA, SIGNAL = 0.67; EST_HUMAN HIT: BE745167.1, EVALUE 4.00e-64; SWISSPROT HIT: Q9UGU5, EVALUE 7.00e-05; NT HIT: gi14778498, EVALUE 3.00e-64
tcaactttcaccagaatgggtttgtcctgaacacagaaacaaatgatactctgtctgcaatctgaattgttaacttcccataatcccacagctatagtcagttcttctgggtatgtgctctttggttgcttctgaagactcaatgaagagaaacaactttagtggcaagaactgtgtccagggtcagaggcagactctaccaagccaagaagcacaagggcatcatttctcaatgttaggaatcagttaaagggtctcccttcaaatcattcctgttagcctctttctcatgttagctaggtgcttttgatgagagaggaaacttgttagaagttgcttcccatcatattgacagtacttctcttgattatttctagatatttcgtctttggaatcgtcacagaagaaaaagaaaaagtccagcccacagtctactgatacagctatggacctgttgaaagctatcacttccccactggcagcaggctccaagccctccaa

SEQ ID NO: 11392 - DNA, 501 bp, Homo sapiens
  MAP TO AC002059.3; EXPRESSED IN HELA, SIGNAL = 0.59; SWISSPROT HIT: P14373, EVALUE 2.00e-14; NT HIT: gi16167919, EVALUE 0.00e+00; EST_HUMAN HIT: AI002159.1, EVALUE 0.00e+00
gaaagggggtcatggtgtctgccttcagagaccctccactctaaatgaagaaaagtccaatgaagcaaacacgtgacataaagtaaaataattgctactgtgaataagagttgggtattgccacaaagcatacctatgagaatttgaactagtcagggaagttgcctcatgaaaagttttgattttgggggaagaagagaattaaagaaaccaaagtcaagagatatttgggcctttgaagtagaggagaggcatggggttggcttctgtccattttctgatcaactttttttccttttcacagtggatatgaccttggatgccgacacagccaacaacttcctcctcatttctgacgacctcaggagcgtccgaagtgggtgcatcacacagaatcggcaagaccttgccgagagatttgacgtgtccatttgcatcctgggctcccctcgctttacctgtggccgccactactgggaggtggacgtgggaacaagcaca

SEQ ID NO: 11393 - DNA, 509 bp, Homo sapiens
  MAP TO AL021393.1; EXPRESSED IN HELA, SIGNAL = 0.9; SWISSPROT HIT: Q61545, EVALUE 4.80e-02; NT HIT: gi14778044, EVALUE 0.00e+00; EST_HUMAN HIT: BG826524.1, EVALUE 0.00e+00
acccaagcgcggtgtgtgtggagaccagcaacctctcacgtggtcggcagcagagggtgaccctgccggtgcattaccccggccgcgtgcacaggaccaacgccatcccagcctaccctacgaggacaagcatggactcccacggcaaccccgtcaccttgctgaccatggaccggcacggggagcagagcctctattccccgcagacccccgcctacatccgcagctacccacccctccacctggaccacagcctggccgctcaccgctgcggcctggagcaccgggcctactccccagcccaccccttccgcaggcccaagttgagtggccgcagcttctccaaggcagcttgcttctcccagtatgagaccatgtaccagcactactacttccagggcctcagctacccggagcaggaggggcagtccccacctagcctcgcaccccggggcccggcccgtgcctttcctccgagcggcagtggcagcctgctcttccccaccgtg

SEQ ID NO: 11394 - DNA, 500 bp, Homo sapiens
  MAP TO AC005663.1; EXPRESSED IN HELA, SIGNAL = 0.92; EST_HUMAN HIT: BG820536.1, EVALUE 8.00e-87; SWISSPROT HIT: O00192, EVALUE 1.00e-19; NT HIT: gi14777116, EVALUE 1.00e-87
ccccaggagcagagcccaggcagccaggcctcactggccacgatgccggaggcacctgatgtgctggaggagaccgtgacggtggaggaggaccccggcacacccacttcccatgtgtctattgtcacatccgaagatggcacaacccggcgcaccgagaccaaggtatggccaggcccaggcagtgggtgggtgagcagggccaggctgctgcagctgtcccacctgcagagtggacatggaagcttgccacgtggggcctctcattgctcgagtgggaaattaaggccagccagaccccagcaaagcagtttctaggcctctcgtgctaccccacctacctgcctatccatccaccaggtcaccaagactgtcaagacggtgaccactcggacagtacgccaggtgcccgtgggcccagatggactccccctgctggatggcggccccccactaggcccttttgcagatggtgccctggaccggcatttcctgctgcg

SEQ ID NO: 11395 - DNA, 533 bp, Homo sapiens
  MAP TO AL031133.1; EXPRESSED IN HELA, SIGNAL = 0.48; EST_HUMAN HIT: BG752291.1, EVALUE 1.90e-01; SWISSPROT HIT: Q07998, EVALUE 6.50e+00; NT HIT: AE005217.1, EVALUE 5.10e-01
cccaaaggtgtcccaggcaggttcctggatggtgggagaagatggacctctggctcccagctaggggcccatgcagggctttccaggtgaatgccaggctccccgtcatgctgaaggcatcatcaaggtccgggttaatacaggaatgtctttctccaggaggcccctgtgcctgctgcgataggggcattgtggcatggaaccctcaaaaggacaagggctgtggctgaacccttccttctgaagtgactctcccttgtagagtatcgctttctggactcctgtcatgatgtgggcaggacggaagccacgcgcctgcctgcttgacctggggcttcaggcaaattcagtgaaattgagtgaaaggagcgaacgctatggcggcaaaaactggtgttttttccccgctcccctcaaaacctcatctgaccggcccgggaagcgggtggcctcgcgttgggggtggttctcaggggcggtgcccttgggccctcacccgcgtctccgtcgccccgccctcagagcagcacgtg

SEQ ID NO: 11396 - DNA, 582 bp, Homo sapiens
  MAP TO Z95114.19; EXPRESSED IN HELA, SIGNAL = 0.6; EST_HUMAN HIT: AV692315.1, EVALUE 0.00e+00; SWISSPROT HIT: O95236, EVALUE 1.00e-73; NT HIT: gi14778534, EVALUE 0.00e+00
tcacctcccctgctggctgcactggtctggggtcagtgggtatggcatggattcagacgctgatagatctgagtgagctccattagattctcctccagctcctgagcctgccgcctcagctcctcagcagatgcagactttgccccctcatgcaagtgctttgactcgtatacaaggttgaccacatccagtgcaaggaagatgcctgaagtggtcgcactcaggatccgggctcctctgctcactgcccgggtggtgcctgcaatcgttctctctgcttgaccaccacttccagctgagattcgccaggtggtcacagggagtcgggccctggctctggcttgcctgatggcacggatttcactcccaatggtttgtgtggcttcgtaataattattaagaagggaaagtaagttgggtgtgatgtcacgcataacttccttaaataccttcaatcggtcaatgctggttgcagtcagcctgctggcttcagcttctgctgatgatgtgtatgagtgctccacgatgctggtggtgatcccagtcacagcagacgctgctcccagccctaccccagctgca

SEQ ID NO: 11397 - DNA, 514 bp, Homo sapiens
  MAP TO AL138970.2; EXPRESSED IN HELA, SIGNAL = 0.3; EST_HUMAN HIT: BG111922.1, EVALUE 4.00e-58; SWISSPROT HIT: P08547, EVALUE 2.00e-20; NT HIT: AF418272.1, EVALUE 5.00e-72
cccctgctctcttttggcctccatttgcatgaaatgcctttttccacccatttactataagtttatgtgagtccttatgtgttaggtgagtctcctgaaggcagcaggtagttggctggtgagttcttatccattctgaggttctgtatcttttaagtggagcatttaggccatttacattcaatgttagtgttgaaatgttagatacggttgtattcattgtgctctttattgcctgtgtactttggtttttttgtcttttgtttttgctttttaatttgtatttttgtttcataggtcctgtgtgatttatgctttaaagaggttctgttttgatgtatttctaggatttgtttcaagatttagagctcttttcagcagttcttgtagtggtggcttggtaatggtgaattctctcagcatttgtttgtctgaaaaaggctgtatcttggctgataattgttttgtttgaggaggctgaagatagggccccaatcccttctaggttgtaggg

SEQ ID NO: 11398 - DNA, 515 bp, Homo sapiens
  MAP TO AC005901.1; EXPRESSED IN HELA, SIGNAL = 0.32; SWISSPROT HIT: P26059, EVALUE 9.40e-01; NT HIT: AF074706.1, EVALUE 1.20e-01; EST_HUMAN HIT: AV700083.1, EVALUE 4.60e-02
tctgcggctcctctctgcccccagtttgctggggctaagccttttcgcaccccaccccatgcactgccgtgtcttctcttgggaagggatatattccttgaatgtctctatcttctaccagatcattggctccctcaatgggggtgctggtgtctgtttcactcattgctgggtctcctggcccagtgtaggggtatgtgtgtggtgatggcaaggtgacctattgggtaacttgctcagacctgaggggtctcccagaactcaggatgccaatagtcaaaccagaactgtcatgggcaaacggggacagttatgggcaggcaaagcatggaagtgttggacagccccccaagaaggaaataaataagacccaaagtgggagctggatgaaggaactgaccagccagtccagggctaaatgtaaaccagtcccaggacagcctgccacagggctgagccaaatgccagggggactttgaagcccaggcgtgtggagcaggaacgccaggctccag

SEQ ID NO: 11399 - DNA, 509 bp, Homo sapiens
  MAP TO AC019278.3; EXPRESSED IN HELA, SIGNAL = 0.35; EST_HUMAN HIT: BI913161.1, EVALUE 1.80e-01; SWISSPROT HIT: Q05859, EVALUE 2.00e-23; NT HIT: X62379.1, EVALUE 3.00e-48
ccgagaccctgcttcctgtggatccaagccattgctggaatcatcctgctgagatgtgggattcacgtctaaactatggaatgctttcagcacagcatcttcctcttctggattcacagattctaatttactcgtaaacccaaatagggatttcatagagaacttactcaggatcgactgagccacttcaagtccggcttctggttttgctggttctgacacatcactgccatccagagaattatcaacgttctccatgtctcagtaatgcccttggtggaagttctgacttgtgttaccttctcctgcgctctcagtttatccactccatctgctcttaatttacaggacagagagcaacaggacccgggagtcaggctgtcagccgcacagcaaacacacttggtctctttcgggtcacagtgccctccttccggtttgtgcgatgatgtgttccagggcaactgtgaaaaatctgtggagtctatgcccagaagcagccgaggctg

SEQ ID NO: 11400 - DNA, 505 bp, Homo sapiens
  MAP TO Z84465.5; EXPRESSED IN HELA, SIGNAL = 0.97; EST_HUMAN HIT: BF035604.1, EVALUE 1.00e-48; SWISSPROT HIT: P48608, EVALUE 1.60e-02; NT HIT: gi14744075, EVALUE 2.00e-43
gcgggggacacggttttgtggcagaaggcacagatgtctgtggacgactctctctcaacaggctctgctggggaaggcggaagctcttcctccccaggcccgaggggactgggcccaggctggactgaaggtccctccactggggcctgtggtcggggtgggggcgagggcaggtgcaactgctctaagtctgcaatgagtgaggcccccattggagcaggagcctcttcttcagaagacaggagcaccggagggggcagtggagggggtgggacgaggtccaggtcaggaagtgcgtccttaccatccaggacaggaggagggggtgagcatcctccattggagagctgcagaggtgcagctggcactgtggctgcagccctgccagggggtgcccaggggctgggctttcccgctaagccagctccgggtgccttcatgggggcaggagcctcccaggggaggccacatcaggcctcacaaaccgcctgcccccttcctcaac

SEQ ID NO: 11401 - DNA, 516 bp, Homo sapiens
  MAP TO AC004624.6; EXPRESSED IN HELA, SIGNAL = 0.53; NT HIT: M57279.1, EVALUE 8.00e-03; EST_HUMAN HIT: BG165628.1, EVALUE 4.60e-02; SWISSPROT HIT: P13942, EVALUE 4.00e-04
tcgggtcctgcacacctcccatgaggagagatgtcttcctcacatggaatcaaagccacatctgtggttctatcctctgggaccaggtctgcagagctggtttaggtcatcctccttgggtactccacagaaatggagaggcctggcctgtcttcccaggccactctgcagaaatggggagggctggccccaacctctggggataccctgcagaaatagggagagctgccctgtcctctggggacacctgcagaaatggggagggctgccccaacctctgggacccctgcagaaatggggagggctggccatgtcctctggggacaccctgcagaaatggggagggcaggttctctcctctggggacaccctggagaaatggggaggacaggtcccaacctctgcagacaccctgcagagatggggagagcttccttgttctctaaggacaccctgcagaaatggggagggctgccccgacctctagggacactctgcagaaatggggagggcagc

SEQ ID NO: 11402 - DNA, 500 bp, Homo sapiens
  MAP TO AL121895.18; EXPRESSED IN HELA, SIGNAL = 0.38; SWISSPROT HIT: Q09305, EVALUE 8.00e-04; NT HIT: AF132957.1, EVALUE 1.00e-97; EST_HUMAN HIT: BF794970.1, EVALUE 4.00e-98
acttgggcccgacctcccaggagttatagtcaatcccaaactctgttcccttgggcatgttcaggatgaccacagtggccccttcaaagaagaggcgcttggctagctcaggatccatctgcacggcagccatggggccagtggtgggtgaccaaaagaaccctttttctttgatgaacagctgagaaagaaagaaaccagagttaatcagaacgtgggggaaagatgcttcatttgctaagcattctgtatgtgccagatattgagttagacccctgacataattatttcccttaatcctcatgacaaccctgcattgagtttacagatgagaaaaacgaggattaaaggaaaggatttttgtgttttggcttaacatgcaaggacactcacttcacagctataagataccagtgaaagaaaagtgacatgctcatggtcataccaggacccaaattagaatctggataccctgcctgcaggccagtgttctgtccacc

SEQ ID NO: 11403 - DNA, 511 bp, Homo sapiens
  MAP TO AC005225.2; EXPRESSED IN HELA, SIGNAL = 0.27; SWISSPROT HIT: P49753, EVALUE 4.00e-56; NT HIT: gi14749321, EVALUE 8.00e-03; EST_HUMAN HIT: BG212070.1, EVALUE 0.00e+00
gccaggcatctacctgtgcctttgagtgagcctttggctcacctccatagaatattgcctcacccaaaacagcgtgcacagaagctctagaaggaggaaaataaggtgggtcaatacagtgaccagtttctgggtaacagattatctggggtctttctttcccatgagcttgtagcctttcagaggctatctgagcatagaattcactcttccagctttgatcatccatgccaacaataaacaagaagggcacctgcgccttttccaatggaacaagactttggtgattgtgttcctccagtggattgctccaagtgtccataaaagtgagaaatcctgacttagtgatttttacttttcctagatcatcgacaagtttaggaataatcatatccttgtaatgtagaggagctactgtgttggctacacaggcattgataagtacagtggctgtgatgcccttcaagaaagaagccattgagagacacaggtcacctcctttggaaaatcc

SEQ ID NO: 11404 - DNA, 520 bp, Homo sapiens
  MAP TO AC005618.1; EXPRESSED IN HELA, SIGNAL = 0.8; EST_HUMAN HIT: BI087139.1, EVALUE 0.00e+00; NT HIT: gi14724411, EVALUE 0.00e+00; SWISSPROT HIT: Q9Y5E1, EVALUE 4.00e-41
ccacagacaggggcaagccgcccctctcctccagcataagcgtcatcctacatatcagagacgtcaacgataacgctccggttttccaccaggcgtcctacttagtcagtgtacccgaaaacaaccctcctggggcctccatcgcgcaagtctgcgcctcggacctggacttggggttgaacggccaagtctcctactctatcatggccagcgacctagagcctctggcactggcctcttacgtgtccatgagcgcgcaaagtggggtggtgttcgcgcagcgcgcctttgactacgagcagctgcgcaccttcgaactcacactacaggcccgcgaccagggctcgcctgcgctcagcgcaaacgtgagcctgcgcgtgttggtgggcgaccgaaacgacaacgcaccgcgggtgctgtaccccgcgctgggtcccgacggctctgcgctcttcgatatggtgccgcgcgctgcagagcccggctacctggtgaccaaggtagtggccgtggacgcaga

SEQ ID NO: 11405 - DNA, 507 bp, Homo sapiens
  MAP TO AL109910.27; EXPRESSED IN HELA, SIGNAL = 0.61; EST_HUMAN HIT: AV732968.1, EVALUE 7.10e-01; SWISSPROT HIT: P07566, EVALUE 2.10e+00
tcgctggatcccacctgtgctcttaaacgactgcatctccctcactgcgaaggacggtgtcactggatcccacatgtgctctgtgcctctcactggatcccacatgtgctctgtgccatcctcccagcctccaggcttccagaagggcaggagcccggtgctgggctgggcaaaggagcacctggtccaatgaggctcacagaagaagtaactcctggcggagcctgtccagggagaaatgcagcccagcaactccacagcttcctcagaaagggcctgtgcagggtgatggaaagggcccaggagggcaggctggagccccagagccgatttgcacatggaggggctcgtacagggctggagctcagggcaggagtcaggaactcgcttgtgtgttcttaaaaacaaaacagcccccaggctccagaagggtcctgacacccacatcccagggtctcaagtcctcagtcaggagcagctgcaaaaagggactgcgactgccgtgct

SEQ ID NO: 11406 - DNA, 510 bp, Homo sapiens
  MAP TO AC003991.1; EXPRESSED IN HELA, SIGNAL = 1.2; EST_HUMAN HIT: BF987948.1, EVALUE 6.00e-57; NT HIT: gi14739825, EVALUE 0.00e+00; SWISSPROT HIT: Q9UHE8, EVALUE 2.00e-23
cggcaaagcatccagtggtcaagccagtctgggaatcgacggtattttgtgcctcggtacagttgtagaatggcagcaataacaccagggaggtaaaccaaagcaagcagtgtaagtgctgttattggaaagatacgatttggaatggaaatagccatacgaaatgtattatctttcttttcataaacataagggtagattacgtctcttataacacaatagaaaaacaagaagacacacagcacagcagacaaatagaaggggaacctccacattggaaatagctgcagggggtacttttcaatttctttggctgccatgagtgatccttgatccattggagtaagtccaagattacgaacaatatccatcactctttgcttggctttgctgtcatttccacacacaaacacctagtttaaaaacagttaattaattctgtatttactccttttccttatttaataattattttgaaaggctacaacagcaccatgccaaatgatgacg

SEQ ID NO: 11407 - DNA, 502 bp, Homo sapiens
  MAP TO AL359402.1; EXPRESSED IN HELA, SIGNAL = 0.61; EST_HUMAN HIT: BI547173.1, EVALUE 4.00e-98; NT HIT: M84966.1, EVALUE 7.40e+00; SWISSPROT HIT: Q08274, EVALUE 5.00e-19
tcccagcagggctgttccctccgcagtgaaccctgtgcctggcatcgtgtctggcacttagtggcccctctgcaaatatctgttggctgcctgactccctccgtgaaagccagcagcctaacaccgattttagaaagtaattctaaattaccccaaaagggccaaaacgctccttgctggcttggctgactgcaggataaaatgtggagggcctggatagacttgccccttcccatcgagaagcacacaagttttcttgctggaaaagtagacctttgagacttctccgttgtgctaacttgttctcctttgtcttcacagagactaatagacaagtcacgagttacctgtgtcaaatgggttcccggttcggaaagccttttcctagtagcccactcgagtgggaacatgtacttatataatgtggagcacacttgtggcaccacagccccccactaccagcttctgaagcagggagagagctttgccgtgcacacttgca

SEQ ID NO: 11408 - DNA, 526 bp, Homo sapiens
  MAP TO AC002432.1; EXPRESSED IN HELA, SIGNAL = 6.7; EXPRESSED IN PLACENTA, SIGNAL =  33; EST_HUMAN HIT: BF348235.1, EVALUE 2.00e-41; NT HIT: AY052063.1, EVALUE 5.00e-07; SWISSPROT HIT: P20186, EVALUE 2.80e+00
gctccacgagggatttgccgccttcagctgcagcagctgcagcggcggcggcgggaagaggggtggagggtggtgaggagggccggagcccgggccaggagggagggaggggagccgggaggctgtgccaggcgagccggaggggtgctccgcgctcccccgccctccttccgggagcgaggatgcagactctgaaactggtgctgctgggctgaggcggaggcaggggagttgcagcgcgcgaggctccgtgagtgtgtctcctgcgcgctgagaggcggggggaggcggaggaccaggaggaggaggaggaggaggaggagggggagaatgcccggagccgccgccgctgccgccgccgccgccgccgcgatgctcccggctcaggaggctgccaagctgtaccacaccaactatgtgcggaactcgcgggccatcggcgtgctgtgggccatcttcaccatctgctttgccatcgtcaacgtggtgtgcttcatccagccctactggataggcgacggcgtgg

SEQ ID NO: 11409 - DNA, 544 bp, Homo sapiens
  MAP TO AC007059.1; EXPRESSED IN HELA, SIGNAL = 0.44; SWISSPROT HIT: P06399, EVALUE 3.00e+00; EST_HUMAN HIT: BF990605.1, EVALUE 3.00e+00; NT HIT: AB012265.1, EVALUE 2.00e-34
agctggccagtgtggggtggagggggtcccaccactcctggactgggccatgaactccaagagtccaagaactgctattctgtccactgctgtgtccccaggtccccagaacagaggggaaccttgctcagtaaatatttgttgaatggaggaatgaatgaaattctctgcctgaggctgactcttctacccacactccttcctccagtggctggaatggccaggggactggggcgtctccacacatccaccgaccaggtggccttcactgtggctctcaagtctctcaggagcagaggccccagtgtccccctgcttggcgctaagggagagaatttagatcaacggtgggttgcccagccatgtgtctcctgggcctttaaaagtgaagctgccctaccttttttcttcttcttctggaaggagaacctgcgctcaatggccttcacctcctcagcggagatgaaatggcgcacattgtagctgacgcccacgcggttcaggtggccccggacgtggttggccaagccgatgccgttgtgga

SEQ ID NO: 11410 - DNA, 567 bp, Homo sapiens
  MAP TO AC007106.6; EXPRESSED IN HELA, SIGNAL = 0.53; EST_HUMAN HIT: AI904149.1, EVALUE 3.00e-77
gcagagatctgatttcgggacatcttgttttttgcattaatggtcaagttatagctaaaaacaaaacaaaagtaaattaagctaaataaggttaacactagcttaaaagttaatcattataaggtaataattatgtcatgtttctaagttttgaaagttttgctttgctagaactaaaatctcagctacaatcaaatccctagaaactttgctattaaaatcaatttaacatcttgccaattaatgtgtttgaatacatgcatttttctgaagagagaattttaagggaatttatggtcaaaaattataaaccagagcagatactcacacacaggcactcaaacaaaacccttggtcagttgaataaatagatcaacgattaattaaggactacatgcttattatattctccttacataaaagactgttaaagattttcatataaatcgttttagaaagaatcatgagtttgagttctcttatcttttaaataaaacattaatgctaatcttatcagcagttgtgaagattaaataatttacacaaattctcatggccagcaagtgc

SEQ ID NO: 11411 - DNA, 554 bp, Homo sapiens
  MAP TO AL133243.1; EXPRESSED IN HELA, SIGNAL = 0.74; SWISSPROT HIT: Q9NR09, EVALUE 9.00e-93; EST_HUMAN HIT: BG007645.1, EVALUE 0.00e+00; NT HIT: gi14730293, EVALUE 0.00e+00
gcggacatgccctgttgaatccttgagtgcaataaatcaagtagaggccttgaataatttaaataaattaaactctgcactatgtaatagacggaaaggtgagctggaatcaaatcttgctgtagtgaatggtgcaaatattagtgtaatccaacatgaatcaccagcagatgtacagactcctttaataattcagcctgagcagaggaatgttagtggtggatatttagtgctttataaaatgaattatgccactcggatagtgactttagaagaggagccaataaaaatacaacatatcaaagatccccaggacacaattacctcgctcattttgcttccacccgatatattggataatcgagaggatgactgtgaggaacctattgaggacatgcagttaacctcaaagaatggttttgagagagaaaaaacgtctgacatttctactcttggacacctggtaataaccactcagggaggatatgtaaaaatactagatctttcaaactttgaaattttggccaaagtggagcctcccaaaaaggagggca

SEQ ID NO: 11412 - DNA, 598 bp, Homo sapiens
  MAP TO Z98745.1; EXPRESSED IN HELA, SIGNAL = 1.2; EST_HUMAN HIT: BF091593.1, EVALUE 8.00e-69; NT HIT: gi12732534, EVALUE 0.00e+00; SWISSPROT HIT: O43309, EVALUE 1.00e-125
tcctcggaaggcattcccacactcatcacacttgtagggcctctctccagtgtggattctctgatgttccgtgaggactgatctttgagtaaacgccttcccacacttatcacatttatagggtctttctccagtgtgaattcgctgatgttctgtaagacttgtcctttgaataaaggctttttcacatacgtcacatttgtagggtttttccccagtgtgaattctctgatgctgaataaggccactctgactgaaggatttcccacattccttacactgatagcatttttctttgtggtggatttcctgatgggaaacaagggatgagttataaacaaaggcttttccacactcgttgcactcatacggcttggcgccggtatgaactccttgatgctgagtaagtatggaacgccgactaaaacttttattacactgagtgcactgataaggtttgtctcttgtgtggatcttgatatggtgaaagaggcctgctttctgactaaaggctttgccacagtcattacagtgatagtgtttttctcctgtgtgaagtctctgatgttggttaagagctgaccaccggccaaaggct

SEQ ID NO: 11413 - DNA, 512 bp, Homo sapiens
  MAP TO AL160414.4; EXPRESSED IN HELA, SIGNAL = 0.3; EST_HUMAN HIT: AA352657.1, EVALUE 2.80e+00; NT HIT: gi10946841, EVALUE 4.90e-01; SWISSPROT HIT: P42128, EVALUE 1.40e-01
catgccacatggtgaggggggcgcacagagaacctccatgcaatatatccttgtacctctgtgacggttagaaataacacccagaggagcccactgtcacatgagtaacacaaagaaggcaccagaagagattctctgctttgagggactggtatctttcctcccagcagctctgaccagaggcttcaagcccaggaaaaagtgttgaccaggccagggcacataaagggaccccaaggaaggcaacagtgcccatgggaccatcaccaacagaggagcgaaacacgcagactgaagcctcggaacagatgagaatagacgagaacacatggaacccctccaaggctccaggttgtccctggtctgaagacaaagctgaggggccccaggatgggaaacgggaaggaggcagcacaggcacagcctcgggaatgtaagctggccaagcacaaagcaaagggcagcagagctgagagctcctgggaaggagatggatgagcctggctgcggac

SEQ ID NO: 11414 - DNA, 508 bp, Homo sapiens
  MAP TO AL022329.9; EXPRESSED IN HELA, SIGNAL = 0.29; EXPRESSED IN LUNG, SIGNAL = 2.4; EST_HUMAN HIT: AA485540.1, EVALUE 2.80e+00; NT HIT: AJ310932.1, EVALUE 0.00e+00; SWISSPROT HIT: O35167, EVALUE 7.00e-05
gggggtgcgaccagggaaagcagagaaggagggagcagagcccacaaacacggtggaaaaggggaatgtctctaaggacgtagggagtgaagggaagcacgtaaggccccaaatccctgggagaaagtggggaggtttcctgggaagaaggagtaagtgggacggtccccagaataagaaggacaaagaaggggtgctcttaagtaaggcagagaagacaggtgagcctcagacccagatggagaagacaagccaagtgcagggcgagttgggggacgatctgagaatgggggagaaagcaggtgagcttcggagcacgactgggaaggcaggtgagtcctgggataagaaggaaaagatggggcaaccccagggtaagtccgggaacgcaggtgaagctcggagtcagacagagaagggctgtgaagccccaaaggaggtgagcacaatggtggagtcgccagcagctcctgggaagggaggctggccaggaagccgtgggcaggaa

SEQ ID NO: 11415 - DNA, 544 bp, Homo sapiens
  MAP TO AL132671.19; EXPRESSED IN HELA, SIGNAL = 0.39; EST_HUMAN HIT: BG485579.1, EVALUE 1.20e-02; NT HIT: gi14756936, EVALUE 2.00e-52; SWISSPROT HIT: P08922, EVALUE 1.00e-14
tcccagctgcaccctctgccaggccgcccgcaggagctttcggtgctgtttggctctcaccaggctcttgttcaatggaagcctcctgcccttgccataggagccagtgagtgctctgtccccagtgtggttactggccttgctggaataagaggaaggtttgaactgcttggcgttgtgattcaattttgagagccccatttggctattcagtcatcaaccagaagcagctacttagctaaaaaaaaagtttatacatttgttctgcatttattagttttacattaggagaatctctatacttctcatgtatatcccaatagaataatttgaacatttattgagtgtctgctaagatccaggcattgacattctagtcagaacaaatagccagggagatagaatacttgggttgagattttttgtgctgttgaaagcttgcatgaatttcagcaattccctaaaactctgaactcgaatctccatctctggagagaggtagtatgtgggtgggtaagcaggtgggctctggagtcagcctgca

SEQ ID NO: 11416 - DNA, 502 bp, Homo sapiens
  MAP TO Z73429.1; EXPRESSED IN HELA, SIGNAL = 0.25; SWISSPROT HIT: P02461, EVALUE 2.10e-02; EST_HUMAN HIT: BE904445.1, EVALUE 1.80e-01
gcccttcttcccccaaccccggcggctcccggccgcctcgggcttggcgtgcctcgcggaaaaagggggaagggaagcgggacgggcccgcagctgccgtggtagagaggctcgcaggcttgcaggaccatgcagcctgctccccaaattgcacaaaacagccgtcgtgagaagtaggaagtttccccgcctcgggtcgcagcttctctcggaggtgggcatgctgtggggcagccggagtctgtgaggagccccgccgaagggctctgacggcatctttctgggatcggtatccaagaatcctgtccaaggcttcctcttcctctgaggaaactacatttctttttcctccaccccaaacacacaccccatgcacgcacaacacgcccctcccctgctgattttattctcgctctttccctcttggcataagaacccggcgcgcaacatcccttgaatggacttccagcctcccagttctagggaccagggtgggggtacg

SEQ ID NO: 11417 - DNA, 500 bp, Homo sapiens
  MAP TO AL031667.17; EXPRESSED IN HELA, SIGNAL = 0.83; EST_HUMAN HIT: AL043012.2, EVALUE 0.00e+00; NT HIT: gi14770873, EVALUE 0.00e+00; SWISSPROT HIT: P37370, EVALUE 9.00e-03
agcgtgtctggcaggggcagctgctgtgggcaactagccttgatcaatgcccgtatggatggccttgagagggccctgcaggcagtcaccgagacccaaaggggccccggtgccccggccggggatgagcttacgaggctctctgctgccatgctcgagggaggtgtggacgggctgcttgagggtctggagacgctcaatgggacagagggtggagcaaggggatgctgtctgaggttggacatgggggggtggggagtgggcggctttgggaccatgctggaagagcgcgtgcagagcctcgaggagcgcctagcaacattggctggggagctaagccatgacagcgcctctccgggcaggtcagctcggccccttgtacagacagagctggctgtgctagagcaacggttggtctcactggagacttcgtgcaccccgagcaccacctcagccatcctggacagcctcgtggcagaggtgaaggcctggcagagccg

SEQ ID NO: 11418 - DNA, 505 bp, Homo sapiens
  MAP TO AC004264.1; EXPRESSED IN HELA, SIGNAL = 0.44; EST_HUMAN HIT: BG437034.1, EVALUE 0.00e+00; NT HIT: gi15318321, EVALUE 0.00e+00; SWISSPROT HIT: P13725, EVALUE 2.00e-14
ggaagtctgggggcaacggccctgcaagtcatgagagggaaggaccggcaggcctcggggagcaaggcaggggggcagtcagcccggccatgagtcagcctgtgtcatcagacccctgaatcaatggaaagtcggtcccgcgtggcccgcccggccaccccactgggcctggggaacttggggctgaggtgggagcgcaacagcctgactctgtctcccagcctggaggaggtagaggggtctgcccagctcccacctcttaaagtgcacttctcagtggctagtagcagaggggaacaggtttggggacccgggagctgtcatcctgcgatggttcctctcatccacagagcacctgccgcatccttcaccggcaaggggtgctctcgaggctaccggggcagctgtcccctggtcatgagtctcttgcctttcctggagggtctggtcctgcgcacccccttcctcagggcctggtgggggctgtgtctccggctccggttcg

SEQ ID NO: 11419 - DNA, 500 bp, Homo sapiens
  MAP TO AC009288.8; EXPRESSED IN PLACENTA, SIGNAL = 1.8; EXPRESSED IN HELA, SIGNAL = 2.5; EXPRESSED IN LUNG, SIGNAL = 2.1; EST_HUMAN HIT: BG722080.1, EVALUE 0.00e+00; NT HIT: gi14777573, EVALUE 0.00e+00; SWISSPROT HIT: P33240, EVALUE 2.10e+00
ccgacggttccccactgctcccaggagcggttacctgggcactctgtgcccctccttcctgttcgggcccaggccgaggacctgccagtagggctcagttgcctggagcccgttcagcccatcccccagttcactttgcttgtgggatctccccgttgctcctgcccgtggactgagtggcaggccatcctacaagcacccggacacttgacatcagtggtgtcaagacaactctaagaaggttttccgtgatcctgcaagccctgccttccttcctgggatcctgccttcaatttgattgcacaggtaccacagcaagccagtgctgcgtgctccgagttccagggcgtcctccagctcagccactgcactgagaacatggactctctgtggggcccaggagccgggagtcacccctttggggtccacaacagccggctgtccccagacttgtgtccagggaagatagtgttgagggccctcaaggagagcggggcagg

SEQ ID NO: 11420 - DNA, 536 bp, Homo sapiens
  MAP TO AC018692.5; EXPRESSED IN HELA, SIGNAL = 0.67; SWISSPROT HIT: P40694, EVALUE 1.70e+00
tgagcttccgcttccgcagggctgaggctccgtctgctgagcttgcaccctcaccctccctgagcttccgcttccgcttccgcaggactgaggcttcctctgctgagcttgtgccttcaccttccctgagcttccgctttggcagggctgaggcttcctctggtgagcttgtgcccttaccctccgtgagcttccgcaggctgagggctcctccgcggggctgagggttcctccgctgagcttgcgccttcatcctccgtgagcttccgcagggctgagagttcctctgctgagcttgcgccctcaccctccctgagcttctgaagggctgaggcttcctctgctgagctcgccccctcaccctccctgagcttccgcttccccagggctgcggcttcctctgctgagctcgcaccctcaccctccctgagcttccgcagggctgaagcctcctctgctgagctcgcgccctcaccctccctgagcttcggcggggctgaggccacctctgctgagctcgcgccctcatcctccct

SEQ ID NO: 11421 - DNA, 513 bp, Homo sapiens
  MAP TO U47924.1; EXPRESSED IN HELA, SIGNAL = 0.48; SWISSPROT HIT: P16752, EVALUE 7.80e+00; EST_HUMAN HIT: AL536522.1, EVALUE 0.00e+00; NT HIT: gi11436303, EVALUE 7.00e-68
gaggatgcccgagggaagcggcggtcctcgctggatggctcggagtctgccaagacatccctgcaggtcaccaacttggtcagcgccatcgtctttctctatgactcactcacaggggtgcccatcttggtgagatcggggtcctccccacctgttctccccaatatccaggccccagcatcatcacctgacctccaacttcatcagccatacagcagctccgtcatctctcctccagttccatcatccatcttcctctcctctgtccatcccccactccatttgtggcccccatcttgatcatctgtcttttagttcccactaccctgtttaccccagctccagcatctgcttcagttcccactcctcagctccatcaccgtccttcagttccacgacctgtcctccagctccgtcatccatcctgcagctccacggttcagccgcagacctctcatccagccgctgggctccactctccattccctccttccctcgggctgccacatggtc

SEQ ID NO: 11422 - DNA, 508 bp, Homo sapiens
  MAP TO AL121907.2; EXPRESSED IN HELA, SIGNAL = 1.5; EST_HUMAN HIT: AW590437.1, EVALUE 1.00e-122; NT HIT: gi15011885, EVALUE 1.00e-114; SWISSPROT HIT: O95104, EVALUE 2.40e-01
agccccacaagccagggaggtgggtaaggaaggccggagcccggtcacggtgatgggggtggtgaggaggggcgggggctaggaccgcagaggccccgtggagcagcttttgtcgtcgtcgttggacccgtaggtgtcaggggctggtacttcttgctccaggctcagctgtcttgggaggtccggcctgtggctccccctgggaaagagcaggagcagaaggcctggggcttggcatgttttgagccaggaaaaacactggtggctgctgcctttaaaacataaataggtttgcttctttaattccatatgtgcatttacactcttctttattagtggataaatattagaaaatcatctctcagacagagtggctgagggcgggcccctccaggggctccggcttggtgtgcagggtgaggctgtccctccagggctcgtacaccagcgtggaggtctcggccctcttgatggtgaacttataggatcggttgggcagcaggtttcg

SEQ ID NO: 11423 - DNA, 505 bp, Homo sapiens
  MAP TO AC008764.4; EXPRESSED IN HELA, SIGNAL = 0.55; EST_HUMAN HIT: BI753205.1, EVALUE 1.00e-20; NT HIT: gi9630966, EVALUE 7.50e+00; SWISSPROT HIT: P39881, EVALUE 8.00e+00
ccctggtcgaggccctgatgtttggcccacgcacagacgccgacgctgcgaagccctccgcgcttctgttcgcccgtcccgttcgagctccggctcccggtcactgggaccgcccacgtctcaggtggcacagcttggacgcaggtctgtgtccccttcttccgcttccggcctcggctccgccggaagcgcatctacagtggactgggcctgcactcgagacgtggtggctggcgcgtcggccggcgcggagggatgacgcgaggaggcagcgaccaatgggaaacggcgtagaccggggcgcctgcccccccgcccagccccgcccccgcccggcgtcgggccgtcggacgggctggaaggggcggccgctcgggcaggatggcggcggccgcggtgggcgcgggccacggcgcggggggcccgggcgcagcgagcagcagtggtggggcgcgcgagggcgcgcgggtggcggcgctgtgcctgctgtggtacgcgctgagcg

SEQ ID NO: 11424 - DNA, 535 bp, Homo sapiens
  MAP TO AP001751.1; EXPRESSED IN PLACENTA, SIGNAL = 5.6; EXPRESSED IN HELA, SIGNAL = 2.7; EXPRESSED IN LUNG, SIGNAL = 3.6; SWISSPROT HIT: P38738, EVALUE 3.90e-02; NT HIT: AL163201.2, EVALUE 7.90e+00
aggagggggtctgggagggcagccccaccagagacaacttcctttgagtgcttatcgggaccttggcacataaggaacccaaatgccaatgggtcagcagtgggcacagagctggtcagagggtgtgtggcctgtggtcagtggttcggggaaagacaaggatgcagtgaaagcagtgtgggccatggctggacagtgagctgagggctgacaggactcatcctagccagtgctgacctcctggggtccagtgcacccctgatcatgcaggtagccccatcaggattgaaatggggagcacggatgatgatttctgcaggtggttggaaagcagatagcaaatgccatgagctttctctagaaaatggccagctttatttacaagagtgagaacattactaacaccaccactgccaccactaccatcgccactatcatcccatcattatcactacaatcaccaccaccaccatcaccaccatcaccatcaccaccatcaccaccatcaccatcaccatcaccaccaccaccacca

SEQ ID NO: 11425 - DNA, 503 bp, Homo sapiens
  MAP TO AC002544.1; EXPRESSED IN LUNG, SIGNAL = 1.8; EXPRESSED IN HELA, SIGNAL = 0.43; SWISSPROT HIT: P13666, EVALUE 3.00e-06; EST_HUMAN HIT: BG336644.1, EVALUE 0.00e+00; NT HIT: gi14777420, EVALUE 0.00e+00
gggtggcctcacacacagcgtcaccaaaggccagggacctgagctgatggggggtgcccagaccccaactaagcaacccgaggaaagggaggcaggggaggtggagctcatgggagttctggccctgagcaaagaggagcaggagaggagcctggaggcaggtcccaggcacgcggggtctgtaaagcctgaggcctccgaggccttcccaggagcctgggaaaaccgcacgagaaaggacatggagagaggaaatactcaggaggatgcggccgatggcgagcagcgggaggaggaggagactgcgggaggccagaccctggcggctgaggctgaaggagaccgagagtctgaactatcagaagtcccagaggcaggcggggaggggctgacaacccaggacgcgggatgtggaactgaggagggagaggcgtctgtctcagagaaccaggagctggacggaagcacaggggcagacgcagggccttgcccgtcactgggag

SEQ ID NO: 11426 - DNA, 500 bp, Homo sapiens
  MAP TO AL121653.1; EXPRESSED IN HELA, SIGNAL = 0.36; EST_HUMAN HIT: AI161358.1, EVALUE 8.00e-50; NT HIT: AF127089.1, EVALUE 7.00e-37; SWISSPROT HIT: P26464, EVALUE 4.60e+00
tgggctatgtgcagcccacggactgcaggttggataagcttgatttaatgctaaatctccaccccaaagtgaacatgggttgtatgttacatgcatgtttattcaatatgcatgtatcaagaccaccttcatgaatattcatagctcctcctgtaatctgttgaatatgtatgtttagccaacccattcaacataaagtgtctaccccaacccctccttcgaggtgcctgtctctggtcttggttggaggcatgtttctcagcctgtgggatggccaccttgcaggctgtaaccctttagaagaaataaagtctcctctctccttttccaaatttatacactgttatttttttttaagtgaacaaagcacaaaccactgatatttacaatacccggcagccgttgattctgtaggtcatgaatactcaaggttttcaggtttgttacagatgtgatgtgcctctcatcttctatggtgaggggactggcttccaccatga

SEQ ID NO: 11427 - DNA, 500 bp, Homo sapiens
  MAP TO AL121871.8; EXPRESSED IN HELA, SIGNAL =   1; EST_HUMAN HIT: BE222256.1, EVALUE 6.00e-57; NT HIT: AL163209.2, EVALUE 1.00e-101; SWISSPROT HIT: P70213, EVALUE 4.00e-14
ggaccctgatgaggctggggacattgaacttgtaaactctgatgagacttttttgccagaaaacaaaaaacagcttccctatccccagtagtggcaacatcccccctgccccaacccatgctgccatcaacctttccacctttgtctgaggagataaaccctgcactgcctgaggcaacaatgatggcctcccctgaggcagttgtcagcaagacaatgctgattctcctcaggagccacccccaacacccctgtttgcatctagtcctataactagactaaagtcctggcagggccccagaggtgaggttcagagtgtgacacacgaggaggtacactacactccaaaagaactgattgagttttctaatttttataagcagaaatctggagaacaggcatgggaatggatattaaaggcgtggaataatggtggaaggaacatagaattggatcaggctgaatttattgatttgggcccactaagcaggggctttgca

SEQ ID NO: 11428 - DNA, 501 bp, Homo sapiens
  MAP TO AC008970.4; EXPRESSED IN HELA, SIGNAL = 0.69; EST_HUMAN HIT: AI439051.1, EVALUE 5.00e-45; NT HIT: AL163213.2, EVALUE 3.00e-11; SWISSPROT HIT: Q03133, EVALUE 2.70e+00
tgaggatgctgacctttggatgaggtttttgtggggactttttgttgatgctgttgttgttgctttctgtttgtttttctttcaacagtcaggtccctctcctgtagggctgctgcagtttgctgggggttcatttcaggccctattcatctcggtccctcccacacctggagatttcaccctaggagactggagaacaccaaagatgggtgcttgctccttcctctgggtctctgtccttgaggggcaccaacctgatgccagtaggaacattcctgtataaggtgtctggtaagtcctgttgggggggtctcacccagtcaggggcatgggatccaggacccatttaacaaagaactttggctctctgttgatggaaggtgtgtcctgtgctgggggaaaatcaactcacctgggctgcccagattcctcagagctagcagggggaaagactaagtctgttggtctgaagagaccatgcccacccctccctttaggggc

SEQ ID NO: 11429 - DNA, 567 bp, Homo sapiens
  MAP TO AC004621.1; EXPRESSED IN HELA, SIGNAL = 1.3; SWISSPROT HIT: P37546, EVALUE 3.20e+00; EST_HUMAN HIT: BF997058.1, EVALUE 1.00e-124; NT HIT: gi14760919, EVALUE 5.40e-01
aacctgctttcctcagcaggaccaaagagatacactctccattcttgtcccccatggggataaagagagttcagataaaaaaattgctgtaggaactgaatgggacattccaagaaatgaaagttcagacagtgcccttggggatagtgaaagtgaagatacaggtcatgatatgactagacaagttagcagttattatggaggagagcaagaagattgggcagaagaggatgagataccttttcctgggtaagtaggaagttttcacctataatgggccctatataaatatgtaccattctcttttttagctgttctctgaaggttagtataaaagagatcattgttctggatagctctcttgttttcatattctcttaactcataagaaggagtaaaggctaagctccagaaacaccctggaaaggttttatgaagacctcaaataaaagttaaaggatctggttgataagtataagatttcttactgcttagaaggtttcaagccatttaggagtgacttatgccccccaaaggacatatgctgagcctggcagttagggagca

SEQ ID NO: 11430 - DNA, 523 bp, Homo sapiens
  MAP TO AC005768.16; EXPRESSED IN HELA, SIGNAL = 0.85; NT HIT: AF031816.1, EVALUE 7.80e+00; SWISSPROT HIT: P54523, EVALUE 2.80e+00; EST_HUMAN HIT: AI671443.1, EVALUE 0.00e+00
gtctgcccgttgaggccaccgtatcattgtcacattgtcctaccaggactgtagcgtttgctttgataaggagtaactactacatctcacagacttaaaagtgtcataagcagtgatgttacctaagcaaggagtataataaaggagtggaaccctccccttccatagctgtgtgagagtctctcatgcatcagtttaccatcgtttcattccatccatccaggagactacacagaaacagagaggactatgtggaaagaagtgctgagtttgcagatggtttgctctcaaaagctttgaaagacattcagtctggagcactggacataaataaagcaggcatactttatggcatacctcaaaaaactttacttcttcacttagaagccttaccagcagggaagcctgcatcttttaaaaacaaaactcgagatttccatgatagttattcatataaggacagtaaagaaacttgtgcagtgctgcaaaaagtagccttgtgggcaagagctcaagcagagcg

SEQ ID NO: 11431 - DNA, 511 bp, Homo sapiens
  MAP TO AC008399.2; EXPRESSED IN HELA, SIGNAL = 0.27; NT HIT: X55760.1, EVALUE 0.00e+00; SWISSPROT HIT: O77680, EVALUE 2.00e-09; EST_HUMAN HIT: BG109556.1, EVALUE 7.10e-01
tccccaggagcgtggacaggatgagcagcgacaggaaacaggcagtgaggatacgaacagagaagtccctctccaccaccagcccagtcccgtccatggcagaggtgttcagagtcctcatcttcctaagagaaagcacatcaggggctctgacacccctcaagttcccaagcagggaataggggtcagtcagatttccaggagtcctccccaccaggcagcactttgcacagccagattgcttccctggcagagggcctcaccaacattccatgagaggaccgcttgagtggcaatccaagtcaatcccgtggatggtcactcttgatttctacatctgtcttctgactcccttgctgcaggtcactgtcttgggcaccagaaagcccctgaattccccaaataaagcactggctttttagcatattctaaatcatcaatccagtgactcctgggcctctgctctgctagtcagttgcaatcacatttcggggctgttgcttttctggtg

SEQ ID NO: 11432 - DNA, 500 bp, Homo sapiens
  MAP TO AC012284.1; EXPRESSED IN HELA, SIGNAL = 0.48; NT HIT: AJ008341.1, EVALUE 1.20e-01; SWISSPROT HIT: Q9R1U5, EVALUE 5.30e-01; EST_HUMAN HIT: AL110468.2, EVALUE 1.00e-91
gggatgcggtccggagtgagcacatttgcgcacgcggcggtggtgcgagacttggctccgcgggcccgacccgggagaagccagtctccgctccgccgaaggcactcaggacccaagcggagtcgctccaggcaccacatctggccactctctgctggagcttgtctacctgcagtgcacaaaggcacaaggatcgtcagagcgagtcccgcaaggtgcagtaaatcctgttccttttctcctattaatactttcggggtgtttcttcctgcctttcccgaaacaaggcaaactgctcttgcttgccgctattgcaaactattttttcagtgagcgaaaaacaactgtttttcttttgtcctatctcaactgtgttgtaatacacacttcggagcttgttttaatccctctccgccctggctggcctaaggcagagattcacaaaatgctggattgtaacttcagtcgctctgttctctgtgccaacgattgccttgcaa

SEQ ID NO: 11433 - DNA, 503 bp, Homo sapiens
  MAP TO AC005175.1; EXPRESSED IN HELA, SIGNAL = 0.42; EST_HUMAN HIT: AI763284.1, EVALUE 0.00e+00; NT HIT: gi14765089, EVALUE 0.00e+00; SWISSPROT HIT: P21731, EVALUE 4.00e-67
aaggccacgtccccggactcggcgcccagcgtcaggaagcaccaggaccccgggtattgcacggtgtagcgacccacgcccagcaggggcagcaggcccagcgccagcgcggccgcccacaccagccccacggtggcccaggcgcggcgctgcgaggcgaccgccgggcgcgagaagggccgggtgatacccaggtagcgctctgaggccatggcggcccccagcagcagcggggacaggccgaagaagatcatgacgacgcccatgaagcgacagagacggcagccagggtccacggcgtgccactcgaagagcgcggcgtgctgggacaccacgatggtaccggtcaccagcagccccaggaagtcggtgaggacgaggccgcagaggaaggtgaggaaggaggagcgcgtgtgcgaacccccctgccgcgcgcccgccagcacgctcagggccagcaggttggaggccaggcccaccacgcagaaggaggcggcgaacca

SEQ ID NO: 11434 - DNA, 516 bp, Homo sapiens
  MAP TO Z93016.1; EXPRESSED IN HELA, SIGNAL = 1.3; NT HIT: gi13653716, EVALUE 6.00e-50; SWISSPROT HIT: Q9W705, EVALUE 7.20e-01
gcgggcccaagatcccacagtagacctttggtgtaaataaatccaagtttgtcctggaaaaggagacatcctatgtgagcacccactaggtgccaggacatcctgcgattccatcgctttcatatccttccaggtagatctcagcatttactttccaaaggagaaaaatgaaatgggggtggggtgggtcagtgatttggccaaagtcaaatgatggggatgaaggatagtcaaagccaggcctgactctgagtccagagggcacctgacatctactgagcgcctcctgcataccagatgcttcacacacagcctccaacaccccttggctggttggatggaggaggggattttaacctggtcttccaggaagggaagcccgggaactcctcagcgcgcccttctggtgtccgcagggaggagcactgaaacctttgtgagcgagttcccgggccccgacaccgggatccgctggcggcgaagcgacgaggcgctgcgcgtgaacgtgggtggcgt

SEQ ID NO: 11435 - DNA, 518 bp, Homo sapiens
  MAP TO Z98750.1; EXPRESSED IN HELA, SIGNAL = 1.2; NT HIT: AF049791.1, EVALUE 0.00e+00; SWISSPROT HIT: Q99972, EVALUE 2.00e-62; EST_HUMAN HIT: BF725009.1, EVALUE 0.00e+00
gcccctcctgggtctcctggggcctggcagcctggtccaaggtcaattggtggaggaggctctccagggagctgagtcgagctttggtggcctccaggtctaagcgttgggtgctgctgtctctctgtaagttatggatgactgacatggcctggctctgctctgggcagctggattcattgggactggccacactgaaggtatactggcatcggccactctggtcattggccttcctgagctgagctgtcctggcccccacatcccacaccaggcaggccagaagcagcagctggacagctggcatctcaggcccaaagctgcagcaacgtgcacagaagaacctcattgcagaggcttggtgaggcttcctctggaaagctctgctgtgctgagaggtgcctggatgggtggccttgctggctcatgcccgagctccagagaggtttatatatactggggagccagcccttcatgggggaagacagaggtggccacgtgaggctgggtggggctgt

SEQ ID NO: 11436 - DNA, 509 bp, Homo sapiens
  MAP TO AC003035.1; EXPRESSED IN HELA, SIGNAL = 0.67; NT HIT: gi16163220, EVALUE 2.00e-62; SWISSPROT HIT: Q12766, EVALUE 2.80e+00; EST_HUMAN HIT: BI092063.1, EVALUE 9.00e-93
gcaggccgttgctcagttggcagtagtcatttaattacagtgggtagagagggctaaggtgataaacatccagtcttctctctccctgcgtctcatctagaaacgatcactagccttcatccccacattataatgctccatagctttaattggctggcttgtgcataccttatgtacatggacttagcaagtgtgcatacacttggtgtccactgtgggcctggacctatctcacacaatattttgggcccagtagcctcctcatgtaggtaggtatttagcaaatactaagtaaatacctgttgggtagcagattaaacatttgaagatttctcttgaggataataaacactttggtgtccaccctccacctcctttcattttgtaggcatcaacatcgaaagctaccaggccttggtattctcatccggtatatgcaagatactggcaacattatcatcaagcaatggcttggatgcaaagccatcacaatgcctacaggaaggccg

SEQ ID NO: 11437 - DNA, 566 bp, Homo sapiens
  MAP TO U62631.1; EXPRESSED IN HELA, SIGNAL = 1.4; NT HIT: U62631.1, EVALUE 0.00e+00; SWISSPROT HIT: O14843, EVALUE 2.00e-34
cctccgggttccaagccgactttcatgagctgctgaggaggttgtgtgggctctggggccagtggcagcaggagagcagcatggagctgaaggagcagaagggaggggaggagcagagagcggaccgaccagctgaaagaaagaccagtgaacactcacagggctgtggaactggtggccaggtggcctgtgctgaaagctaggtcctccgggggaggagggtgtagctggcatgtcatcctcagggcgcttcctcgctcacgccaggagggacttggagtggcgagctggggcccgatggggcttgggggcagagtagacatctagcctccctaagggtatgcgcgctaaagcccagctctcgatctcacctccatccccatccacccacacactatggattgggctctgggaaggggtcagggtgagaggctgctctggagaacaatgaggtcctcatagcagcaggcagctcctgtgttttcttgagggtggcagaggagctaagagcagtgcccagggtctgagggggctgcccagtgagtggcaggggcaggagaggggag

SEQ ID NO: 11438 - DNA, 578 bp, Homo sapiens
  MAP TO AC005063.1; EXPRESSED IN HELA, SIGNAL = 0.54; NT HIT: gi15297906, EVALUE 0.00e+00; EST_HUMAN HIT: BG118231.1, EVALUE 0.00e+00; SWISSPROT HIT: P14736, EVALUE 1.90e+00
ggcttgttaccaggtacattacccagcattttttcttacaaggaatctatcaagtactagccaacaaatagtctacatttagaaactgagggtagaaatgtctgtattttaataggaaacaagcatctaaaatacaaatcacatgtctttaacaaggcaatttacataattaggtgtaagtttttaattaactttatgttccttaggatcctagcaaacactcagttgactgtatctcaagttcaaactgcactcacctggctataaaggtaaacatcacaatggaattgggcctgtctgactagggaaaaagatcacttcaatattgcacatttcctttctttaaaaacaaggattaagtcagggccatcttggttctgaatctctccatttttgttgggagaagactaaccatctctttactaagttctagctcaacttctatttcctgggcggcctcaggatgcttttcacagtaatcaacaataaatttgtaatgttccaatgatgttgccaaattttccagctctttcttgggatctgcagtaatgattttgccatagagacgggcaactcga

SEQ ID NO: 11439 - DNA, 563 bp, Homo sapiens
  MAP TO AL158091.7; EXPRESSED IN HELA, SIGNAL = 0.6; EST_HUMAN HIT: W78220.1, EVALUE 2.00e-01; SWISSPROT HIT: P51532, EVALUE 1.90e-02
tcagcaggggtggggtggtcgctggcagccaagtcaaggtccttggtggggaccccggcgagctggatgcgcagcccacccccagcccttccttcctggggtgggtggctcccagctgccgggtgggtgggctgaaagccggcatctgccagggtccgggcgtctgtgctgtgagctcagggaccggggctccttcaaggccctagatctgggggagcctccggccctgaagctgggctgggcggcggtccctggatgcctgagagtagaggaggaggggaggggaggggagaggagagccagtccgggacaggatggacagacttcgggcatgcaaggtcaccatgaacccgggttctggctggcaggagaggaggaagcttcgtccggggtccccactgccctgcggccacagctcggggaggaagcttcgtccggggcccccactgccctgtggccacagctgggtggtggaagcttcatccagggtccccgctgccctgtggccacagctggggggagggcacagttcttgggccgcgcctccccgcacttcccgagct

SEQ ID NO: 11440 - DNA, 508 bp, Homo sapiens
  MAP TO AL118505.13; EXPRESSED IN HELA, SIGNAL = 0.36; NT HIT: M96167.1, EVALUE 4.80e-01; EST_HUMAN HIT: BG249069.1, EVALUE 0.00e+00; SWISSPROT HIT: Q98930, EVALUE 5.40e-01
ttgccccggggtaggctctgccattgctagctatggtgtcttgggcaattagttcctccttctaaacttctgtttgcttctttgcccagtgggagtgaggacaggagcttcctccaaaggtttccccagaatcaatgaggtgatgtgtgtgtgcggcgtgtgtgccctggggtgcctggcagagacgcgttgatgggcttggcagggggtgacgtcggcaatgaggattcaaagctctgcgcagaagtgtccctgaagccagacgtcttctaactggttggcctcccctccagggcagcagacactatgtgcgcgccagctgcgggatccagcggccccttctcagcctccctgtcactctcccagctgcccggagtgtgccagtccgaccaaagcaccactctcggggcttcacacccaccttgcttcaaccgctccacctacgcacagggtaccaccgtcgcgcccagcgcagcccccgccacccggcctgcgggagaccagcaga

SEQ ID NO: 11441 - DNA, 500 bp, Homo sapiens
  MAP TO AC010358.5; EXPRESSED IN PLACENTA, SIGNAL =   3; EXPRESSED IN HELA, SIGNAL = 1.8; NT HIT: AF114156.1, EVALUE 0.00e+00; EST_HUMAN HIT: BE394525.1, EVALUE 0.00e+00; SWISSPROT HIT: Q03350, EVALUE 3.50e-02
gccatgcctgagcctcccacccactccatgggctcctgtgcggccggagcctccctgacgagcaccgccccctgctccacggcgcccagtcccatcgaccacctaagggctaaggaatgcgagcgcacggcgcaggactggcaggcagctccacctgcagccctggtgcgggatccactaggtgaagccagctgggctcctgagtctggtggggacgtggagagtatttatatctagctcagggattgtaaatacaccaatcagcaccctgtgtttagctcaaggtttgtgagtgcaccaatctacactctgtatctagctgctctggtgaggacgtggagaacctttatgtctagctcagggactgtaaacacaccaatcggcactctgtatctagctcaaggtttgtaaacacaccaatcagcaccctgtgtttagctcaaggtttgtgagtgcaccaatcgacactctgtatctagctgctctggtgaggacgtgga

SEQ ID NO: 11442 - DNA, 573 bp, Homo sapiens
  MAP TO AB016897.1; EXPRESSED IN HELA, SIGNAL = 0.63; NT HIT: U11077.1, EVALUE 3.50e-02; EST_HUMAN HIT: AV726323.1, EVALUE 2.00e-01; SWISSPROT HIT: P21401, EVALUE 1.40e+00
ttgggcccattcgccacaagaacagttaaattatttagcaacaaaccaaagcaactttaaagttatttcagttggcaagaacgctagcaacctgggttgccagaattcattcacctgggttcacaggtgcaaactatgagccattctagttcatttcctaaaaaaaagaaaaacttaaaaaaagaagagcacaggatagcttaggaaatcacagggttccagccgtgaagctggacagaagctcctgggcaccgaggcggcagccacacagaacacaccagctcggctctgatgccaccagctccagccacacgcacatggccagttgcatcctacaagtgtgcactgccacacctccagcaaatatttcattatcctaaccatattctcacactttatttggttggcaatattggagactaaactgcttcttataatttatctttctaaataatggaagttgactcctttaaaacttttaaaccattttagatggcctgtaatatatgaaacctttttttacattcttcaacaaatagcaatataatgtgtgtgtgcgattcagtgtgagtg

SEQ ID NO: 11443 - DNA, 536 bp, Homo sapiens
  MAP TO AC022325.3; EXPRESSED IN HELA, SIGNAL = 2.9; EXPRESSED IN LUNG, SIGNAL = 1.3; EST_HUMAN HIT: BG705878.1, EVALUE 3.00e-12; SWISSPROT HIT: Q62703, EVALUE 6.60e+00; NT HIT: AL163207.2, EVALUE 7.00e-22
tccactgacaggcagttcccctgtacttcatcctttcctagacctctctattccctgagacacaacaatatcgaaattaggccagtcaccctacaatggcctctatgtgttcagtgaaaggaaaattagcacatctcttattttaatttaaaatctagaaatgtaatcattaatattaaatgtaatcactaagcttaatagcttagtgagaaaaatcatgtcaaaagctgagataggccagaacctaagcctcttgcaccagttagtcaagttgtgaatacaaaggaaaattcttgaaggagatcaaaattgttactgcagtgaacatatgaatgataagaaggctaaaatgccttactgccgacatggaggaagttttagtagtctagatggaagataaagccagctataacattcccctgaaccaaggcctaatccagagcaaggtcctttctctcttcaattctgtgaaggctgagagaggagagaaagctgcagaagaaatgcttgatgcaaaccgagattcagtcatgcgg

SEQ ID NO: 11444 - DNA, 500 bp, Homo sapiens
  MAP TO AP001067.1; EXPRESSED IN HELA, SIGNAL = 0.37; NT HIT: AL163300.2, EVALUE 1.00e-47; EST_HUMAN HIT: AI334029.1, EVALUE 7.00e-69; SWISSPROT HIT: P02440, EVALUE 9.00e-03
cccgtcccttcctgctgtgctcccacctcctcctgccaacccagctgctgccgcccagcctcctgcgtgtccctcctctgacgccccgtgtgctcccgcccagcctgctgaggcctccgctcaggtcagaagcccagctgctgatggacacgccccccagtgccagccaggctcaggtcccacctgaaagctgatagtcgcgtcctgaattgctcctgcactttgaccatttcctggtgtctgctgttgagctggacaatggaagaactgaaagtctatactcaatgctgcagccctcttgcggggggaggggggcgcttctagaaagttcccatggcagtggcctcccctccatatctcccacctctcatgagggtcagttcagccttgacccgtgaggtctctgtcctcctggctcagagccgcagagccttctttggacgccctcaagctgaccaataaaggccctgagactgcaatggcgctgacacccaggtgtg

SEQ ID NO: 11445 - DNA, 548 bp, Homo sapiens
  MAP TO AC005838.1; EXPRESSED IN HELA, SIGNAL = 0.45; NT HIT: gi14771513, EVALUE 0.00e+00; EST_HUMAN HIT: AW194905.1, EVALUE 0.00e+00; SWISSPROT HIT: P47990, EVALUE 6.00e-01
tgggcacagccaccctgtctcttaagaaagaacggcctcgcatctatacagcccttgatccttttagagtgaacgctgagttcgtgctgttgaccgtgaaggaggagaaggagcaccaggaagccaagatgaaggaatatcaggccagggagtccactggagtggttgatccaggaaaagccagcaaagctgcatggatcaggaagatcaaaggcctgcctattgataatttcacgaagcaagggaaaacagcggcccctgaacttggacaaaatgtatttatctaaaccagccttgggaaattacagtgttttacaataaacagaaagccaagcggatgttgctatttggcctttttttttttttttgactgtttcttcctggtaattaatgtgggaactcccaattatcttcccctgagccaaatatttgatatcatcaaaataagaaaacagaaggaggttgggcgagattagcatctgtagtcccactgaaaacaatttagtgagcattaggaaagcccagtttcgttgatgggggatggggag

SEQ ID NO: 11446 - DNA, 508 bp, Homo sapiens
  MAP TO AC011448.1; EXPRESSED IN HELA, SIGNAL = 0.49; NT HIT: gi14042965, EVALUE 0.00e+00; EST_HUMAN HIT: BI828962.1, EVALUE 0.00e+00; SWISSPROT HIT: P02467, EVALUE 4.80e-02
ccctgatcgccgagctgctgcagttcagcccgtccgccaggccctccgcgggccaggtagcgcgcaactgctggctgcgcgccggggactccggctagaagccgggtggttccagccattcctgcagccaagggcactgggccagggcggcgcacgcgcaagaggcgcgcttcgagggaatatgcgaagctgccgcgtgctgctgcacatgcgctttttcccttccgcttccctccctttcttcccacgggggagtccgcagttgcccttgttcggaatccacgttccccgcgatcccgggagctggaggcgcatgcgcatccgcgattccctgcgaccaggccccgagagggcgagaccagaggggacggaagcattgcgcctgcgcggaactctcagcctctgcgcggagggcgtcccttcccaaccagccgtgggtgccaggttcccggttggaacctgcaataaactcgctgttcctcgcacctggctctaacggtggccccca

SEQ ID NO: 11447 - DNA, 535 bp, Homo sapiens
  MAP TO AF146367.1; EXPRESSED IN HELA, SIGNAL = 0.77; SWISSPROT HIT: Q33568, EVALUE 2.20e+00; NT HIT: U92283.1, EVALUE 5.10e-01; EST_HUMAN HIT: AA557862.1, EVALUE 1.00e-109
gaggacccctgggagggcaggactcaggcaccactgggctgtttccctgctgttctgtggactccacacaggggtgtgacctcaaactggagtttacacctttctcttaaagcttgccttggcaccttcctgtctggaaacattatcttctgatatctagttgtttgacacagttatggtggttctgttcttctgtagctcacaccaacgtgtgcattgagggattttgcaccttcatcagcaaggccagtttcagggttgcactagctcttcagttttgagtagtgttaacattttcattttggatttgttctttcagaatgtgaaaccaagggagagagtcaaaatacagacttgagtccgaagccattaatttcagagcaaacagtgattctggggaaaacacccttggggaggattgatcaagaaaataatgaaacaaagcaaagcttctgtctgagtccaaactctgttgaccaccgtgaagttcaggtcttaagccaaagcatgccactcactccgcaccaggcagtgc

SEQ ID NO: 11448 - DNA, 506 bp, Homo sapiens
  MAP TO AL021366.1; EXPRESSED IN HELA, SIGNAL = 1.2; SWISSPROT HIT: P79955, EVALUE 5.40e-01; NT HIT: gi16195831, EVALUE 7.00e-62; EST_HUMAN HIT: AW814547.1, EVALUE 0.00e+00
tggccactggaacccggaagggtcaagggggcgagtgtgagattcgccgtgcagggccagggagtgaggagctcactgtcaccaatgctcgatatgtccctgtctcctgtgagaaagaagtgaggacccatgggcactggaactgggaaatggggaggagtgggcagggtgccacgagatggaggtagagggagaaaggagcaagagagaattgaaggatgaagtgcaagttatcaggctggcttaccacatccggttttggcctgtgggctgtcggtagatctgccttaacctgggagtggcgagggagtgatgcatctgccaaaacgaggagggtcactacatctcatgtctcatctccttgctcagctcatcctagccatgctggcctcctggctgttcctcaaccagctagtcgtgctccccatctcagggcctttgcctggatgctctttcctggagatcttggctatcctgtcaaaacttgtgttccccaccccgccttt

SEQ ID NO: 11449 - DNA, 541 bp, Homo sapiens
  MAP TO AC025436.2; EXPRESSED IN HELA, SIGNAL = 0.73; SWISSPROT HIT: Q9Y5F3, EVALUE 3.00e-19; NT HIT: gi14861873, EVALUE 0.00e+00; EST_HUMAN HIT: AA448114.1, EVALUE 1.00e-119
tcgcccacagcttcagtggctccagacagctagcagatagaatgacttcagcttgaacgactaatctcattggcttctcaattcccaaggactttttttcctgaaagggaattaacaggtgagtctgttgttgctttggcaacaaactttcaacctctacctaactctccggaatgagaacatatctattaatacattcgctagactggggagttgagtcgctcaatgcaaattttctttcaagtgcaaaacagcttaatgggctcggctagcctttggtggtgctgcagttagaggctagtgaagcggagagcagctgttgcagtaacctgttgcagaaaagtgaaagtatatccgcaacagttggctctgattgcagagagcgcgcttgtgagaactgatggcgggtacgcgcagaaaatctttgcaaaacaggcaagtgggatctcttctcatttttctgtgcatatctgtgggggatgcgacaactatccgctattcagtggcagaggaaatggagagcggctcgtttgtggccaac

SEQ ID NO: 11450 - DNA, 536 bp, Homo sapiens
  MAP TO AC008888.4; EXPRESSED IN HELA, SIGNAL = 0.97; NT HIT: gi14760508, EVALUE 3.00e-76; EST_HUMAN HIT: BF058506.1, EVALUE 0.00e+00; SWISSPROT HIT: P21485, EVALUE 5.00e+00
cccaaatccttcccgaggcgtcatgggaacagtagtatccagcccagctatgaaaagggttgaaggtagggaagggaggctggagaagggacttggggcgctggtggggctggacggcgattggggggcgctcacccagacggcctccttgatgagccgggccaggcggcccagcagtcgtggcaggtggcccagctccagctcacgggcggaatgctgcacgcacagcgccagcagcgtggcgggcccgaggggcggcaggtctcccgagccggcggctgcggcgcgcacgatctcgcccagcagcgcctcctcctcgcgcggccggaagcgcaggactggctcacggccgtccaggtaggcggccagtgcctcgccgcgctcctgcaggccgcggccgcacaggcgacaggagaaggcccagccagggcctggcggcgtggccccggggcgcgcgggcagccacggcggcctcgcaggccccgagcccccagtgcgggggtccttgtacatgaacaggaagtgctcgcccagcc

SEQ ID NO: 11451 - DNA, 500 bp, Homo sapiens
  MAP TO AL121953.10; EXPRESSED IN HELA, SIGNAL = 0.86; NT HIT: U73123.1, EVALUE 7.40e+00; EST_HUMAN HIT: BG999573.1, EVALUE 1.00e-05; SWISSPROT HIT: Q01656, EVALUE 3.00e-12
gatgggagcatccaatcgcccagtgaaaaatttcttgatttttcttgcaataacaatttgtgcaggtataactggtggtaacttcacccatggtcttcctggttcattgcaaacaaaatagacatatttgttggcacctgttctactttcttcttttggtatagcctgtggggccttgtaaaaggactttggtaattcatcttcctcatcttcatgagcttcactttctccattgtccctctcttcagctacatcttcctcttccacttcctcttcatcttccccctcacgaaattccacttcagctacaatataattcatttccagacccaagatctttccccagaagcggcatctttggattgggtgggtatcagtaagctgcttgagggcaagaaatatgcggtatgtctcatctgtgcccaaaccaactccagcttgttcaaaataaaaagctgactccattacatttggaagagcgttttctgcctggggaaaca

SEQ ID NO: 11452 - DNA, 531 bp, Homo sapiens
  MAP TO AL136125.2; EXPRESSED IN HELA, SIGNAL = 0.39; EST_HUMAN HIT: BG720179.1, EVALUE 0.00e+00; SWISSPROT HIT: Q28337, EVALUE 5.00e-02; NT HIT: D49835.1, EVALUE 8.00e-03
tgcgattctgggcctttgccgaggctgaggccttgccatgggcgtctacccactccctgcctctgctcctcttcatcctgtcgtcaatcacttacctcacctgcagccttctggcccacctgctgcagtccaagtcagagctctcccactacaccttctactttgtggactatgttggcgtgagcgtttaccaatatggcagtgctttggctcatttcttctacagctctgaccaggcctggtatgaccggttctggcttttcttcttgccagcagctgccttctgtggctggttatcttgtgctggctgttgctatgccaaatatcgttaccggaggccttatccagtcatgaggaagatctgtcaagtggtgccagcaggtctggcttttatcctagacatcagccctgtggcacaccgtgtggcgctctgtcacctggctggctgccaggagcaagcagcctggtaccacaccctccagatcctcttcttcctggttagcgcttatttcttctcctgccccgtgcctg

SEQ ID NO: 11453 - DNA, 538 bp, Homo sapiens
  MAP TO AL009182.13; EXPRESSED IN HELA, SIGNAL = 0.41; EST_HUMAN HIT: AI741427.1, EVALUE 0.00e+00; SWISSPROT HIT: Q10302, EVALUE 5.00e+00; NT HIT: AF006988.1, EVALUE 3.30e-02
agcgagctggagctgacccgcggcccgtcctaccgcggccgcgacctgccctaccacagcaactcggagaagaagaggaaaaaggagcccgccaagaaaaccgtgagactgcgtctgcctcccctcctccgaggggactgagcgggagcctccaggcagggcgagcagtgtcgctgtctgggggccggggaggtggcgaggcgggagggtccttgccggagaggccgcaggggcctgcctgggcgagttcgtccgcggatgctaggccgggggctttttcagcctcactctgtccaaggccagatgaaggaaggaagcaagggctgggagagttgaaaaacaggcagaaagttgaaggcgtgtatatggttttacagggagcattaggtatttaaccaactcagaagcctttagcatcagggatctcgggagccatcaccaccaccggcctttagtgggcttctgaggtctgtgtgcagaatcttcgatgcatccttctatgtgcattcctccccagccctgcttggggcgagggttt

SEQ ID NO: 11454 - DNA, 537 bp, Homo sapiens
  MAP TO AC007868.2; EXPRESSED IN HELA, SIGNAL = 0.8; SWISSPROT HIT: P10162, EVALUE 3.40e-01; NT HIT: gi14165285, EVALUE 0.00e+00; EST_HUMAN HIT: BI259681.1, EVALUE 0.00e+00
gggcacccacccagaggaccaccagggccactctgatcaacaccaccaccatcaccaccaccaccatgggcgagacttcctgctccgagcagccagctttgacgtgtgcgagagcgtggatgaggctgggggctccggtcctgctggcctccgtgcttccaccagcgacgggatcttacggggcaacggaacagggtacctaccgggcaggggtcgtgtgctgtcttcctggagccgagcttttgtgagcatccaggaagagatggcagaagatcctctcacctacaaatcccggctgatggtggtggtgaagatggacagttccatccagccggggcccttccgggctgtcctcaagtacctgtacacgggggagctagatgagaacgagcgtgacctcatgcacattgcccacattgctgagctgctcgaggtctttgatctgcgcatgatggtggccaacattctcaacaatgaggccttcatgaaccaggagatcaccaaggccttccacgtccgccggaccaaccgggttaa

SEQ ID NO: 11455 - DNA, 595 bp, Homo sapiens
  MAP TO D87022.1; EXPRESSED IN HELA, SIGNAL = 0.81; SWISSPROT HIT: P04211, EVALUE 1.00e-07; NT HIT: U03637.1, EVALUE 0.00e+00; EST_HUMAN HIT: AV709950.1, EVALUE 3.00e-71
tcccccatcctttggccactccaaaattgggagagctaatctggggaaaggcaccaacacctattcattagtgtctcggtcctgtgtgatcatgggtctgtgtgagttctcagcagctgcctctctcaaggtctccccacaggacagcagggtgaaacctggggcaggaagagaggggaagctgatttgcataaagaactttttttatcctattgggtctggggaggcatgaaaaggccctgaggaaaacaaaccccagctgggaagcctgagaacacttagccttcatgagtgtccccaccatggcctggatgatgcttctcctcggactccttgcttatggatcaggtcaggggaagggactctatccctgggggaccacagaaaacagggtccaggttactctcatcctcatgatcataactgtgtctctcctgttcgttttaggagtggattctcagactgtggtgacccaggagccatcgttctcagtgtcccctggagggacagtcacactcacttgtggcttgagctctggctcagtctctactagttactaccccagctggtaccagcagaccccaggccaggctcc

SEQ ID NO: 11456 - DNA, 519 bp, Homo sapiens
  MAP TO AL031228.1; EXPRESSED IN HELA, SIGNAL = 0.88; NT HIT: gi15451872, EVALUE 0.00e+00; EST_HUMAN HIT: BI522492.1, EVALUE 0.00e+00; SWISSPROT HIT: P08825, EVALUE 2.80e+00
cgccggaagagcctgagctgcatggtgcggcgtactccgaggggatccgtaagagcgaagggcggagactagctccccgggcctgggtcacggccggggacttaaccgaccacgcccgggatgcggaggtctgagcgcgcgaccgggaccagcgcaccctggggggcggggagaggcggtgcagctgcggaccgcggtcgaggcatgctgcgggggtggctaccttgtcgccgcggcctcgccgccagcaagctccgctccatggctggccgactgcggcactcacggcccctcccccgcctcgccccggcggccggtctgccgcccgcttccgcgttgcgcgctcccatccccgccggaagcggcgtcggagcagcgcggcagggcgcggaaacccgggcgggtggagtggcaccaaacggagtgagaccggtctgtccagccgctccccatcccaacccaccgacgtactccaccagggagaccacacccttcataaccaacgtccgcgtttttgcc

SEQ ID NO: 11457 - DNA, 504 bp, Homo sapiens
  MAP TO AC005754.1; EXPRESSED IN HELA, SIGNAL = 0.46; SWISSPROT HIT: Q9Y5E5, EVALUE 2.00e-93; NT HIT: gi14861873, EVALUE 0.00e+00; EST_HUMAN HIT: AU127985.1, EVALUE 3.00e-06
gaaaggcctcctccatctgtggcctcaatttctacatggtaagatttaattttttcgaaatccaatttttttttcaacagtatttctcccgtgacttcatttattgagaaagtttgtttaatttcatctgatgcttggaataagccataagaaacactcccgaagtttccagcatctatatctctagctaagaccctaacaattggagagtctagggggctgttttccaggacctgcaccccatatggagtgtgcacaaactcaggagcattgtcattgatgtccatgatcaggattcgaaccatgaccgtgccagacctaggtggtgacccaccatccagcgccacgagggttaagctgaactcaggctgctcctctcgatccagtggtttgtcctgcaccaaatctgggtatttcttgccctcactatgatttcgagtgagaatgtgaaaatgagaattggggctgattgtgtatttttgaagaccattgctgcccacatcc

SEQ ID NO: 11458 - DNA, 530 bp, Homo sapiens
  MAP TO AF176681.1; EXPRESSED IN HELA, SIGNAL = 0.63; SWISSPROT HIT: P17097, EVALUE 3.00e-50; NT HIT: gi11177859, EVALUE 0.00e+00; EST_HUMAN HIT: AL582185.1, EVALUE 0.00e+00
caagccctacgcctgccacgagtgtgggaagacctttggtcgcagctccaacctcatccttcaccagcgagtccacactggagagaagccctatgaatgtactgaatgtggaaaaaccttcagccagagctcaaccctcattcagcatcagaggattcataatgggctgaagccccatgaatgtaaccagtgtggtaaagccttcaaccgaagctcaaatctcattcaccaccagaaagttcatactgggggaaaaaccctacacctgtgttgaatgtggtaagggcttcagccaaagctcacacctcattcagcatcagataattcacaccgggcgagcgcccctacaaatgcagtgagtgtgggaaaagccttcagtcagcgttcggtcctcatccagcaccagaggattcacactggggtgaagccctatgactgtgctgcttgtgggaaagccttcagccagcgatcaaagttgatcaaacaccagttgattcacaccagggaataggctgttgggctggcaggag

SEQ ID NO: 11459 - DNA, 503 bp, Homo sapiens
  MAP TO AC010486.5; EXPRESSED IN HELA, SIGNAL =   2; EST_HUMAN HIT: BG428301.1, EVALUE 1.00e-97; SWISSPROT HIT: Q26481, EVALUE 7.00e-24; NT HIT: gi14748786, EVALUE 9.00e-89
agcctgtgggccagcagcacgcctgtccaatacactgcagcataatttgtcaggccaacttcacaccatattttggcagtttgtatgcatatgatgcgcagactatcatatccccgtctatatgggcataagcaatctaataaatgatatctttgttacatgaactatcattctgtatttgggtgtgctgtatttatttttgtcctgtatctccaagcatgtccaagcacagaaatcagttttaccctctcatcatcttctaaatttcacttagtatctttcaaagtaggccttattcttaacaactttaacaaaccccatcctgctgaatagagacctgcatccatggcttgacaaagaccaataggcccaacagcactagggatcagaaagggccacaacccttgcgcagacacaattgtgggacccagtttttaatggcttgcaattgcatatcaaagattgcctggtcaaaccaatcccctgagcctctaagaaccggg

SEQ ID NO: 11460 - DNA, 500 bp, Homo sapiens
  MAP TO AC006457.3; EXPRESSED IN HELA, SIGNAL = 0.65; NT HIT: gi14745941, EVALUE 0.00e+00; SWISSPROT HIT: Q9Y2Q1, EVALUE 2.00e-48; EST_HUMAN HIT: BI599433.1, EVALUE 4.00e-67
cgcgttcccatttcacccaagaccttcagccagagcagggcatcaaagattcactccaaaaagtaataccaagaacatatggaaaatgtggacatgagaaattacaatttaaaaaatgctgtaaaagtgtgggtgaatgtgaggtgcccaaagaggttatagtgaagttaaccaatgtttgtcaactacccaaaacaaaatatttcagactcataaatatgtcaaagtctttggtaaattttcaaattccaatagagataaaacaagatatactggaaagaaacatttcaaatgtaacaaatatggcaaatcattttgcatgctttcacacctaaatcaacatcaggtaattcatactagggagaagtcctacaaatgcaaagaatgtggcaaatcctttaactgctcctcaaaccatactacacataaaataattcatactggagagaaaccatatagatgtgaggaatgtggcaaagcctttagctggtccgcaaacc

SEQ ID NO: 11461 - DNA, 502 bp, Homo sapiens
  MAP TO Z68869.1; EXPRESSED IN HELA, SIGNAL = 0.59; NT HIT: D63856.1, EVALUE 4.80e-01; SWISSPROT HIT: P30373, EVALUE 3.10e-01; EST_HUMAN HIT: BF791188.1, EVALUE 7.00e-01
tggcatttcaccgcagtccgctgtccggagtctgccgtttggtttatgtattgcgtaattttctggcatttcaccgcagtccgctgtccggagtctgccgtttggtttacgtattgcgtaattttctggcatttcaccgcagtctgctgtccgcagtctgccgtttggtttacgtattgcgtaattttctggcatttcaccgcagtccgctgtccggagtctgccgtttggtttatgtattgcgtaattttctggcatttcaccgcagtccgctgtccggagtctgccgtttggtttatgtattgcgtaattttctggcatttcaccgcagtctgctgtccgcagtctgccgtttggtttatgtattgcgtaattttctggcaagtggcactcttgagccttggcctagcaaaatcagtgaattgcaacaatttcttgatagctggagaggaaagcgagttgtccaaactggatcaggatccaatgcaccattcctctcgga

SEQ ID NO: 11462 - DNA, 560 bp, Homo sapiens
  MAP TO AL031781.1; EXPRESSED IN HELA, SIGNAL = 1.1; NT HIT: AB067801.1, EVALUE 0.00e+00; SWISSPROT HIT: O00712, EVALUE 8.10e-01; EST_HUMAN HIT: AW896548.1, EVALUE 0.00e+00
gaggtgacgggccaatggggtgggacctaaaactcagaatgacctcagtaatgtcaaatgtaaaagtatttgttgaaatgtacacaacagatttacccaaccaaactgaacctcagttaccaaagtggatctgaataaatttaaggtgcaattatttcaaaggggaacccttatgagaggctgaaataaaacaaaatttagttttcggtcttccctaatgcaaacttgtcttgcctctctaaaactgataaaatcatttcaaaatctgagggagcaaaaatatttataaagagaatgttgttaaccccatggggagaagaacttacctaatacaccactaggttcaataggatactcaaggattgatgtagctggtgccaatgtgtaggggtactcatagggtgtatagattaaaccagcttcgggccctggaggaactattgcagcagttgggtgaggagttccgtttggcatgacagcggtctgtatttgtctgatcaaaggcattatggtagggccagctggcgtaggagtacgcagggcagctggtgggagaaccg

SEQ ID NO: 11463 - DNA, 502 bp, Homo sapiens
  MAP TO AC007539.8; EXPRESSED IN HELA, SIGNAL = 1.2; NT HIT: AF169659.3, EVALUE 5.00e-04; SWISSPROT HIT: P23631, EVALUE 6.00e+00; EST_HUMAN HIT: AV681617.1, EVALUE 4.50e-02
cccccagcctctcctgctctctggaagtgtgcaccaaggcctgtagaaatcaccgtgtcaaggaaatgcatagggcaggttcctctcggagaccagatgttaaagctcttgtggccgctttcaagttgtctcctgaaatggcaagtctgagcttctgggttcaggaggaacgcctgtggactcttaacctccatgactactttctgactttgcgtgaaccctaactggggagagtttctatttgtggatacttacctcgctgactttgcctctactgagaattttggattcttatttgaaccctcaccatttctccttggaattactggaaatgcatcctaagttgactccctgcttctttttcactccttctacctttccttcttgctttttagaacggcttttaaaagatgcaagccagattgcattcatttttctacttaaaatccttcaacgctacagacttcttttcagataaagttcacacgcccagtgcagcaga

SEQ ID NO: 11464 - DNA, 522 bp, Homo sapiens
  MAP TO AC009948.2; EXPRESSED IN HELA, SIGNAL = 0.21; NT HIT: gi4507720, EVALUE 0.00e+00; SWISSPROT HIT: Q05623, EVALUE 7.00e-24; EST_HUMAN HIT: F00495.1, EVALUE 6.00e-54
ggcggtagcagagtcctggggtacgttgttgaaatgcagcccaaaggaactgaaaaatggagcattgtggctgaatccaaagtctgtaatgcagttgttactggtttgagttctggacaagaatatcagttccgtgtcaaggcttataatgagaaaggaaaaagcgatccaagagtgttgggtgttcctgtcatagccaaggacttgactatacagcctagtttaaagttaccatttaacacatatagtatccaagctggagaagatcttaaaatagaaattccagttataggccgaccaagacctaacatttcttgggtcaaagatggtgagcctcttaaacagacaacaagagtaaacgttgaagaaacagctacctcaactgttttgcacattaaagaaggtaacaaagatgactttggaaaatacaccgtaacggcaacaaatagtgcaggcacagcaacagaaaatctcagtgttatcgttttagaaaagcctggacctccagttggcccagttcgg

SEQ ID NO: 11465 - DNA, 508 bp, Homo sapiens
  MAP TO AL163300.2; EXPRESSED IN HELA, SIGNAL = 0.34; SWISSPROT HIT: O75690, EVALUE 2.00e-05; NT HIT: AL163300.2, EVALUE 0.00e+00; EST_HUMAN HIT: BF058205.1, EVALUE 2.00e-69
tgtggggctgcttcttcgtgctgccggcagtctagctgccagccagcttgctgtgcctcttcctcctgccagccggcctgctgtgtgcccgtctgctgcaagcctgtgtgctgtgtgtccacctgctctgaggattcctcttcatgctgccagcagtctagctgccagccagcttgctgcacctcctcctcctaccagcaggcctgctgcgtgcctgtctgctgcaagactgtctactgcaagcccatctgctgtgtgcctgtctgctctagggcttcctcttcacgctgccagcagcctagctgccagccagcttgctgcaccacctcctgctgcagaccctcctcctctgtgtccctcctctgccaccccgtgtgcaggtccacctgctgtgtgcccgtctcctcctgctgtgcccccacctcctcctgccagtccagctgctgccgcccggcctcctgcgtgtccctcctctgccgccccgcaagctcccgcctggcctgctaca

SEQ ID NO: 11466 - DNA, 524 bp, Homo sapiens
  MAP TO AC009948.2; EXPRESSED IN HELA, SIGNAL = 0.5; EST_HUMAN HIT: AU127120.1, EVALUE 0.00e+00; SWISSPROT HIT: Q62234, EVALUE 7.00e-08; NT HIT: X92412.1, EVALUE 0.00e+00
cgagaagtgcctaaagccgcctggtataccattgattccagagtccgaggtacatctctggtggtaaaaggcctcaaagagaatgtagaataccatttccgtgtttcagcagaaaaccagtttggcataagcaaacccttgaaatctgaggaaccagtcacaccaaaaacaccattgagtaagtgccctttcaaccacaaaattataaacattatttcagcacttttctgtttttaaatgaaagtcattggcttataatacttgggactgtattctaatacatgtgtgctttccacttatatttacagatcctccagaacctccaagcaatcctccagaagtactcgatgtaaccaagagttctgttagcttgtcctggtcccggcccaaagatgatggtggttctagagtcacaggctactacatcgaacgcaaagagacatccactgacaagtgggtcagacacaacaagactcagatcaccaccacaatgtacactgtcacagggcttgttcccgatgctg

SEQ ID NO: 11467 - DNA, 521 bp, Homo sapiens
  MAP TO AC005926.1; EXPRESSED IN HELA, SIGNAL = 0.54; EST_HUMAN HIT: BG490066.1, EVALUE 1.00e-76; SWISSPROT HIT: P51843, EVALUE 3.00e-22; NT HIT: U31929.1, EVALUE 0.00e+00
ctcatcgccgcacgaacagccccagcactgatccaccagccgcgtctctggagcctcaggagccgcgcgcgtttgcttcgcgctcataagcatgttgtagaggatgctgccctgccactggtggttctcgcccgccatggcccgcggcgcccgtagcccagttctgcccagtggctgcctcctgggacctatttatacctagcgcgcacgcaggcgcgtcggccgcctcggtctgggcaagggcgcggaggcgggcggtgtgtgcgggggggcgcggtgctgcgctccggtgtgttcgcccatgacctcggtggttcgaaggggcgggtgctctttaaaagctggaaatggaagaacagcagcgtgggagctcctggacactttcctccttcctctcattacccctttccctgtctcaggaagaccggaggagagcgagcgcctggatgctgttgcaactctttccattgaaccctcgcatctaatttgttccctttattgggagggcaggggaaaagagg

SEQ ID NO: 11468 - DNA, 514 bp, Homo sapiens
  MAP TO AC004736.1; EXPRESSED IN HELA, SIGNAL = 0.28; NT HIT: gi13640821, EVALUE 0.00e+00; SWISSPROT HIT: P48547, EVALUE 3.00e-60; EST_HUMAN HIT: AW898499.1, EVALUE 0.00e+00
ctgccttggaggacaggccgctcagccccacctccaggtagaagggcaggatggccacaaagtcaatgatgttgagcgagttcttgatgaactctaccttgttggggcagaagatgacacgcatgaggaactcgaaggtgaaccagaccacacagacgccctcgatgtaggtaaggaaggcctccgtctcggcctcccggtagtagcgcacttgcgtgccattgcgaacgttctcgatctccgtcttgttcacgatggggttgaagcgctcgtgggtctccaggcagaaggtggtgatggagaccaggatgaagaagagggaagcgaaggccacatactgtggggataaagacacagtgtcagagggaggcccacccagagtggagaagcctgggttgcctctgtccagtcccagggccaggcggggggagatgccagcaccaggccccctgcagcacgtgctacatttccctcctcagggcacagggggcctgcacgaccgtcagggcaggct

SEQ ID NO: 11469 - DNA, 532 bp, Homo sapiens
  MAP TO AC009516.17; EXPRESSED IN HELA, SIGNAL = 0.26; NT HIT: V00574.1, EVALUE 7.90e+00; SWISSPROT HIT: Q04748, EVALUE 2.90e+00; EST_HUMAN HIT: BI831230.1, EVALUE 1.00e-67
ctcatggccggctgtctgggctcccacagccgggacagtgacctaggtgcccaaggctcattgccacctgtgagggacaaactcctgctggagaagaacctcaagcggctgctacagctggagagggaaggggtgagagccagggccatggctgggtggggtggactcccatggagagcccagggctagggtcagccctggcttggctgctcctgaacacttcacagagtcaccctctttctgcagaaaggcctcagtcagtcctgctcccagagggactccctgctgtgggattcgctgggtagccagaccagctttcagtggacacaggagcagcccttgtcctggttctcagggctgctgggctcaagctctggcgtgcctgaagcatcagagccgaggcctggagaacaggagccaatcttccgcaagcgagagttcaataaggagatcaagtcattactgagccagctggagtccctcgacctgcctggctactgtccgctccgtgagccccatcgcacgctgaact

SEQ ID NO: 11470 - DNA, 512 bp, Homo sapiens
  MAP TO AC002085.2; EXPRESSED IN HELA, SIGNAL = 1.1; NT HIT: AF101769.1, EVALUE 0.00e+00; SWISSPROT HIT: P47888, EVALUE 1.00e-64; EST_HUMAN HIT: BF328527.1, EVALUE 1.00e-05
gccctggtgggaatttgctgcactgtctccttcatcaatgctctgactcacacagtggctgtgtctgcgcttgacttctgtggccctaatgtggtcaaccacttctactgtgacctcccacctcttttccagctctcttgctccagcatccacctcaatgggcagctgctgcttgtgggggccaccttcataggagtgatccccatgatctttatctcagtgtcctatgcccacgtcacagctgcaatattacaaatccgctcagctgaggggaggaagaaggctttctccacatgtggctcccacctcactgtggtctgaatcttttatggaactggcttcttcagttacatgtgtctgggctcagtctcagcctcagacaaagataaggggattgggatcctcaacactatcctcagtcccatgctgaacccagtcatttacagcctccagaaccctgatgtgcagggcaccctgaaaagggtgctgacagggaagaggcccccagcttg

SEQ ID NO: 11471 - DNA, 512 bp, Homo sapiens
  MAP TO AC009470.2; EXPRESSED IN HELA, SIGNAL = 0.83; NT HIT: AL163302.2, EVALUE 7.60e+00; SWISSPROT HIT: P14723, EVALUE 9.40e-01; EST_HUMAN HIT: BI830908.1, EVALUE 0.00e+00
ttgcgcctggactgacgctgggagaacgaggagggcatgggcagggcttggtggccaggggttggggagcttggctgaagcacagcccggacatctgtggcgatgctctcccaggcccactggaaggggaaggagggtttccgaggaagaagcgggaagtgactgaagaaggaaagggtgggggtcagggtcggcgccagccccagagggccctgacccccaacagcctcctgacccatcccactgctgcttactcttcagactcttcagagccctgtcctttcttgctctggcccctgggcttgcggtccttctttgctgtctgccttgagctctgagacctctgctgcaggtcttgatttggcacaccatcaccactccccaggcagccctgggcagagacagtaggggaggagcagccagcttgagcagcctcctggactgtgttgcacctcacccgggtgctccctctgtgcacctggctgggcctggctgggtccctctgggccctc

SEQ ID NO: 11472 - DNA, 585 bp, Homo sapiens
  MAP TO AL022101.1; EXPRESSED IN HELA, SIGNAL = 0.63; NT HIT: gi13637310, EVALUE 2.00e-13; SWISSPROT HIT: O60809, EVALUE 2.00e-43; EST_HUMAN HIT: BG488994.1, EVALUE 8.20e-01
gcatgcttctgggatggagggtgagggactaggtgtgagagtggtaccaatcacacaggcaagggtgaaaggactgagcctaaaatggagctgcccctgaatgatctgagtcttcatcaggcagcaccttgcatgcagaccatcatctgatgatgggaacaaacttgtgtttgggtgaaacaggcttccccattgcagttactataacacctgtgtggtagtaaggtgcagaattactcaatgcccacttcaagtttaccattgagatgatttcccacccccctcctctaactggcaccattgcccataactaacttcttgctctccccaggtacctcaagaaccccttgggggcctttatattcagtgatgcttacctaactgatcgggacatggagtgtctgtctcagtacccaagcctcagtcagctaaaggagctgcgtctgattcatatcctaatgtggaccacccatcttgagccccttggagttctgctggagaaagttgctgctactctcaagaccctcgtcttaaaggactgtcggatccaggacccccaactcagggtcctcctgcctgccctga

SEQ ID NO: 11473 - DNA, 530 bp, Homo sapiens
  MAP TO AL118557.2; EXPRESSED IN HELA, SIGNAL = 0.69; SWISSPROT HIT: Q14112, EVALUE 7.00e-23; EST_HUMAN HIT: BF968370.1, EVALUE 1.00e-76; NT HIT: AB009804.1, EVALUE 0.00e+00
gcacaaacccgtccatcactggaatgtgtatgaagccgcaaaatgttttacctttgctgaactttcaaactgaaatagttcattacacttgagagcgtagctggcataacaaacccagttttcccccactcacttcatgaggcccatattttaaaaaaacattattaatgatcaagagattccgaacagaatctgcctgccaagatttatttggcaaaggaaatttactctatctcttgaaacacagggattaaaaattagatccaatcttctttttgctaaacttttcacctacccacttaagagaaaaatcacaacgctatgcaaaaccagcatggttaagatgaaaccttagcacccagttttctaatgcactcaccctcggtgttggaacctatgttgtcttccagtcccacctcatacgtccctcgacttaagggtgtagtgtgacctgaagcagggtaacttcgaagaacaatttcttcttcaggatgagctgggggaacatccatttccgaaggcactggccc

SEQ ID NO: 11474 - DNA, 530 bp, Homo sapiens
  MAP TO AL163201.2; EXPRESSED IN HELA, SIGNAL = 0.24; NT HIT: AL163201.2, EVALUE 0.00e+00; EST_HUMAN HIT: AV750850.1, EVALUE 0.00e+00; SWISSPROT HIT: P40355, EVALUE 2.90e+00
agttgccatccacacccaaagctacacatataccttctgattttatagaattgttccaatatctttttctgtcaatatcattaaaatcaccctacctgtttggaccgaggtctaccaggagaaaattttctcttagtaatagctggtttacccatgccagttttttggagtgactgagatgtaagttgttggcatgatgtttccagcagaggaactaagagctgaagggtaattacgcagcatgtcatgcgaaggcaagtctgaagaaggtgttggggaggaagacacatctgccttgcttatgtctgctgataatgaaaatgatgactctgtctcagatgataactttatagatttgcctccttggtatgaaacatctttcacacaaccctcaattgtaggagtcatttcagagtccatcaatccagtagaaagttcagaatcttctttctgttccttttctccttgtagcctttctataaccaactgttcctcaggacataatgaagtgctttcctcatgtggggaca

SEQ ID NO: 11475 - DNA, 503 bp, Homo sapiens
  MAP TO AL137039.1; EXPRESSED IN HELA, SIGNAL = 0.69; EST_HUMAN HIT: BF773021.1, EVALUE 0.00e+00; SWISSPROT HIT: P78617, EVALUE 2.70e+00; NT HIT: gi14770815, EVALUE 0.00e+00
actggtctggccgtggggagggtgagcagaaaaacagtgctaaagaatatcgaggcactcttcgtgtcactttcgatgcagaagccatgaacaaagagtctcccatggtgaggtcagccagggatgatatggatagaggaaagcctgacaaaggcttgagcagtgggggcaaaggctctgagaagcaggagtccaaaaacccgaaacaagaacttcggggtcgtggtcgtggcattctgattttgcctgcccataccaccctatctgtcaattcagcaggttctccagagtccgcgcctttgggacctcggcttttgtttggatctggtagtaagggatctcggagttggggccgtggaggcaccacacgccgattgtgggacccaaacaatcctgatcagaaacctgctctaaagactcagacgccccagctacatttcttggacactgatgatgaagtcagccctacatcttggggtgactcacgccaggctcaggcatct

SEQ ID NO: 11476 - DNA, 547 bp, Homo sapiens
  MAP TO AP001067.1; EXPRESSED IN HELA, SIGNAL = 0.84; NT HIT: AL163300.2, EVALUE 0.00e+00; EST_HUMAN HIT: W70177.1, EVALUE 7.00e-29; SWISSPROT HIT: O75690, EVALUE 2.00e-05
tcccacctcaccctgtgccccccgggggtccacagacaggacagaggttggtgtgagacagaggcggctttattagaactagagggggtgctgcccagggtggaaccaggcctgctgggggttagttctgcagaacttgggtctgggggagtagctggggtctctcatgcagccagcatctgggaaggacagggggagcatcctggtccctaagacaaagagcctgccccatcttctgagggtgtcaaagccagagagggcagagcttgctggggcagctgggaggtcagcccctggtgggaagggactccggatcacatccagggctgtcagcagctggacttctggccagagcagaggctgtagcaggcagggcgggagcacatggggcggcagaggagggaaacacaggaggccgtgcggcagcagctgggctggcaggaggaggcagaggcaccacaggaggggacgggcacgcagcaggtggacttgcacacagggtggcagaggagggacacggaggaggaggatctgcagcaggaggcgg

SEQ ID NO: 11477 - DNA, 599 bp, Homo sapiens
  MAP TO AC009509.7; EXPRESSED IN HELA, SIGNAL = 0.49; NT HIT: AL139078.2, EVALUE 2.30e+00; EST_HUMAN HIT: AI697525.1, EVALUE 0.00e+00; SWISSPROT HIT: P54677, EVALUE 3.00e-01
gggccacagaaaccagccaagtctttgaagtcacagatacctcatcttcatttgcagatgtgtggtttctgctattgtatcctttggttttgtttagtaattgtttgctactgttgagtccaggtggaacaggcatatgagaaagttttgtgtctatgggttcaaagaaaggagaaatagtcttattatctggattgctgatgaaatcagtacttggtgacaccttatttatctttgtggtaatggactcattcagggaagtaaatcttgcccaaaaatctgtggttaattccttagaataactggtactgtttgtgtttacaaccaaatcttgatgcgtggttgaggatggagcctctgtggatggcagcataccatttatcgtggtggtttgtttatctaaattcatagcttttagaatccttagtctgtcccatctattggatgaagaacgagtatttagatatgtgggagattgttcaaaaaccagcaaatccggatctatacctgaaaaataaataaggcatcattcattttatttttactttcaaagcaaaaaccctaaagcacagtttggagaaggggttggcttttgccgc

SEQ ID NO: 11478 - DNA, 506 bp, Homo sapiens
  MAP TO AL358293.1; EXPRESSED IN HELA, SIGNAL = 0.49; SWISSPROT HIT: P03371, EVALUE 6.20e-02; NT HIT: AL163246.2, EVALUE 1.00e-120; EST_HUMAN HIT: BE064410.1, EVALUE 1.00e-102
cagtgggctcatggtcacgggattcactagtcttaccatgttctccatcatcctgaagcacctggatgcatctggttgtgcactttgcatagaaggaaaaacgcccagatgtgcgatctgatagatctgataagcatctgatagaacggtggaatggccttttgaagtcacaattacaatgccaactaggagacaataatttgcagggctggggcaaagttctccagaaggccgtgtatgctctgaatcagcatccaatatatggtactgttcctcccatagccaggattcatgggttcaggaatctaggggtggaagtgaaagtggcattactcaccatcacccctagtgatccactagcaaaatttttgcttcctgttcccacaacattatgttctgctggcctagacgtcttagttccagagggaggaatactgccaccaggagacacaacaatgattccattaaactggaagttaagattgccacctggacactttgggctc

SEQ ID NO: 11479 - DNA, 512 bp, Homo sapiens
  MAP TO Z97630.11; EXPRESSED IN HELA, SIGNAL = 2.9; EXPRESSED IN LUNG, SIGNAL = 2.1; EST_HUMAN HIT: BF512731.1, EVALUE 8.00e-10; SWISSPROT HIT: O60755, EVALUE 2.00e-25; NT HIT: AF129514.2, EVALUE 1.00e-124
ctcctgcctcaacccgctcgtctacgcgctcgcctcgcgccacttccgcgcgcgcttccgccgcctgtggccgtgcggccgccgacgccgccaccgtgcccgccgcgccttgcgtcgcgtccgccccgcgtcctcgggcccacccggctgccccggagacgcccggcctagcgggaggctgctggctggtggcggccagggcccggagcccagggagggacccgtccacggcggagaggctgcccgaggaccggaataaaccctgccgcctggactccgcctgtgtccgtctgtctcactcccgttctccgaaggcgggacgccaccgggccagggatggggcaatgccacgagctctctgaggggcgttgagtggagcgacttgtccccgctccacagcggagcaccagcccagtggacacccctgggtgtgaatatgaacagcacagcccgcccccagcagggcagcccccagagcctgcccagagccagcctggcagtccctctgccca

SEQ ID NO: 11480 - DNA, 513 bp, Homo sapiens
  MAP TO AL022318.2; EXPRESSED IN HELA, SIGNAL = 0.55; NT HIT: gi15318714, EVALUE 3.00e-79; EST_HUMAN HIT: BG770088.1, EVALUE 2.00e-60; SWISSPROT HIT: Q9UH17, EVALUE 2.00e-04
tgaccatctttgttgcccgcctctactacttctgggacccagattaccaggaggcgcttcgcagcctgtgtcagaaaagagacggtccgcgtgccaccatgaagatcatgaattatgacggtgagaagtgggaggttcaggggtgtgggagagactgcttaagtgtctgtgatgggtccttcccacacatacctgtgggtctgctctgatgcctgcaaaggccaagtgtcccaggggagcctgtggggttgggtctggcgctgactgtaactagtatctagaatatgtctgggaggggagggtcccgaggtcacagaagagaggccagctgggcttgactgcgttctctcttctttttcttagaatttcagcactgttggagcaagttcgtgtacagccaaagagagctatttgagccttggaataatctgcctaaatattatatattactgcacatcatgctgggggagattctcaggtgagggtctccctccaggctcatcgcctcgctcc

SEQ ID NO: 11481 - DNA, 527 bp, Homo sapiens
  MAP TO U82672.1; EXPRESSED IN HELA, SIGNAL = 0.22; NT HIT: M89985.1, EVALUE 0.00e+00; SWISSPROT HIT: Q03368, EVALUE 9.70e-01
cctggccccgagctcctttctgaagaccttgatgagcactcggtacctgcccaggggcgacagggcagcccgcacggcctcctggaactcatgttcctcgcagtcgtcagggatatccaggatgagcagagagcgctctgcgttcacacccatcctcctgcaccagtcctgaagcatcgccagagctatcgcagaggacttgagggagggagcctgatcagacaggaatgtgtgctgactgttgcagtctctgacgcagcctgtgagtgcaaaggggagagagggacgacgttgctgccaatcaacccacccccactacaggcctttgccctcccctcccaagcactgcagcagccagggatccattccctcccactgctgcagcccatgcacccccaaagccctcccccagttggtgacacttaatcccttggcacacacccaccacctctattgggagatccccttttgcctgagctgatgtccccttatcacaccacaacaagtgcacctccccctcccaccat

SEQ ID NO: 11482 - DNA, 561 bp, Homo sapiens
  MAP TO AC005031.1; EXPRESSED IN HELA, SIGNAL = 1.6; EXPRESSED IN LUNG, SIGNAL = 0.95; NT HIT: U80017.1, EVALUE 0.00e+00; EST_HUMAN HIT: AI820932.1, EVALUE 0.00e+00; SWISSPROT HIT: Q13075, EVALUE 1.00e-105
agaccagacgaggggctggccagtatcatctgtgaccagctcctagagaaagaaggatctgttactgaaatgtgcatgaggaacattatccagcagttaaagaatcaggtcttattccttttagatgactacaaagaaatatgttcaatccctcaagtcataggaaaactgattcaaaaaaaccacttatcccggacctgcctattgattgctgtccgtacaaacagggccagggacatccgccgatacctagagaccattctagagatcaaagcatttcccttttataatactgtctgtatattacggaagctcttttcacataatatgactcgtctgcgaaagtttatggtttactttggaaagaaccaaagtttgcagaagatacagaaaactcctctctttgtggcggcgatctgtgctcattggtttcagtatccttttgacccatcctttgatgatgtggctgttttcaagtcctatatggaacgcctttccttaaggaacaaagcgacagctgaaattctcaaagcaactgtgtcctcctgtggtgagctggcc

SEQ ID NO: 11483 - DNA, 503 bp, Homo sapiens
  MAP TO AL022328.21; EXPRESSED IN HELA, SIGNAL =   1; NT HIT: gi14779835, EVALUE 3.00e-85; EST_HUMAN HIT: BI821344.1, EVALUE 0.00e+00; SWISSPROT HIT: P77649, EVALUE 6.00e-04
tcaaacccgcagctgttcgcgcttatgggcacccgggcaggcatcgccagggagctggagcgtgtggagcagcagtctcggctggagcagctgagtgcggcagagctgcagagcaggaaccagggccactgggctgactggctacaggcgtacaggtgagccctgcgtccatggtcaccgggggacggcgggtcgcgtgctggaaaaagtccagcccggctgtgactccagagcccggatgtcattccagagcccggctggacaaggacctggaaggcgctggggacgctgccgcctggcaggctgagcacgtgcgcgtgatgcacgccaacaacccgaagtacgtgctgaggaactacatcgcgcagaatgccatcgaggctgccgagcgcggggacttctcagaggcaagcacacgcctgtccctgtggtccctgggaggggggtcggccccagacccctctcaccctcctgatcctccaggtgcggcgggtgctgaaact

SEQ ID NO: 11484 - DNA, 505 bp, Homo sapiens
  MAP TO AL133245.2; EXPRESSED IN HELA, SIGNAL = 0.5; NT HIT: gi14730293, EVALUE 0.00e+00; EST_HUMAN HIT: BF354440.1, EVALUE 1.00e-101; SWISSPROT HIT: Q9NR09, EVALUE 5.00e-78
gcaccaggagcaacacaacattccttttccatgtttattagctggaggtttattaacatataaatctcctgctacctcacccattagtagtaattctcacaggtcactggatggtttaagcagaactcagggtgaaagtatatcagaacaagggtcaactgacaatgaatcctgcactaattcagaactaaattctcctctggtaaggaggactttaccggttttgcttctttatagcatcaaggaatctgatgagaaagcaggaaagatcttttcacagatgaacaatattatgagtaaaagtttgcatgatgatggttttactgttccacagattattgaaatggagctggatagtcaggagcagttgttattgcaggatcctcctgtgacttacattcagcaatttgcagatgcagcagccaaccttacctctccggattctgagaagtggaactctgtgtttcccaagcctgggactttggttcagtgcttgaggctgcca

SEQ ID NO: 11485 - DNA, 559 bp, Homo sapiens
  MAP TO AC022882.3; EXPRESSED IN HELA, SIGNAL = 1.3; EST_HUMAN HIT: BI753109.1, EVALUE 5.00e-02; SWISSPROT HIT: Q95155, EVALUE 2.00e-53; NT HIT: AF101751.1, EVALUE 2.10e+00
ggattcctggctccacaaccccatgtattattttcttagtgttttatcattcttggatgcttgctattctacagttgtcactccaaaaatgttggtcaatttcctggcaaaaaataaatccatttcatttatcggatgtgcaacacagatgcttctttttgttacttttggaactacagaatgttttctcttggctgcaatggcttatgatcactatgtagccatctacaaccctctcctgtattcagtgagcatgtcacccagagtctatgtgccactcatcactgcttcctacgttgctggcattttacatgctactatacatatagtggctacatttagcctgtccttctgtggatccaatgaaattaggcatgtcttttgtgatatgcctcctctccttgctatttcttgttctgacactcacacaaaccagcttctactcttctactttgtgggttctattgagatagtcactatcctgattgtcctcatttcctgtgatttcattctgttgtccattctgaagatgcattctgctaagggaaggcaaaaggcc

SEQ ID NO: 11486 - DNA, 500 bp, Homo sapiens
  MAP TO AP000322.1; EXPRESSED IN HELA, SIGNAL = 0.21; NT HIT: gi14729244, EVALUE 4.70e-01; EST_HUMAN HIT: AW750272.1, EVALUE 0.00e+00; SWISSPROT HIT: P74192, EVALUE 1.60e+00
gcaccccatgtgaggtcgctgttgaagtatctttggctgcagtggtgtggaattcatctcaacagagttgacggtaaagaccagacatgtagcagcctcactgcttgttggaggaaccacccttaagaaaatttcccaagatagtagttttcccatctccgtactttgctagttaatgttctccacttgcttgcgtttatcctttcaattcctttgctaattaaattgctgaaaagtatacattggtaagaatagccactgtcaatggactgcaaacaaaactcgtttctgttattgatgataaaccatttcagagaagaccaggctgagtctaaagggttcagataattacaaggggaaggcagagagagtagttcatggccacaggacttggccacctctgggcaacacataatgcttgctaagctaatgactgtagggatatagaactggccctcagcctctctgtcttcctttggcctctgctcttcctgctgcct

SEQ ID NO: 11487 - DNA, 532 bp, Homo sapiens
  MAP TO AL356019.2; EXPRESSED IN HELA, SIGNAL = 0.63; EST_HUMAN HIT: AW405535.1, EVALUE 1.90e-01; NT HIT: AF121973.1, EVALUE 5.00e-29; SWISSPROT HIT: P23270, EVALUE 1.00e-42
ccccatgtacatcctgctcgccaacttctccttcttggagatatgttatgtcacctccacagtccccagcatgctggccaacttcctctctgacaccaagatcatctcgttctctggctgcttcctccagttctactttttcttctccttgggctctacagaatgctttttcctggcagttatggcatttgatcgataccttgccatctgtcggcctctacgctatccaaccattatgaccagacgtctctgtaccaatcttgtggtcaattgctgggtacttggtttcatctggttcttgattcctatcgtcaacatctcccaaatgtccttctgtggatctaggattattgaccacttcctatgtgacccagctcctcttctaactctcacttgcaaaaaaggccctgtgatagagcttgtcttttctgtcttaagtcctctgcctgtctttatgctctttctcttcattgtggggtcctatgctctggtcgtgagagctgtgttgagggtcccttcagcagctgggaga

SEQ ID NO: 11488 - DNA, 500 bp, Homo sapiens
  MAP TO AC004890.2; EXPRESSED IN HELA, SIGNAL = 1.4; EST_HUMAN HIT: BE563559.1, EVALUE 0.00e+00; NT HIT: gi14743417, EVALUE 0.00e+00; SWISSPROT HIT: Q9UDV7, EVALUE 9.00e-16
caagcaccagcgcatccacacgggcgagcgcccctacacgtgcggcgagtgcggcaagagcttccgctacaaggagtcgctcaaggaccacctgcgcgtgcacagcggcggcccgggccccggcgccccacggcagctcccgccgcctcctgagcgagactagggctgggctgggggagggcagggccggacggagtggatcgggggcggcctgagcaccaaccaccttgccgggtgtcctcagccaccgtctggaaatcggcaacaggcattgcactccggttgggggtccccagggtggggcagggatcccccagatctgtctggtctgaatggacgcccagctcatctagggtggacccagctgctggggaagagccagggggaccgcgaggagccgagcgtcctcgggcaccgccctcacacctcctcgagtgccctgggaccactgggccacagatggtcatcaggggaagccaccagggagtcccgaagccctt

SEQ ID NO: 11489 - DNA, 500 bp, Homo sapiens
  MAP TO AC006147.2; EXPRESSED IN HELA, SIGNAL = 0.45; SWISSPROT HIT: P31792, EVALUE 2.00e-23; EST_HUMAN HIT: BE745019.1, EVALUE 1.00e-107; NT HIT: AL445067.1, EVALUE 4.70e-01
tcttcacgtgctgtgtgaagccggttataaagtgtccaaggacaaggcaaaagtctgttttcaggaggttggatatctaggattcatggtatcccaaggccagcgcaggcttaagtgcacgcaaggaggctgtatgtgcactgcccaccccagttacaaggccagggaatttctaggcgtggcaggattctgccgaatctgtattccaaacttctcccttacagcaaggcccttgtatgaggctataaaaggaaaggaaagagagcccctcctatggcaaaagaaacaggaaaaggccttcaaggatataaaggaagctctcatccaggccccggcactagggttgccaaatgtaaaaaagccctttttttgtatgtggatgaatgtcaaggaatggcagttggagtcttaactcagttcttgggctcttggcatcggccggtagcatacttatccaaaagactggacttggtggctttaggttggccccactgcctcag

SEQ ID NO: 11490 - DNA, 544 bp, Homo sapiens
  MAP TO AC002544.1; EXPRESSED IN LUNG, SIGNAL = 1.4; EXPRESSED IN HELA, SIGNAL = 0.9; EST_HUMAN HIT: BF889221.1, EVALUE 7.60e-01; NT HIT: gi14777420, EVALUE 0.00e+00; SWISSPROT HIT: P10388, EVALUE 1.00e-03
gccgaaggggctgggaaaggagaagaggtggtagtggtggagaaggcctgtgaaagcactagggcatgggggacgtggggcccaggggcagagcctgaggactggggaatcttaggcagagaggaggccaggacaaccccaggtagggaagaggccagggcaattttagatggggaggaagccaggacaatctcaggcggggaggaggctgagacagcctcaggcggggaggaggctgaaacagcctcaggcggggaggaggccgggacagcctcgggaggggaggaggccgggatagcctcaggcggggaggctgggacagcctcaggaggggaggaggccgggacagcctcaggaggggacgaggcctggacaacctcaggcaaagaggaggctgacctgctgggagtcagacagacagaatatggagcagtcccaggagaaaggctcctagaggctactggaaaagtctgggtcctagaggaggagggggatgaggagagagaggctgaggtgagccctttccccaaacaggcccaggtcc

SEQ ID NO: 11491 - DNA, 511 bp, Homo sapiens
  MAP TO AP001067.1; EXPRESSED IN HELA, SIGNAL = 0.28; EST_HUMAN HIT: BF057369.1, EVALUE 1.00e-85; NT HIT: AL163300.2, EVALUE 0.00e+00; SWISSPROT HIT: P02438, EVALUE 8.10e+00
agagcaggtgggcaggcagcacacaggcttgcagcagacgggcacgcagcaggcctgctggcagggggaggaggtgcagcaagccggctggcagctagactgctggcagcacgagggcgtgcaggagctggtgcagcctgattggcaggggctgggctcacaggctgcctggcagcaggggctggacacacggctcactggggtgcagaccagggtcaggcagggggccggggcgcagcagctgagggcgcagcagtggggctcacagcagctctctgggcaggcatccacctgccaggagtcggagcaagcgctggagcagacggacatggtggacgcggccatgctggggtggggaggaggtgagctgcgggaggtgtgagtgagtgagtgtgggagtcagtgtgtgtgtgagtgactgagtgtgtgagtgagtgtgtgagcttcgtggggctctgcttttataccccttctggccttgttgttccagggcccacagcgtccccttcct

SEQ ID NO: 11492 - DNA, 543 bp, Homo sapiens
  MAP TO AC016577.4; EXPRESSED IN HELA, SIGNAL = 0.22; EST_HUMAN HIT: BG433950.1, EVALUE 0.00e+00; NT HIT: M14123.1, EVALUE 0.00e+00; SWISSPROT HIT: P10267, EVALUE 1.00e-107
tcctttttctccccattcccaagggtagaaagactgcaattttttatgcttatgtttgtctaaactttctgttaagtcgctatcaacagctggactcacttgtgcacttggacacgactgagtttgtcctgagcaattgtggtagaattgacctcgaggtgcccaatctataatagttccaaattcattgttttataatatcaccgcactattggccacacattcttcccaaactaaaacttctgtattttttgattctttgggaatttccttggggcaaggtttccctttaggtctaaattttaatgatctttgataagaaaagtcttgtaaataatttacccgtggcctgagtgacatcccgcttaccatgtgataagtgaatctactgatgggactgacagtaggtacttctaccaaccaattttggactgcaggcattaaacatcctggtgctctccctaggcaaataggaggataacgatacccaatggaaatatttatcatcatcccttcttcctcaggtttggcagggcagcgatc

SEQ ID NO: 11493 - DNA, 582 bp, Homo sapiens
  MAP TO AL160233.1; EXPRESSED IN HELA, SIGNAL = 1.3; NT HIT: gi14753969, EVALUE 6.00e-04; SWISSPROT HIT: Q02595, EVALUE 5.60e+00; EST_HUMAN HIT: AI742838.1, EVALUE 0.00e+00
tgcagggctgtgtttccatgcaggtcaatgctggtccattagcatatgcaggggctttcttaaatgatagccaagctagcaagtatccacctaggaaagtgagtgagttgaaagacatgtttaggaaatccatacaagcatgcagcattgcacttgaactaaatgagtggctaattaaagaagatcaagttgagtaccatgaagggctaaagtcaaatttcagagacgtggtaaaataattatttgacattatccatgagcggatattacaagaagacacaatgcattctccctggattagcaacacattgcatgtcttttgtgcaattagtggtacattgagtaaccgaggctatggttccccaagatacactgaagtgtgaaaaaatgcagatgtaaatgacaataagattgaactttctcaggaatgtttgcaactgtgcaaatgttaaaatttaaagatttgatatacatggagtgtttcttctcgacaccaaaattttcttgtgttccaacagagtgcttacatatttgtaaatatttaagtaatttgaaagtgcctggaaaattgcaccactgtgc

SEQ ID NO: 11494 - DNA, 527 bp, Homo sapiens
  MAP TO AC009974.2; EXPRESSED IN HELA, SIGNAL = 0.94; EST_HUMAN HIT: AI332334.1, EVALUE 0.00e+00; NT HIT: gi15297081, EVALUE 0.00e+00; SWISSPROT HIT: Q04893, EVALUE 1.30e-02
ggttgggcccaggcctcttgggcgtcccaccccagccagcatatttcttttgccccagcactttatgtagctctgggaccacggctgtcattgcaggccacagcagttcctgttacctacactctctcccggacttgttcaacagcaccctgctataccgccgctccagctataggcaaaaaccgtaccagcaactggagtctttctgcttgcgttcgagcccgtcagaaaaaagccctttttctctccctcaaaagagcctccctgtcagtctcactgccaacaaggccacttcttccatggtcttctccatggcccagcccatggcctcctcatccacagaaccatacctctgcttggcagcggctggggaaaacccttcagggaagagcctggcctctgccatctcagggaagatcccatctccactctcttcctcctataagcccatgctgaataataattccttcatgtggccaaatagcacgccagtgcctttattgcagaccacacagggcctgaagcca

SEQ ID NO: 11495 - DNA, 506 bp, Homo sapiens
  MAP TO AC010636.3; EXPRESSED IN HELA, SIGNAL = 1.1; EST_HUMAN HIT: AL119536.1, EVALUE 1.00e-61; NT HIT: gi14769113, EVALUE 2.00e-74; SWISSPROT HIT: Q05481, EVALUE 8.00e-36
gctcacctggggcccttcacaacttattataagttttttacaaatgtattttgatcagtatgtttttgttaaattcatatgtccaggaagaaattacagcttgtggtattttcctgtgtcatcttgcttatgtagtttgtataaaactatacaaactgcatatatatatttatatttatctgagtctaccaattgaagtaatgtgtttttattgtttctttcagtaatgtgttctcattttgcccaagacctttggccagagcagagcatgaaagattctttccaaaaagtggtactgagaagatatgaaaaatgtgaacatgacaatttacagttaaaaaaaggatgtataagtgtggatgagtgtaaggtgcacaaagaaggttataatgaacttaaccaatgtttgacaactaccccaagaaaaatatgtcaatgtgataaatatgtgaaagtccttcatcaatttccaaattcaaacggacaaaagagaggacatactggga

SEQ ID NO: 11496 - DNA, 555 bp, Homo sapiens
  MAP TO AL135999.2; EXPRESSED IN HELA, SIGNAL = 0.62; EST_HUMAN HIT: BI548510.1, EVALUE 8.00e-41; NT HIT: gi14751043, EVALUE 0.00e+00; SWISSPROT HIT: P43694, EVALUE 5.50e-02
agtgcgctttcgggacgacgcgccgtcggcgtccccgggcccggccagcacgaagccgccccgggagcccgaggcggggctgcctccctcgtcgcccggcaagggcaggggcgggggtggcgtcggggggtcgctgtggccggaatccagggaggtgcggcggggcgagcgcagcagcgccgcctgatggtagggcacactctggcgtaccccgtagccgtggcgcttcccggcctgccactggccctggtaggtgcctgcgggcggcggaggggtgggagaaagagtcaggacgtgccgctgggctccttgcgccccaagtcccaagcgcccctggaagcccaagcgtcaggcgggagagatggaggcagttagtgtggaggtcggggaagggcactgggagccgggaacaggccaggctgggccggaaagtgtgggagagcagagtgaagacgggcaggtagcaggagccctacgtggattttggcagtgcgggtaaacaggggaaacggggagggcccggcaggcatgcgaaggacaggctggtcagggcgt

SEQ ID NO: 11497 - DNA, 540 bp, Homo sapiens
  MAP TO AC004889.1; EXPRESSED IN HELA, SIGNAL = 0.99; EST_HUMAN HIT: BG831953.1, EVALUE 0.00e+00; SWISSPROT HIT: P13611, EVALUE 4.50e-01
gcagctcttccccctgcctgatagtcccactttcagcgccttcattctggttggtctctgcaggatgctcttcgcagggagaataatatctggtctgaccagagttatctgaagaggtttcctcttcttcttctgcctgtccagatcccaatgtcaaagaagtaagtcctggccaaaattccacctcctcttcttcgcttcccaggtcactggaaaatggggccatgtctagatgctcactctgaatggggcaggcccagagctctgggggagctagagtccttgcttgtcggcctgctaggctctggggtactgcctcccagtgttccggagtgtcacaggcctcagccacaaggctttcctgattgggctccacatctgcagaaccttccttgggaaaagagggcatcgtctcaatcgcatagtcacacacatcccttaactcactctgctgagttgctgagagtctgtgttcctctctccacttataggatgggtcctcatcttcttgagcttcaagccccaaggcagagacctggc

SEQ ID NO: 11498 - DNA, 502 bp, Homo sapiens
  MAP TO AL121657.1; EXPRESSED IN HELA, SIGNAL = 0.41; SWISSPROT HIT: Q10172, EVALUE 8.00e-06; NT HIT: gi14723985, EVALUE 0.00e+00; EST_HUMAN HIT: BF347746.1, EVALUE 1.00e-122
ggatggcatgctggacgacgacgagtttgcactggccaaccacctcatcaaagtcaagctggaggggcacgagctgcccaacgagctgcctgcccacctcctgcccccgtccaagaggaaagttgccgagtgatggggtggggggacattcagacgggcagtgttagaggaggagatgggagcggtgactacacacacacacacacacacacacacacacacaaacatgcacacacacatatgcatatcttgacattgctctgtaggtgagagaggaccatgacgcccatgtttgcagctgatacttgtttgggcacacctccaagttctcgggattagaaggacaagagcactcccaggccccagagtctaagcctaagtctctatcgctcttcccctctcctcggccactccccagataccagacctgaggcaattcacttgccagcacagatggccaacccacctccagattccccagtgcttccacacccgggctctg

SEQ ID NO: 11499 - DNA, 501 bp, Homo sapiens
  MAP TO AB016897.1; EXPRESSED IN HELA, SIGNAL =   1; NT HIT: gi7657157, EVALUE 2.00e-28; EST_HUMAN HIT: BI771211.1, EVALUE 4.00e-30; SWISSPROT HIT: P06798, EVALUE 2.70e+00
aggcaaacctcccttcccgctgtgtcccgcctttcctcctggcggttgcgtttccacgtgtcctccctgctgcccgccccagcccacactgagcaggaaggtggggcgtggcggggaggggagtggaactgagggaagcagagagggtggtgccattgcccccggcctagcttctgtttgatcattagtttcaattcaagaaaacgttcttttgagggaattttaaaaatgaatcacgtgcacctcttaagaaaaccgagtgtcacaatcgttgttaccacgcaggtgagaggagaggagggaggacgggaaagggaaggggcatgagaaaggcggatgggactgagcttctacggctccctggccgcggcgcacgcgctggccctccccgtccacagcagcagcggcatcctccccaccctacagcgaggaggtggacgttgccccgaggggaggagcgtgtcagggtggcttccaggtgcaggttctcgcgcaggcctc

SEQ ID NO: 11500 - DNA, 525 bp, Homo sapiens
  MAP TO AL121895.18; EXPRESSED IN HELA, SIGNAL = 0.61; EST_HUMAN HIT: BF380880.1, EVALUE 0.00e+00; SWISSPROT HIT: P17437, EVALUE 2.00e-04
agccctcttggtccccagcctggaaagaggtcatctcccttcgcttccctgaagggaacccaaaccccagaggtatgcgcccctcagcttcttcagggactactctgggctttctgctggtgatgggaggaggcctgcgctcacctcctgtggcaggggacaccacaaaccctacttggtccttgggctctgggctggctttcgaaagatggacatgtctaagaaagggctccctgagctccgaaggctcccctgacccatgggaggttgggcttggagaagcttcctccagagctgccaggtcctcagaatgaccaggggaggctggcaggggaatgatcacctccatgtgaagaaatgctgaagcctcgcggtccttcagctcagcccctcctttctgggtgggaaccactcccctctctttgggtgggaagttgcctctgtctggtttgactggcttcctgacattcagagggatggcccgaggaagggcgcaggcctgggggtcgggatgcacgccctgtc

SEQ ID NO: 11501 - DNA, 530 bp, Homo sapiens
  MAP TO AC002310.1; EXPRESSED IN HELA, SIGNAL = 1.2; NT HIT: gi13027593, EVALUE 9.00e-83; EST_HUMAN HIT: BE881949.1, EVALUE 0.00e+00; SWISSPROT HIT: P17594, EVALUE 4.40e-01
tggccatgccctcctggttctgcctttcttggtgctgttccttctgcctggaatatccccaggtgtccgcttcttattccagatcaggcccagatgttcacgtcatctctgcccttcccccgcggtgacatttccccagcccggaggcggaatggactgttccctccctccaggctctgtctggctctgcagccgaggaacaggtgtcactcctccatctcctaggagcagtcgggggtccagcaggcctgtccctgtccacgcgggctgtgggattcaatgaccaggatgagccaagcctgaactctcgcctccttatctttcagcagattccagaaacaaggaagaggaaagacaaagggaagggacgggagccctggagaagcccgaccctgtggccgccgggtctcctgggctgaaggctccccaagccccctttgccgggttggagcagctgtccaaggcccggcgccggagtcgcccccgcttttttgcccacccccctgtcccccgagctgaccagcgtcacg

SEQ ID NO: 11502 - DNA, 533 bp, Homo sapiens
  MAP TO AL022326.1; EXPRESSED IN HELA, SIGNAL = 0.53; NT HIT: gi11418145, EVALUE 0.00e+00; EST_HUMAN HIT: AI128910.1, EVALUE 1.00e-95; SWISSPROT HIT: O43759, EVALUE 2.00e-35
ccaggctgtgctggccttccagcggtaccagattggcgccgactcggccctcttctcccaggactacatggaccccagccaggactccagcatgccttacgcgccctacgtggagcccactgggccggatcccgccggtatgggcggcacctaccagcagccggccaacaccttcgacaccgagccccagggctaccagtcgcagggctactgagccacagtgaccgcctgcccccgcccctccccatctgtcccctctctccacacccagcccctgctcctgcccaggctgccctgcccagcgcctcatcagcctctgccttgtcccactgaggtccagggtagctcggggcaggggtggggcagtccagtgttggggactgtctacgtatgtgcaagtatatcccagggcatgtgccccgcaggggcctagagggtgggggccaggggtatttgcattcatacattgtgtcatcaagcattccttgagcgcctactgggcatccggcctgtgctgggcatgggtggtgaca

SEQ ID NO: 11503 - DNA, 510 bp, Homo sapiens
  MAP TO U52112.1; EXPRESSED IN HELA, SIGNAL = 0.52; EST_HUMAN HIT: BF035804.1, EVALUE 4.00e-55; SWISSPROT HIT: P51610, EVALUE 3.20e-01; NT HIT: X79198.1, EVALUE 0.00e+00
tcacggttgctgctgcctcggaggtgtccatgggctcgccggtgcctgctccagggtcgagagaaacactacttactaggaaggctggccagaagcgggcagcccgggcggaggcccccaaagcctgtcctagagaccccgtccacctcctaccgtgctccactgtaggctaagccctggccgaggggccctgcctgtttcccaggcgctaaccccagccagcctgttctacacggcagtctctactacttggcctgcctggggtcccctgtgctcgtcctccccatcacatctggctcatgccaccctcgagggaaatgggctcctcttcccaggctgtctccgcggcctattgctcccccgagcggcccggcttccccagggttgcaccggcactcacccatgacggcctgctgcgcggcctggagcaccgcctggatggccagggcctgggcttcctccgtggctgcggcctgggcagctgcttctgcagcagccgtcactgccagc

SEQ ID NO: 11504 - DNA, 587 bp, Homo sapiens
  MAP TO AC004382.1; EXPRESSED IN HELA, SIGNAL = 0.57; NT HIT: gi14775195, EVALUE 0.00e+00; EST_HUMAN HIT: AL558932.1, EVALUE 0.00e+00; SWISSPROT HIT: Q99217, EVALUE 1.30e-01
tcctcgcggctctcccagtcgccgtcggccagcagcgcgggcgcggggggcaggggcagtgcgggcggcggcccgggcgagggcgtgccgctgggcggcgtgggcggcaaggagtcggcaggccccatgcgctccggcgacgggctgcccaggatggtcaggaggctgcccttggacagctgcggggactcggccagccgggggctgggcccgtggctcatggtgcggccgggcgggccctgagctcgaactcgcggtcgggctcaggggcggctccggggacgcgcggcgggcgcgatacaactgtgcatgatgacgccgtgccccgcttccctctgggccaccgggcggaggacgcctcctcggacctacgggagaacacaaccgttattggactgcgaccaccgtcagtctcgaagatcagccgcgccaaggccctggcggagggaacagaacggccaaggtaggaggagagagttctgttccaggagagtcccaatgaggcaggattggtggagcaagggcccgcaaaggcctcctcagtggcctcgactccctgctccaatcccttcacccagcggcgctaa

SEQ ID NO: 11505 - DNA, 508 bp, Homo sapiens
  MAP TO AL138752.2; EXPRESSED IN HELA, SIGNAL = 0.43; NT HIT: gi15529971, EVALUE 0.00e+00; EST_HUMAN HIT: AI268054.1, EVALUE 0.00e+00; SWISSPROT HIT: Q99297, EVALUE 5.00e-03
tcgaggcttggtgcccattcttttccggaatggactcagcaatgtcttgtttttcggccttcgaggtcccattaaggagcatctgcctaccgcaacgactcacagtgctcatctggtcaatgattttatctgtggaggtctattgggtgccatgttgggattcttgttttttccaattaatgttgtaaaaactcgcatacagtctcagattggtggggaatttcagtctttccccaaggttttccaaaaaatctggctggaacgggacagaaaactgataaatcttttcagaggtgcccatctgaattaccatcggtccctcatctcttggggcataatcaatgcaacttatgagttcttgttaaaggttatatgaaaaaaccatcagttaagtgccatttatcaactgaatagaccttctaagaagaatgcagtttggcctcttttttttttttttttaaaggaaatcccaatcttattatggaaagccatcaactgggtgtgggga

SEQ ID NO: 11506 - DNA, 503 bp, Homo sapiens
  MAP TO AL031406.1; EXPRESSED IN HELA, SIGNAL = 0.74; SWISSPROT HIT: Q15742, EVALUE 1.40e-01
ttttcctggcccggagggagctcaggggcctctggtgtcctccccagactcctggatcctccctccccactcccagggatgggcacgtgagcttcttacccctctctgaactcggagaggctttttgcagctcttggcctttccccttgagattccccggcctggagtaccctcctgtcccatccccgcccagtgagtgctacttctcaggcaggactcaaagctgcctcctacaggaagccttccagcccaccaggcctcagccaccctgtaaggactggctggcaagtctgcccctgtgtgggcttcctgagggcagggactcttttcatgcccaggcccatactggctccttgagaactgtctgctgaggaaacatgctccctcctgtgccacccctgagtgcctggaggcacagcaagcaagttgatcagaccacggagaccaccggcccacctctcccacctccaccgaccacggggaccaccagcccacctctccca

SEQ ID NO: 11507 - DNA, 509 bp, Homo sapiens
  MAP TO AF230666.1; EXPRESSED IN HELA, SIGNAL = 0.33; SWISSPROT HIT: P01266, EVALUE 1.00e-25; NT HIT: X06066.1, EVALUE 2.00e-96; EST_HUMAN HIT: BG998863.1, EVALUE 5.00e-82
tgtctgtgtgtggtgggggacactattcacctgagtaccattggcaagtgaggtcaggttttcagaaagtgagccagtattttcaagacttgccttagaagggatgaacctctagtgagagctggtggagtggtcatgccaactggaaaagtcacacttccaaaatggccccacaaaggcagctcaggggaaaggaaaaaataaaatgacacagagaagaaagtggtttcaaacgtaggtgtccttgattgaatgttctggcttcttactacctaaaggatctgaggagctgtctcaggattgcttgtgacattaaaaccttttctcccatttcactttgtctcatgcagctgaaggccaatcttgtgcctccgaaaggcagcaggccttgtccagactctactttgggacctcaggctacttcagccagcacgacctgttctcttccccagagaaaagatgggcctctccaagagtagccagatttgccacatcctgcccacccacga

SEQ ID NO: 11508 - DNA, 567 bp, Homo sapiens
  MAP TO AC004206.1; EXPRESSED IN HELA, SIGNAL = 0.31; SWISSPROT HIT: P53588, EVALUE 5.00e-48; NT HIT: AF058953.1, EVALUE 0.00e+00; EST_HUMAN HIT: AL528277.1, EVALUE 0.00e+00
tggccatagccaaaccagcaccatttactaggcagcctatacttccatcgaggccagtgtagttgagatctgccttagcagcatctttgttcctttcatcttcctgggtccagtcctgtagatcaaacattttcttttggcgataggctgaattagagtcaaaattgatctttgcatccttacacaatgcagctccatctgaatcttccaccattgaatttatttctatcatggttgcatcgtatttcagaaaaaggctgtaaagcttgatcatgttttctgctgctgaagccacaatattagatggaaatcccatcttctgtgcaagctggagagcttattcctctttgataccttctacaatatcaataggtactttaattattgcttcaggagtctcagcagcaacatcttcaatgttggccccactatgtaaacttcctattaatacaagaccttgaaatgacctttccattgttattgcaaagtagcactctctcttgggatattttcactcacagaccaatacctgattgcatattctgcccttttctcccatttgcttgg

SEQ ID NO: 11509 - DNA, 503 bp, Homo sapiens
  MAP TO AC002364.1; EXPRESSED IN HELA, SIGNAL = 1.2; SWISSPROT HIT: Q07436, EVALUE 3.50e+00; NT HIT: gi14764606, EVALUE 5.00e-72; EST_HUMAN HIT: AW501070.1, EVALUE 8.00e-10
agactgcgggcacacgcctcggctatgggggacgaagacttaccaggcatggcggcccttcagccacacggggtccccggggacggggaagggccgcacgagcgaggacccccaccagccagcgctcccgtgggtggaagtaagtgcggatgtggcctcctgcggggcgagggttacctgcagggcggaaactgtggggtccagagtgaggatggctggctttccaggtccatggtgagctttacgtttaggaatattgatgtgatcgggaagagcacacacctgctctttctgatctgtgttggggaaagatcattgaaattgacaaagttgtctttcctaggtatttggcttgttttcaaaaaatacttaattgttgaaaactagggtaagaactacacaggcttccacattcagaggctgctggagatggattagggccttcatgacctttgcagcgtgcgtgccgagatggaaccgtcagtgtgtgcccgcctgagacc

SEQ ID NO: 11510 - DNA, 526 bp, Homo sapiens
  MAP TO AC004690.1; EXPRESSED IN HELA, SIGNAL = 1.5; EST_HUMAN HIT: AA065301.1, EVALUE 2.00e-81; SWISSPROT HIT: P36814, EVALUE 2.80e+00; NT HIT: gi9845300, EVALUE 7.80e+00
cctagcgggccaggcgctactactcagcctgggcggcggggcgggggtcgcggtggcgccaggggcgctggacctggcgctgcagtacgtgctggcgctctaccactgccaagtgttcctgaagcgcttcctgcgcttgcggtacgggcgacagaggcggcggcagcagcaacagcagcagcagcagcagcagcagcagcggaggggcgcgctccccgtccctcccggcgcccgggtccctactgcggccggagcccggcggcgacgaccccgtggccccaggggcgccgggggagcccccagccaggggctgcccgacctaccccgctttcttttcttcggaatgcacggctttctggatgagatcttcttcaccttcttcttcaacgtactggggcagggggacgggacaaccagcggccacacgtcgctctggtccttctttatgtacggcagctgcagtttcgtggtggaaaagctctacttccacctccactacagccgcggttggggcacttggaagcgg

SEQ ID NO: 11511 - DNA, 537 bp, Homo sapiens
  MAP TO AC010328.4; EXPRESSED IN HELA, SIGNAL = 0.39; NT HIT: gi8922743, EVALUE 1.00e-108; EST_HUMAN HIT: BI761488.1, EVALUE 2.00e-97; SWISSPROT HIT: Q9Y2Q1, EVALUE 2.00e-14
cacacagggacattgcaaagacaagcaagtcatcacactggagatttttccttccaggaaattgagaaagattttcaggactttgagtttcagtggcaagaagatgaaagaaatggccatgaagcactcatgacagagataaaaaagttgacaggtaatacagactgatatgatcaaaggcatgctggaaacaaacctattaaagatcagcttggatcaagctttcattcacatctgcctgaactgcatatattgcagagcaaagggaaaattgatagtcaagatgagaagtctgtcaatgatgcttcctcagtttcagcatcccaaagaatttcttgtattcctaaaacccatatttctaataagtatgggaataatttcctccaggaagcacacatgagagaaaaatctttccaatgtaatgagagtggcaaagcctttaattgtagctcactgttaaaaaaatgtcagataatccatttaggagagaaaaaatataaatgtgatatatgtggcaaggtctttaatcagaagcga

SEQ ID NO: 11512 - DNA, 507 bp, Homo sapiens
  MAP TO AC010336.5; EXPRESSED IN HELA, SIGNAL = 0.39; NT HIT: gi15302946, EVALUE 0.00e+00; EST_HUMAN HIT: AL566847.1, EVALUE 0.00e+00; SWISSPROT HIT: P27508, EVALUE 2.70e+00
tgcactcagcgacgccgaactcggccgctgggccgaactactgtctcccctggacgagtcccgtgccagcatcacctcggtcaccagcttctctccggacgacgtggcctccccgcagggtgactggaccgtggtggaggtggagaccttccactgagccagaccacagccccgcctgctacaccccacccctgccttaggatccgcccctccgggtacgccgtttgttttagaccccgcctccactgccctggagccccgctgggtggattagtcttagctccctagagcctgagcctttggcctcggaggctcgggacctacccacagctttgacctaggcccgcccctcgagctccgcccctttggcctaggacacgccccgtttccccgagtcccgccccgtgtgcagtgtattgcccaccccgcacagcctgagtttgcaataaaactgggacactgggacttgcacaccttcgctgtcacagagaggactggggctggggg

SEQ ID NO: 11513 - DNA, 507 bp, Homo sapiens
  MAP TO AL356019.2; EXPRESSED IN HELA, SIGNAL = 0.91; NT HIT: gi9938009, EVALUE 4.00e-17; EST_HUMAN HIT: BF948752.1, EVALUE 7.10e-01; SWISSPROT HIT: Q15615, EVALUE 2.00e-39
cctgggtttccatggtcaaagggagatgcagagctgcttcttctcattcatcctggttctctatctcctgacactgctagggaatggagctattgtctgtgcagtgaaattggacaggcggctccacacacccatgtacatccttctgggaaactttgcctttctagagatctggtacatttcctccactgtcccaaacatgctagtcaatatcctctctgagattaaaaccatctccttctctggttgcttcctgcaattctatttctttttttcactgggtacaacagagtgtttctttttatcagttatggcttatgatcggtacctggccatctgtcgtccattacactacccctccatcatgactgggaagttctgtataattctggtctgtgtatgctgggtaggcggatttctctgctatccagtccctattgttcttatctcccaacttcccttctgtgggcccaacatcattgaccacttggtgtgtgacccaggccc

SEQ ID NO: 11514 - DNA, 577 bp, Homo sapiens
  MAP TO AC005609.1; EXPRESSED IN HELA, SIGNAL = 0.49; SWISSPROT HIT: Q9Y5H7, EVALUE 1.00e-106; NT HIT: gi14861872, EVALUE 0.00e+00; EST_HUMAN HIT: BG719192.1, EVALUE 1.00e-121
cactcgaggcaccagcagcgccggcgcgttgtcgttctcgtccagcacgaacacctgcagcgtcacgttgctgcccagaggcggcacgcccgcgtcgcgcgcgctcacctggaactgcagcagctccacttcctcgtggtccagcggctgcagcgcgtacaccttgccgctctccgcgtgcaccgaaacgtaactcgacagcgggcgctcgcccacccgccgctccaccagcgagtaggacaccagggcgttctcctgcgcgtccgcgtcccgtgcagacaccgtgaagatgtggcagcctggcgggttgttctccttcacgaacacggtatactggggctgcgcgaacgccggagcgttgtcgttcacgtcggccacttccacagacacgctggcggtggcccacagcgaaggcgagcccccgtcccgcgcggtcaccaccagctcatagaccgacacgctctcgcggtccagggcgctgtccagcaccaacgagtagtaattcttgaaggtggacaccagcttgaagggaacgtggggcattagggagcaggtcacctgcccgttggcacctgag

SEQ ID NO: 11515 - DNA, 524 bp, Homo sapiens
  MAP TO AC018836.2; EXPRESSED IN HELA, SIGNAL = 0.77; SWISSPROT HIT: P55199, EVALUE 2.20e+00; NT HIT: gi14730805, EVALUE 1.00e-111; EST_HUMAN HIT: BE783517.1, EVALUE 4.00e-70
gctcctgcagcaccaccagggcctcggctgcaatcttgtagaaagagtcagccacacaggccatcacaggtggcaggaggataggcaagtgtgggtggaaggcctcagctggttcggtgcccagcagcccctgcaagaaggccagggcatccatccggatggtggaggagctggagcggtcggccagcgagaagatgatgcctgcagggtgaatgcaaaggttatgaggccaccgcctctgatgcaacacggccctccctggaagcaaggctggggtacctacaagtgcctgagctggactgaagcacctaaactcttctgcagaagtttccaagaagtcagccctgaccagtggccagggctgagggaaacatgtccagggaactcactggagccagccttgttctcactgctggtagtgggaggccactggagactcttgaccagggactgagcctgggattgggtctcagactgtctcaggaactgggggctcaactcaggggtggggtctgggttctgga

SEQ ID NO: 11516 - DNA, 557 bp, Homo sapiens
  MAP TO AC004979.1; EXPRESSED IN PLACENTA, SIGNAL = 1.6; EXPRESSED IN HELA, SIGNAL = 2.4; NT HIT: gi11420322, EVALUE 0.00e+00; EST_HUMAN HIT: BE896939.1, EVALUE 3.00e-03
tgctgctggcctgtgtgctgatttctgctttcaccacttgcctgtacatcacgcttagccaggcatcaccttttcctgaacttgtgactacgagaaataacacatcatttaatatcagtgagggcatcttgtctttagtggtttctttggtcttgagctcatctctccagttcatcattaatgtgacttctgcttccttgctaatacactccttgaggagacatatacagaagatgcagaaaaatgccactggtttctggaatccccagacggaagctcatgtaggtgctatgaagctgatggtctatttcctcatcctctacattccatattcagttgctaccctggtccagtatctccccttttatgcagggatggatatggggaccaaatccatttgtctgatttttgccaccctttactctccaggacattctgttctcattattatcacacatcctaaactgaaaacaacagcaaagaagattctttgtttcaaaaaatagtggaatttcagtaaacaatacctagatttacctgatggtttgggggcaaga

SEQ ID NO: 11517 - DNA, 530 bp, Homo sapiens
  MAP TO AP001731.1; EXPRESSED IN HELA, SIGNAL = 0.5; EST_HUMAN HIT: W38389.1, EVALUE 4.00e-89; SWISSPROT HIT: P81270, EVALUE 9.00e-27; NT HIT: gi15320194, EVALUE 1.00e-106
agtaacggagggcgcggctgagcttatcgtagttcatgttgggtttgctcttccgctctccccagcgccgggccacctcgtcgggatccgtcatcttgaactccccgttggtgccttcccaggtgatgcagctggagttggagctgtccgacaggagctccaggaggaactgccaaagctggatctggccactgcctaatgaggtcaggagaggaaggaaaactccagtgagcacaggttccaggggaaagaggctctctgtgatgacggaaggaggtgctattggtgtgccgcccacattcccttcaccaggcctgtccgtccatccctcagctgcaggggtgcggactgctctcgttccatggccacccacttctccagagaactgcccttgcctgaacagagccgccgcctcgcccacccccaggtatcccacagctgggtggactgaacggggtaccacgggccggcccccttgcctcaaggaaagaccaactccatgacgctattcaggcttcagggctcccgtg

SEQ ID NO: 11518 - DNA, 535 bp, Homo sapiens
  MAP TO AC008848.4; EXPRESSED IN HELA, SIGNAL = 0.57; NT HIT: gi4507974, EVALUE 4.00e-26; EST_HUMAN HIT: AW367524.1, EVALUE 0.00e+00; SWISSPROT HIT: Q14585, EVALUE 5.00e-74
ggccttcagccgtgcctcacaccttgttcagcatcagagaattcacacgggtgagaaaccttatgactgtaaggactgtgggaaggcctttggtcgtacatcagaacttattctacatcagagacttcatactggtgtcaaaccttatgaatgtaaagaatgtgggaagacctttaggcagcattcacagctgattctgcatcaaagaactcacacaggcgagaaaccctacgtatgtaaagactgtggcaaggctttcattcgtggctcccaactcactgtgcatcggagaatccacacaggggccagaccctatgagtgtaaagaatgcgggaaagcctttagacagcactcacagctgactgtacaccagcgaatccacactggtgagaaaccctacgagtgtaaggaatgcggaaagggctttattcacagctcagaagttactcgacatcaaagaattcattctggggagaaaccctatgagtgtaaggaatgtgggaaggccttcagacagcacgcacagctcacacga

SEQ ID NO: 11519 - DNA, 547 bp, Homo sapiens
  MAP TO AC009086.5; EXPRESSED IN HELA, SIGNAL =  10; NT HIT: gi14775898, EVALUE 1.00e-122; EST_HUMAN HIT: BI522879.1, EVALUE 1.00e-103; SWISSPROT HIT: Q01650, EVALUE 1.00e-10
gttccgctgcagggtcacgccctcgccctcgcctgccggcgccgcgccgtccgcgcgcttggaggccagcatcttctcccgcgcctcttccttctcctcggccaccggggccgctagcgcccgccgcttcgggcccgcacccgccatgctctgcttaccggccgggcctgggacacccgagagccgcagccgagcgaggattgtgcgcgccgctcgccgcccgcagctgcgtcaagaaccccgcccgcgccgccttttaggccccggcccgctggccccgcccaccgtccgcggctcctccccgccccgtggcccggccgcggctctcagccccgccccctcgacccagctcggagcacgtgcgtcctccggcctagcctggcaggcgattcccaggcccgcgtggtcctcgaaggcccccgtcctcctgcgccatggagaccccggcctcgcgacctacccccccggcgcccgcgtcatcccaccccgtcctcccgggtgcgcctgggcggggcctggcagtcagggcgagccccttcacccactg

SEQ ID NO: 11520 - DNA, 540 bp, Homo sapiens
  MAP TO U52112.1; EXPRESSED IN LUNG, SIGNAL = 0.94; EXPRESSED IN HELA, SIGNAL = 1.7; SWISSPROT HIT: P51610, EVALUE 2.00e-29; NT HIT: X79198.1, EVALUE 0.00e+00; EST_HUMAN HIT: BI261459.1, EVALUE 0.00e+00
accaccaaggggagggccagataaggcaggacaggctcctggagacctctgtctgcttcaggtacagccaggacgccccagctctccccactggtaaattgggtgccaaggagcctgactggtggactctggacggacccccgccatcgttgtcttggcctttcagcctggggggctgggagaccatgaaagccaggctggccaccttcacttaccttggtttgaactcatgttggaagtgacagtggtggccgtgtgagtggtgcccgtctcgtgggtctcacagggggggttggagcacaccctctgtgttgggaaaggagccagcagcgcggtgccagcctggggggtgacgctgggtgccgccgccacctctaggccagactccacggtcctgtgggaagaagtggcgtcgggaagcagggcacccacgctgaccgacatggtggtgccagtggaagtggtctggtgtgtctcacaggggcgaccagcagggggctgctgcccaccctcgggctggcccgtgcccccgtttgaagt

SEQ ID NO: 11521 - DNA, 509 bp, Homo sapiens
  MAP TO AC011530.5; EXPRESSED IN HELA, SIGNAL = 0.66; EST_HUMAN HIT: AA160661.1, EVALUE 0.00e+00; SWISSPROT HIT: P70178, EVALUE 1.00e-07; NT HIT: X84813.1, EVALUE 0.00e+00
gagagggctctgggggctggaagtccggccctggggcagggtgttccgcttacagctagtaccaagtggagggggcagggcccctgagtcaggaccctgagtcccccacgtatatggcagggcacagcatggggagggctgtaacagagaggcctcccatccaaagggggatggagacctggacaggaggtggccggggatacaacccccagcaccaccagggcttggagaggccacccaggcagaaggatgtggtgactggggtcttcagcaaccgcatttctggggctcccccctcccattcctgtccctgcgtcttcagcaccaatgtcgggagaggccacggggccacactgggtcacagttccaagggctcctccacaggcaccgactggagctgggtcagaaccttggcctcagcttccaacccctcgtcaacctcaccccctgcggtggcccccaggagcagcccctcagggtcggggtctggcagcctcagcacggtgtgg

SEQ ID NO: 11522 - DNA, 518 bp, Homo sapiens
  MAP TO AL023096.1; EXPRESSED IN HELA, SIGNAL = 0.61; NT HIT: Z38108.1, EVALUE 0.00e+00; EST_HUMAN HIT: BG762731.1, EVALUE 0.00e+00; SWISSPROT HIT: Q63046, EVALUE 2.00e-06
atggtggaagcggctggtggccggcatgcccgccacgctgaggctgctgatgctcgtgcccgagggcgtggcgctgtaggggaaggcagctgacatggccccgggataatgcatcctggggtctgggaagcggctctccgtgagggttggcagcgtggggaaggagcggtcaaactggcgggggtcggagaatgggttcagttccgaggtgcctggaggacagcagggaagaggtcagttccagctcgagacaaccccaggagggcttcctgaagaatgaccttgggctctggttcccaaggcccatctgggggacccctagttctagacctggctctcctcttcctgccctaggctgcccggggcctcccccgccaggactccgaacacagacctgccgggaagctggttggagcgtgccccgggccaagaggggccatgggagcccccccacagcagcaacagaacagaggagggggtctattcttctttttaaatcctccttcccagcctcgcag

SEQ ID NO: 11523 - DNA, 575 bp, Homo sapiens
  MAP TO AL035703.19; EXPRESSED IN HELA, SIGNAL = 0.69; NT HIT: AF055716.1, EVALUE 2.20e+00; EST_HUMAN HIT: AA806623.1, EVALUE 8.00e-41; SWISSPROT HIT: Q60821, EVALUE 6.00e-16
cccctggagtggcagcaagctctggggaagaatgaggctctccagcaccttcagatgaaaggatttctacttgaggcttctctggttcctttctgaatgtctctgaggatggcgcagagacatcccttaccacctgaccctgaaccgagcagtttacaaggctggtcagaagatttttgcagctaacagctacatcaaacatctgtagactgtctgctaaggagatgattttggagaagttgtgcttgcccacaggtagtttgcccgtgtacatcatttccaacaagagcgcaaactcctcggggctcaccacagatgcatcgatggagatggtatctgtgttatccagcagggttttgaacaggaggctggcagcagccaggacaagcttgtgagccctgaagtaaatggtaccaatggagatggtgcaatcacagaactgctgctccttgcacagagtgtacagctgctgcagcagctgccggctgtagttggggagctccattgcgtcaactctgccccaagaactgctcttcctctcctctccttagagttggctttgggaggacaggccc

SEQ ID NO: 11524 - DNA, 500 bp, Homo sapiens
  MAP TO AL158075.2; EXPRESSED IN HELA, SIGNAL = 0.84; NT HIT: gi15298461, EVALUE 2.00e-25; EST_HUMAN HIT: AW384022.1, EVALUE 2.00e-25; SWISSPROT HIT: O95897, EVALUE 2.00e-04
cgaagcgctgccgtaggtcgtacttgatgatgttcttggtgaaggcgcggttgtagtagaaggcgccctggtacaccacgtggcctgtgccgatccagttgtagggtagcttgtacatgttactccagcggcctgcaggcgagggcgatggtcaccccagacctcccgagcaaccccagcccacccacatcccctgagcccaccaagggctctcagtggcccagtaagtgactgataccaagcatgtgcagtgtgcctggagctgggatgacatcttattatggcacaagcgtctcctgaaggaggtctatcgtcatcccatctgcttaaaaaaaaaaaggctcagaggatcaaggtcgcccagctctggaatggcacagctaggatttagacacagggtgacatcagccccattctttgtctccaggccttcgtccctgctgttcctctgttaggactgccattccccaggccatctgcttggggaatgcctgcccatc

SEQ ID NO: 11525 - DNA, 512 bp, Homo sapiens
  MAP TO AC004447.1; EXPRESSED IN HELA, SIGNAL = 0.74; NT HIT: gi4557742, EVALUE 1.20e-01; EST_HUMAN HIT: BI561519.1, EVALUE 0.00e+00
atgccccaatttccggtggccaatgacctggtcccgagaatcagagtgagaaaattccagatcccggccacattctttgcgaaagtagctgtcatcactgatggaagggttgcttgatctgaaggaaggccctggaaatacgtcacttctcaggccttctcttccggcatctctagagtgagctacagatccactgagggagtatctgccatcgctgtggacgtcatcatacatctctgctctggatcttgggactgcccttaagagatctgaaataaaccatccaaaaaaaaaaaagaagaagccaaaagatactttagaccagagaatgcaaacagtgcaaacaaacagtccacggatcaccaggcagcaaaactgctttatacacctcagtgctttttgccaatctgtatttgctgccaacatttaaaatgcgtgtggtgtcacttaaaaatctggatcgactacttactaaaacagaagacctataagcaccaagcctgagtttgccc

SEQ ID NO: 11526 - DNA, 503 bp, Homo sapiens
  MAP TO AC000040.4; EXPRESSED IN HELA, SIGNAL = 1.6; SWISSPROT HIT: P46591, EVALUE 2.40e-01; EST_HUMAN HIT: BF842904.1, EVALUE 3.00e-52
tcttcgctggtcactccggccatgatccttggagcctttctcacacctctcctcttctgtgacaacacaccaaatccatcatcagatcctgttggccttacctttaatacatagctcatcttctcaagattccatgctggtctaagatataatccactctctcctgggctagggcaagagcctcctgcctcatctccctgttttcattctcaccccctatgctctgtatttcatagtgaagtcacaatgattcttaagaatataaaaatcaaggcatgtcttttgcatgctcagaattctccaaacccttcccatcacatctagaaaaaaacatcagagtccttgctaggtgtgtacagggatccagggtcttgcccattgcctttctgatctcagctctttctattcctgcccagttgggatccagggtcttgcccattgcctttctgatctcagctctttctattcctgcccagttgggatccagggtcttgcccattgcc

SEQ ID NO: 11527 - DNA, 512 bp, Homo sapiens
  MAP TO AC004204.1; EXPRESSED IN HELA, SIGNAL =  13; EST_HUMAN HIT: BG565744.1, EVALUE 1.00e-129; SWISSPROT HIT: P39023, EVALUE 1.00e-86; NT HIT: gi14778998, EVALUE 1.00e-127
gggtgtgggcaatgacgcagatgacttggcagtacttcttcatgctgctgaagtccttctccagctgcttcttgccatcctcatcctgccatttcttgcagtacttggtaaaggccttcttcttagatttatgccagttcttatagaaacgcctcttgcattcatcactgatgtgctcagcgaagacagtcttgcaagtccggaagccttgaggggtttccacgcagcccacaatgcccactggtggcctctccacaatggtcacagcctccaccacctccttcttgttcaccttggatcctggcctgtcgacttcccgcacgatgtgggtcatgccagccttgtatcccaggaaggctgtgaggtggaccggcttggatgggtcatccttagggaagctcttcaccttcccacgatgcctgctgctgtgcttccaaggcaggaagccgagggacccatgtctgggagtggagaactttctgtgagacatcacgccatcaaatcctgccggt

SEQ ID NO: 11528 - DNA, 509 bp, Homo sapiens
  MAP TO AL355885.1; EXPRESSED IN HELA, SIGNAL = 0.34; NT HIT: AF213467.1, EVALUE 1.00e-100; EST_HUMAN HIT: BF795264.1, EVALUE 1.00e-100; SWISSPROT HIT: Q03444, EVALUE 9.40e-01
cgcgacccaagggaaagatattggtacaggctatggcactttggattttttctaagagctctttctcttttcgttggtgttcctgttttaatgcttcttcctcatcagcagtaagaggctctcttgttacacagttgatctgttcttgccttgtaaattctttaaatccattttgtcctcttttccctgtaattaaaataaaatgtttcatcatcatcatatttcaagtttccattagaaaaatatgagatacaaagttaccccaagttattaggtgttatgaactaaactgtatcccctctccacaaccccaagttcatatgttgaagccctaacctccaatgtgactgtatttggagacagaacctttaaggaggtaattaaggtcatgaaggtggggacctaatccaacatgattggtgttcttagacaccagagatcttgttatctgacatgcacagagaaaaagccatgtaaggatatagcaagaaggcactgtctgcaagcca

SEQ ID NO: 11529 - DNA, 532 bp, Homo sapiens
  MAP TO AC006027.1; EXPRESSED IN HELA, SIGNAL = 0.47; NT HIT: gi5174616, EVALUE 0.00e+00; EST_HUMAN HIT: BE887277.1, EVALUE 0.00e+00; SWISSPROT HIT: P33076, EVALUE 7.00e-06
agcaagaccagggggtgggcaggctcccaggggcaggagctgtcaggcacgcggctcaggtccaagtccgagtgcagctcgtccaggccatcgaaggtgaagagggccacgtgggggaagcgcagcaggaaggcaaacacctcctcggggtcccgctctgggtagcagtagtgcttgaagagcaggtcctgcagacacagcctgtcactttccttgaagcagctgaacatgcggcagcgaaagtggaagaagaatttgacccctgcgtctagccggcccgtggcccagaggctctgcagccgctgtagcagcatggacttgcccaccccagcatcacccaggatgaagatggtctcaccctgctcattgaggatgccggtggtgtggtccaggaggcaggccaggctgttcaggctgcccaggctctcattgctgaagccaaccagctccatgatggtgtccatgtagatctcctccagcagcagctcctccttctgggcatagcacagcacgaacttggagtcacggccca

SEQ ID NO: 11530 - DNA, 531 bp, Homo sapiens
  MAP TO AF228728.1; EXPRESSED IN PLACENTA, SIGNAL = 1.9; EXPRESSED IN HELA, SIGNAL = 0.55; NT HIT: U09411.1, EVALUE 8.00e-03; EST_HUMAN HIT: BG403072.1, EVALUE 0.00e+00; SWISSPROT HIT: Q61967, EVALUE 2.00e-05
aggcctggctgtgcccaatggttctgcacgaagacccgggccggcctgtggggagctcagctgcatatgcgtctgtggcgccccctgtgccctgctctttggggactgagcatagctgcccctccctctctcccttctgcccgctcctggacatttccggaaggccccaggaaatggtggctgatagtggttcctgaggccacaccacgggctgcctggtgccctttccctccccagtgcccggctggagcaagaagccgagctcctgatgggagctggccctttctttagactttgcttcaccttcaggacagggggttctgaatttctgcgctagggccccgccggcttgggtgggcttccagcgtgaatcctcggcctgtcgtccccgtcatcaggaagcccaacagggcgcccgcctgccctctgtgtcctccccgggctcgcggccgtgcaccttctggtgctggatgagggtggacagccggctgcaggccctcccgcaggcgcggcaccggtatggcctctcgc

SEQ ID NO: 11531 - DNA, 502 bp, Homo sapiens
  MAP TO AC005005.1; EXPRESSED IN HELA, SIGNAL = 0.66; NT HIT: U82695.2, EVALUE 7.40e+00; EST_HUMAN HIT: BI760784.1, EVALUE 2.00e-25; SWISSPROT HIT: Q62799, EVALUE 7.00e-01
cctcgcccctgctggaaaccatcctctaaggagtctctagccctgcagccctcccagggcatctccctagccccttgaagacaaggccccaagccaactattatggcccttcctctcctggcagggcctctccgtctgctataagggtaaggagagctgaggtggcagctgtttcagggaggcttggtctggccagggtgcagggcggcagggagctgggggctggggcctgggtcatgccaggggctgccaaggcagctgccacacatgcctcagggctggagcctggcaccctcttgccctagtcttagagcactagtgccccagtcccctgtcaagatagataaactgaggctcagagaaggtggtgacatacctaaagtcaagaggaggcagagcctggctcaaaactacccctcccaccaacccagaagcacttacgagactagtgctgcgggtggtgccggtggaggagcggcggcgggtgctgaaggcaggtggg

SEQ ID NO: 11532 - DNA, 503 bp, Homo sapiens
  MAP TO AL118558.2; EXPRESSED IN HELA, SIGNAL = 1.3; EST_HUMAN HIT: BI039744.1, EVALUE 1.00e-117; SWISSPROT HIT: Q9JHU4, EVALUE 2.00e-14; NT HIT: gi9506548, EVALUE 1.00e-26
ggaagtgcaggccctgatcgcagaaggcattgcgttggtgtgggagtcctacaaacttgacccatatgtacagcgcttagcagagactgtcttcaacttccaagaaaaggtatgctctcatgtaatcctcaggtgtcctggtaacgaatgaagcacagtaatagcgagctcagttaaaacactagttctcccgaagaaggcatgcatggttgatgcagcatacggccatgtgagctgcaagggaggaggaccctttgtactcaccgggctatttaatggtgctgggttttagggaggccattaagtaacaacctgagtttagaaacaggtggagagctaaaggacacaggagtccaacagagagcagaatgcagttttattgctgctacagctgaaagcagagcaggctctaggtctcagccacgaaggccttacccagacgtgcggctgccagcggaccagatgcatacgacagcgaggctggctccccaggcacaggagga

SEQ ID NO: 11533 - DNA, 505 bp, Homo sapiens
  MAP TO AC009948.2; EXPRESSED IN HELA, SIGNAL = 1.1; EST_HUMAN HIT: AA194318.1, EVALUE 1.00e-57; SWISSPROT HIT: Q02173, EVALUE 5.00e-03; NT HIT: gi16157781, EVALUE 1.00e-57
gccactggactggtagaaggtctggattaccaattccgtgtatatgctgaaaattctgctggcctaagctcacctagtgacccaagcaaatttaccttagctgtttctccagtaggtaagtgattattattcaaatacatttagtttagcaattgaacatattagaaacaaatatatcaaggaatgcttttcttctctgcatcaccttcttacatatcttcttgtcactagagaactggtcatgtaaagcaagaggaattattttaagtcagtctaataaactaatttgaagttcattttaaagactatgaaatggaaagttgaaattaatgaccaatatgagtttgggagattgaataaattacttattataaaaattttacttatttattaaaattatagaataattgtattgttcttccatggatgattaagacctggttacaaatgtaatgatgcatttaccttccttataattttttagacccacctggcactcctgact

SEQ ID NO: 11534 - DNA, 524 bp, Homo sapiens
  MAP TO AL022718.1; EXPRESSED IN HELA, SIGNAL = 0.59; EST_HUMAN HIT: BG468859.1, EVALUE 2.90e+00; SWISSPROT HIT: P56524, EVALUE 3.30e-01
gagtggccacgaggcagcgggaggagctgctgcaccacgttcggcggctgcaaaggcatgcggaggagcgccaggcgacctcctgggctctaacgtcccagctgcagcagctgcgcctggagcatgaggtggcggcaacacagctgcacctcgcgcaggctgccctgcagcaggcgctgaatgagcgtgatgggctgtacgggaggctgctccagatcgagaggtttccccaggccgctccactggcccatgaaataatgtctgggccgcaagcagagcagaatggggctgcggcatgtcccctggctacagagcagcagagcgatatggtggccatggggacacatgctaatgcccagatgccaaccccgacagatgttctttatgtgccaggacctctgagtccctgggcccagggcatgcaaccccctctgccagtgccacatccattcccacacccaccaccattcccaatgaaattcccatccttgccacctctaccacctgctgtagtcacgggggca

SEQ ID NO: 11535 - DNA, 500 bp, Homo sapiens
  MAP TO AC004962.1; EXPRESSED IN HELA, SIGNAL = 0.99; NT HIT: gi14729175, EVALUE 0.00e+00; EST_HUMAN HIT: BF000300.1, EVALUE 0.00e+00; SWISSPROT HIT: Q94918, EVALUE 1.60e+00
ttgcgcgccccgtatttgacaatgtgcctgtttttctggcacacctggttgtgcaatgtcagcgtctagaagccgctgagcagcgaaagcggaaacacctacagggcactcctcgggcccacccacctgcgggaggcgccctgagaccgagaggccgcagcgcccggggcctctgccggctgcccctcgcctcccgcacggagctcgctcggggaacgcccccatccactgccctccacagcctcagggacaagggtgaggccaggggagcagagggagcagtcatggcggagctggaggctgtggccgacgatctagacgccgtcatcgacgacctggactacctcccgggccactttcacctggagatgcagttgaacttcgagccgcgctcgccggccccacagcgcgcccgggacctgaagctgcagcgggagggtctgcggcaggagctccagctggcggccgccccgcagcgccccgctgtgcgtcacctcctg

SEQ ID NO: 11536 - DNA, 502 bp, Homo sapiens
  MAP TO AC007011.1; EXPRESSED IN HELA, SIGNAL = 0.41; EST_HUMAN HIT: BG823810.1, EVALUE 8.00e-50; SWISSPROT HIT: P23352, EVALUE 5.30e-01; NT HIT: gi14779866, EVALUE 6.00e-50
gcctggggaacgtggtgagcgacgagcggcgggtgagcagctccggggggctgcagaacgcgcagttcgggatccgccgcgacgggaccctggtcaccgggtgaggaggcagggagccccgtgctgtcgagggcagagggcctgagatttgggttgtagccgtgcctccgtgttcaagtcacttaaccaagctgagcccctgtttcctcctctgcagaatggggataggaatcgcttccttgcagagtttattcatcatccagtatcattgagcacttgcttgtatcaggcaatgtgccgcgccccggtgagatagccgtgaacaacacagtctttgccttaacagccctcccccattactagaaaaatcaacaaaagccgggtaaatagctaacatacattctgattgctgtgtgtgcagcaaagcaaccaacggggtgaacccgttgtaaatagtgttgattttagggagggtgatctggaacacgcctctccgaggtga

SEQ ID NO: 11537 - DNA, 540 bp, Homo sapiens
  MAP TO AF205588.1; EXPRESSED IN HELA, SIGNAL = 0.83; EST_HUMAN HIT: AA161185.1, EVALUE 0.00e+00; SWISSPROT HIT: P17032, EVALUE 1.00e-30; NT HIT: AJ245588.1, EVALUE 2.00e-06
gggtttctctcctgcatgggttctcagatgtctactgagagatgataggtggtaaaatattttcttacattctttacactcataggttttatctctcgtgtgaattttctgatgtcttatgaggtcttcatttttagagaaagatttcccacatttatcacagtcataggatttgccctttgagtgagtatgctgatgtactatgagggcagacttctggcagaagaacttcccacattccttacattcacaggctttctctgtggtatgagttttctgatgttttgtgagttctccattcctagacagaaagttccacattcattaatgtgtaagacttttaaggctttttgttccccctgctccactgggcgtattttccaagtacctctgaggaccgatttctagagatgttcccatatttactggatccatagggtttctccactgtgagcattctctgacctgcactgtagtttaacatttggtaaggtgaatctgcatttgcattctattcacagggtctctcaattgcctgca

SEQ ID NO: 11538 - DNA, 517 bp, Homo sapiens
  MAP TO AC021385.3; EXPRESSED IN HELA, SIGNAL = 1.2; NT HIT: AB037858.1, EVALUE 8.00e-06; EST_HUMAN HIT: BI550363.1, EVALUE 0.00e+00; SWISSPROT HIT: Q09147, EVALUE 9.40e-01
ggctttggcctgttcaccctccttcttgtccaggacactggaagttgggctttctatgccagctgactccaaacctggctgtgggtagggcaatgactgtttgccggaatctatgtcagctgaacaccctgaggacgaaagcaaaatcttggacttggagagtttcagaggcctcactgactgctcagccactgtttctgaaagggcgcgggtggtccatggagaatcgaagcacttgtgaaggatggccacaaaatgctcgagcctggaactggtactggggtagtgaagccaaaagttgctgcaggctgcaaagatgagcgtgtgcaagagcaccagataggggaaaaactttgcaaaccaatggagctgtttctcgtaacagacggcatcaatataggagtactgctgtcggtggaggtcattctgaattcggagggggagcggaagcggtgtcccaggattagaggatgtgttcatgctggctttcaggatgtcccaaggcacggcacagtga

SEQ ID NO: 11539 - DNA, 507 bp, Homo sapiens
  MAP TO Z81314.1; EXPRESSED IN HELA, SIGNAL = 0.33; NT HIT: gi13655032, EVALUE 2.00e-52; EST_HUMAN HIT: AI740692.1, EVALUE 3.00e-52; SWISSPROT HIT: O97704, EVALUE 2.10e+00
gctcagcgcaagagggcgacttcgacttcctatgatgtcatctccagtcccagcaaccagcactgctcactccctggacccctatccgccaaattatccttccctgccagagcctgcagaccacaggagaggcagacagggagcacccccacaaacacacaaatatgggatttcaagaatttatggttatttatggtcagggctttgagagaacagaacgcaattctgggaagaacagagggcgcctagttaatgtcaggggtgtgcggcaagtcctctctttgcagaaggggcagctgtagttatgcactgatgtgtccgtttagcattcgtcgccccccaccctcatggtaagcttttagaagagcaagaccacgtccgtgttattcgctgccttcctaccttctggtttaaccacacgggatcctcgaacagccctgccccgggagctggaacaggtctggctcgccttctgcggcaggtgccggtggtgctgggtgagccggt

SEQ ID NO: 11540 - DNA, 589 bp, Homo sapiens
  MAP TO AC006059.3; EXPRESSED IN HELA, SIGNAL = 0.75; SWISSPROT HIT: P30414, EVALUE 5.00e-99; NT HIT: AF184110.1, EVALUE 0.00e+00; EST_HUMAN HIT: AU145298.1, EVALUE 0.00e+00
tgcttgctttcgttttggagccttatgctttttgtcttttttccctttcaatttctctttcacttttttggtgtgttctcttttaagattttcctttgacccatgtttgtgcttttgtggctttcccctattgttttccgaattggaacaggacccctcagagtcagaagttgatgtgcgctgtttgcttgatttccaagcaccattatcatcaggcagtgaagtatttgtggacgacttggttgtgggtttgactttgatgtgaatttcactaacctctgattcagaatcggatgtggcctcaccttcttccttgtcagaggatggatgggagtcatttttactgtttttagtgacatctcgttctgaatttgactcagagtcccatttactaccagcataattcttccttttgggcttactgccatttctaaggtgatcagaaagattctctttcaaagttcttttttttgaatgagggcattcccgttcagacttggatttttcttcacctctgtttttttcttgtttattatgtgttctttccatttggccctgcttctctttttcctgggctgactgtgtggcc

SEQ ID NO: 11541 - DNA, 512 bp, Homo sapiens
  MAP TO AF178030.1; EXPRESSED IN HELA, SIGNAL = 0.3; EST_HUMAN HIT: BG254038.1, EVALUE 0.00e+00; SWISSPROT HIT: P87000, EVALUE 3.60e+00; NT HIT: gi14747642, EVALUE 0.00e+00
ggatttggtaggccaggcacgtgactcaagtagtgcggattcccaggaacggagagcttatatttactccagaaccgcagccaatcagcttcactctggaagtcattatgtacaaagggaagtccaaaaagtgggtactggtacttttcaatagggctgcctggtggtgaataatttgggtgtttcgcaggtctcatgtacttttctataggactgcctctctcagaacttcctttcccttcagatacggatgaactatttcctggatctccagtactttcctgaggactttttatctgaatgtgcaaaggttgcatccttttgtgaatatccaaagtttggctgaccaggactggctgctgagcagaatggcttttagtcaatgaaccctgggcttcgtatttacttaggctggggagtggaatttctctctggtgactttcagttagatgatcttctgacctcctctctaacgggcttccattgacttgctcctcattgctgcccctctg

SEQ ID NO: 11542 - DNA, 524 bp, Homo sapiens
  MAP TO AP000540.2; EXPRESSED IN HELA, SIGNAL = 0.44; EST_HUMAN HIT: BF929482.1, EVALUE 2.00e-22; SWISSPROT HIT: P75972, EVALUE 2.20e+00; NT HIT: AL163202.2, EVALUE 5.00e-72
cactgctgctgcattctgagtgtttgtccctcagataggattccagaacactgctgctgggttctgagtgtttgtccctcatatagaattctagaacaatgctgctgggttctgagggtttgtccctcatatagaattccagaacacagctgatatgttcggagtgtttgttcctcacctaacattccagaacactgttgctgtgttctgagtgtttgtccctcactttgtattccagaactccgccgctaggttctgaggcttatccttcacatcgaattccagaacactgctgctccattctgaggatttgtacctcacataggattccagaacactgctaggagggtctgaatttttgtccctcacatagaattccagtgcagtgctatgaggttctgaacgcttgtccctcacataggattccagaacactgctgcagggttccgtgtgtttgtcctccacataggattacagaacactgctgctgggttctgagtggttgtccctcacattggattgca

SEQ ID NO: 11543 - DNA, 501 bp, Homo sapiens
  MAP TO AC005940.3; EXPRESSED IN HELA, SIGNAL = 0.19; EST_HUMAN HIT: BF359595.1, EVALUE 2.00e-87; SWISSPROT HIT: Q9XES1, EVALUE 9.00e-16; NT HIT: Y15725.1, EVALUE 0.00e+00
tggcacgcaagaacgccatcgtgcgaagcctgccgtccgtggagaccctgggctgcacctcagtcatctgctccgacaagacgggcacgctcaccaccaatcagatgtctgtctgccgggtgagtgacggccagcttggtgttgctgtgcgttgcagagcaggctgggctccctctctgggtctctcccccacctccttttcagtgagggatggaggagagaatctgtgggctgtcccttggcccagagcaggtccaggttttcacaagatgacagggagactatagcaaatcatgcctgggtagccacatgtcactgaggcctgtgtgtcactgtggggccctggccaggttgctgacagtctgttaacctcagtctcctcattggaagcctggctgtgtgagccctgctaggtaaacgtaaaggacataggagaggctcaagttcagccttggcataggggccaagctgggcctggatccgggttccatcctgccccat

SEQ ID NO: 11544 - DNA, 546 bp, Homo sapiens
  MAP TO AL031667.17; EXPRESSED IN HELA, SIGNAL = 0.26; EST_HUMAN HIT: AL043012.2, EVALUE 0.00e+00; SWISSPROT HIT: P37370, EVALUE 4.00e-04; NT HIT: gi14770873, EVALUE 0.00e+00
agcgtgtctggcaggggcagctgctgtgggcaactagccttgatcaatgcccgtatggatggccttgagagggccctgcaggcagtcaccgagacccaaaggggccccggtgccccggccggggatgagcttacgaggctctctgctgccatgctcgagggaggtgtggacgggctgcttgagggtctggagacgctcaatgggacagagggtggagcaaggggatgctgtctgaggttggacatgggggggtggggagtgggcggctttgggaccatgctggaagagcgcgtgcagagcctcgaggagcgcctagcaacattggctggggagctaagccatgacagcgcctctccgggcaggtcagctcggccccttgtacagacagagctggctgtgctagagcaacggttggtctcactggagacttcgtgcaccccgagcaccacctcagccatcctggacagcctcgtggcagaggtgaaggcctggcagagccggagcgaggccctcctacgccaggtggccagccacgcagcactgctc

SEQ ID NO: 11545 - DNA, 541 bp, Homo sapiens
  MAP TO AC008132.26; EXPRESSED IN HELA, SIGNAL = 0.45; EST_HUMAN HIT: BG773077.1, EVALUE 2.00e-90; SWISSPROT HIT: P14164, EVALUE 1.00e-02; NT HIT: gi14756466, EVALUE 2.00e-09
tgcccacggcattgctaacgaggatgccgtgcacggcatcgctaatgaggactccgtatacgacatcgctaatgaggatgccatatatgacatcgctaatgacaccgtacaaggcacgctaacgaggatgctgtacacgacatcgctaatgaggacaccatacaaggcatcggtaatgaggacgttgtatatgacatcgctaacaaggacactctacaagccgtcgctaacaaggacactgtacacaacatcgctaatgacggcaccgtacaagacatcaccaatgagggcgctttatacgacattgctaatgataccgacaaggcacgctaacgcggacactgtacacgacatcgctaatgaggactccgtatacgacatcgctaatgagggtgccgtatatgacatcgctaatgacaccgtacaaggcacgctaacgaggacgctgtacacgacatcgctaatgaggacaccatacaaggcatcggtaatgaggacgctgtatacgacatcgctaacgaggacaccatacaagccgtcg

SEQ ID NO: 11546 - DNA, 525 bp, Homo sapiens
  MAP TO AL121758.4; EXPRESSED IN HELA, SIGNAL = 0.5; NT HIT: gi14746400, EVALUE 5.00e-01; EST_HUMAN HIT: AI266336.1, EVALUE 7.40e-01; SWISSPROT HIT: P07867, EVALUE 4.90e+00
cagggtcacactggcaagggctccatcacttcctgactgtaaggttagactgctgcatctctctgcgcctcagtttctctacctgtagcgtgggtattataagaccatcactccgcggttgtgagcactggatagtgaaggtacgctctgtacaaccgtgctggccccatgctccgtgggttggggtggcggctatttgcactgccgtcgatggaggaaggaattgaacccaggctgcctgacaggaagagctgaggtgcaggtcggagaccaccactgtcggagctgccacaggggcgccaagctggaaggcgcaaagggtgacgcgctcaaagcgggaaaccctcttcggcgcctcctctcaccgcccctccacttctcgccccctccagggtacgccccgcaccgcctgcccccgagcagctacgatgcggaccagaagccgggcctggagctggccccggccgagcccgcgtacccgccggcggcgccggaggagtacagcgaccccgaaagcccgcagtc

SEQ ID NO: 11547 - DNA, 515 bp, Homo sapiens
  MAP TO AF196779.1; EXPRESSED IN HELA, SIGNAL = 0.87; NT HIT: AF196779.1, EVALUE 0.00e+00; EST_HUMAN HIT: BG014350.1, EVALUE 0.00e+00; SWISSPROT HIT: Q92988, EVALUE 2.10e+00
taggaacagccccctgcccggcatctactctgctagcctttcctctgagtccctacacagatttacacctcccttggagctaacagtgccaggcctcccccacgcatttctacccctgaccgcctagcctaggatagaacctcagctgccctttacatgtcactacctgccacctttatacacacagcttccaaccttgggcccatttggagatgtgaaagtgaaggcttagaaagggctggggtagggagggcactgcacgccttctgcctgatttttctgaccctattcccatgaccctcgcctctcaccccagacctgaaggccttcattctcgtcagtggtccggcagccaggactcccagatgggcttcccccgggcggaccctgcctccgatcgcgcctccctcttcgtagctcgcacccgccgcagcaacagttctgaggccctgctggtggaccgggccgctggtgggggagctggctccccgcctgcccctctggctccctctgcc

SEQ ID NO: 11548 - DNA, 530 bp, Homo sapiens
  MAP TO AL136295.2; EXPRESSED IN HELA, SIGNAL = 0.54; NT HIT: gi14750991, EVALUE 0.00e+00; EST_HUMAN HIT: BF949143.1, EVALUE 0.00e+00; SWISSPROT HIT: Q9Z140, EVALUE 4.00e-18
gcttggccggtgctctgctcccgctgggccggctcagccacacggttgatgatgggggccacattggtggggccgtagagctggatctggggcaggcaacgacggtaggaggcgatgacccctgagatctctgtgagtgaagagaagttgtgaagctggcagaaatgagcagggccccctcctgacactccttaaagcaaggaaatgcttccaggtctgaggactgccctcccctcgagttccttcattaagcagtgggagagttggatggtcccttggcagggagagttgggtgcagatgctgggcctcggccctggaagcctcacctgataaagacaggcctgggatgggtggaagggacaggaagctgggccctggggagtggagtctgtgctcctgtgtggagtgtgtctgcggggaggcggggcaggtgaaaatctccccttttaccttcacattcaggattttccgggtcaaagttgatagcaaagtcatgggacacctgtgagggcaaggcgggagcagtgag

SEQ ID NO: 11549 - DNA, 508 bp, Homo sapiens
  MAP TO AC004449.1; EXPRESSED IN HELA, SIGNAL = 0.57; EST_HUMAN HIT: BG912020.1, EVALUE 3.00e-31; SWISSPROT HIT: O00411, EVALUE 8.00e-06; NT HIT: gi14762748, EVALUE 3.00e-30
tgtgctcagagggaatgcggcgccagtgaacacccacatttcacacagaaggatctcagcacagcagcccgaccttccacctcaggaaaccagaaaaaggagcaaagtcaaccccaacaccaaagcctcatcctgacgagggctctgcaggctgccccccgacgaggccaaaagcacccctgcccagacagattcacgagccccgagaaagaacggaaggaaatgctcaaggcattagcagaatttctccctacttttttggtcattttcaaaatttgagagtcacacgtgatttgtatttgaaaagcctaaaagaattattaaaataaaaaacaaaggacttgaacctgggggctaagagagaaaagtccagtctaaatgagggcaagttcctgtctccaacgaccagggcaggtggcccggctcccggctgcactcacctgccgcgcccagccaagcatcacggcgttgtacatgtccagcgtgagcagcttccgcttctgccgct

SEQ ID NO: 11550 - DNA, 528 bp, Homo sapiens
  MAP TO Z98048.1; EXPRESSED IN HELA, SIGNAL = 0.43; EST_HUMAN HIT: BI559578.1, EVALUE 0.00e+00; SWISSPROT HIT: O75190, EVALUE 3.00e-63; NT HIT: gi11496244, EVALUE 3.00e-79
tgccccaatgaaccctgtgatgtatatcctgtatcatatgaagaaaatttctcaaaaattggatattcactggcagtggagaaaaagtatcctgcatctctgtttctgtttccataggagcttcctggacgatttaacaggtcctcaagcgagtcttcaaagaagtgaaaagaaaatggatccctttcatgaaaaatttctttaaaaacatcatctggcttatggaatgtgaagccgtactcacattcatcatcaaaatgacttccacctccgtttaatccttctgtgccatatttatcataaatgtcccgtttctcatcatttgataatacctcgtatgcctcagctacttctttgaattttctctctgcttcttctttattttctggatttttatcagggtgccatttaagtgccactttatgataagcttttttaatgtcctcaggtgaagcatatctttgcagtcctagaacttcatagtaatccaccatgttttaacagatagttggaagtgggtgtgctggg

SEQ ID NO: 11551 - DNA, 503 bp, Homo sapiens
  MAP TO AC008764.4; EXPRESSED IN HELA, SIGNAL = 0.73; EST_HUMAN HIT: BG760469.1, EVALUE 0.00e+00; SWISSPROT HIT: Q98937, EVALUE 2.70e-02; NT HIT: gi15302708, EVALUE 0.00e+00
gccaaaggcttcggtgctgcagcagctggacagggtggacgagactccggggcctccccatcccaagggaccccctcgctgctctttcagtcctcggaactcacggcatgagggctcctttgcccggcagcagagcttgtatgcacccaagggctccgtgcccagcccctcaccgcggccccaggcactcgatgccacacaggtgccgtcaccgcttccactggcacagccgtccacaccccccgtacggcggctcgagctgctgcccagtgcggaaagcccagtgtgctggcttgagcagcctgagagccaccagcggctggcggggccgggctgcaaggcagggctgtccccagccgagcccctcctgtcccgggcaggcttttccccagactcctccaaggcggacagtgatgctgcctcctcagggggctcggacagtaaaaagaagaagaggtaccgacctcgagactatacggttaacttggacgggcaggtggctg

SEQ ID NO: 11552 - DNA, 521 bp, Homo sapiens
  MAP TO AL353997.2; EXPRESSED IN HELA, SIGNAL = 0.21; NT HIT: gi14723711, EVALUE 2.00e-12; EST_HUMAN HIT: AL045152.1, EVALUE 0.00e+00; SWISSPROT HIT: Q23977, EVALUE 5.60e-01
tgcccctccctgtgtcctggagttggggtccggtcccgagaagactctcagtcacctgtgggtgctgatgaggggagggagaggtctgtggactgagaagggccattggtaggggactctgaacaccaccgctcaggggtctggtcagtgggggtctggtcagcagagattgaactctggggctcagacacagaaaacctgctcagtgaccctttctcctttttcagctcttgccgcacgtgcagagagagaggaacttccagtgcccgctatggagccacagcccacagcatggggaagtccccatccagaggcagtgctgcagctagaggtagctccagagtcctccgggccctgcaccgatacagccaaagaccagcaaagcgacaagctgccagacctcatgccacctgctgtagccactgggctcagccctggagctgagagcatcgctggagatagacgtggcagagaagaggttgcgagcatggccccagccagcagctcccacgctgccccta

SEQ ID NO: 11553 - DNA, 511 bp, Homo sapiens
  MAP TO AC007732.1; EXPRESSED IN HELA, SIGNAL = 1.2; EXPRESSED IN LUNG, SIGNAL = 0.94; SWISSPROT HIT: Q02788, EVALUE 5.50e-01; EST_HUMAN HIT: AW411169.1, EVALUE 0.00e+00
  unsure 352
  unsure 412
  unsure 414
  unsure 420
  unsure 424
  unsure 436
  unsure 440
gtgaggtccccgggcgtagggacccaggggtgcatgccccagatccagggagccctcgcgaatcccatcacgaagcaccaagagctctgcctggggagaaaagcgagggtcccggcggtgaactagacctaaaaaaagggaacggatcgtgagggcgtcgcccaaagccggggcgagggcgggggcgtggtgaggctgagagctgtgagttcccaaaggcaagtagggttacttaccaagcaaagagaagacaaagtccttggcccggaggagatcggctcccggcttgggcccgtcactccagctctcctgcacacccagctcctggatcagctgggtcaattcctgcagntgcgccccggagcagaagtcgatgtccgtgagcggccgagctggggccgggggcggcggngncccacncagnggggcactcccnccangactgcggaagccatgcggttctatcgctttgggctgcggaaaacacggaagggaggtggctttgctgcca

SEQ ID NO: 11554 - DNA, 509 bp, Homo sapiens
  MAP TO AL031777.2; EXPRESSED IN HELA, SIGNAL = 0.88; SWISSPROT HIT: P45481, EVALUE 8.10e+00; NT HIT: M60747.1, EVALUE 0.00e+00; EST_HUMAN HIT: AA767038.1, EVALUE 3.00e-49
cggccaagcctaagtcggggaagccgaaggttacaaaggcaaagaaggcagctccgaagaaaaagtgaaactggcgggacgttcccctttgaaaattttaaacggctcttttcagagccacccacaggtctcagtcaaaagagctgaagctttttggaggggggagtggggtggagaggggtgcgggtgctgcggtgttgtgcggccacggtctatcctagtcgtgctggttgggggtcagttattaacagctcccagcagcctgggcgcaaggatccttccgtctcagtctcagccacagtcaccggatagctaaggctacttgagccaccaggtcctactttttcttcaaattcccgcggtggtgtgtgattggccggccgatttctgttaaagcgcggcgcttaaaagtggccctgaaaaaattttatttctgacacagggatgtggtgtaaatgctttagtttactttagcgttgaggtgacttcctgagcacatcccgtcctgg

SEQ ID NO: 11555 - DNA, 561 bp, Homo sapiens
  MAP TO AC004889.1; EXPRESSED IN HELA, SIGNAL = 0.2; EST_HUMAN HIT: BE543056.1, EVALUE 0.00e+00; SWISSPROT HIT: O95047, EVALUE 1.00e-76; NT HIT: AF327904.1, EVALUE 0.00e+00
tggccgccaggatgtgtgagtaggagaccagcaccaggcagagtggtcccaccaggatgaacatgcaggctgcaaagatgaccacctggttgagccaggtatcagcacaggccagcctgaggacagacaggatttcacagaagaagtggttgatttcacgaggcccacaaaagggcagtcttaggatgaggctcacatggaccatagccaggagggagccacatgtccaggaagtgatggccagagtgatgcagactttccaggtcatgatgatgaaatatcggagagggtggcagatggccacgtaccgatcgtaggacatcagcaccaacaggaggcattcagtatgtgcaaaactcaaaaagagaaaggtctatgtcatgcagccagcaaaggagatgggcttggctggatgcaggaggttcaccagcatctggggcactgtgttgcaggcataggcgatgttgacgacggccaggtgtgagaggaagaagtacatgggggtgtggagtctggagtccagtgagatgagccccaggatggtcccattccccagcaggg

SEQ ID NO: 11556 - DNA, 537 bp, Homo sapiens
  MAP TO AP000041.1; EXPRESSED IN HELA, SIGNAL = 0.48; SWISSPROT HIT: Q10475, EVALUE 1.20e-01; NT HIT: X53730.1, EVALUE 8.00e+00
ggtttggcacgggctcctcccgggccgcccggcggtccaacaaaggccggccccgacacgcacccggtcttttgtgggagagaaacacaaagaagagggaaaaacacggaggaggccaacagcaccaggacgcgggggccaaccaggaactcccggagccggggcccattagcctctgcaaatgagcactccattccccaggaaggggccccagctgcgcgcgctggtgggaaccgcagtgcctgggacccgcccaggtcgcccaccccgggcgccgggcgcaggacccggacaagtcctggggacgcctccaggacgcaccagggcaagcttgggcaccgggatctaatttctagttattcctgggacggggtggggaggcataggagacacaccgagaggtactcagcatccgattggcaccagggccaagggagcccaggggcgacacagacctccccgacctcccaagctactccggcgacgggaggatgttgagggaagcctgccaggtgaagaaggggccagcagcagcac

SEQ ID NO: 11557 - DNA, 511 bp, Homo sapiens
  MAP TO AL078605.18; EXPRESSED IN HELA, SIGNAL = 0.6; EST_HUMAN HIT: BG956595.1, EVALUE 3.00e-86; SWISSPROT HIT: O00548, EVALUE 8.00e-32; NT HIT: AF222310.1, EVALUE 0.00e+00
tgtgggcaaggacaccctcgttaagcctcagtttccccatctgaaacctgggtcgagtggcacatgctcttgcccggctgttgtggcgactaatgcagccaccagagtgttctgcacagcgcctgtccagatgctggccgtgtggtttctgacttgtagagctagacctggacacctctcgtatttgaggtcctaaaccatgtcaccttgcgctgtggactcattcaggccacagactgtctttggtttgtctggtttctacagtgtcagacagatagatgcttcagagtgactttttggtgaacaaacctacgaggagacacgtgatgttcatgtccctgtgttccaggtgccaagtgtgtggacctcggtgatgcctacctgtgccgctgccaggccggcttctcggggaggcactgtgacgacaacgtggacgactgcgcctcctccccgtgcgccaacgggggcacctgccgggatggcgtgaacgacttctcctgcacctgcccgc

SEQ ID NO: 11558 - DNA, 510 bp, Homo sapiens
  MAP TO AC022517.1; EXPRESSED IN HELA, SIGNAL = 0.47; NT HIT: AF163763.1, EVALUE 1.90e+00; EST_HUMAN HIT: BF907707.1, EVALUE 3.00e-43; SWISSPROT HIT: Q55242, EVALUE 2.80e+00
cgagagcagtgaccgggcggggccggcctgcatggcaaggcggtcctggatgctcagtgacaggttgagagtggtgactgggcggggtcggcctgcacggccgggggtgggggtcctggatgctcagtgacaggtccgagagtggtgaccgggcggggccggcctgcacggcggggggtaggggtggtcctgggcactcagtgacactcgatcatttcagttcattcaggtctggcgggagatgcgggcgggacctttccttaatgcggcctcgggaccatcgcaggggttagggttttcaccttaaccgacgtggtaaagagctgaactccgatgtttacaaagaacttggggctcggggtgcgagctaaggccaggacgtcaccgactgacccgccgcgtgacccgaggtgactctgagtgaggcttcgtttccactcctcaaatggggcagatgtgactggaagagacaagctgtcgcctcctcccgggagcctcgagccaggggag

SEQ ID NO: 11559 - DNA, 501 bp, Homo sapiens
  MAP TO Z98885.1; EXPRESSED IN HELA, SIGNAL = 0.8; SWISSPROT HIT: O95696, EVALUE 8.00e-06; NT HIT: gi11321641, EVALUE 3.00e-48; EST_HUMAN HIT: AL040577.1, EVALUE 5.00e-48
tctgcatcgtcgagaccggccaccccatagggagccacagccacacagtcctcttggtgggcacccaaaacgcagccagtctgaagtgacaggtgctgagcgtaaaatacacatcagatggcaaagaaggtgaaaagcttatatatcctcagtaacgtttaccgatcccatgttgaaatcaactcttccatacactgagtaaaataagacatattattaaagtaaattccacctgcttcttttccatttttcagtgaggctactagaaaatgtaaatgatgtatgcggttgcatgctagtggctcccggaccatgctgatagggagctggcaacacagagcaggacagagtctgctagaaagagcgtcttccacctcctccggacacggcgccagttcttaccgtcttcccaggagaaaggccgccgcggtgccgcagcaggccgctcaggcaggtgcatccccgaggcctcttccaagccgatgctgtccacctcgcgcc

SEQ ID NO: 11560 - DNA, 500 bp, Homo sapiens
  MAP TO AC018761.2; EXPRESSED IN HELA, SIGNAL = 7.6; SWISSPROT HIT: P17275, EVALUE 5.00e-17; NT HIT: U20734.1, EVALUE 0.00e+00; EST_HUMAN HIT: AL574183.1, EVALUE 0.00e+00
gagaacgcggggctgtcgagtaccgccggcctcctccgggagcaggtggcccagctcaaacagaaggtcatgacccacgtcagcaacggctgtcagctgctgcttggggtcaagggacacgccttctgaacgtcccctgcccctttacgacaccccctcgcttggacggctgggcacacgcctcccactggggtccagggagcaggcggtgggcacccaccctgggaccagggggcgccgcaaaccacactggactccggccctcctaccctgcgcccagtccttccacctcgacgtttacaagcccccccttccacttttttttgtatgttttttttctgctggaaacagactcgattcatattgaatataatatatttgtgtatttaacagggaggggaagagggggcgatcgcggcggagctggccccgccgcctggtactcaagcccgcggggacattgggaaggggacccccgccccctgccctcccctctctgc

SEQ ID NO: 11561 - DNA, 502 bp, Homo sapiens
  MAP TO AL034406.1; EXPRESSED IN HELA, SIGNAL = 0.76; SWISSPROT HIT: P13529, EVALUE 2.10e+00; NT HIT: gi5032014, EVALUE 1.90e+00; EST_HUMAN HIT: BG571354.1, EVALUE 7.00e-01
tgcctgtacagctgtgttctcggcctagctcccctggccttttcttcagtgaggtatgtgcaaattaaccataatgacaaacacacacttcccaaagctcttatactttataaaacttgagaattcacttttcacttctgataactcagttagttgtttggtaaagttgtttctcacacagtctcttaatgtcctaattactgagggctactacacctgttatactttaggactaatatccacctccaaatacccaaattccttgctttcagttgttgtcaggcaagtgtttacaacctgaatacagtgagaatctgaagcccattttaccgtaattgtggtccagtgtttaggacaaattggcagttctttcatttttacatgattagaagccaagagaactcttcagagtgagtgaaaagcagcttatcttttaattttaggagaatagtgtgcaaattgcattctttttgatagtttgtgatgaaaaggcagggccagc

SEQ ID NO: 11562 - DNA, 600 bp, Homo sapiens
  MAP TO AL161730.2; EXPRESSED IN HELA, SIGNAL = 0.9; EST_HUMAN HIT: BI769349.1, EVALUE 0.00e+00; SWISSPROT HIT: P70700, EVALUE 2.60e+00; NT HIT: AJ290954.1, EVALUE 0.00e+00
ttggtgttatgcagacaatttggggtaacaatacactctcatcttctgattcctaaatataattgcattttaatattgcatacctttgtgattctgagatgatataatagtatacttttcactattccagcacctgcatttctgaataatcttttaaatttgagttattcattaaaatgtcttggagtgtataaatattactaattaataggagtgaattaattatattatccagcattatttttgagtgagcagtaccacattctgggaagtcttccctgtatttgatttttttttccccctcttctccagaacaaaaagagagtaaatgtgagtcatgccagaatggacaagaagaactgatctccaaatcccatcagctttacctaggatcatcttctaggtctaatggtgtcattgggaaacaaagtatcgggtcatctatttcagaatactccaacaagcctgatagtatcctgtctcctcatcctggagagcaatcaggaggtgaagagagtcccaggtccttatcatcctctgatctggaatcaggaaatgaaagtgaatgggtcaaagacttgactgcgaccaaggcaagcc

SEQ ID NO: 11563 - DNA, 507 bp, Homo sapiens
  MAP TO AC011625.2; EXPRESSED IN HELA, SIGNAL = 0.43; EST_HUMAN HIT: BF953019.1, EVALUE 1.00e-103; SWISSPROT HIT: P51805, EVALUE 1.00e-50; NT HIT: AB007932.1, EVALUE 3.00e-24
gcgaacatgccatccgcctcagagttcttggtcagtttccggctggagatggtgggaaaatactcgggcttcccatccactgccgtggcaatgaacagcttgtcatccaggttgctgtaggagacgatcactccaaagaccgagccgctctcgttgacacctgacagatagtgctccttcttatgataaggctcccccagcttgaagaggtcctccagcctcagcagcttgcagatgccttggtacaggctcccacaggcaatcagcctgttctccttgtagtctatgaggagcatcttgttgacattgttggtggtggtcaggggctcattgcaggtctggacgatgcggggtgggtaacacttggggttgtcctcgtccggccctgtctcatgcgtcaccaagaccttcaggtcgctggagagcttgtaaatccgattgacggcccccaagtaaatgtgtcctgtcctctcatccaccaccaggtgattgaaaccctcggcgggc

SEQ ID NO: 11564 - DNA, 507 bp, Homo sapiens
  MAP TO AC010724.1; EXPRESSED IN HELA, SIGNAL = 0.87; EST_HUMAN HIT: T70163.1, EVALUE 1.00e-121; SWISSPROT HIT: Q9NYV4, EVALUE 1.80e-01; NT HIT: AF266285.1, EVALUE 1.00e-75
cgggagctggagaggttgcgggagctggagaggatgctggagctggggtgggaagccctgtacgagcagcgggccgagccacgcagcggcttcgaggagctggtacgttgccccacctggggaggctgccctcttccctagccctcaaggcctttgtttccccacctgtaaaatggggcattgtagccttcacatgaaatggtacttctaaaggcatctgtgagccagagccctgctctgatggctgtgggagagaggggatatttttctaacctgcctccacccttcccggtgccatgggaggcagacactaagttctggggtctccagttttagtgggtggccactgattgcttctctctgtccagaacaacgagaacaagagcacactgcagttggagcagcaagtaaaggagctggagaagtcgggtgagctgaaagagactgtaacctccgacccatccaagaagatgtgggaggcgggcaccagcctctggggaggggagg

SEQ ID NO: 11565 - DNA, 515 bp, Homo sapiens
  MAP TO AC007564.9; EXPRESSED IN HELA, SIGNAL = 0.78; NT HIT: gi8924119, EVALUE 4.00e-23; EST_HUMAN HIT: AA658825.1, EVALUE 4.00e-21; SWISSPROT HIT: Q9EUS8, EVALUE 5.50e-01
cgcagggatccttggggagggctgccagtggaattggggaaagatcacagggataagaacacttccagctgaactttgtagcaatttcaaccaaatataaagtttcctggacagaatctggaggagggggcaaatggggagtgcagacacaagcacagaagtagaggggctcgaaacctgaaagtcctgctttttttcttagcggggaggcttgtagtctggggcatgttctcagccctgctcaccagctgcctagaaataaactcactgacattgggagggcacggtgggagtgagactggacttttgggccatgtgggagctgggtgaggcctgtcactgccagctttcctccacttccctggcaacctgtatgatgcagcagaggcagccataatctccccgagaacgtaactctatccacctgagaaccacaccatcatctcccacagcagccacagcaagccctgcccaaggacagtctaggcttagacacgcctaaccctgcacccacc

SEQ ID NO: 11566 - DNA, 503 bp, Homo sapiens
  MAP TO AL121757.2; EXPRESSED IN HELA, SIGNAL = 0.61; NT HIT: gi10946717, EVALUE 2.00e-19; EST_HUMAN HIT: BG997819.1, EVALUE 4.50e-02; SWISSPROT HIT: P25931, EVALUE 4.00e-08
gaccccaaagccaatccagggaaaacccaggatttattcagcctgtttgacccaaagcctgtgctgttttcactaaaacacttcactatgccaaatgatgttgctaaaataagatgaagcttgttaaagctggataacaagtacatgaggattcactgtgccactgctttagtgtatgtttggggttagttacaaactaacgtttccacgtattcatcattactactgttggcttccctcccccaccagatatctcgccatcgttcaccccttgaaaccacggatgaattatcaaacggcctccttcctgatcgccttggtctggatggtgtccattctcattgccatcccatcggcttactttgcaacagaaacggtcctctttattgtcaagagccaggagaagatcttctgtggccagatctggcctgtggatcagcagctctactacaagtcctacttcctcttcatctttggtgtcgagttcgtgggccctgtggtca

SEQ ID NO: 11567 - DNA, 504 bp, Homo sapiens
  MAP TO AC005038.1; EXPRESSED IN HELA, SIGNAL = 0.3; SWISSPROT HIT: P57074, EVALUE 2.70e+00; NT HIT: gi14742666, EVALUE 5.00e-47; EST_HUMAN HIT: AW503118.1, EVALUE 3.00e-71
tgccaggcctgtggggagacctgggcctgcatcagccacttctgagccaggttcttattctcaatgttgggatcatagtagagctggtgcagcgcctgcaggacagcacaggactgagcaggtgctggccactctggatcctgccagagcccagaacagaggcgtgacttggtcctgcaaggctgctccctctccctgactggggggctgagcagggagagctcagcgctctgcagtgtttcctgggcctggggtcctgctgatatcttgagagcctgaaccttgcccatgctctaccatatcctcttctccttacagcaaaacattatgggttcagagagggaatctccacaggaaagcaaaaaagaggaggctgatctccccaaaggggaggcacttgagggcaaggcccaggtggaaggaacagcttcacagggatgaagctaagtctgagaagggcatggaacagcttgaggggacttgaccctcccaggcacagctgct

SEQ ID NO: 11568 - DNA, 545 bp, Homo sapiens
  MAP TO AC005300.10; EXPRESSED IN HELA, SIGNAL = 0.27; SWISSPROT HIT: Q69024, EVALUE 6.70e+00; NT HIT: AB038162.1, EVALUE 3.30e-02; EST_HUMAN HIT: AI829583.1, EVALUE 2.00e-04
tgggggagcaggcagtgaggctctccactggtctttgctcttctgtttcctctgctgcccccatgaagcctggcacgtcacacagccccccacaacctgcacctggccaggccactcactctgctcgggcagtttccctgactgcctgacctggcacagccatgctcaggggctactgaactttaaggctgccagagcgtgccagaaggaagaaccttaggtactgttcattcaggatctagtattgtctattattattattatttactgaagagggtcagaatatgtcacccaataggccactttagcagaagaaatatttttagctgaaggcaattaagaagcagcaaatgaagaaagagctctttgcccacctcatctgcctaaatttccctttgtgaaggtgtcgccctcccctctcccgtaccaggagaatcacccttaccaccggaaacagaaagttgttaccaagatgggtctgcacaaaccagccttataaaattgcccttatcttccattagtttcccccatatgtttgcctgccc

SEQ ID NO: 11569 - DNA, 512 bp, Homo sapiens
  MAP TO AL139392.1; EXPRESSED IN HELA, SIGNAL = 0.61; NT HIT: gi15617474, EVALUE 2.00e-03; EST_HUMAN HIT: AW779097.1, EVALUE 2.00e-04
gcctgtcttgcggccctcacctccctttccctgccccccgcgcggcctcagtcaccgtggtgactcgccctgcgtcgcagagggagcacagtccggcgaggggcaggcgggaggacggcgcgggccactccggggccggaggtcacagtgaggtctctacgcaggagccgtggcggtgcagcggccggtggctgtggcccagacacccctcctgccggtggacgatgaggaccggaaagtagagggcgtcgtggtagggcggcggcggcccggcctcctcctcgtcgtcgtcctcgtcgtcccccatgctggcctggctggacagccgcgtctgctccgtggggcagctggcctcgttgacgctcccgctgcggctgcgccacaggcagctgcgccgggagccgtagagacggcccagcgagaagcggctgcccccgcagcccgcgcccccaccgggccccgggccggcccgcgggctggcgcagatgcttagggcgctgcgcgagaagata

SEQ ID NO: 11570 - DNA, 502 bp, Homo sapiens
  MAP TO AC025115.2; EXPRESSED IN HELA, SIGNAL = 0.99; EST_HUMAN HIT: BI093413.1, EVALUE 5.00e-08; SWISSPROT HIT: Q95155, EVALUE 1.00e-42; NT HIT: X94742.1, EVALUE 5.00e-07
tcaggttgcctttctgtgggtccaatgagatcaacgactttttctgtgatgttcccccactcttgtccctctcatgttcagatacctttataaaccaactggttcttcttggtttatgtggctccattattgtcagtacctttttgattgtcctggtctcatacatttacatcatctcaacaattctgaggatcccgaccatgcagggacgctagaaagccttctccacgtgcgcttcccacctaacaggagtgtgcttgttttttggtactgttttcttcatgtatgcacaacccagtgccatcttcttcatggagcaaagtaaaatagtgtccatattctacactatggtcatccccatgctgaatcccctgatatacagcctgaggaacaaagaggtcaagcaggctctgagacggagcatgcagaagctgtctttgtgatcaccgtctccatggatctcctcagtcatcctggacctcgccccaaagcgctgctaccc

SEQ ID NO: 11571 - DNA, 512 bp, Homo sapiens
  MAP TO AL034380.22; EXPRESSED IN HELA, SIGNAL = 0.79; EST_HUMAN HIT: BI828578.1, EVALUE 0.00e+00; SWISSPROT HIT: P46577, EVALUE 1.30e-02; NT HIT: gi14734332, EVALUE 0.00e+00
tccgagagcgattttcccgcaaagaccccacattcgacccactacccgcgagagaaatgcggctgcgccgcccgcccctcggcgtctagcttcgtccccgccgtgagggcgggacttcctctcgttggctcgccgtttccgacgctgtccggaagtcgagttagtctagttagtatcggcctgttatctccttttgcgcgacacggtctcagctgttccgcctgaggcgagtgacgctggccgccaacgaggtatacgtactgggaccctcgccctcagtctcgtctccggcgcggctacctgccccgttttccctgtgagttgacctgctccgggccgcgggccgccaatggcaggggccgctccgaccacggccttcgggcaggcggtgatcggcccgccgggctcagggaagaccacgtactgcctgggcatgagtgagttcctgcgcgcgctgggccggcgcgtggcggtggtgaacctggacccggccaacgaggggctgccgtacg

SEQ ID NO: 11572 - DNA, 545 bp, Homo sapiens
  MAP TO AL022327.17; EXPRESSED IN HELA, SIGNAL = 0.56; EST_HUMAN HIT: BG037038.1, EVALUE 2.00e-50; SWISSPROT HIT: Q15049, EVALUE 5.00e-06; NT HIT: gi15319292, EVALUE 2.00e-50
gaggcgcccgtggatctttgggcttgaggaaatgttcacacacattgtccttgcatatgaaaattagcagatgtggtgtctcctggtgatcccctggggacgagcactggactgagtcaggcttagggggaggggagggtacagcatctgtcttcacctccctgtagccagcggccgccaacccctcacccagctccagagcccctcctggccggggtttctgagacccaggagagaggggtctcatgggaatgccctggagcagcccagatcggccctccgagggtgacgctgagacccacctcgctcaccctggggtgatgcctctgcaccccctgccctgcggggtcagaagctgcacccaccttctttttcttgcagtcctcctcgctggaccgtgcagcgatgatcaccgtggccgccatgagcagctccagcaggagcagcaggatgaggttgaagttgatctgccaaggggcacacacgcttcagcaccgggcccgcctttctcacgccaccgcgcttcagcgtccaccggaccacct

SEQ ID NO: 11573 - DNA, 507 bp, Homo sapiens
  MAP TO Z82188.2; EXPRESSED IN HELA, SIGNAL = 0.42; SWISSPROT HIT: P23757, EVALUE 5.40e-01
acgtgagcatgcacaggcggggacacccagtgtggtggggaagcaagggctgccggggctaggtgagggaccctacccaggcagccactcccacccaacgctggggccccagcagttcctccactcccaccacttgcacaccggccgcatgtcacacctcagtgcccattcactcacggacgcagctaagatgtcccgaccacctactgtgcaccctgcactgggctcacacaaacctggacacacaatatcacacccagcaaaggcagccacacacagcaaaccccacacacacccagacccgcatgttgttggttgctggtgcctggcccacctcccctagccattagtaggctgtccctgacccacccctgccccacaggccaggccagagtgtccatcacagtgccctaccttctctctggctggaaatgtaggcacatgacccgcacctggccaaccatggcaccctatcaccacgtctttggtgattggcccaagggacca

SEQ ID NO: 11574 - DNA, 502 bp, Homo sapiens
  MAP TO AL121895.18; EXPRESSED IN HELA, SIGNAL = 0.39; EST_HUMAN HIT: AW135536.1, EVALUE 5.00e-08; SWISSPROT HIT: Q14135, EVALUE 7.90e+00; NT HIT: gi11067406, EVALUE 2.00e-09
gagcggcaaggcaaagcaggtgtgtcatttgctggtggtggcgccaccttctccatgggggttgtgtgaccctctgggcaccaggtcacaccaaaagctgagggtctttgtggccaagctaacatgggccaagcagagaagcccatcattcagcctgagctacacccaggcccgtttagggaaaaaactcacagggatggataagcagcctctgattgcagaaatgacgaggggccactgaaacatgcttctaaaaactacagagcatgcggccagcccccatgggcggggagcagcggtgggggcgggggctcacgcggccagttaccccagttccagtagcttctgccagcgtggtttcacagcctgaattgggggacacgggctctagttccgtgtgtgcttcctggtaggatgcagaagtgtcctccctgaagtgtctggtagccagaggtatcactgtggaatgtgtggctttggggctggcaaagtcccctggggg

SEQ ID NO: 11575 - DNA, 527 bp, Homo sapiens
  MAP TO AC022432.2; EXPRESSED IN HELA, SIGNAL = 0.44; NT HIT: M61872.1, EVALUE 2.00e-43; EST_HUMAN HIT: BF223897.1, EVALUE 3.00e-31; SWISSPROT HIT: Q03923, EVALUE 3.00e-39
tcacctggggcactgcacagactttacttatttataaattttttacaaatgtattttggtcagaatgcttttgttacatttatatgtctataaaggatttaggatctgtagtattttgctatgtcatcttgtttatatagttggtataagttagatttgtaaatattaatctgagttgagtaaatggaataatttgttatttttatttctttcagctatgtgttctcattttgccaaagaccttaggccagagcaatatataaaaaattctttccaacaagtgatactgagaagatatggaaaatgtggatatcagaaaggctgtaaaagtgtggatgagcataagttgcacaaaggaggtcacaagggacttaaccggtgtgtgacaactacccagagcaaaatagttcagtgtgacaaatacgtgaaagtctttcataaatattcaaatgcaaagagacataagataagacatactggaaaaaatcctttcaaatgtaaagaatgtggcaaatcattttgcatgc

SEQ ID NO: 11576 - DNA, 526 bp, Homo sapiens
  MAP TO AC007324.38; EXPRESSED IN HELA, SIGNAL = 0.44; EST_HUMAN HIT: BI829297.1, EVALUE 0.00e+00; SWISSPROT HIT: Q91684, EVALUE 1.30e+00
gtcccccaaaactggcacggaagacacctgtggaaaagacaagaccttttcccacagaatttatctttaaagtgtatctagattggcagtttcacaactcttaatccatgggggaaaactgctgtggagggaaacacctctgcattgcagtggatcgtggatgctgccatctaccacaccccagtgtgcctggcatgggttggtgagaggctgccaatcaatagcaccacaccaagggaattgcagatgtcataaatagtccacattggcagatgttcatgtctacatttgattaaactgcagatgacatcgataatgcacactggcagatgttcatgtctacatctgattggaaagaagccaggaaagtaacatttctgttcaagacaaagaaaagtgtcttacattggcagcatcttcttttttacagatgtcttgtacagtgtcctcattagcaatgtcatatacagcgtccttattagcgaattcgtatacagcatcctcattagcgatgccatatacagcg

SEQ ID NO: 11577 - DNA, 503 bp, Homo sapiens
  MAP TO AL163152.2; EXPRESSED IN HELA, SIGNAL = 0.38; SWISSPROT HIT: Q15615, EVALUE 3.00e-50; NT HIT: AF042077.1, EVALUE 1.00e-04; EST_HUMAN HIT: AA953020.1, EVALUE 2.00e-41
accctgggctcacagcccccctctatttctttctgggcaacttggccttactggatgcatcctactccttcattgtggttcccaggatgttggtggacttcctctctgagaagaaggtaatctcctatagaagctgcatcactcagctctttttcttgcattttcttggagcgggagagatgttcctcctcgttgtgatggcctttgaccgctacatcgccatctgccggcctttacactattcaaccatcatgaaccctagagcctgctatgcattatcgttggttctgtggcttgggggctttatccattccattgtacaagtagcccttatcctgcacttgcctttctgtggcccaaaccagctcgataacttcttctgtgatgttccacaggtcatcaagctggcctgcaccaatacctttgtggtggagcttctgatggtctccaacagtggcctgctcagcctcctgtgcttcctgggccttctggcctcctatgca

SEQ ID NO: 11578 - DNA, 518 bp, Homo sapiens
  MAP TO AP000345.1; EXPRESSED IN HELA, SIGNAL = 0.9; SWISSPROT HIT: P51142, EVALUE 1.20e+00; NT HIT: AB053119.1, EVALUE 3.20e-02
agcagcttggtgttggggcggcatcagcgggtggagctggagccgatgagaaaggataggccaactagggttcaagtggccaagaccttctatgccctgctctgccagttacagccagcagtggtggtaagcacagccacccggcactgaacaatggcagtgtggccggcactgtgctaagctcatctcagtcactcgctcaccacatcctccaacgagcccatgaggcccagagaggttaggcgagttactggtggtcacacagccgatagtggccaggctggaacttggactcaggctcccaattctcacccaccagcatgtgctgcctctgaggagtttggggttccccttcaggacaactgggagtcacaagggatttttaaggggggtgggtagcagagtctcagtgccctaaatccccaagtcatgctcatggagaaactgctgcatccacctgggagacgtggccagtctgtttttagggtctgagggtcaccttggcctctccgggagct

SEQ ID NO: 11579 - DNA, 556 bp, Homo sapiens
  MAP TO AL096801.15; EXPRESSED IN HELA, SIGNAL = 0.49; SWISSPROT HIT: O34136, EVALUE 6.10e-01; NT HIT: gi14758506, EVALUE 0.00e+00; EST_HUMAN HIT: BG773091.1, EVALUE 6.00e-88
caggtgtgagccagtgcgcccagccatatataacattttaaatctcagctacaaagtgttttcacatacatattctcaactgatttttataatcaatttgagatgcattgtcagtttcattttacaaatggaaaaaaaggaagctgaggcaaaggtcaggcagtgaaaccaaagcatcacagccagtagatcaagctgtagggtgggatccaagtcttcgtttctctcgttctactgtgttgcagcatgctgtcaagaggatgcagtcctggtcggatctttaacaggaatgatgatggtggtgctggaattgttggccctttttctgctctgctcctatgtaacatcttcttggtttttgttcctttccctccccttctgtttctttcagcttggattccttagcaccaccacagctcagccagaacagaaggcctcgaatctcattggcacataccgccatgttgaccgtgccaccggccaggtgctaacctgtgacaagtgtccagcaggaacctatgtctctgagcattgtaccaacacaagcctgcgcgtc

SEQ ID NO: 11580 - DNA, 579 bp, Homo sapiens
  MAP TO AL157955.1; EXPRESSED IN HELA, SIGNAL = 0.22; NT HIT: U95218.1, EVALUE 0.00e+00; EST_HUMAN HIT: BI823897.1, EVALUE 0.00e+00; SWISSPROT HIT: Q61038, EVALUE 2.00e-43
ccctttagccaattgccaggagcctggatttttacttccaactgctgatatctgtgtaaaaattgatctacatccaccctttaaaagcattgatgaattaattagaactttagacaacaaagaaaaattgaaaaagaattctcagtaaaagcgaattcgatgttcaaaacaaactacaaagagacaagacttctctgtttactttctaagaactaatataattgctaccttaaaaaggaaaaaatgaacagcacatgtattgaagaacagcatgacctggatcactatttgtttcccattgtttacatctttgtgattatagtcagcattccagccaatattggatctctgtgtgtgtctttcctgcaagcaaagaaggaaagtgaactaggaatttacctcttcagtttgtcactatcagatttactctatgcattaactctccctttatggattgattatacctggaataaagacaactggactttctctcctgccttgtgcaaagggagtgcttttctcatgtacatgaatttttacagcagcacagcattcctcacctgcattgccgttgatcgg

SEQ ID NO: 11581 - DNA, 503 bp, Homo sapiens
  MAP TO AC022150.5; EXPRESSED IN HELA, SIGNAL = 0.74; SWISSPROT HIT: P51522, EVALUE 1.00e-67; NT HIT: gi14758035, EVALUE 6.00e-56; EST_HUMAN HIT: BE161630.1, EVALUE 3.00e-43
tcgagcaaaggtcttgccacactcatgacagttgtaaggtttttctccggtatgaagtctacgatggcccacaagggatgacttctgactgaaggtcttgccacactcattacacttgtaaggtttctctccagtatgaagcctataatgacatgcaaggtgtgctttttgattaaaaaccttaccacattcattacatgtgtaaggtttctctccagtatgaactctctgatgttgtgcaaggtatgaatcacgctggaaaaccttgccacattcattacatgtgtaaggtttctcttcagtatgaactctgttatggcgtgaaaggcatgaattatgcctaaaagctttgtcacaaaccttacatttgtatggtttctctccagtatgaattcgcctatgtgtttcaagttgtgatctgcaactgtaaactttgtcacatccttcacatttgtaaggtttctctccagtatgacgtctacgatgccctacaagggatgacg

SEQ ID NO: 11582 - DNA, 512 bp, Homo sapiens
  MAP TO AC002080.1; EXPRESSED IN HELA, SIGNAL = 0.82; SWISSPROT HIT: P08581, EVALUE 1.00e-20; NT HIT: gi4557746, EVALUE 4.00e-85; EST_HUMAN HIT: AA005247.1, EVALUE 8.00e-81
ccacgttaaacaaccagcaaggggttaagaaagaaagttgctatgttttttctttcattgctgaatgagtctaacttagttactgtatcaaccttaatacagaacattgtttgcatctcaatggttctctaaaattattcgttcatggcttgagttctaaaattaaactatgtggagtcatgtccaaccgcacaatgcatctttatgtgaaacttgctagagtttttgttttccttctatgtaaaagtccagttgggaagctttatttctgatagattaaatggtataggtctttcagttttctcttcatttctgacaactgaactgctctcgccttgaacctgttttggcagataaacctctcataatgaaggcccccgctgtgcttgcacctggcatcctcgtgctcctgtttaccttggtgcagaggagcaatggggagtgtaaagaggcactagcaaagtccgagatgaatgtgaatatgaagtatcagcttcccaacttcaccgcgg

SEQ ID NO: 11583 - DNA, 511 bp, Homo sapiens
  MAP TO AC023490.4; EXPRESSED IN HELA, SIGNAL = 0.39; SWISSPROT HIT: P11087, EVALUE 1.60e-02; NT HIT: gi11427757, EVALUE 0.00e+00; EST_HUMAN HIT: AU125898.1, EVALUE 9.00e-59
ggccctgtgacgtgcgagtgtcaccgggcaccctagcggcgccctctcctcccggggcctcgctggctgtgccctggatggaaaggtcccgcccctcatggcccggcccggctctcccctggctgcggtcggcatcctggccaccctctttccccaccacccgcatgttcttgggagtggatggcctcacttggcagccgcctctatgcttccttttgcagccaggagtgggtccagtgttttagagagaggggccttggggctgccggtctggctgctgaggccaggtggtgaaagtgggccctgggcagcctgagggcagctctcacctctggccagcaaacttctagactgcaccttgagggccaaaaacgtccagatttcctgctcaatgctgtcgtcgctgtccacggagctactgtcaccatcagagcgggaaggcacgttgggggagtagaagagtgggcttgcggacagggacccatcgctgccctccatagggccggcagga

SEQ ID NO: 11584 - DNA, 507 bp, Homo sapiens
  MAP TO AC006453.3; EXPRESSED IN HELA, SIGNAL = 0.36; SWISSPROT HIT: P21918, EVALUE 5.00e-10; NT HIT: M76064.1, EVALUE 0.00e+00; EST_HUMAN HIT: BE746231.1, EVALUE 2.00e-66
tagggtcagcaggcaggcggtgaccacctgcacgggccccagtggcggtgcccccgccgagccccccacggcgttcccctgcgccagctgctggtatagcgctaactgccccgggtacgcggtgccgttgctccttggcggcagcatttcgggctgggccgcagagtcggtttgtgcgcgatcccaactacagccctgcgacccccaggcagccccatcgggcaccccgaggatgcgccccctcagccaagggaccctcgagccccagagggcgctcaccatgagctgcgccgggtcccggagcgcgcggggacttctcttgcctcctgaagcgcctctggctcggtggccgtggtgcgcccctccagtctccgcgatgggcacaggaagcggctggtgcccgctgacagccagggctgttctcgggagtctgcggcgcgccagatggcagcgacagcggctgtgtctggttcggagcgagagaagagagcaagccgccactgaggg

SEQ ID NO: 11585 - DNA, 509 bp, Homo sapiens
  MAP TO AC012313.5; EXPRESSED IN HELA, SIGNAL = 0.38; EST_HUMAN HIT: BE296973.1, EVALUE 0.00e+00; SWISSPROT HIT: P55317, EVALUE 1.20e+00; NT HIT: gi16162715, EVALUE 0.00e+00
tctctgggccacccccaacccatgcctgcatccctctcaccttagcatccactgtcatatcacatgaagccgcaccacagtgcagtgctgtgactgtcggcctcctactggctctgaatagtctcggccccactagagttcagccaccacgtcctccccctgatgttgctgcagtgctacctctttggggatggaggtgtgatctgtgggtgaactggcaaatcctgtccccacgtgcaaatgaaatcacagccaaagggcctcccttgtccctgactagcaagcacgggactttttctctgctgtggatctgcagaggacatatgccctttagctgtggaagggattcacagaaggccagggctgcaacctgtgacctcagacctccgctggctgcgagacggcggctgggcccgaggcgggagtgggctcggtttccttcgctggcgcaccttctgatgatgccccggcaacagacctggcctgggggtgcaggctggccctggatc

SEQ ID NO: 11586 - DNA, 500 bp, Homo sapiens
  MAP TO AC005754.1; EXPRESSED IN HELA, SIGNAL = 0.69; EST_HUMAN HIT: AU131635.1, EVALUE 0.00e+00; SWISSPROT HIT: Q9Y5E4, EVALUE 1.00e-50; NT HIT: gi14861873, EVALUE 0.00e+00
tctgtcgccccgcacatcacctcccggtctagtttttcatatagaagcaaattgccggtctttatatcaagctgcaagagctctttgtttcctttgtaatgcattcgcgcgccccgagtggccagttcccccaccccaagacccaggtcttttgccaggttggccacagaatagccactttctgtttcttctggtatggaatacctaactgcctcagagccagcctcccacaaaagcaacaatatagcaagaaacataacttgccttttctgtggcgtttttgctagcgcagtctccattgttcagacccggtccagaaggcgcagtttaactccgtacacaatccacccagatgatttgcataaataaccgcgaatccgatctttcttgactgatttccacaagaacgaagcccaccctgaagatctagccactagatcttacctaaaatgcgtccttcttttagagtttggattccccagcttaatggcgtctgagtt

SEQ ID NO: 11587 - DNA, 500 bp, Homo sapiens
  MAP TO AD000092.1; EXPRESSED IN HELA, SIGNAL = 0.19; EST_HUMAN HIT: AI758227.1, EVALUE 6.00e-20; SWISSPROT HIT: Q13351, EVALUE 5.00e-21; NT HIT: U37106.1, EVALUE 0.00e+00
ggcagagctggcagcggaaggggcgctgccccgtgtgtttccggtagtggcgggtcagctcgtccgagcgcgcgaatctccagccgcagccttcccacgtgcaggcgtatggcttctcccctaggggacaaggaagccataagcgccactgtctgcccagtcatgtccccgggtcccctgcatctggccacacccctttactcagcctgggctgggactaggatgaacaaagtgaggcccctagggcacaaaatttaaggaggcactcactctcagaggccagccaagtccaagtcccgccctctgcaacccttcttcccctgtaactacagcgggcgccgcgccctttctcatgtccggggccccgccccctcacctgtgtgcgtgcgcagatgcgccttcaggtgggagctcttggtgtagctcttgccgcaacccgggtgcgcgcacgtgtgcgctgcctgcctcttgcgcgcccacgaacgtcggcctcgcttgga

SEQ ID NO: 11588 - DNA, 534 bp, Homo sapiens
  MAP TO AC005343.1; EXPRESSED IN HELA, SIGNAL = 0.5; NT HIT: AF024588.1, EVALUE 5.10e-01; SWISSPROT HIT: P14770, EVALUE 6.00e-03
ccacaggcaaacttggcgggatacaaagcccaggtgtctttactgcccttatgtaacctaagaaagggagatccagttcagtgagtcctaggagaaagtggggagctggctgggggaggggatgcagagcagggaggggagggtgggggtggagggagcagcaccagcctctctcccattggcaggaagggtgatggctcatgtgaggggaggcttgtgacttttctagccgagctggcacagaggcagggtcgcccccttctttcccctggcctgctctctgagtcagcacccagccaccaggaggaaagtgtggggccagaggtgatcgtcccaatccctcgggccccagcagggccggctgcgctcacctcggtaggagaaccactccatccagtgtttgaactcacgcaggttacagtcacactcccaggggttatccccgacctgcagcagctgcaggtttgctaggggttcaaatgtcagccggtccagattctgcagacggttggagcgaagcgagagggagcgcag

SEQ ID NO: 11589 - DNA, 504 bp, Homo sapiens
  MAP TO AL137853.3; EXPRESSED IN HELA, SIGNAL = 0.3; SWISSPROT HIT: Q9UPN3, EVALUE 1.00e-92; NT HIT: AF317696.1, EVALUE 0.00e+00; EST_HUMAN HIT: BF090089.1, EVALUE 0.00e+00
ggcagctcttgccagcacccagcagttccagcaaatgtttgatgagttgaggacctggttggatgataaacaaagccagcaagcaaaaaactgcccaatttctgcaaaattggagcggctacagtctcagctacaggagaatgaagagtttcagaaaagtcttaatcaacacagtggctcctatgaggtgattgtggctgaaggggaatctctacttctttctgtacctcctggagaagagaaaaggactctacaaaaccagttggttgagctcaaaaaccattgggaagagcttagtaaaaaaactgcagacagacaatccaggctcaaggattgtatgcagaaagctcagaaatatcagtggcatgtggaagaccttgtgccatggatagaagattgtaaagctaagatgtctgagttgcgagtcactctggatccagtgcagctagagtccagtctcctaagatcaaaggctatgctgaatgaggtggagaagcgccgctc

SEQ ID NO: 11590 - DNA, 503 bp, Homo sapiens
  MAP TO AL139342.2; EXPRESSED IN HELA, SIGNAL = 0.88; SWISSPROT HIT: O53712, EVALUE 1.20e+00; EST_HUMAN HIT: AW843417.1, EVALUE 4.00e-95
tttccagccgtgggggagtgagaattcagtcctgattccagaacctgtcagttgtccccggggctccataagggaacgggtacaaagcaagtcacctcaggacagcctgagcagcagctgccctcaatgtgacaccatcgtggccaagcctgtggaggagccagcagacacatcctgtcaggtagatacctcctgccagggggacctgcccttgcaccaggaagtggactcctcagatagtgaggtagctgttactctcatcgatacttctcaacccggagacccactgagtctacatgagcccataaaaattgttatcacgatgagcagtaccccaaactccatgacagatttggaaagctccctccacctgagggtggttggcacagagaagaccagtgtaaagtctgacgctgagcccactaacccaggggcggccggttctccaaatgccgagcagatctcaattcctgtaatcaccctggacctgcctgagggtgggg

SEQ ID NO: 11591 - DNA, 524 bp, Homo sapiens
  MAP TO AP000359.1; EXPRESSED IN HELA, SIGNAL = 0.54
gccctggtgagcagcaggttgatgaatgaagtgatttcactgtaacagatttccaagtctaaaatcgaggatgtaaaggaaccctgcttctccccataaatagacaatctcaacttttctcttcttgattttcacttaaggctggatttttttttctactttctcccagatgagtttcattcattcattcattcattcattttttcagtgttttgtttgagagcccacaatgtgcccagcatgagggacagagtatgaataagtcacatgatgttgtttcctgcatggagctcacatttgagccagggggaagagagaggcaataataaagtgatcacatcagcaaaataccagattgtggtcaatgtgatcaataaagcatgtgagctgggtggtgtgatagtgagtgtccacggggtgacgtggcctgagacgtgacagatgggaagaagccagtcaggcttgtggtactatttggggaggtgagagcatgactgagttatgaatggagagggcagcagcga

SEQ ID NO: 11592 - DNA, 511 bp, Homo sapiens
  MAP TO AP001660.1; EXPRESSED IN HELA, SIGNAL = 0.52; SWISSPROT HIT: P10273, EVALUE 3.00e-13; NT HIT: gi15187162, EVALUE 8.00e-03; EST_HUMAN HIT: BF672016.1, EVALUE 1.80e-01
cgggctccatctcattaggccccaaggagcctatggtctcaattgtagtagggcgctgaaaaatagactttatggtagacacaggtgctgaacactcggttgtgactcaaaaaattgggccgttatcaaaagactatgctaatattatcagagccacagttatcacagaaaagacaccttttttcaaatgaaagagatgtatgactggagaccgaaaagtccaacgtaagttcttatatttgccaaactgcccagtgccactattaggaagagacttactacaaaactgcaggctcagatctcctttacaccaagtggagataggaccttaagcctaaggcaaagaaaggttatggtattaacactcacaatccccaaaacagatgaatggagacttcatgaaagtagttgccaggagtatggaagaagatatagtgtggctgaaagagaaaaactattcacagacttacttcttaagttatcaggagtctgggcagaggacagtcccccg

SEQ ID NO: 11593 - DNA, 543 bp, Homo sapiens
  MAP TO AP001710.1; EXPRESSED IN HELA, SIGNAL = 0.46; SWISSPROT HIT: Q60610, EVALUE 3.00e-22; NT HIT: gi15320009, EVALUE 1.00e-118
agggactgggggatgctgggggtgctgctggatcgggtgctcacttcggagttcctgtggatcaccttccccgaggaagcgtgcctggtcctccgcgtcttgtgcgagaggcgcagggagcgggaagtgtgcttgcgccccaggctggcatgcttttctccataaaactcgtgctctacatgttgactttctgcgtttcccatggttttatggtctgcagcaaagcggggggaaaggggagaattgagtcactattagtacaggtataggcatcttagagaaagcgctcagcctgcagggagggcagaacaccttggctcacaggggttgttaggtaagtaacagcacaacttcctatatgcacctggtaggttctcggactcttacctgggagcaggtgaacagtaacatcatctactgagactgccccctgagatgtgaaatgagctcataaatatgagcatcagagagttagacttgtctctgcccagagagaagatggccacaggccatagctgagagcgctgcttttggacagccaga

SEQ ID NO: 11594 - DNA, 518 bp, Homo sapiens
  MAP TO AC002319.1; EXPRESSED IN HELA, SIGNAL = 0.35; NT HIT: AF163572.1, EVALUE 0.00e+00; EST_HUMAN HIT: BG025899.1, EVALUE 3.00e-31; SWISSPROT HIT: P16442, EVALUE 3.20e-01
gggggcagggctgtgtcaaccacacccccctccatgcccccagcatctagctcaacttgccttcccttgattcgtccacttacctgcttcttcactactttcttctctgtgatcctcaatgttcctgcctgtaaaatgggcatgcttatgcagatcaaagatcataagaattcttagaacgtcgctgggcacttagaaattgctcagtaaaagttcacctggcctaggagcataagaatctctaccaggaacatgcttacaacagccgtaagaggctggtactagcattttgggaattggacaaatgaggacccagagggccagagcagagtgacatcttgagatggggagctggtaagtggaccccagcctggctgaccccagcacacagtggggaccctggcaggctgctggtgtagcagtgggtgaccgggtgatcatcactaggtacactcatttcatccagtccttcctggagtcagccgaggagttcttcatgcgtgggtaccgggtgcact

SEQ ID NO: 11595 - DNA, 510 bp, Homo sapiens
  MAP TO AC011904.3; EXPRESSED IN HELA, SIGNAL = 0.85; SWISSPROT HIT: O43869, EVALUE 1.00e-35; NT HIT: gi13937343, EVALUE 0.00e+00
gtcatggttgggggcatccgtgaactccctaattcacatggcgatcttgatgcacttccctttctgtgggcctcggaaagtctaccacttctactgtgagttcccagctgttgtgaagttggtatgtggcgacatcactgtgtatgagaccacagtgtacatcagcagcattctcctcctcctccccatcttcctgatttctacatcctatgtcttcatccttcaaagtgtcattcagatgcgctcatctgggagcaagagaaatgcctttgccacttgtggctcccacctcacggtggtttctctttggtttggtgcctgcatcttctcctacatgagacccaggtcccagtgcactctattgcagaacaaagttggttctgtgttctacagcatcattacgcccacattgaattctctgatttatactctccggaataaagatgtagctaaggctctgagaagagtgctgaggagagatgttatcacccagtgcattcaacgactgca

SEQ ID NO: 11596 - DNA, 504 bp, Homo sapiens
  MAP TO AC004181.1; EXPRESSED IN HELA, SIGNAL = 0.77; SWISSPROT HIT: O70441, EVALUE 8.10e-02; NT HIT: gi14782292, EVALUE 1.00e-111; EST_HUMAN HIT: AU143330.1, EVALUE 1.00e-111
agcacgtgggggtcgacaggatccctctgcttctcgctgctgctgctggcacttctgggcatgttcccgggccaggcgatctgaccaggctgagaaggactcaggttcctgggtttcatgggaggcatcacctgtttgggagggtgggatgggggtagttggagagaggctgtgagaaggtgatgggccccaagaagcagggaagcacagaggagggggcagaggagcctagtgtgacgcattcatgcagatggaaagcagccagtggggaagggcagctgtggatagcagtggacttctcaccttcaaacctccccatgacttcctgccactcgtcctccagctcaccctggagcttctgtctccattcccgctccttggaggcatcatcttcttcctcctcttcagcagaatcccaggggggtccccagcccaaaatttggccaggggtctccccatccttattctttattcccatggcggagggacagcggcttagcagcg

SEQ ID NO: 11597 - DNA, 512 bp, Homo sapiens
  MAP TO AC005500.1; EXPRESSED IN HELA, SIGNAL = 0.79; SWISSPROT HIT: Q02763, EVALUE 1.00e-07; NT HIT: D63483.1, EVALUE 3.10e-02; EST_HUMAN HIT: AI949809.1, EVALUE 1.00e-101
tccacagcggtgtgcgaaggcaactccacgtgctcagagaacgaggtgtgcgtgaggcctggcgagtgccgctgccgccacggctacttcggtgccaactgcgacaccagtgagcgtggggtcgggccggtattggtcggtggggcggaatcctggagagatggggcggggtccaaggtggggcggggtcggatccgccttcggggcgggtccccagaggtggcggctggagtgcgggacgcgggcaggttccggctggctgggggcacctactcaagcaccggggccttccaccccctccgctcctcccctgcagagtgcccgcgccagttctggggccccgactgcaaggagctgtgtagctgccacccacacgggcagtgcgaggacgtgacaggccagtgtacttgtcacgcgcggcgctggggcgcgcgctgcgagcatgcgtgccagtgccagcacggcacgtgccacccccggagcggcgcgtgccgctgtgagtccggctggtg

SEQ ID NO: 11598 - DNA, 503 bp, Homo sapiens
  MAP TO AC010271.5; EXPRESSED IN HELA, SIGNAL = 0.46; EST_HUMAN HIT: BE898853.1, EVALUE 0.00e+00; SWISSPROT HIT: Q9NYC9, EVALUE 5.40e-01; NT HIT: gi14787055, EVALUE 0.00e+00
ggtgccttggacctgctgggcccagccactggctgtctactggacgatgggcttgagggcctgtttgaggatattgacacctctatgtatgacaatgaactttgggcaccagcctctgagggcctcaaaccaggccctgaggatgggccgggcaaggaggaagctccggagctggacgaggccgaattggactacctcatggatgtgctggtgggcacacaggcactggagcgaccgccggggccagggcgctgagccctcgtgctggaatggttgtctggtatctgaactgagcctgctggctggaccaactgtcctcgaaaagacacagctggcttccctagtacagagaacagggcttgggccactttggagagacagaatctagtcctgggcaacttcacatccgtcctcctgtctcagggctggcagggggagcctggaattaccccctagtgatggaatgacagggtctggtggggactgaattccctggccctggg

SEQ ID NO: 11599 - DNA, 526 bp, Homo sapiens
  MAP TO AC004624.6; EXPRESSED IN HELA, SIGNAL = 0.46; NT HIT: M21064.1, EVALUE 7.80e+00; EST_HUMAN HIT: AI651137.1, EVALUE 0.00e+00; SWISSPROT HIT: Q92733, EVALUE 1.90e-01
tctgaagggaggccgagggctctgtcactcttgtaggtgtgacacggcaaaagtcccagagcatgactgtccctgggaccaggtggactgaggactgatagagcagacatgaccaccaaccaggccacacttgggcctgcgttgcaccttgatcgtaatttgcaaggggctgccgaggaagagatgctgaagcacctgcaggaactaggttatttccatagtggtcccgagaccaggtcctgctctcaccaccgcggggaggaagtgagatcttcctgccttgggaggccacccctggatggagctgggagagctgtcagggtgttggaggcctcgctggagagtgggtggagtggagcagccacagagagctggacgccagctggggatggtcagcccaggaggaaattccccaagttcctttctgatgatgttcctgttgttattctaggctgggtggggtggaggcatctccagaagaagccacctgctcacaggatgcctctcccaaacttctgcgcgggaa

SEQ ID NO: 11600 - DNA, 501 bp, Homo sapiens
  MAP TO AL355834.1; EXPRESSED IN HELA, SIGNAL = 0.45; SWISSPROT HIT: P46566, EVALUE 2.10e+00; NT HIT: gi16190317, EVALUE 0.00e+00; EST_HUMAN HIT: BG776298.1, EVALUE 0.00e+00
gccagcttggaaaactgggacgtacaaaggaaaaccacaagtttctatttctatcactgaaaaggtaaaatccatgcagtatgataaacagggtatagcagatacatggcaagttgttggaacagtgacttgcaaggtgagatttttctctggtacttgctttatcgttttatttaacatatggagaaaagttaaatttgctagttgtattttaaataacattttttattttcatcttaagcagcagtttttaaatgggagagtcatgtaaaattttatgttatctttttgcattccttaccaattatattagttatctgtggctgtgtaaagaattgtctcattgtccccaaaatagacatttattattttcatagtttctgtagggattagcttagctgggaactttcagggtagaatcactcatgaagttgcagtcaagttttcagttgaggctatagtcatctgaaggtctgactgaggctggaagatctgcttgca

SEQ ID NO: 11601 - DNA, 504 bp, Homo sapiens
  MAP TO AL355839.1; EXPRESSED IN HELA, SIGNAL = 0.66; SWISSPROT HIT: P07572, EVALUE 2.00e-06; NT HIT: AL163209.2, EVALUE 6.00e-56; EST_HUMAN HIT: BG008447.1, EVALUE 6.00e-29
tccctctccatacagcccaccagaagcaatgtgtcttcagctggcaaggccagcaatatacctttactatcctacctcaggcgtacatcaactcttcagctttgtgtcaaaatcttattcagagagaacttgatcactttttgcttctgcaaaatatcacactggtccattacattgatgacattgtattgattggatccagccagcaacaagtagcaaacacattggactgattggtgagacaacagcatgccagaggaaaggaaataaatctgactaaaattctgggaacttctagcttttataatcaagtggataggatgactcgttctgtggacaccactcagcctctttccttagccacccctgtcattgcccagtgggcctatgaacaaagtggccgtggtgtccagggtggaggttttgcatgagcttagcaacacggacttccactcaccaaggctgacctggctacagccactgctgagtgcccaatttgccagc

SEQ ID NO: 11602 - DNA, 549 bp, Homo sapiens
  MAP TO AL163278.2; EXPRESSED IN HELA, SIGNAL = 2.4; SWISSPROT HIT: P29316, EVALUE 1.50e-01; NT HIT: AL163278.2, EVALUE 0.00e+00; EST_HUMAN HIT: BF674570.1, EVALUE 5.00e-36
cccccatggacctgtgagtgcactgaaatccaaagttcttatgctggatcactcaaagggataaaaatacatttctactcattcttttcttccctaaaggcaatgtcttgtttatccttccttgtctctaaatagataatttaatcaaaatgaactagccagatgatctacaataatcaacattagctgtgaaaattgtttatggaactactcgctacccagcacagatgtattcacatttccttcatagtgcctggattctactagacatcacagaagcacattccctacaaattagtgattatatatattcattgttttttttttgttttgttttgttttttttgccaaatgctttctagattgttgccctatttgttgtttaagaaatgctgacccttttcacaagacagtgctgaaagcgaagaaagaagttcctgcccctcctaaagccaaagccaaagcaaaggctttaaaggccaagaaggcagtgttgaaaggtgttcacaaccacaaaaaaaagaagatccacacgtcccccaccttccg

SEQ ID NO: 11603 - DNA, 511 bp, Homo sapiens
  MAP TO AP001754.1; EXPRESSED IN HELA, SIGNAL = 0.49; SWISSPROT HIT: P02438, EVALUE 3.60e+00; NT HIT: AL163300.2, EVALUE 4.00e-57; EST_HUMAN HIT: BF057518.1, EVALUE 2.00e-53
cctcagcagccagggcacacaaacccacacacctcacaccagcactcacaccacccagtccagcacccaccatggctgacgcctgctgcaccaggacgtatgtgattgctgcatccaccatgtctgtctgctccagtgacgtgggccatgtcagccgagtctcctcccccagcacctgcactggctcctcctggcaggtggacaattgccaggaaagctgctgcgagccccgctcctgtgcctccagctgctgtacccctagctgctgtgccccagccccctgcctggccctggtctgtgccccagtgagctgtgagcccagcccctgccaatcaggctgcaccgactcctgcacaccttcatgctgccagcagtctagctgccagccggcttgctgcacctcctccccctgccaacaggcctgctgtgtgcctgtgtgctgcaagtccaactgctgcaagcccgtgtgctgcgtgtccatctgctctggagcttcctccccatgctgcca

SEQ ID NO: 11604 - DNA, 596 bp, Homo sapiens
  MAP TO AC023112.3; EXPRESSED IN HELA, SIGNAL = 0.39; NT HIT: gi11433869, EVALUE 6.00e-04; EST_HUMAN HIT: AI652410.1, EVALUE 3.00e-03
tcaccctcatcatcatcattgccatcatcaccatcatcattaccatcatcaccatcaccataattaccatcaccatcatcattaccattatcatcactctcaccatcaccaccttcatcatcattatcaccatcattaccaccatcattaccatcattgctattatcaccatcattaccaccaccatcatttgtcatcactatcaccaccaccaccatgatcataaccatcaccaccaccaccactatcaccaccatcatgatcatcattatcatcctcctcctcacatttattggacacttactatgtgctagatgctcacatatcctactggtagacattttcgtcattgctgttttacaggtaaggaaactgaggcttagtgtggtaaaataacatacttaaatcatatagctagtaggtggcaaagctaagatcaatatgacagctatgatttctaccaccaacttttaaagagcaggaagctccactgtcattttcacacatttgattgatggaacaaatcaatccatcattcaggtgaaagtaggaccccaagagttagaggaacagctaggtcctccaattgtcaaccg

SEQ ID NO: 11605 - DNA, 502 bp, Homo sapiens
  MAP TO AC000026.3; EXPRESSED IN HELA, SIGNAL = 0.39; NT HIT: Y07848.1, EVALUE 0.00e+00; EST_HUMAN HIT: BG753436.1, EVALUE 0.00e+00; SWISSPROT HIT: Q99501, EVALUE 2.00e-03
ggcaccagccctaagccatgcacataacccactctgaggtcaggacctgggttcctttcgtgtccactgggggccttagccgttgtcttcacttctctaggtcccagcccttcacaatgggcgcgcctccctgcctgagagggaggccccagccaagccccagtttccaccgcaaaaagccacacagcaaacacttaatggaccctaaatttataaaaattatcccatagagtcctatgaggcagggaatgttactgtacccatttcgcagatgaggaaacttggggcaccgacatttcccagagccaacatgtaaaccaggcatttggcctgagtgacagactggtgcaggtggccagcagcttaatttgtactgagcgcttactgggtccccacagcgatcctgaactgtgttcctgcccacagtgactcggccggtccgggcatggcagacccagtggcgggcatcgcgggctcggcggccaagagcgtgcggccattt

SEQ ID NO: 11606 - DNA, 559 bp, Homo sapiens
  MAP TO AC007954.6; EXPRESSED IN HELA, SIGNAL = 1.1; NT HIT: U50871.1, EVALUE 1.30e-01; EST_HUMAN HIT: AL523064.1, EVALUE 0.00e+00; SWISSPROT HIT: P39919, EVALUE 6.10e-01
cgtgcagctgaaacctggcgggacgtcccaggaaggaattgccaaggagtccaagagagacgtaccaagcgaaactgaaccagggatacaccaagaggtaaagtcggaaacatccagagagatgggagagtttttcaaagatttggaggcccctatggatgaaacgcataaagagtcagacctagagccaccagaggaggctaaaccaaatgttacagaggatgtgttcctagagtcagctatggaaacagatccagatccagtgccaccaacggaaaccatgtctgaggtttcgggggccacagtcagagagagaaatttagaattactagaggaggagactgaaccgggggttccagaggaatcacttagagtgcaacatgaagagacaggtctagagcctccagagcagaccaaacaagattttccaagtgagaaactaggagaatcacttgaagagacagatcttcagccaccaaagatgaccaaaccagagactccagaggagacacaaagagagtcaactgagaagaaaaggacagagccacccgagcaggct

SEQ ID NO: 11607 - DNA, 581 bp, Homo sapiens
  MAP TO AC002084.1; EXPRESSED IN HELA, SIGNAL = 0.97; NT HIT: AL163246.2, EVALUE 0.00e+00; EST_HUMAN HIT: BF971469.1, EVALUE 0.00e+00; SWISSPROT HIT: P21414, EVALUE 2.00e-12
cagccacccccgtcatcacccaatgggcccataaacaaagtggccattgtggcagggatggaggttacgcatgggctcagcaacatggacttccactcaccaaggctgacctagctacagccactgctgagtgcccgatttgccagaagcagagactgatgctgagccctcaatatggcaccattccttgaggtgatcagccatctacctggtggcaggttgattatattggacctgttccatcacggaaagggcagaggtttgtcctcactggaatagacatgtactccagatatgagtttgcctgtcctgcacacaatgcttctgccaagactaccatccatggactcacagaatgcccggtccactgtcatggtatcccacacagcattgcctctgaccaaggcactcactttgtggccaaagaagtgtggcagtgggctcatgctcatggaattcactggtcttaccatgttccccatcatcctgaagcagctggattgacagaatggcagaatggccttttgaagtcacaattaaaatgccaactaggtgacaatactttgcagggctggggcaaa

SEQ ID NO: 11608 - DNA, 552 bp, Homo sapiens
  MAP TO AC004382.1; EXPRESSED IN HELA, SIGNAL = 0.5; SWISSPROT HIT: P78423, EVALUE 2.00e-24; NT HIT: gi4506856, EVALUE 0.00e+00; EST_HUMAN HIT: AL536123.1, EVALUE 0.00e+00
gctggccttccttggcctcctcttctgcctgggggtggccatgttcacctaccagagcctccagggctgccctcgaaagatggcaggagagatggcggagggccttcgctacatcccccggagctgtggtagtaattcatatgtcctggtgcccgtgtgaactcctctggcctgtgtctagttgtttgattcagacagctgcctgggatccctcatcctcatacccacccccacccaagggcctggcctgagctgggatgattggaggggggaggtgggatcctccaggtgcacaagctccaagctcccaggcattccccaggaggccagccttgaccattctccaccttccagggacagagggggtggcctcccaactcaccccagccccaaaactctcctctgctgctggctggttagaggttccctttgacgccatcccagccccaatgaacaattatttattaaatgcccagccccttctgacccatgctgccctgtgagtactacagtcctcccatctcacacatgagcatcaggccaggccctctg

SEQ ID NO: 11609 - DNA, 512 bp, Homo sapiens
  MAP TO AL163974.2; EXPRESSED IN HELA, SIGNAL = 0.31; SWISSPROT HIT: P17600, EVALUE 2.00e-03
aggagagggggaggcccagcctagggccctgtgcaccatgggagctcactcagggagggctcctccccaggcagagcccaggacacgaccttcccctctctagcactttctaagccctgaagctcagctctcatttagtgagaatcgatttgggggtgggaggccaagaggccctgccactggatcaatgggcaggcgggcatctgtcaggcagccctggcctgtgaggacgggaggcacagcccccaagagggcacagggatcccagccccatgggaggagaggagtgggtgacggcgctcttggggagcccggaccttggactgactcaggaggatgctctcaggggccagctcccaggcacggggctctaaccctacctgtcccaggcaggacggctacagctccctcctggagcccgggacagaagcccccatcaaggaagctcacagacaggaccttcgaagccacatgccaagccccagccaaggtcggaaccccaagggcaaagc

SEQ ID NO: 11610 - DNA, 503 bp, Homo sapiens
  MAP TO AC005937.1; EXPRESSED IN HELA, SIGNAL = 0.74; SWISSPROT HIT: O78747, EVALUE 3.50e+00; NT HIT: AJ271347.1, EVALUE 1.20e-01; EST_HUMAN HIT: BG012962.1, EVALUE 7.00e-01
gctgtgctggaggctgtggctgacacagacattgtagaggacgtgatgatctcagaggccgtgctgctctcagagccggtggttgaggccacagtggcacagatgctgtggtggagggtgtggtaacctcagaggctgcaacaatagttgtggtggcttctgagcctatggaggtctcagagtccatggtggagatggcgatgatctcagaggttgaggtactctcagagcctgtggttgaggccattgtggacacagactccaccatggtctcaaaggctacagtgggccctgggggcatagtccttcctgaaaaatatcaatttttagtcaaatacgacacctactttacatttttgatatttaattaggagcatcgtgcatatgtctttcttgtttcctttacatcagcagaactgctggtgtcgttaccttttatttggaatcatgtatttcagaggctcagcatttgcagtttcctccgcagctaagggcccggttgc

SEQ ID NO: 11611 - DNA, 520 bp, Homo sapiens
  MAP TO AC007057.3; EXPRESSED IN HELA, SIGNAL = 0.31; SWISSPROT HIT: Q51389, EVALUE 2.80e+00; NT HIT: gi11434816, EVALUE 0.00e+00; EST_HUMAN HIT: BE928466.1, EVALUE 1.00e-130
tgcttgatttctgaatcggtttgttcgtgttcttttctttctagctctgaggtggcagcaatcgaatcagacaatctgtggttattttcctggagagttctaattgttgcatctttttcctgtagtgattttcttagctcttctaactcttgctgaagcaattcagaagattcactcaatacttcagacttacttgctctaagacactctgcagactggggagtaagcaatgatgcagaagacagctggggtgaaataatatcaagttttcctaaaagaagatccttggtattgcaaagctgcccaatgctgtgctgaacttgtgctaattcctgcccaaaatttttgagtttggtttcattctgctcataactttggatcaggccagtatagtccacttgtaatttagaattattatcactgtcaaccaaaacctgtgcttgaagttggtgaagctcttcctgaagctgggctgactcgtgttgcatattttgtactgtggtcatcacctgctgcttcc

SEQ ID NO: 11612 - DNA, 504 bp, Homo sapiens
  MAP TO AP001697.1; EXPRESSED IN PLACENTA, SIGNAL = 2.2; EXPRESSED IN HELA, SIGNAL = 1.5; NT HIT: gi14780106, EVALUE 0.00e+00; EST_HUMAN HIT: BI459665.1, EVALUE 0.00e+00; SWISSPROT HIT: Q9UHI8, EVALUE 5.00e-14
gcgtgggtactggcccaaagctccgagaccccggagcccgctccgcgttccccatgtcgctgcccagcttgcgccttccgaacccctcgggcacagctcgctgcattggagccccaggagacaccgctcgtagcagcgcacggagcgagggacctttagttcgggtcgggagagcaaagcctcgttggcctgctctggattgttaaaattaacaatttctattattcgttggaagggcgcgcagagccggctacagccgaagctcccggagtcactaaaaggaggcgctgcagttctgccggcgcgcgggaagtttttcttccagcgcaaagttggagacactgagaggcaggcgcaggcagagtggctctgctgggacaagaagcgctctggggcgcctccggggctgaggcaacgcggagattggtgcctggcgcccctcttcggcctccgccttggctgcgatgttgctcactctgctcagggctctcccctctccgtccg

SEQ ID NO: 11613 - DNA, 510 bp, Homo sapiens
  MAP TO D87011.2; EXPRESSED IN HELA, SIGNAL = 1.1; NT HIT: gi14518450, EVALUE 3.10e-02; EST_HUMAN HIT: AA558468.1, EVALUE 0.00e+00; SWISSPROT HIT: Q9Y2X9, EVALUE 2.10e+00
agggatgccctgttgggagcatttgactgggaaagggctcaaagactttggagctacttcttgacaatagggagctgatgagatgtcactgtaaaaaacaacctgacagttgatgacattgcttgctagcatctacagccacaatgcacatatggcctagcctcacttctgcctttcggaactcctggaagtcagtcgaacatattttcagctagaatccttgctgcaagggagtctggaatctctagtgttcatagccgtcttctttttagtttttacaggagaagactgagggtcagtgttgctaacaataacggaagccataccacttgatcctggctgaactgaagtttgaataataacttttgtttcactaggcaacccttgcagttgctccggctttttaaatgtttgatggtccttggttttgtgctctatttcctccttcaacgtcaaaaactgtagccggcacttggaacactgaaggaccctccttctgctgtgcctcca

SEQ ID NO: 11614 - DNA, 532 bp, Homo sapiens
  MAP TO AL050313.6; EXPRESSED IN HELA, SIGNAL = 0.5; SWISSPROT HIT: P81274, EVALUE 3.00e-17; NT HIT: AJ011301.1, EVALUE 1.30e-01; EST_HUMAN HIT: AW502388.1, EVALUE 0.00e+00
tgagctctgcactcccctggcaagtcactcagctcctgatatacctccagttcctgtgtgtgataacccagggccttgtcatacttctggatcattcggtatgcagtgcccagggctgcatatgcactggcttctaatcttctgtcctttacctggtgagctaagcccagttgctgctcatagaattttattgcaccatttatatcttttttacagatgaatatatcgcccaggtttcctagggctcgaaatttagcctgggaattattcagagactgggctagggacagtaggtacttctgacactcttcagctttactgaaattcagcagagccttgaatgctaggcccaagttgcagtaggcttttgcttggctcaacttgtcgtgaaggtctttagccagtgccagatcctgttcgtagtacttcactgcctcctgatagtttccaaggcagtaatgggcatagccaagattgtggcagaccttcccttctccttccatgtcttgaaggtcgggagcaagccggaggt

SEQ ID NO: 11615 - DNA, 566 bp, Homo sapiens
  MAP TO AP000511.1; EXPRESSED IN HELA, SIGNAL = 0.71; SWISSPROT HIT: Q10146, EVALUE 9.30e+00; NT HIT: AL161504.2, EVALUE 1.40e-01
tcccaaagatgaagaactggagggcactgagtgagtctaacaggattttctgatctactcagtttgtagagtttgaagttacaaatccaaataaagaaagttgtgtaattacaaattctcaggggaaattttttacccactccattattataaactgtgataatcttattcttcctcctactggtcaggttccatcctgaggaaacgatagaaagccaaagcctaaagagttctgacttgtgtgttgagagatcaaagagaaattgttctgagcttgatcatcgtgacccctcctccccacaagagttggaaccatggttatgctcaggggatattttcacttgagctcacacccaaagctggtgaggctgcaggtctcctccagaaccactccctatttttctgactgtcccgttggccaaaccctctgtgctcttttctctggttcttttcttgattttgatcatgaccatctctatggccaatcccttggagacctcagagaagcccatcctgacccattttatggtcactaccttctcctccatgatcccccttcttcccca

SEQ ID NO: 11616 - DNA, 516 bp, Homo sapiens
  MAP TO AF176678.1; EXPRESSED IN HELA, SIGNAL = 1.1; SWISSPROT HIT: O14423, EVALUE 3.00e-13; NT HIT: AF072467.1, EVALUE 0.00e+00; EST_HUMAN HIT: H16935.1, EVALUE 1.00e-126
ccgtggcgttggcacacatcagcacggtcagccggtccttgccctgcttggggccaggcacagccccgccttccggagtgggatttggcaggcaccgccagaaaaggccggtctcatcagcgttgtaaacctgctcggcggacagcccgtgctcagcagccaagctcctgaaaaacgcacagaactgctccgcggcctggtggtcggctgactgcttttcactggatgcatctagctttttaatgccgtgtctggccttaaagcgccaaagccaccctccggagaacacgcagggctcagtgagctgcatctgctcgtaaaagtccttggccttctcgatgagcatggggcctgacacggggacgccctcggagcgcttccccaggaaccactcgtacaggacgcggtccaggtgctccagcttgggcgtgtgcagcgtgcgccgctgctccagcgccttgttggagtcggagctggcgaagaaccggagcagctgcgccttgtgggccctgatgt

SEQ ID NO: 11617 - DNA, 513 bp, Homo sapiens
  MAP TO AL132857.3; EXPRESSED IN HELA, SIGNAL = 0.45; SWISSPROT HIT: P13983, EVALUE 3.70e-02; NT HIT: AF000297.1, EVALUE 1.00e-63; EST_HUMAN HIT: BI830535.1, EVALUE 1.00e-94
gcgagtttacccccaccccgttcccactcagggctccgcaaacctcggcacactgcagtgcagtcgacctggaggaggccggcgctggtgacccagcttgtgataaactggtcggccagcgcaactaccggtgcggacatgttaagagggccccggggtgggttttttcggggcacgatctcaggcccgctgatgaccgctgtggtatgaatgaggtcaccgcattcggagaggtggatgtccagatgtggactcaggaaatggcctcatcccgaaagtctcgggctagtgggcgtgccctctggccagtgcctccacgcccgcgccagaagggcagcaggccctcgtagggtccggcgtctcacccacccgtgtctcctttgctgtccctagcctcggacgagagcagcctggagaccagcccgccagactcgtcgcagcggccgtccgctaggcccgcgtctccgggctcggacgccgagaaaaggaagaagcggcgggtgctattctcca

SEQ ID NO: 11618 - DNA, 566 bp, Homo sapiens
  MAP TO AP000536.1; EXPRESSED IN HELA, SIGNAL = 0.35; SWISSPROT HIT: P08683, EVALUE 4.80e-01; NT HIT: AL163202.2, EVALUE 1.00e-81; EST_HUMAN HIT: BG009093.1, EVALUE 7.00e-32
gaagccagaagcagtgttgcggaatcctatgtgagtgacaaacactcaaaatccaaaagcagtgttctagaatcctttgtgagggacaaaccttcagaccctcaaagcactgttctggaatactatgtgagggaaaaacactcagaaaccagcgggagtgctctggaatcccttgtgagggacaaacactcacagtcctaaagcagtattctggaatcctttgtgaggggcaaaaactcagaacccagcagcagtgttttggaataccatgtgaggtacaaacacgcagaacccagcagcagggttcgcgaatcctttgtgagggacaaaccttctgaccctcaaagaagtgatctggaatcgcatatgagggccaaacacttcgaacccagtcgcagggttctgcaatgcattgtgatggagaaacattcagaccgtcgtagctgtgttctgtaatcctatgtgagggacaaacactcagaacccagtaggagagttttagaatcctttgtgagggacaaagactcagaacccatcagcagtgttctggaatcctgtgtgcggga

SEQ ID NO: 11619 - DNA, 533 bp, Homo sapiens
  MAP TO AL024496.5; EXPRESSED IN HELA, SIGNAL = 1.7; SWISSPROT HIT: O00482, EVALUE 5.80e-01; NT HIT: AF253322.1, EVALUE 5.00e-04; EST_HUMAN HIT: AI833218.1, EVALUE 1.00e-05
gtgtggagcgtgcggtgtccgcacatgaaacagggtgtaactttacatcatctgcagtccctgctgaccccaatgccaggcacacgcgcagaagccgttctcacaccgtgtggcttggggaagagcaacaataaaaatgtctgtccgtgttcagcacggacgcagccctccactaaaagatatattttccatctgaggttggttgaatccccaaaagtggagttcacggacgcggccggctggctatatcatgcagccataaaagggaaagacgtacagacaccccacagatgagtcccggaaacacggcgcacgatgacacgagccagacacaaaaggacgcacattgtgactccatttacacgacaggtgcagagaaggaaagtccggagacagaacggagcccattggttggcgggggctggggaggggtgggagtgcctggtggtttggggggactccctttgcgctgataaaaatgttctgaaagcgacagtgaagacgttcgcacagccctgcgaatacggcaaagg

SEQ ID NO: 11620 - DNA, 585 bp, Homo sapiens
  MAP TO AF216808.2; EXPRESSED IN HELA, SIGNAL = 3.9; EST_HUMAN HIT: BI763767.1, EVALUE 0.00e+00; SWISSPROT HIT: P38828, EVALUE 5.00e-12; NT HIT: gi14783974, EVALUE 5.60e-01
ctgcctccgctgaagccaccaccagcgcctccttggctggatgctggaagagtcctccatgtgtacggactcaggatgacagggcagcctccttctgtggttgctgggcttgtgaacgttgcagtatcttttggctttccacgtctctaaaatgtttttcaactattttgcgtacatggctcagtgcactcccctctttgcctttacagttttccacttgatatgggggtgtaataacaacttcttccatgactacgatgtttttttcttgccatttacagtctttaatggtcttgtgaatggtctggaagagctgctggccctctagagagacaccagcactgattgcataggcctggctcagcttctcctccttctctgtccgtgctttgctggcaagcttactaacattgagtgaagctaggggaggaggggtttctgttcggtcattaattatttccacttctgaaacatactgtaagtttatgagcaagatgtctgcatggttgggctttccactggaagagggacattttaaagccagcattttggattggtagtcaaaggctaccacctcgccctgca

SEQ ID NO: 11621 - DNA, 519 bp, Homo sapiens
  MAP TO AC016597.4; EXPRESSED IN HELA, SIGNAL = 0.94; SWISSPROT HIT: P36099, EVALUE 4.20e-01; NT HIT: gi15318237, EVALUE 0.00e+00; EST_HUMAN HIT: AW504800.1, EVALUE 2.00e-22
tgggcaaagggacataccttggtggcaatgacaaatacatctatgaatttaccatgcaaaatgtgtcttgcccatttcactcatgtatgcatctctttggcccctgagacagtgattttgtgacccttagttgagaacaaccatcttgttgtgcagataaggaaactgaggtccaggagctaactggcttcatgccaattagaggggctgggatgatgatgcccaagtcgggctgctctttggagcttacctctgctggctggctggtcgtccccatgactactgctgccagcatccttccttgagcccctcctcccactagcagggcgctctctgttggggggctggttaaagatgtctgagtcatcactgtggactttggtggttgccctctggggtctctccttggtgttgacactccggctggtcccccaccctggctcatgccgtaggcctttatccctggcctcggtctctccaggaccctcaccgatgacatcgtctgatgggagcctgccc

SEQ ID NO: 11622 - DNA, 506 bp, Homo sapiens
  MAP TO AC011536.5; EXPRESSED IN HELA, SIGNAL = 0.84; SWISSPROT HIT: Q06666, EVALUE 5.00e-04; NT HIT: gi4503680, EVALUE 2.00e-56; EST_HUMAN HIT: BF515345.1, EVALUE 7.00e-41
ctgcatgggtggtggggaccgtgacattctttgcaaggctctggcttcctatgtggccgcctgccaggctgctggggttgtcatcgaagactggcgggcacaggttggctgtggtgagtgttgggggagcagaggcggggctgggggcggggtcccatctcttcggggctggtttggtttcactctggtccttctgggtctctttgttttcttttttctctgtttgtctctctgtttcttggtgctcgtctctgggcctcgctttgcttgtctctatctgtctgtttctcattctctagctccctcagtttctgcttgggtctcctggtgtctcgccctctcccatttctttctctgtgtcctctctctgtgtcttgttttctgtctccccctttctctgtctgctccctagtgtctctctctgtctcctcccaccctgttctgggaccccacccctaacacccttctttctgtttctctccttcctgctccttcatctgcccaca

SEQ ID NO: 11623 - DNA, 508 bp, Homo sapiens
  MAP TO AF106564.1; EXPRESSED IN HELA, SIGNAL = 0.44; SWISSPROT HIT: P07197, EVALUE 2.00e-68; NT HIT: Y00067.1, EVALUE 0.00e+00; EST_HUMAN HIT: AL537508.1, EVALUE 0.00e+00
tctagcgagcggccaccagggagcgcggcggagagggcgcctgggcacgagcccaagtgtcgggggcgcgcggcgctggcgctggcgcaggctggccgcgcagccgcggttcctacctggtagctgctgaggtcgtggttgtggcgctcctcgatgtcgctgagctgccgctccagggactccttggtgccgcgcaccgactctagctcgatgctcttggactgcagctggcgccggtactcggcgatctcttccttggcggagcggatggcctccttgttctgctcggccgcctcggtgagcttggcgtagcggcatttgaaccactcttcggcctggtgcatattctggtctgagtggctttcgagctgggagcggatttccttcagcgccgtcgagatgtctgtcttcaggtagtctttgcgctccaccgtgatgtgcgatgcctggatctgggccagaaggtcggccacctcctcctcgtggttgctccgcaggaaggccacct

SEQ ID NO: 11624 - DNA, 526 bp, Homo sapiens
  MAP TO AC012398.4; EXPRESSED IN HELA, SIGNAL = 0.49; SWISSPROT HIT: Q91684, EVALUE 1.30e+00; EST_HUMAN HIT: BI829297.1, EVALUE 0.00e+00
cgctgtatatggcatcgctaatgaggatgctgtatacgaattcgctaataaggacgctgtatatgacattgctaatgaggacactgtacaagacatctgtaaaaaagaagatgctgccaatgtaagacacttttctttgtcttgaacagaaatgttactttcctggcttctttccaatcagatgtagacatgaacatctgccagtgtgcattatcgatgtcatctgcagtttaatcaaatgtagacatgaacatctgccaatgtggactatttatgacatctgcaattcccttggtgtggtgctattgattggcggcctctcaccaacccatgccaggcacactggggtgtggtagatggcagcatccacgatccactgcaatgcagaggtgtttccctccacagcagttttcccccatggattaagagttgtgaaactgccaatctagatacactttaaagataaattctgtgggaaaaggtcttgtcttttccacaggtgtcttccgtgccagttttgggggac

SEQ ID NO: 11625 - DNA, 500 bp, Homo sapiens
  MAP TO AL160231.1; EXPRESSED IN HELA, SIGNAL = 0.91; SWISSPROT HIT: P23960, EVALUE 8.00e-02; NT HIT: AB038490.1, EVALUE 9.00e-52; EST_HUMAN HIT: BG194789.1, EVALUE 1.00e-54
gcaggaccaccgctcattggataatggcccaggtgatttaccagatgtgtaataacagtgcgggctgctatagagattaatccatgctgcatttgagttttcactggaaataaaaaatataaatgaatgggaatattgctgcttcctagggaatcatatgacaatgaaatattagacaacaaatagggattttatcacattgttaatatttccagtttagattccataatacagtaatgatggcaaaaaaggaggaaaaccattctttgatgaagttttgtttataaggaagacctttctgaaatttttgctaatgggtccataatttaaaccaaggcctttatatatagatcactttgaagaatcagaagtattataaatcaatcatgaaatcactaatgcacattaaaaagccaaagacggccaggtgctgtaacacatctgaaatctcagcactttgggaggctgaggcgggaggattgcttgagaccagtctgggc

SEQ ID NO: 11626 - DNA, 509 bp, Homo sapiens
  MAP TO Z98883.3; EXPRESSED IN HELA, SIGNAL = 0.61; SWISSPROT HIT: P19055, EVALUE 1.40e-01; NT HIT: gi15317753, EVALUE 3.00e-61; EST_HUMAN HIT: BE171267.1, EVALUE 9.00e-59
actggcagtcggagggcgtggaggccagcatcctcgcggagctggccaggcgagcctcgggacccatttgcctgctgttggccagcctgctgtcgctggtctcagctgtcagtgcctgccggtaggtgtcccgggacaggcaggtggcaaagagtggggtcccatgagtgctggcccatccctttgtctgcagtgggcacagaggcccagatgcgctcttcctgggcccgggccccctcccactcctgcagcccgggctttggccccatcctgctctcccaaccctcgcctctcagagggtgtccctcacccctggggtagagccaggtctctgggcagcctcagggattgccaggggccctcccagaaggtgtagagggtgaacctcagtggcttaggtccctgaaagagaaatcagaaggtgagcacagacatgactactgctgcctgggggtgctcctgagggcacacaggcccgctggcctccctgtagccctgcctgtgccccc

SEQ ID NO: 11627 - DNA, 520 bp, Homo sapiens
  MAP TO AP000346.1; EXPRESSED IN HELA, SIGNAL = 0.29; EST_HUMAN HIT: BG433460.1, EVALUE 2.00e-87; SWISSPROT HIT: P10263, EVALUE 1.00e-12; NT HIT: Y08032.1, EVALUE 1.00e-04
tcctcccgcggttcagatgcctgtaacattacaacctcaaacgcaggttagacaagcacaaaccccaagagaaaatcaagtagaaagggacagagtctctatcccggcaatgccaactcagatacagtatccacaatatcagccggtagaaaataagacccaaccgctggtagtttatcaataccggctgccaaccgagcttcagtatcggcctccttcagaggttcaatacagacctcaagcggtgtgtcctgtgccaaatagcacggcaccataccagcaacccacagcgatggcgtctaattcaccagcaacacaggacgcggcgctgtatcctcagccgcccactgtgagacttaatcctacagcatcacgtagtggacagggtggtgcactgcatgcagtcattgatgaagccagaaaacagggcgatcttgaggcatggcggttcctggtaattttacaactggtacaggccggggaagagactcaagtaggagcgcctgcccgagctgagact

SEQ ID NO: 11628 - DNA, 510 bp, Homo sapiens
  MAP TO AL135818.3; EXPRESSED IN HELA, SIGNAL = 0.58; SWISSPROT HIT: P47708, EVALUE 1.60e+00; NT HIT: U48405.1, EVALUE 1.00e-69; EST_HUMAN HIT: H07993.1, EVALUE 6.00e-29
gcaggcggctctcccagttcttatggctggagctaggatcctcctctgcctataactccctcaattctcccaacccaacaccccctaccttccttctttcctcctcccttccttctccccttcctcctttccttcccccctctttctttccttccccctctttcttccttccccctcctgccttccttccccctccagtcttcccttcccaccctgttgtgggcgggctgcagtgctgatcccaccgggacgtttggacaggcattgtctgtgacaacggtggcattggaaggccctggcagctgaacgcccagcctcccaccctccatgtcctcacactccccatgcacaaactctgcaggaagcaggccagggaacgcagttcactgtcttcccccgaccagcagccccagcctggccacatcgcagccgcggcagaggacacggcttattcccacgagccaaccggggcttattcccaccctcggcggtcccagcgggctcagcaag

SEQ ID NO: 11629 - DNA, 503 bp, Homo sapiens
  MAP TO AC007092.4; EXPRESSED IN HELA, SIGNAL = 0.48; SWISSPROT HIT: P58154, EVALUE 2.70e+00; NT HIT: X64770.1, EVALUE 1.90e+00
tgaaggaaagccaaaggacgagggagaaaaaaaaaacactctttgatgggaaagaaaaacagcaagaaaagagagagacctagaaagatgtgtcatgggaccaactttaatcctgcatcctctgccacatttagcttctctgccatcaacctgccatatttcttcatgggctcggccactagtacttcagatcctcccaggagtcccatggctcttccaaggagtatacaagtggcacagagagtgtggcaacttccaaacattaaagggaaaaaggagtctccttccacgccatcatcatttttaaaaacggcaattgatgtcgcctgaagcggaggctcggaaacccaattataccacatttcattcaagtgtcagaattggaataatagtgcccaacagcaagggcccctgtgtgaaaggacgctgccatattatcttgttttggcccaatgttttcataaatttaggcttggagcagagcccagcgctgctttctttca

SEQ ID NO: 11630 - DNA, 500 bp, Homo sapiens
  MAP TO AL031685.15; EXPRESSED IN HELA, SIGNAL = 1.2; SWISSPROT HIT: Q9UM82, EVALUE 2.00e-52; NT HIT: gi14786324, EVALUE 0.00e+00; EST_HUMAN HIT: BE746201.1, EVALUE 0.00e+00
tccagcttccaagcccagcgccttccccagcaaggcctcgactcatgacagcctggcccacggggcatctctgcgggagaagtacccaggccagactcagggcctcgaccgcctcccgcaccttcactccaaatccaagccctccaccacgcccacttcccgctgtggcttctgcaaccgcccaggcgccaccaacacctgcacccagtgttcaaaagtctcatgtgacgcctgcctcagcgcttaccattatgacccctgctacaaaaagagtgagctgcacaagttcatgcccaacaaccagctgaactacaagtccacccagctctcccatctcgtgtacagatagaccggcctcgccccttccagctccaagggctacatcaaccgacctttcgggtttcacggtgaagaagtactaacgcattgatctcagaggcggaggcctgcacttgaccatgtaggtggcagagatcgtgggctggctgtgtccacgtggg

SEQ ID NO: 11631 - DNA, 509 bp, Homo sapiens
  MAP TO AC012313.5; EXPRESSED IN HELA, SIGNAL = 0.46; SWISSPROT HIT: P52740, EVALUE 5.00e-50; NT HIT: U09411.1, EVALUE 0.00e+00; EST_HUMAN HIT: AI627269.1, EVALUE 0.00e+00
ggccctgttggcctgtcagcaatccctgggacctcttcttgggtgtgaattcctgggtaacatttctaatgaagtcaaccattcccaccaagtggaattcttagttaactggcatttctctactttcaggttcttggcatggagtagagggtgagggggcccatcccaagcagaatgtttctgtagaagtgttacaggtcaggatccctaatgcagatccttccaccaagaaagctaactcctgtgacatgtgtgggccattcttgaaagacattttgcacctggctgagcatcagggaacacagtctgaggagaaaccctacacatgtggagcatgtgggagagacttttggttgaatgcaaaccttcaccagcaccagaaggagcacagtggagggaagccctttagatggtacaaggacagggacgcacttatgaagagctctaaagtccacctgtcagagaaccccttcacttgcagggaaggtgggaaggtcatcctgggcagc

SEQ ID NO: 11632 - DNA, 570 bp, Homo sapiens
  MAP TO AL031276.1; EXPRESSED IN HELA, SIGNAL = 0.99; SWISSPROT HIT: P18416, EVALUE 1.40e+00; NT HIT: AL162331.1, EVALUE 0.00e+00; EST_HUMAN HIT: BF355896.1, EVALUE 0.00e+00
cgcaaaggactccgtgagctgggttttcaatcattaaacaaaatagaacaaaagactgatgctcctcaccttgacctctatgcaaagattcaaagaaatcatgtcgtgtgaaatgagcttcctcctgactgttggcactgccagacccggaaggtgggcaaaacatccggcttccttcagacccaacagcttctctacctgccaactgggtgcaattcaaagaatacagtttaatgtccttgatttccacctgcagacggtcacttctggattcatcatctcccgccacaaaattctggatgaatatctgtcccaagtgtcccaccaacaactcaggactccccggcttccgagggatagaaacaactggtgattcaatgtttatgttcaagattagctttacagtgtccaaatgagacgaagctaggtcaaacccatatatttcattttcctctaagataaagggttcccgagtcttccttggagtttcaaagagcgataccatctcgctatactcggcagtcttggtagctagtactgtggtgactttggtggctgcgcttttcagca

SEQ ID NO: 11633 - DNA, 503 bp, Homo sapiens
  MAP TO AC002994.2; EXPRESSED IN HELA, SIGNAL = 0.23; SWISSPROT HIT: P14585, EVALUE 2.10e+00; NT HIT: gi14772614, EVALUE 9.00e-89; EST_HUMAN HIT: AW500810.1, EVALUE 6.00e-66
caaggcaaatgtttacagcctgttccctcctttcctcagctcccttcctcttcccttttaccccttctttcctcattcattcttgagctccctgctgtggaatttgatagtttaccagacagcattataacttgggctaggaaacattagagacctaagatttctttcagagttaatattctgttccaagatgaaaatccactagtattcgttgggggctctaagttatgtatcctatacagttatttaggtatttctaataaataattattttaacctagcaattatgttagctaggagcagaaagttaaatctcttaaattcttgtattcttagatgatccagtattcctggaagaagcagggaaagcagaaaaaattgtgatttccagatccacaagcccaactttcaacaaacaaacaaagagagttagctggtcaagctttaattctttgggacagtattttactggtaaaataccgaaggcaacacctgagctcggg

SEQ ID NO: 11634 - DNA, 549 bp, Homo sapiens
  MAP TO AL050336.7; EXPRESSED IN HELA, SIGNAL = 1.2; SWISSPROT HIT: P35526, EVALUE 2.00e-11; NT HIT: AY032602.1, EVALUE 0.00e+00; EST_HUMAN HIT: AA458577.1, EVALUE 7.70e-01
gagccccaggaggacaggggcatctcaatggaagggttatattcatcaacccaggaccagcaactctgcgcagcagaactccaggagaatgggagtgtgatgaaggaagatctgccttctccttcaagcttcaccattcagcacagtaaggccttctctaccaccaagtattcctgctattctgatgctgaaggtttggaagaaaaggagggagctcacatgaaccctgagatttacctctttgtgaaggtaaggtctgcctctgacaggcataccctgttcatgcagatattatggctggtgttttattttgctctgaatgaccagggaaagattcataatgccatggtccttggatctcaatacatattcaggagtcggagggactaaatcagtcattagagtgtactcagctcttcacaaaattagaggaattggaaggtgcatttaaagcacgtatttaatcactgacttttacataccatgggcaaagtatttttcaaaacggttcacataagtgagccataactgctgcccaaatccttgcca

SEQ ID NO: 11635 - DNA, 534 bp, Homo sapiens
  MAP TO AL031963.12; EXPRESSED IN HELA, SIGNAL = 0.8; SWISSPROT HIT: P32882, EVALUE 5.00e-21; NT HIT: gi14758305, EVALUE 6.00e-93; EST_HUMAN HIT: BG767831.1, EVALUE 0.00e+00
cagggtgcccatcccggaccccgtgccgccccccagagagtgggtcagctggaagccctggagacagtcacagctctctgactccttcctcaccacatccaggaccgagtcgaccagctcggctccctctgtgtagtggcccttggcccagttattcccggctccactctggcctgccagagggaaagtgaacattagacactaaaacataaggaatttcaaaatctgtcattttgactatggaggagaaggtaggactggtcttagactggcagattcttctcttttgaatactcttcttttacctgaagaaatatttttctatgtcagtgacctcaaaaacactggggatcataataaagtaagaagtaagtttagctcatctgaggctattgattgaggaagaggatagggttagaaaacttaattggttctgaaatacatacatttttaagaggcattctctttatactcaactacaattaaacaggcaaggtgaaggcagtgtgaccagcagagaaggtggcctcagca

SEQ ID NO: 11636 - DNA, 526 bp, Homo sapiens
  MAP TO AC018762.4; EXPRESSED IN HELA, SIGNAL = 0.65; NT HIT: gi16306589, EVALUE 0.00e+00; EST_HUMAN HIT: BF846665.1, EVALUE 0.00e+00
agatcgtggccgccaactgctttgacctccagacgctgaatgtccaggactgcgaggtctccgtggaggccctgcgctttgtcaaacgccactgcaagcgctgcgtcatcgagcacaccaacccggctttcttctgaagggacagagttcatccggcgttgtattcacacaaacctgaacaaagcaaatttttttaaaagcagcgtatgtaagcaccgacacccactcaaaacagctctttcttccgggaaggttattaggaatctggcctttatttttcctcatttctcatgggcaacagaggccaaagaaacgaagcaagacaaacagccaaacaggcatttaggtcaggtcatttgtaggcagtttctcttctcacaaaagatgtacttaagcaggctgatcgctgttccttgagcaaggcgcttactctcctccgctcaggcccccaaggcctgccctttccctcgcacacaggccccacccccacagttccacgccccccccccaaggccacaccctccct

SEQ ID NO: 11637 - DNA, 529 bp, Homo sapiens
  MAP TO AC005629.2; EXPRESSED IN HELA, SIGNAL = 0.77; SWISSPROT HIT: P21918, EVALUE 8.00e-77; NT HIT: M67441.1, EVALUE 0.00e+00; EST_HUMAN HIT: BE746231.1, EVALUE 0.00e+00
aaaccgcaggctggtgtcgggcgcgcagcctgcgctgctccggcagctctgcacgtgctctgcggccctctccagggaggaaatcctgcggatctgcacctgggcgatgcggtagatgcgcgtgtaggtcacgatcatgatggccatggggatgtagaagctgatgagcgaggaagagatggcgtaggttcgattcaggctggagtcacagttctctgccctcacgtcgggctcccaaacggcctcctcccagggcgtccagttggccaggttgtttggcaggtccagcccacctcaagagaccgcctggtccctgtgccagttgagctggaccggaatgaaggagatgaggctggacaaggtccaggccgggcggaccatgaccaaggccatgcgctgggtcatcttgcgctcgtagcggaagggcctggagatggcccagtagcgggccacgctgatgacctgctgacgcacaggttcaggatggaggcggtggagcacatgatgtcgaaggccacccagacgtcgc

SEQ ID NO: 11638 - DNA, 541 bp, Homo sapiens
  MAP TO AC009466.2; EXPRESSED IN HELA, SIGNAL = 0.46; SWISSPROT HIT: P13595, EVALUE 5.10e-02; NT HIT: X07198.1, EVALUE 6.00e-53
acgggcctggggcctacctcttttcttcctgcacatcagtgcctttctggtagggactcagcctggcactgaataacacaccgactgggggccccagggtggctgataagggcaccttggccttcttagcctgcttcccaagctattctcatcagtggcctgactgcaagggctcccccagggaaaacagaagccgctgctaggatgataaggataaaacataattaacatggcctaattagccagcaggcggctgctcctggggcccagctgcctgtcctgctctctctgccttatcccagccccttggttgacggtcgcctcagagaagccctggatgaggctgaagacacatctaacaaggaggacacagcacagcacaaatgcacaccaccacaggacacaacccgatgacagcagacaaagagaggccgtactcggtctttgctggcgcaggcgaaacagagctgtctgcagtggaaggagcaagctcaggggcttgtccactggccccagcggcgggagcaggagagcccagggc

SEQ ID NO: 11639 - DNA, 501 bp, Homo sapiens
  MAP TO AL163636.2; EXPRESSED IN HELA, SIGNAL = 0.23; SWISSPROT HIT: P21414, EVALUE 2.00e-06; EST_HUMAN HIT: AA403053.1, EVALUE 1.00e-118; NT HIT: AL163209.2, EVALUE 0.00e+00
tcccacttacaatgggtccccggactcatcctacggtcatttccttagtgccaaaatgtgtaattggcatagacatacttagcagctgggagaacaccacattggctccctgactggtagggtgaggactattatggtgggaaaggccaaatggaagccattagagctgcctctacctagaaaaatagtaaataaacaacaatatcatattcctggagggattacagagattagtgccaccttcaaggaatggaaagatgcaggggtgaggattcccaacacatccccattcaactctctcatttggcctgtgcagaagacagatggatcttgaagaatgacagtggattatcgtaagcttaaccaagtggtgagtccaattgcagctgctgtaccagatgtggttttattgcttgagcaaattaacacatctcctgatacctggtatgcagccattgacttggcaaatgcctttttctccattcctgtccataaggccca

SEQ ID NO: 11640 - DNA, 546 bp, Homo sapiens
  MAP TO AL032818.2; EXPRESSED IN HELA, SIGNAL =   1; SWISSPROT HIT: O35245, EVALUE 9.00e-08; EST_HUMAN HIT: BF185609.1, EVALUE 1.20e-02; NT HIT: gi11418311, EVALUE 0.00e+00
agggagggcagcctggatggccctctgagccaggcgcacatcgtagaagaatctggaatacctgagggtcttcaaaattgtcagaaataacaggaaacccaaaattatcctcataatgtgatctacctgagaaactgcatgaaagggaatgaagtcttctgggttcgacaagtaaaaccgaattatgccagtggccaggaaatgtttcctgagaaagagcacaatcaacacagtaaatatgcactttaaagcaaagttgagcaaattatacacacttctcacataggaggctctttcttgcataatgatacaaccctcatcaacaacgtaggctaagaaaaaaatgagaatggccacatacaagtagatttctgctgaagcttttctgtcaaaatcagcaagtgaaaaagagtgcagagatatgcttgtgttgacaactcctaactgagagacttcaaatatgaccgaaatgctacagaacagatttatatctggattaaaagttgttaattccaaaaccacagcccatgtcttctcatccagcca

SEQ ID NO: 11641 - DNA, 528 bp, Homo sapiens
  MAP TO AL162471.1; EXPRESSED IN HELA, SIGNAL = 0.28; SWISSPROT HIT: Q9QXZ9, EVALUE 5.00e-11; EST_HUMAN HIT: BF516449.1, EVALUE 0.00e+00; NT HIT: gi14753049, EVALUE 0.00e+00
cagctcgtgcttcggcatcgtgtccacgctcagcgtggcgctcatctcgttggaccgttactgcgctatcgtgcggccgccgcgggagaagatcggccgccgccgcgcgctgcagctgctggcgggcgcctggctgacggccctgggcttctccttgccctgggagctgctcggggcgccccgggaactcgcggcggcgcagagcttccacggctgcctctaccggacctccccggaccccgcgcagctgggcgcggccttcagcgtggggctggtggtggcctgctacctgctgcccttcctgctcatgtgcttctgccactaccacatctgcaagacggtgcgcctgtcggacgtgcgcgtgcggccggtgaacacctacgcgcgcgtgctgcgcttcttcagcgaggtgcgcacggccaccaccgtcctcatcatgatcgtcttcgtcatctgctgctgggggccctactgcttcctggtgctgctggccgccgcccggcaggcccagaccatgcaggccccctc

SEQ ID NO: 11642 - DNA, 502 bp, Homo sapiens
  MAP TO AC008149.14; EXPRESSED IN HELA, SIGNAL = 0.51; SWISSPROT HIT: P41970, EVALUE 2.00e-22; EST_HUMAN HIT: AA128742.1, EVALUE 1.00e-110; NT HIT: gi11435887, EVALUE 1.00e-120
gctttgtcggccagtgtgcgtgttccacctatggtcactttaggccgctaaaagcaagaaaccaatcaagcatcccactagagtcgacaaaccaaaccctgtctcatgtgcaccccttggtctgaggatggaaaagcagcttcccttcacatttacacagtgacctcggtacgagtcataggacaacgttttgagggacagaaggaagtctctttagttgctcttccttttttgctaagccactgaagctggctgtggcttagatgacaggaatgactcttacctgtgcggtgaagaaggctggggtgagggatcccgaggggagggctgggctgttgagggcgatggagccgatgtcggtgccggagagcaccagcgggggcgctgagatttccaagcctttgggttttttggcctttgggggaagagatggagacttggtcttggagcccgatgacaggttcaagggctccagggaatcggagtcatggcaggcggcctc

SEQ ID NO: 11643 - DNA, 502 bp, Homo sapiens
  MAP TO AL121673.27; EXPRESSED IN HELA, SIGNAL = 0.96; NT HIT: AJ251760.1, EVALUE 2.00e-03; SWISSPROT HIT: P55704, EVALUE 1.60e-02; EST_HUMAN HIT: H68549.1, EVALUE 1.10e-02
ttctcccgggctttcctcggtctcccactcccctcaccctttgtggattttcctgggggattttactttattaaacgttcatgagcagatattctgctgccaggaaagaaaagcaatgaccagagattcggctgtgaaaaaaagaaaatggaggggttgggacaccatatcattcataggaccccttcattccaaagctcagcattgggctgaggcctgggcggagggcaatggagaggtgcagcgtgggggctgagtgcggcttggctgggtccccaccggtggccacggcacctgcaaggccacagggaccccatgcggggaatccgtgggcctctgtcgtgaactgcagccagggaccctgaagggctcgggcagctggggtgctctctgcttctgctgcacgcctggctggtgcctgagcagctctgcgatgcgcatcatggtcggggctgttttggggccgtttccaacaccagcagcgtcgtggctccacagcagc

SEQ ID NO: 11644 - DNA, 574 bp, Homo sapiens
  MAP TO AC018432.4; EXPRESSED IN HELA, SIGNAL = 0.75; SWISSPROT HIT: P12755, EVALUE 2.50e-02
gcttggtgtaccacgccccgtgatattaagcatctgtggaattgggtgattctggattttcatagttaaatatttggtgctcaattctcttttcagatctcttattgttaatctgcctttctgatctttacgtttgggagaaagaggaacatatgaataaaatgaatccagaacatttctttgaaataatttttgtagttgaatgctttgttttgcattagatgcttctagttcttttttctgcttttgcatgattaggcggctgttctccctatgagtgatgacttgagtcttcatttgagattcctctgcctttagagatagaagatgcgggtgtgcactactgcttgtgtccattcttcctctctccttctccagattggcagtcctggccttgtgcatctctgttttctcttcttgcagatgtaaagctctgtttgtgcctatttttaatttcccttctttctgattcacagtactatcattgtccatttctaattttttctgctctagatttatattggtgtttgcgtctgtttgatgtttttcctccagatcccctgattgaaattga

SEQ ID NO: 11645 - DNA, 509 bp, Homo sapiens
  MAP TO AC011530.5; EXPRESSED IN HELA, SIGNAL = 0.47; EST_HUMAN HIT: AW297226.1, EVALUE 0.00e+00; SWISSPROT HIT: P70178, EVALUE 3.00e-25; NT HIT: X84813.1, EVALUE 0.00e+00
ggctgggaggcagcccctacgcggagtggagtggccacaggccctgtcctttttcctcagtccctctagtgccccccgcagtgtgattccccaacaccgatgggatttgggaaggagctcggaatggagccgctggaagaggagacgcgtgcggggagagggcccgggcgggtgcctgtcccgtccacacttagtccccgcgccccgcgggcgcctgagattgtgagctggtcccgggagatgtccgaggacctcggcgcgccggccccagcagtgggcacgggggaagagggctggtggacgggatgtccccgggagagctggacttgcgccgcccgaggcccctcacctcttgcagggcgcgccgcctccggccccggtccggtcgcgctgtcgccggttcttgaaccagttgctgacctgcgtgagcgacaggccggtgagtgtggccaggcggcgcttctcgtccggcgtggggtagcggttgccgcggtagcaggccttgagcg

SEQ ID NO: 11646 - DNA, 506 bp, Homo sapiens
  MAP TO AC005225.2; EXPRESSED IN HELA, SIGNAL = 0.43; SWISSPROT HIT: Q06846, EVALUE 2.10e-02; NT HIT: AE005914.1, EVALUE 4.80e-01
cccagtcttgggcgtgacggtcagggtcgcggccttttgggagaaaaaggacgatgtggatatcggcctccaggcctggagggggaccccagaggctcggagcgctgcccggaccgccggccacatggtccgggactgtcgcggctttgacctccgccaaggtcgaggcggcctggcactggcggccgaggttccgcgctgaagaggagggaggaggggggcccggcctggcaggtcgtggccctgtggggcaaaaccctgcagggccacgtgatgggacctgggctggtcctgcggcgccacttagcaacgggctgcaagaagagacgacttcggagggcccagggtcctttgagctcctagaggtcccgtgtggaaccatctggaagaggtaggatcccctcgcgagtttaccccggacgtgtggcgaataaagttaagcatttttaacggtaagtgccggcctctggccgcctctgaatttcctcactggccaccaggggtca

SEQ ID NO: 11647 - DNA, 554 bp, Homo sapiens
  MAP TO AC006994.2; EXPRESSED IN HELA, SIGNAL = 0.62; EST_HUMAN HIT: BE897311.1, EVALUE 0.00e+00; NT HIT: AF263518.1, EVALUE 2.10e+00
ccacgagccagtgcatgaaagatgtacaaattattctggattcaaatataaccaaagacactaatgtagataaagtacaactacaaaactgtaaatggtatcaagagaatgcacttttggataaagttactgatgctgagattaaaaagggtttattgcactgtactcaaaagaaaattgtacctggccactcaaatgtgcctgttagttcttcagctgctgaaaaagaggaggaagtacatgctcgtttacttcattgtgtaagcaaacagaaaattttacttagccaggctagaagaactcagaaacatttgcagatgctcctggcaaagcatgttgttaagcactatggtcagcagatgaaattgtctatgaaacatcaactccccaaaatgaagacatttcatgaacctaccacaattttgggtaatagtttacctaaatgcactgaaattaagccagaagttaacacattgactgcagagaataaattgtgggatgatgcaaaaaatggctttgcacggtgtacagctgcggaaatccaaagatttgca

SEQ ID NO: 11648 - DNA, 506 bp, Homo sapiens
  MAP TO AL022328.21; EXPRESSED IN HELA, SIGNAL = 0.58; SWISSPROT HIT: P49901, EVALUE 9.30e-01; EST_HUMAN HIT: AI913718.1, EVALUE 1.80e-01; NT HIT: AB007967.1, EVALUE 4.80e-01
gcagaagcagggagggtgctgcaggccgctctctcagaggcgctctgtgcagaagcagggagggtgctgcaggccgctctctcagaggcgctctgtgcagaagcagggagggtgctgcagcccagctgcagaggccccacagcgttagttggccactgggggcggctggagtggggaggggcacttcaaagggcaaagaagtagcaatgtcatctggcaaaagtgacattaaataactgcaattaatacagaattgaaacctaaatacttacattctaggaaagatacataatgttaatttttttcaacagaaatagggacatgagatggggaaatggcagtttgctgatttccacatctttcactgggaggggttcacggtgtcacttgtgaaatccgtgtcttgagagttacacattgatacctgaagtgaaaggtgtcagctgaccgtgagtggatgcaggacatgttgggcccagcactgctgtaagcaggagcccgccccc

SEQ ID NO: 11649 - DNA, 511 bp, Homo sapiens
  MAP TO AL137790.1; EXPRESSED IN HELA, SIGNAL = 0.98; SWISSPROT HIT: Q63734, EVALUE 2.10e-02; EST_HUMAN HIT: AA400737.1, EVALUE 4.00e-18; NT HIT: gi14739513, EVALUE 2.00e-18
aggtggcacggcatggaagcatctaacaaaacccaccctagtttccttcctctcaaccctgcctgcccccatcagaagaccaaattccagctcttccaggaccgtagtcctgtgtggagtggagggcagctgaagatagggcagcctgtgcagaccaaagaagggggtggaggagctgagctgggcaccccactcactggaggggatgcggcaaagcaggcagctgggactgggtccaagtagtaagtcaagtgtgtgcaatctcctgatggagcgtgcaggggagagggtgggagtgtgtaattcccctgcgagccacggaggggggttgagaggaaggcgggaacaatctgcggtggtaaggtaagtcaggctcggtccctgctcctcccggcccctacccaccacccaccacggaccccttgcagacccaagatggggagacacgggctcctgccactcaccctagcggcccgggaggagtagggatcctcgaagagcgcccacatgc

SEQ ID NO: 11650 - DNA, 507 bp, Homo sapiens
  MAP TO AL135999.2; EXPRESSED IN HELA, SIGNAL = 0.91; SWISSPROT HIT: P80198, EVALUE 2.10e-02; EST_HUMAN HIT: BG819025.1, EVALUE 1.80e-01; NT HIT: gi14751069, EVALUE 1.00e-105
gaggctccggcctatgctgcagtggtagagcagcagctccaggctgtctgtgctgaaggcctggcacactaggcagcggaacaccttcagggacaggctgtcgtctgggggtggtgaggtgggcaggctgtcagatgaggaacccaggagctgacttggaggcaggtgggcatcaggggataggcttccaggggctagaggacagagacagattagtggcccaagaaagaaatggggcacggttggttctctatgtggggaggtgggttaatgagtaggatagtgctcagagggacttatggttacctaagtggggagttggtccttgggagaaagcacggaatagagtttggccctggggaggagagaagagggaagaagcacagaagcttaccggatgtggggaacttgcgggcaggtgctcctacgtggtggaaaccattgagaagtagctgggcttccaggggcttgtctggcctcagccccgggccagccaagggagtctga

SEQ ID NO: 11651 - DNA, 511 bp, Homo sapiens
  MAP TO AC005523.1; EXPRESSED IN HELA, SIGNAL = 0.48; EST_HUMAN HIT: AL530855.1, EVALUE 1.00e-118; SWISSPROT HIT: P04404, EVALUE 1.90e-01; NT HIT: gi14764059, EVALUE 1.00e-114
tttcgccggttcccacaagctaggtcgtgtgacgctgcatgacgggaattgtagtcctcaaattgctagcttccgatgccatgcgctgcgactggaacgccaattcccaccatgccgcgcgctcacagctctcaggggctgtcctgtggcctttggggaagtgtagtcttgagcccccaagattccttttctgttctatggagtgggcccgcgcaaaggactccatttcccggcgtgctgccatccgtcgggtcgcggcagccattttgttccgcccgaggagaccctaagatggcggcgagggggacggtgaaggttgcctcccgcccgtccgggctctgatcctccgtctccccgtcccccggcggccggcccatggcctggcggaggcccgaaccatggacctccgcaccgccgtgtacaacgccgcccgtgatggcaagctgcagctgctccagaagctgctcagcggccggagccgggaggaactggacgagctgacgggcgaggt

SEQ ID NO: 11652 - DNA, 565 bp, Homo sapiens
  MAP TO AF230667.1; EXPRESSED IN HELA, SIGNAL = 0.72; NT HIT: gi14748739, EVALUE 1.00e-117; EST_HUMAN HIT: AU142054.1, EVALUE 1.00e-117; SWISSPROT HIT: P01266, EVALUE 8.00e-39
tggaagggaaacggccccagcccagggagaatatcctcctggagccctacctcttctggcagatcttaaatggccaactcagccaatacccggggtcctactcagacttcagcactcctttggcacattttgatcttcggaactgctggtgtgtggatgaggctggccaagaactggaaggaatgcggtctgagccaagcaagctcccaacatgtgagctaacgcatatgaagagttaaatgtgtgtgtgtgtgtgtgtgtgtgtgtatgtgtgtttaacatataaaaaaggatgtctagtgggagggtattgagtgtcaaagctggaatggagtttagagatggctgagaaaacgaaggctcacagaggggaagggacttccctgtatcaacacagtcaggtgttggcaagattgatagagtatattttaaaactttcatataattgattacttcaatcagtgtcttagatttttactggatgtcttctgtgtgcaagcatcttcatcttagagctgatgaaggctataaaagtggagatgacctggccctcgtcctcctatgg

SEQ ID NO: 11653 - DNA, 501 bp, Homo sapiens
  MAP TO AL121829.12; EXPRESSED IN HELA, SIGNAL = 1.2; SWISSPROT HIT: P42694, EVALUE 3.00e-06; NT HIT: gi14769949, EVALUE 1.00e-94; EST_HUMAN HIT: N35382.1, EVALUE 2.00e-59
cgaaggagcagagggccacggcgtcccccactaccaccagctgggactgggcgcgggtcaggacggtgttgagcacgcgggcgtcggtgaagaactcaggggccagtgccccagggctgagcaggctctggcaggtgtgcacagtgctgagcaccacgacccggaactgccgccctgcagggggcacgcagtcaggtcaggctgggtgcgcaagacggtgggaccagccccacccctgccgatgccaggctgaggagtgggccgagccacccggggtatcctggggcagctggcagcacctggccccgctggtcacccacctggcaggatctcaaaactgccgacagacacctggcctaggtcccgcctcctcagctcctgcctcagtgcactgacctgaagacgcagcagggccggggatgagtgctggacgcagtgaggactcggccacccccgacaaggagagggcacccccaccaagctcggggatgagcgcaggac

SEQ ID NO: 11654 - DNA, 544 bp, Homo sapiens
  MAP TO AL138811.1; EXPRESSED IN HELA, SIGNAL =   2; EST_HUMAN HIT: AW562333.1, EVALUE 1.90e-01; SWISSPROT HIT: P13824, EVALUE 6.00e-03; NT HIT: Z35852.1, EVALUE 8.10e+00
tcaaaggttgaccttccgcttctgtttactaaatctccagatggctctatgtgaaatgaatgtgattcctccagctgtccttcactgaacatttttcctgaaacaatgtcatttaatgattctgttttctctgtattatttaacaatgtatgctgtctttcattaatgctcacaaaaaggaagaggtcattttttgtggcttcagttacctgattctcatcaatctgattctttttattggaaaactctgtttctgtgcaagttttcatgtgaacagcagttttcacatctttggcttgtgaagcatgactattctcattgttaagatgaagatgggaaatgttcacattagtgttttctaagtatcccaaacagttattaaattgactgttttgcatatcactcatatttttacacatagtttttcccccagggcttgagttaggtttcaccaacatagacatactatggacatttttatctgagttcttcagaagtagttttgaattagcactaaaagcagcatatgaaacatggtggtcga

SEQ ID NO: 11655 - DNA, 505 bp, Homo sapiens
  MAP TO AL049732.11; EXPRESSED IN HELA, SIGNAL =   1; EST_HUMAN HIT: H39550.1, EVALUE 0.00e+00; SWISSPROT HIT: Q9Y5V3, EVALUE 1.00e-10; NT HIT: gi14760383, EVALUE 1.00e-123
aatttgggggcgggcacaacccttcagttcataacatatttacgctctatcatttcctgtaattataaagacacttaggctaagtgaggttaagtaacttgtccaaggtcatatagcacgtaagtcagcagagctgaaactggagttcagaactgacccatgatagagccccaataactgagaagtttaaaaaagtattgctactagtttaatacaaagcccgtaggttaatacatgattactagggttgttttcttattatgattatcatccccatttcaggtgcagaagaaagaccccaaggactgggctgtgcagtaccgcgaggcagtggagatggaagtccaagctgcagctgtggctgtggctgaggctgaagccagggctgaggcaagagcccaaatggggattggagaggaagctgtggctgggccctggaattgggatgacatggatatcgactgcctaacaagggaagagttaggcgatgatgctcaggcctgga

SEQ ID NO: 11656 - DNA, 500 bp, Homo sapiens
  MAP TO AB016897.1; EXPRESSED IN HELA, SIGNAL = 0.99; EST_HUMAN HIT: BF897579.1, EVALUE 1.00e-27; SWISSPROT HIT: Q61555, EVALUE 7.90e+00; NT HIT: AL163282.2, EVALUE 4.00e-20
ggctcagaacgccggaggtggaccagcgtataaaatcctagggaccaaggttaaacaccgcccttgaccttcacggtacctgcttggatctcttccgaatgtactttctttcctgctctaaggctttgtaataaacttccactcctgctctgaaacttgcctcggtctttttctgccttatgcccctccttcgaattatttcttctaaggaggcaagaattgaggttgctgcggacccgtgcggattcgctgccagtaactcggacaccttccacccctaacacacggacacaatgggcctgcaaccacaattctcctcctggcattcagttgcacaagccactaaagtcttcccttcttgagctagttggagttggctgctgtgtcttgtgcccacgctgactaacactgctccttgtgcagcagccagaagcagagctggcacctgcaccaagcccggccctctgtgcccaagattgccgcctctccagggggcactt

SEQ ID NO: 11657 - DNA, 500 bp, Homo sapiens
  MAP TO AL008639.10; EXPRESSED IN HELA, SIGNAL = 0.4; SWISSPROT HIT: Q99439, EVALUE 6.00e-42; EST_HUMAN HIT: BG823822.1, EVALUE 8.00e-84; NT HIT: gi4758017, EVALUE 1.00e-81
ggagcggaacttcgacgacgccaccttgaaggccagccagtgcctcactgagctgcagatgggcaccaacatatgtgcctgccagtcgggcgcgacaacttagggcacgatgaggcatctctaccaccccaagaaccgtatcctgccctctggaccactcgaccatcagcctccagatgggtgcaaacaaacgctccagccagggggcatgacggctcccgggaccccgcagcacatctacaacaccaaactgggagcccacaagtgtgacaactcctccatgtccctgcatatgggtgacacgcagagtgccaaccacagcgtccagggctttggcctgggccagcagatatactatcccaagtactgccctcaaggcctgcagccagtggggctcccttggatgccggcaactgcccaggaccaggggaggcccccgaggatcccccctgctcccaggaggaggccactactgaggcccccgaacatgctggctccct

SEQ ID NO: 11658 - DNA, 503 bp, Homo sapiens
  MAP TO AC004771.1; EXPRESSED IN HELA, SIGNAL = 1.8; SWISSPROT HIT: P07359, EVALUE 2.00e-82; EST_HUMAN HIT: BF360177.1, EVALUE 0.00e+00; NT HIT: AF395009.1, EVALUE 0.00e+00
cgctggctgcaggacaatgctgaaaatgtctacgtatggaagcaaggtgtggacgtcaaggccatgacctctaacgtggccagtgtgcagtgtgacaattcagacaagtttcccgtctacaaatacccaggaaaggggtgccccacccttggtgatgaaggtgacacagacctatatgattactacccagaagaggacactgagggcgataaggtgcgtgccacaaggactgtggtcaagttccccaccaaagcccatacaaccccctggggtctattctactcatggtccactgcttctctagacagccaaatgccctcctccttgcatccaacacaagaatccactaaggagcagaccacattcccacctagatggaccccaaatttcacacttcacatggaatccatcacattctccaaaactccaaaatccactactgaaccaaccccaagcccgaccacctcagagcccgtcccggagcccgccccaaacatgaccac

SEQ ID NO: 11659 - DNA, 521 bp, Homo sapiens
  MAP TO AP001671.1; EXPRESSED IN HELA, SIGNAL = 1.2; SWISSPROT HIT: P57255, EVALUE 2.10e+00; EST_HUMAN HIT: AI126619.1, EVALUE 2.00e-72; NT HIT: gi14780046, EVALUE 1.00e-72
tgcttctgaaatgccaccaccagtcaattagtcttacagggatcagcaacatgacaatgtgtattagccaacagatgaagctgtacttctaaactatacgagtcctagatgttccaattcacagtttgttgattccatttagtgtaatcattttaaatggcaaaacaaacatggaaattgcttaacttcaatgcttagaagacagaatcccagtgaatgaaaaattttaagatgtctcatttttgctaaggtgaacctgttaaatacaatgtttcccaaatctatgattccacagcaaaattcttgacccattacacatctatacaaatgtacaaaaatcccaaaccacccaacttttacttttctccccattttacttacattcctctctgctgtaatgtggatgctgggtctggacattagcctctggactagagattgtctcttcttttttctgtgcctggttgtgactatgaggccacaatacactgttacgacataaagtggcacctgaatcttgt

SEQ ID NO: 11660 - DNA, 507 bp, Homo sapiens
  MAP TO AC009516.17; EXPRESSED IN HELA, SIGNAL = 0.27; SWISSPROT HIT: P40872, EVALUE 2.70e+00; NT HIT: AB051453.1, EVALUE 0.00e+00; EST_HUMAN HIT: AL551815.1, EVALUE 7.10e-01
gggccgccccttccagtatgcaggtcgctgcagggacccgaggcgacacgcgcctgcaggaggtggcactcctgccgcagctcttcgatctgcttgtccttggccagcggcgcgctcgcctgctccgacaggtcccgagcgcgctggcgggcaaagacttggcacagctccaggccggcgcaactctcgccgggtataggcgcgctcacggcccggaggttggtctcctgcagctcgcgggcgcggtcagctaggcgccgcgcgagcccggtcagctccgcgcgctttaccttgagccgcttcaccttctcgtctgcctggtaggggcagcctgcacgccgcagctgcttgttctcttgcagggtataacagcggcgcgccagcacccacaacgccttggccagcagccagttcagctttatcagctcgtggtggcccaggcccgggggtgagggagtcaggacttcgcagggctggctctcagagccttctcctccccgcgggttg

SEQ ID NO: 11661 - DNA, 514 bp, Homo sapiens
  MAP TO AJ239328.2; EXPRESSED IN HELA, SIGNAL = 1.1; EST_HUMAN HIT: BG948920.1, EVALUE 2.80e+00; SWISSPROT HIT: P45181, EVALUE 4.20e-01; NT HIT: AL163303.2, EVALUE 0.00e+00
acggggcctgggagggaactgagacgggctctgtccccgtgcagggcagtgaggatgtgctcacccgccacaggcaggcgtcagtgatactttctctgcgcctaagaagttgggtgacattatcaaacaggccacaaagataccttggcaagcacatttgagggcctggtgaaattaactccccctttcagagtccacatgaaaacatagggtccatctacacacacagatccaggctgtggaaagccagtggaataggcctttgtcttcattccagaatcagtgggatgccaggcgggcatagcgtccttggctccgcccgggccatgcggagctgggtcccatgcagctccatgaccgggggctccgacacctcttttctgctcctgctgggtctaggtgtaattccagtgctggaggaagaagttaccctcagataaacggtcggtgtaattccagtgctgggggaagaagttaccctcagataaacggtcggtgtaattccagtgctggg

SEQ ID NO: 11662 - DNA, 553 bp, Homo sapiens
  MAP TO AC007957.34; EXPRESSED IN HELA, SIGNAL = 0.24; SWISSPROT HIT: Q13360, EVALUE 2.30e+00; NT HIT: AB051453.1, EVALUE 0.00e+00
ctggctggagtgttggcccccgtccccagctgttgggggccacccctgggcatcttgatgactttggcggatggagctggacacagtgccgagctgggctcatggagctggcaccctctcttcacccccagagcttgtccttgcctgctgtggggctcaggctccctcctctcctctcgcctctctgtgccccacagatccaagcacagtgcctcctgctcctccttcaaaacgttatggaagtcagatgcatactgttggctggcgcccagctggggaggtgtgaacccttgggcatcttgcttttgccgaagtaccctctcaagggcagccttttcctgacacggttctttcctgggcccacactcggtgcgtagatggatgaatcctggagcagggcttttgctggtgcccatgtgctgggagcaattttccttctccccaggctggtcactgactgaaggtggcctgtggttctggggactcttctgaaagagcaggtcctttctacagccctcccaggcctctgcaagctcctgggcttggctgccag

SEQ ID NO: 11663 - DNA, 505 bp, Homo sapiens
  MAP TO AP000510.1; EXPRESSED IN HELA, SIGNAL = 0.21; EST_HUMAN HIT: BF834417.1, EVALUE 0.00e+00; SWISSPROT HIT: Q15517, EVALUE 8.00e-59; NT HIT: AF224753.1, EVALUE 0.00e+00
gcgtcagctccaaccagcgtccctgtagttcggacatccccgactctccctgcagtggagggcccatcgtctcgcactctggcccctacatccccagctcccactctgtgtcagggggtcagaggcctgtggtggtggtggtggaccagcacggttctggtgcccctggagtggttcaaggtcccccctgtagcaatggtggccttccaggcaagccctgtcccccaatcacctctgtagacaaatcctatggtggctacgaggtggtgggtggctcctctgacagttatctggttccaggcatgacctacagtaagggtaaaatctatcctgtgggctacttcaccaaagagaaccctgtgaaaggctctccaggggtcccttcctttgcagctgggccccccatctctgagggcaaatacttctccagcaaccccatcatccccagccagtcggcagcttcctcggccattgcgttccagccagtggggactggtggggtcca

SEQ ID NO: 11664 - DNA, 522 bp, Homo sapiens
  MAP TO AC025740.1; EXPRESSED IN HELA, SIGNAL = 0.95; EST_HUMAN HIT: AI761424.1, EVALUE 2.00e-96; SWISSPROT HIT: P06700, EVALUE 4.80e+00; NT HIT: gi14861873, EVALUE 2.00e+00
acccctacctccccctcccggacagccgccttctctaagtgttacaaccaattttctcttgaatacatgtagtgaggaagcctcaatgacttcccaagggaccttacttatagagaagaggcaccacgggaagatttatggaacgtctgtaaaatatgtgtgtagaaactcgcgacattttgatcgctaccaaggaaaaaaaaaaaaactggacagtttcttactagtcagtttcatgagcattttttatgggttttttaaattaattaatcttttcttcctttgttaggaattcttggcacagacacaagccccggagaagggtaacattgcccacgggctgtacgtccaaactgtcaggctttcaatcccaaatctctggaggcaaaaggccagatttcatgtgcttcccatgaagtggggagagtcttgtcaatgttggagagaagggagtattattagtgggattgccaccgctgtctctaacagcctcagtgccactggcaagcgccatatggtccc

SEQ ID NO: 11665 - DNA, 514 bp, Homo sapiens
  MAP TO AC004760.1; EXPRESSED IN HELA, SIGNAL = 0.78; EST_HUMAN HIT: AW502055.1, EVALUE 2.00e-69; SWISSPROT HIT: Q92793, EVALUE 2.00e-21; NT HIT: gi14778081, EVALUE 1.00e-69
cggaaggaagggggctggtgtctactgtccgtgagcttacaggccaggggttcttggggcatgggtcaggttatctttgagccttcagggctgttgccaggagtgaaggtccttgggagcaacacataggcagtccatgcccccgtcctgtccatgatcccatgttgtccatgatcccatcccgtccatgatcccatcttgtccgtgctcccgccctgtccgggtctcccacctgtccgtgctcgcatcctgtctgggtctcctatcctgcctgggtctcctggcacagacccagacttagcggtggagggaagcagccaggatgcctggtggtactgggtcccatgctgacaccggcctgtcccctttccttgcttgcaggactacgacctctgcatcaactgctataacacgaagagccatgcccataagatggtgaagtgggggctgggcctggatgacgagggcagcagccagggcgagccacagtcaaagagcccccaggagtcacgcc

SEQ ID NO: 11666 - DNA, 515 bp, Homo sapiens
  MAP TO AL034396.6; EXPRESSED IN HELA, SIGNAL = 0.91; EST_HUMAN HIT: BG120060.1, EVALUE 0.00e+00; SWISSPROT HIT: P98169, EVALUE 3.00e-94; NT HIT: gi14758093, EVALUE 0.00e+00
aaaccagtggccgccgttccaaaaaagagagaggtatccagactttgaggagggtcgctggtggccatcaaggacggagggtccacagcctgccctacggaattattattattagcagggaggtgccctgccagagtcgagctcacagaagccacatcaatagtcaagattccagagttcaccaatgctgtgtccagcaatgcagcagaagtactgtcaggtacatcagagaagagagacactatctctgcatcactgagatcattctgtctctggctggtaagttcactgctgggtgtaagagaatttgctgcttctagctgagctaagagatcctggcccaccttatgccttttaaccatgtgcgtcttcatgctgtgcttggatgtgaagagtttattacaagaggagatcgggcaacggcttttccaagtgtccacatcctgcaggtgtttcttggagtgaatgtagaggctactgcgagcagagaacctggcacagcagcctgccacagg

SEQ ID NO: 11667 - DNA, 504 bp, Homo sapiens
  MAP TO AP001710.1; EXPRESSED IN HELA, SIGNAL = 0.17; SWISSPROT HIT: Q13009, EVALUE 3.00e-37; NT HIT: gi4507500, EVALUE 0.00e+00; EST_HUMAN HIT: BE711811.1, EVALUE 2.00e-56
ccactgaggcacccttcacggactcacagaactcatcatcgtcactgaggatgtctgtctccttgatgtcatcttgctcctcatactgagcaagatcaaactgctcctctacccatcggtcagtgtccccaccaccggggggctgctgggactctttctccgggctgcttgcggagacggcatcagaatcaatggtaaacctgtttcgagccagccgccgcctcctcctcccaagagacttgcttggggcagacactgcacacacacacaaaaatataaaaataaaacccccacatgctttacgtgagatgaaaatccagaaagcaaaggacaggagaaaataaaaaccaaaacggtatgcattgaatgccttgatgtcttttggggcttaaagtctacatatcaccaatctgtcatggagcatttaccttgtcgaggtatctggacttagaggatgttctagcaactgatgcaagggcaagggggaaccggggcacacaggag

SEQ ID NO: 11668 - DNA, 505 bp, Homo sapiens
  MAP TO AC004736.1; EXPRESSED IN HELA, SIGNAL = 0.41; SWISSPROT HIT: P15172, EVALUE 8.00e-19; NT HIT: AF027148.1, EVALUE 0.00e+00; EST_HUMAN HIT: BF309465.1, EVALUE 0.00e+00
aagcgcaggtccggggagtcgaaacacgggtcgtcatagaagtcgtccgttgtggcaaaggagcagagagagccgtcgggggccgtcaggtctacgtcgcggagcggtggcgacagtagctccatatcctggcggtggcgcggcacggtcctggcttcgcccaacccaagcggcagagagtggccggaactttctgccgctcgggagccccggctgtagatagcaaagtgctggcagtctgaatgcccacccactgtcccccacccctccctctcctgtccggcctgatttgtggttaaggaaagcggcggcagcgccccagggcttcctcacccctagcttctcgccaggcgccctgggctatttatccgtagtagcctaaacgccccggagcccaggcgggcagctgggggagggggagtccgaggccaataggaacactgcggggcggggcttggggggggtccccggggtggccgcaggggcccgcagactggccagccag

SEQ ID NO: 11669 - DNA, 527 bp, Homo sapiens
  MAP TO AC023120.3; EXPRESSED IN HELA, SIGNAL = 0.44; EST_HUMAN HIT: AU133797.1, EVALUE 1.00e-130; SWISSPROT HIT: O29602, EVALUE 3.70e+00; NT HIT: gi15300386, EVALUE 0.00e+00
ccaaaggaccgacctgtcaccgtgttctttgaaagaaaaggaagtccatgccaatctagtactgtcaaggaattatccaagacagacagaatgggcacccagctgaatgtagcctgtaaactctcaaataatcgcatttcaaaaagagaacactttaggccaactcagtcttacagccacaattctgatgacctttccagagagggaaatgctaggcccattttcttcactccaaaggacaatatgagtattcccctgtaagtgaaatgtttatttatgtataaatgggaaacttcttggagtatttttattaaggtgccttgttctgctccaactatttgtgtaaagtggctgctcaacttggccattttctctttgtaaaaatattccctaattgttgactctaccatcacctgaagttggatgtagttatatcctaggaatccttgactgatcatgaatagcagagtaaatactgggttcctccccattaagtgagaagcatttgtgaagggcagtacagtgcc

SEQ ID NO: 11670 - DNA, 514 bp, Homo sapiens
  MAP TO AC006124.1; EXPRESSED IN PLACENTA, SIGNAL = 1.8; EXPRESSED IN HELA, SIGNAL = 0.5; EST_HUMAN HIT: BI520645.1, EVALUE 0.00e+00; SWISSPROT HIT: P26187, EVALUE 8.30e-02; NT HIT: U28945.1, EVALUE 3.10e-02
gagtttgggctgggaccggggctaacccaagctgtgatggggatccaggccctagtggagctggacgccgagttctgggacacaggaagctccatctccagccagctactggggagggccggaaggtgtccctttccccacctggcctggcctggcctggcgtgacctggaagaaactggggcactggaaggagactcaccctgcaccctgcacagggccatgggtcacagcccccagggactggaaggatcaggtgtcctagaaggacctggacagttcaggaaaggggagggaagactcctttcccagcccctctcgccttctagcccctccagccaaagccaggccccaggagaggcccgccagccccccgttcactgtgtgggaaacaggcctggcctagcagcagcggccgggcagcctgtgccccgcaggccgggagggcgtggtggcggccatggtgctggcccgtttcgagtggcggatgcccatagagaacgctggagccctggc

SEQ ID NO: 11671 - DNA, 516 bp, Homo sapiens
  MAP TO Z98272.1; EXPRESSED IN HELA, SIGNAL = 0.84; EST_HUMAN HIT: AL526136.1, EVALUE 0.00e+00; SWISSPROT HIT: O15169, EVALUE 2.00e-79; NT HIT: gi14777210, EVALUE 0.00e+00
cggcacagccctcctgcttcaggaaagtcctgaacaggcttatcccatcttggtcatccagcagggaatgcagtgactcagcccacttcaagtatggtggggtgggggaggcactgccctcaggctcataccccaggtccagatccgagcgcctcggagtggccgtcgaagtctcacctttaatgccaacacctttcccggagcagaaactgtagctggcgggcctcgggtctgtggacaccagttctccctcctcaccaggcactgggggtcggggagcatcttcggtgaaacttgctccgaggtccaaggggaaaccctgctcttggatattcattttgggactctgcgtcaaggaacaatgagcgctgcaccctaatacatcagtacttacagctccaaagtgaatcaatctgtcctgttgaaaccattaagaggacaaggattaggaaaggtgggtccatgaaacacgaccagaggttttctcaagacaagactcacgatgacgccctcccg

SEQ ID NO: 11672 - DNA, 542 bp, Homo sapiens
  MAP TO AC003005.1; EXPRESSED IN HELA, SIGNAL = 0.59; EST_HUMAN HIT: BF743864.1, EVALUE 0.00e+00; SWISSPROT HIT: P52740, EVALUE 7.00e-06; NT HIT: gi14766474, EVALUE 4.00e-94
ccagcagccaaaaccctgtggaaagccatttgcagaggattgtgttggggactctgcctctcctccttgtgctacaccacatccttgcatccttggtgctcatgaggcctccccaaatctgtgagctagccaggttcagcactgcacagcaggcccttccccaccaagcgctagccccctcattctgcaagcagtcccacacgctaattaccaggtgtgtcagacacgtgtgagagtgctgccttctcacaccaaagactacatttacttcatcaacatttctcttctttcaggtagttggcaaggagccaaggctgaggcagctgctgagcagagtgcttctgtagaagtgcccagttcaaacgttcagcaacaccagaagcagcactgtggagagaaacccttaaaaagacaagagggcagggtcccagttttgaggagttgcagagtccacctatcagagaagtccttgcaaagcagggaagttgggaaggatcttctgaccagctcaggtgttctcaagcaccaggtgactcacacgg

SEQ ID NO: 11673 - DNA, 518 bp, Homo sapiens
  MAP TO AC007731.8; EXPRESSED IN HELA, SIGNAL = 0.83; NT HIT: gi14777504, EVALUE 1.00e-122; SWISSPROT HIT: P35590, EVALUE 1.00e-06; EST_HUMAN HIT: BF058985.1, EVALUE 1.00e-122
ccgctgccaccctgtggacggcacgtgtgcctgcgagccgggctaccgcggcaagtactgtcgcgagccgtgccccgccggcttctacggcttgggctgtcgccgccggtaagcgcggtctctcggccagggagggaggaggtggaagggcgggccgccgatggggacaggggtgaggcgggtcccagccttccctagcctccgacccctcccccaggtgtggccagtgcaagggccagcagccgtgcacggtggccgagggccgctgcttgacgtgcgagcccggctggaacggaaccaagtgcgaccagccttgcgccaccggtttctatggcgagggctgcagccaccgctgtccgccatgccgcgacgggcatgcctgtaaccatgtcaccggcaagtgtacgcgctgcaacgcgggctggatcggcgaccggtgagcagccctgcctgcgtcggcccagacacgcagtcccccgccctgcctccctaacaaaggccccaatgtcgagggcgct

SEQ ID NO: 11674 - DNA, 557 bp, Homo sapiens
  MAP TO AL135999.2; EXPRESSED IN HELA, SIGNAL = 0.19; NT HIT: gi14751043, EVALUE 1.00e-122; SWISSPROT HIT: P35799, EVALUE 1.60e-01; EST_HUMAN HIT: BI761423.1, EVALUE 1.00e-119
aggccaagctttggggctggagaagggaccctggtcccctccaggaggcagtgggctccggcaggcagggggtcgccagggttggcgggaggaggcaggactgctgggcagttcaggggatccctctgagggggtcagtccgttctcatataccccagggctgtcctcatccaggggctccgtgtcggaaccttctgagtcctgcctgggtctgcggcctgggtagggatagctgagaatcagaggggcctaactggccttgggctggagtggctgcagctttattcctgactgggcacttcccaggactttggaattcccaggctcatagcctctcaccgccagaccccaaaccccccattatcctactgcatacattcccaagtcccactccccagactaccaggtctggcccccaccctgtgttccttgcaccctcattccttgttttttcccatccccacttcccttgcagggcttctcatctgtttccccacacctgagcctctctagctccctaggggcctcactgccctccccccagctgtccatgcctc

SEQ ID NO: 11675 - DNA, 506 bp, Homo sapiens
  MAP TO AC016397.5; EXPRESSED IN HELA, SIGNAL = 0.31; SWISSPROT HIT: O15553, EVALUE 2.10e+00; EST_HUMAN HIT: BG056564.1, EVALUE 2.00e-53
cctggcactcagcatccaggctatgagcccttgtactgggacaagcctgggacctgcctccaggggccgccccctccctggctgcagactgcacactgactctgtttccacccctgcagcaaaggtccccggcaggctgggcaggcattcccacttgcgtggagtcagcaggcctctgcagcgctgactgcgtgccagactgactgcgtgccagactgactgtgtgccaagtctgccagtcctagggctttcccagagctaggattcccctctctgaggctggcttccagggccagcggcccagaggttaggggccgacgcccatgtgccaagagcacggctctccctgcaggctccgccccgtcacaggaggctccacggggcagcaagttaccttttcacactcctctcgtactcagtccgctggcggcacagctcggccctgagctcagtgaccagcccctgtaaggcctcggagcggcgcgcgtgttcccgggtggggctgt

SEQ ID NO: 11676 - DNA, 580 bp, Homo sapiens
  MAP TO AL163636.2; EXPRESSED IN HELA, SIGNAL = 0.44; EST_HUMAN HIT: BI523039.1, EVALUE 8.20e-01; SWISSPROT HIT: P23267, EVALUE 2.00e-22
tcggaggccccgagaaagaagtagaaatagaattgggtgatacatgcagcaaaggaaatagtgtgttgccttgagaggaaattgctcagcatctttggaatgatgacagaagtgagcagtatctctaggcaggacaggttacccagaaagaagtacataggggtctgtagtcgagtatcagcccttaccacccccacaatcaacacattgcctgtcagattcaggagatagacaagaagaaacacagaaaataattccactcttgcgctgttgagatttgggagccctgccaggacgaactctgttggatcactactgtggttcccatcaggactcattgtctttttcacctgtccaacaacaaaaacatgatcctggtaagagcaggtcctctgcttacagtcctgaaacttacttcatcatgatatgggactcatatccccagtttatccaattgcaggtcctgttaagatctgaagcacttaaggtcatcatctgattgattttagcactagagaagattttctctaaagggtaacaaaacttaggtatgaaaatgccaggagcctccatctcctcc

SEQ ID NO: 11677 - DNA, 506 bp, Homo sapiens
  MAP TO AC008009.4; EXPRESSED IN HELA, SIGNAL = 0.3; EST_HUMAN HIT: AV706204.1, EVALUE 0.00e+00; SWISSPROT HIT: P43560, EVALUE 1.20e+00; NT HIT: X03912.1, EVALUE 4.80e-01
tcagctgaagatttttaccagtgtgcctactagagagggacaaagttgtgaaatatgtaatatagacttgtagggaaacaaatggtgtcatcagattttactgtcaactagaaaccttacccagccagaaatctttgtattttagatagtaggaaagatgttcctcatttagacaagtggggttctcattcaacctgcaaatcaaaaagattactcttatcttgctttacaaaaaagtactctttaattagtgaaaaaattcaaattcaagccttgcctaatgcttattgcccttccttgcaggtctaaatgctagacctagtgactgtggcaactatctctcactgatgttccagaaagagaagaactccttcctgctagactttcttcgatatttcagttgtgataagcagatttaactagcgtttggaaagttgctcactatcatcaatgcatgttatgccttcacttctctggatttgaagctcttgctgcttgctgccttg

SEQ ID NO: 11678 - DNA, 517 bp, Homo sapiens
  MAP TO AP001743.1; EXPRESSED IN HELA, SIGNAL = 1.3; EST_HUMAN HIT: BE149231.1, EVALUE 2.00e-96; SWISSPROT HIT: P57078, EVALUE 7.00e-16; NT HIT: gi14780526, EVALUE 9.00e-83
gcaccgctgtccagtgccaggtccacgtcctgcggctgcaggatcttcatcagtttgctggtgtccccggacacgatggcatccacaagcttcttcttctggacgtctgtggtgcccagatctgcagggagaggagaggcaaaggtcagagcgtggctgcacatccagggacgtggcgtctctgggagcctggctgtggcgctcaggtggaggagtgccatggcctccaggctgctcgctggtcacccgactgtgtttgagcgttgtctgtgcctcgtgattaaggtcagtcctagcgggagccccggggcaggctggcgaatgtctcccaggtgctcgttagtcggtttgcaaaataaaacccgctctccctgtcctgcggggtggtgagcccccttggtgcttagagatggcagtgactgcaaacatcccttcattaaagaaagaaggaaaaagggcacagactaaaaagaccaggccagagctcccattcgcctggaagccttggcacctgcca

SEQ ID NO: 11679 - DNA, 538 bp, Homo sapiens
  MAP TO AC006960.1; EXPRESSED IN HELA, SIGNAL = 1.3; EST_HUMAN HIT: BF245929.1, EVALUE 2.00e-69; SWISSPROT HIT: O67887, EVALUE 1.70e+00; NT HIT: gi14749462, EVALUE 1.00e-124
ggcggctaaattggccacaagtttgtaactcccacatgaaagcttagaaccagaatctgaagctgtcttcctaatataattgcttcctgtcacaaagagcctatataacagattataaattttgatgaatgcaatggagtttatatacaggtaatactcgtcttgtcgcacatttacatgtcctgagtgggaattaaccataacatagaaataatttgaatatttttaaatgtctttgtttttgcttataagatcacagataattgttttagtacataaaaatgaactaccactattgaaatggcattttacctgcttaagaaatcggtcagatgcgtggctatgcttagctaatacgcttggcagagcaggattggcatactcaaactgaggattgtaggtatagtcagatttgaagaatctcagtttttctttctctaagttggtgggttttatagcagtcaatatacaaaatttcttcccagaaaagtcatctcccttttcaaagcttctagacagctgaggctttggctttgga

SEQ ID NO: 11680 - DNA, 547 bp, Homo sapiens
  MAP TO AC007841.1; EXPRESSED IN HELA, SIGNAL = 2.2; EST_HUMAN HIT: AA878730.1, EVALUE 4.00e-15; SWISSPROT HIT: P39188, EVALUE 1.00e-09; NT HIT: U91328.1, EVALUE 3.00e-24
cccagcagctccatcctgcctcaagacctttgtgcttgctgttccacctgccaggatgtactgaaccgagagcctgcactgctcatttctttctgtcatttagatctcactcagtgccgcctctgtgaggccttctctgaccacctgatttattgatttattgacccaagtttatttttgtagagatgaggtctcactatgttgcccaggctggtctcaaactcatgggctcaaacgatcctcctgcctcagcctcctgaagtgttgagattgcaggcatgagccaccacacccggtccctgaccacttgatttaatattgtcaccccttacatccctctatcttatttctagttttatgtcaataatccctgcttgacattgtggccttgttatatgtgtatatacacagacacgtatatgtacatacatgtacgtatgtatgtatacacatgcacataatatacatgtgcatgtatgcatatttttcccaaaactaaaaatcaagtttcatgaatacaatgttgggcctgtgttcttgtctcgcc

SEQ ID NO: 11681 - DNA, 529 bp, Homo sapiens
  MAP TO AC023890.3; EXPRESSED IN HELA, SIGNAL =   1; EST_HUMAN HIT: BI830589.1, EVALUE 0.00e+00; SWISSPROT HIT: P06151, EVALUE 7.00e-74; NT HIT: gi15082233, EVALUE 0.00e+00
ggatccatccatggcagctttcagaatggataccaagcttttgtccaatcaagaaacgaaaacgagcagtatccagattacagccgcttccaataatacggtttttgggaaatgcactcaacttccaagctacataagttaagatatccactggattggaaacaataatcagtttgcagtgggggctgtactggacaatactggaaatcattaacttgaagatggccacatttcgctggactaaattaaggcgcgtttctcccttttcttggcgtgcacctgctgtgataatcactaggttggagtttgctgtgacaaagtaatctttgctacaaacaatatttggcattttcgtgaaagggctgccatgttgaagatccatcgtctcacccttcagtttgtcttcatcaagatccacaagggcaagttcatcactcaagccttttaataagatgctgatagcgcaggccatgcccaccgatccagttcctatgatggagaccttactgtgatgaacgggcttctcgga

SEQ ID NO: 11682 - DNA, 500 bp, Homo sapiens
  MAP TO AC004595.1; EXPRESSED IN HELA, SIGNAL = 0.86; SWISSPROT HIT: P28284, EVALUE 2.00e-03; EST_HUMAN HIT: BE715394.1, EVALUE 4.50e-02; NT HIT: gi16161062, EVALUE 7.00e-71
agcgcactgggggctcagacccaccccggacacgcggcttctcggccgtgttcgggacctagagcccgagggcctctcccctcggccttggccttggcgtatactgggcggtggcgcggtgcgctcactccgcccccagcgggctggggcggggacaccgtcccccgggaaacgggacgcgctgcttgtcccaggccttcgcttcggcctgcgaggctacagctgtgcgcagtggcgcggctgctaagtagcagcaggtgggagactagggtctgcgctcgcggcgaccgcggaggagggtgggcgcctgcggaggtgtcctcgctcacttcggggggcccagagtctcgggtgaggagccagccggcctcgcgttccctcggacggttgcccaatggcagcccaggtggcagcccgggaggcgcgagacttcagagaagccccgacccttcgcctaacctcgggggccggcctggaggcagtgggcgctgtggagctcg

SEQ ID NO: 11683 - DNA, 508 bp, Homo sapiens
  MAP TO AL031406.1; EXPRESSED IN HELA, SIGNAL = 0.56; NT HIT: gi16168272, EVALUE 0.00e+00; SWISSPROT HIT: O08770, EVALUE 9.00e-12; EST_HUMAN HIT: BI522570.1, EVALUE 1.00e-45
tcggtggagtagggcgtggggtggctcacgggccgggcgggcagcgagccattccgacacttggcctggagtacggtgatggcgttgaggctgtggtagggccggggcaccagcagcgggtagccggcaaactcccgcggcgactcacactgcaggcggtcgtagttcttggtgacgttgttgaagaccaccagccaggccaggaagccaaagaggtcgcactcacagttgaaggggttgccggccagctcacacaccatcaggccggcgaggctggcaaaggtggcaccgtccaggcggctgaggcggttggaggacaggtcgatgctgatgaggctcgggcactcggagaaggcggtgggcgtcaccacctcgatgaggttgtgctggacaaagaggaactgcaggcggctcatgcctcgcaacatgccctccgtcaggttgctgagcttgttgtagcccagctgcaggacctgcaggctcgactggcccaggaaggcaccgtcct

SEQ ID NO: 11684 - DNA, 571 bp, Homo sapiens
  MAP TO AP000477.2; EXPRESSED IN HELA, SIGNAL = 0.57; SWISSPROT HIT: P08547, EVALUE 1.00e-31; EST_HUMAN HIT: BI053546.1, EVALUE 1.00e-36; NT HIT: AJ271735.1, EVALUE 8.00e-28
gtgggcacccttatattgttccagttcttagagacaaggctttaagtttttcctcattcaatatgatactagctgtgggtctgtcatatatggcttttcttgtgttgaggtatattccttctatactcagtttttgagggtttttattatgaaaggatgttgaatttatcaaacagtttttcagcatcaatcaaaattgtcataaggtttttgtccttattctgttgatacgatgtatcacattgattgatttgcatatgttaaaccattcttgcatcccttggataaattgcacttggctatgaataatgatatttttaatgtgctactgaattttgtttgctagtattttcttgaaaatttttgcatcaatgttcatgagggagattgcctgtggttttctttttttgatgtctcattgtcagattttggcatcagggtaatactagcctctttgaatgtgttcagaagtattccttcctcatctattttttgaaatagtttgaataggattgttatttgttcttcttcaaatgtttgttaaaattcagcagtgaggccatcaggcccc

SEQ ID NO: 11685 - DNA, 541 bp, Homo sapiens
  MAP TO AC007228.1; EXPRESSED IN HELA, SIGNAL = 0.54; SWISSPROT HIT: P08043, EVALUE 2.00e-21; NT HIT: gi16177749, EVALUE 0.00e+00; EST_HUMAN HIT: BE540015.1, EVALUE 0.00e+00
agccgtacaggtgcggccagtgcgggaagtccttcatcaagaactcctccctcactgtgcaccagcggatccacacgggcgagaagccctaccgatgcggcgagtgcgggaagaccttcagccgcaacacgaacctgacgcgccacctgcggattcacacctgagcgcctctgtgcagggctctcactggcggtgcccaggacggacgccagatggctgcgcgctttgtcagcagtgctgtgagaagttctcccctggggtggggactcggggtcaggggagctcaggaatgtggggttgtggaggggctggctgatcacacatgccccctccttactgagcctcagaaagcaagcccctcggtgtctgacgtatctggggacacttcaaggttcactgtagctgagccatggccgctggtaacagacatcagggttccagactagccctcttgagtaactgtcctagagctgggacaggtcacgcctgcctccacatctctgtttcttcagcgggaaagtggagctggtggaggggaggg

SEQ ID NO: 11686 - DNA, 524 bp, Homo sapiens
  MAP TO AC006596.2; EXPRESSED IN HELA, SIGNAL = 0.17; EST_HUMAN HIT: AA451737.1, EVALUE 0.00e+00; SWISSPROT HIT: Q06885, EVALUE 1.90e-01; NT HIT: gi11432870, EVALUE 0.00e+00
ctgccgctccagccttcctggcaggcaccgcctgcagtcttgcaggcccagcccggacccccggtagcagcggcaaattttcccctgggctccgctaaatcattgatgactccatcaggagaatgcagggcctcttctatagaccgcagggctcctctaaagagcgcaggacctcctcgaaggagcgcagggccccttcaaaagaccgcatgatctttgctgccaccttctgtgctcccaaggcagtgtcagctgcgcgagcacacctgccagctgcctggaaaaacctgcctgccacaccggagacctttgctccctcctcaagtgtcttcccagctacctcccagtttcagcctgcctctctgaatgcctttaaaggcccctctgctgcctcagagaccccaaagtcactgccatatgctctgcaggatccctttgcctgtgtagaggccctgcctgcagttccatgggtcccacagcccaatatgaatgcctcaaaggcatcgcaggcagtgcccaccttc

SEQ ID NO: 11687 - DNA, 515 bp, Homo sapiens
  MAP TO AC007981.24; EXPRESSED IN HELA, SIGNAL = 0.53; EST_HUMAN HIT: AU125898.1, EVALUE 9.00e-53; SWISSPROT HIT: P11087, EVALUE 6.00e-04; NT HIT: gi11427757, EVALUE 1.00e-118
ggccctgtgacgtgcgagtgtcaccgggcaccctagcggcgccctctcctcccggggcctcgctggctgtgccctggatggaaaggtcccaccctagcggcgccctcccatcccggggcctcgctggctgtgccctggatggaaaggtcccgcccctcatggcccggcccggctctcccctggctgcggtcggcatcctggccaccctctttccccaccacccgcatgttcttgggagtggatggcctcacttggcagccgcctctatgcttccttttgcagccaggagtgggtccagtgttttagagagaggggccttggggctgccggtctggctgctgaggccaggtggtgaaagtgggccctgggcagcctgagggcagctctcacctctggccagcaaacttctagactgcaccttgagggccaaaaacgtccagatttcctgctcaatgctgtcgtcgctgtccacggagctactgtcaccatcagagcgggaaggcacgttgggggag

SEQ ID NO: 11688 - DNA, 549 bp, Homo sapiens
  MAP TO AL035427.17; EXPRESSED IN HELA, SIGNAL = 0.48; EST_HUMAN HIT: BI458804.1, EVALUE 6.00e-57; SWISSPROT HIT: P54073, EVALUE 4.00e+00; NT HIT: AB051488.1, EVALUE 0.00e+00
ccactggtggctgtggtggctttggattgttggaagaccatcaccttcagcaggtctgcacttgggaacaatcattctcccccagcccgagcgtgcctctgccctctgtatcattgacagaggctgtatgtttggaaagagaactttgtgactgcagaactgacagttgactctaattcttgctaccaagtttttccccgacccagtgaaagagtgttaagacttcgacctaggacacattgagaaccaaggccaagactggacagggccatataactgggcttcaaccatggctgggactaagaataagacaagagcccaggccaaaactgaaaaaaaggctgctatacaagctaaagctggagcagagagggaggctactggtgttgttaggcctgtagccaagaccagggccaaagcaaaagccaagacagggtctaagacagatgcagtagcagagatgaaggcagtgtctaagaacaaggttgttgctgagacgaaggaaggagctctgtcagagcctaagactctgggcaaagccatgggaga

SEQ ID NO: 11689 - DNA, 533 bp, Homo sapiens
  MAP TO AC013685.3; EXPRESSED IN HELA, SIGNAL = 0.64; EST_HUMAN HIT: BG459947.1, EVALUE 3.00e-06; SWISSPROT HIT: P08547, EVALUE 6.00e-05; NT HIT: AB063285.1, EVALUE 5.10e-01
tggtccaaccacgatctctggctgcatctttatcctgtgcatccttatcttctaaatcctaaagtccttttggttttgttgtgccctttcagctcttgggatacagaaagtctcggctactttcttttgccccaggctcgactatatggacttcatcaagctgctatgcaaacacatttgcagatcagttcttgttattctataaggccaaagtgtccctgaattctgctctagttatccagacactagcctgccatgaagtctataagaaatagagtggcataaataagaaagaatgataataccatgtgtcagtaaggatgtgaaataactagaattctcatactttcctggtgggaatgcaaaatggctcagtcccattggaaacattttggcagtttcttgttaaaataactataggatttattatacaactcaccatttgcatatctaagtattattccaagagaaataaaaagttatctaatgaggccgcagaccctgcccagcagccagcacctggcacaggccct

SEQ ID NO: 11690 - DNA, 514 bp, Homo sapiens
  MAP TO AC003956.1; EXPRESSED IN HELA, SIGNAL = 0.43; EST_HUMAN HIT: BG197640.1, EVALUE 8.00e-10; SWISSPROT HIT: Q9GZK3, EVALUE 5.00e-34; NT HIT: U86216.1, EVALUE 3.00e-11
gcaccaccaggacgctcaggaaaaagatgcccagcgccttgctggcactcttggcgcagctgagcttcagcaccggggcgatgtcacagaagaagtgctccacgtggtctccgccgcaaaagggcgatgagaagatcatgctggtctcgatcaaggccaccgagaacccagagcagaaaaccagggctcccaggcagaggcaaacggtgggtctcatgaccatagagtagcgcagggggtggcagatggccacatagcggtcataacccatcagggtaaggaggaagcagtggctgcatcccagacccaggaagaaaaacatctgagcctgacagccagggatggagatggcctggtctccatcagcagatgagccagcatgctggggatggtgaccagcgtgtatagcaggtctccgagagggacagcaccaccaggaagtggtacatgggagtgtggcgggacctatccgcatgggtgatggtgatgatggtgacgttgccaccgagggtga

SEQ ID NO: 11691 - DNA, 500 bp, Homo sapiens
  MAP TO U82672.1; EXPRESSED IN HELA, SIGNAL = 0.29; SWISSPROT HIT: Q99102, EVALUE 5.00e-06; NT HIT: AY056047.1, EVALUE 7.40e+00
cccaagctcaccgacggtcccttcagagagtaagcgtgccctgcgggatgacaggtcgcaggagcccacagccattgcccctactccaggcgccctgcccggggacaggtcaggggcgcccagggccattgcccctactccaggagccatgctcagtggcaggtcacgggcacgcagggccattgcccctacaccaagcgccctgcgaggttacaggtcttgggcgcacagggccattgcccctaccccaggctgcctgtacagtgacaggtcacgggcgcacagggccattgcccctgctcgaggcaccaagcatggtggcaggtcatgggcatgcaggtccattgcccccaaaccaggctccctgtgcggggacaggtcacaggcgagcagggccattgaccctaccttaggcgccaggcgcggtggcaggtcacgggcccacagagccattgcccctactccaggctccctgtgcggcaacaggtcacgggcttgcg

SEQ ID NO: 11692 - DNA, 512 bp, Homo sapiens
  MAP TO AL132640.2; EXPRESSED IN HELA, SIGNAL = 0.53; NT HIT: gi14784186, EVALUE 0.00e+00; EST_HUMAN HIT: BF811118.1, EVALUE 0.00e+00; SWISSPROT HIT: P09255, EVALUE 6.20e+00
gcagggcacccagctcaatgtatggtgcacggtgagcactcaggaaatgacagccaaccgccattcacatcattctgaattctggcgctgaccctcactggttgtgtggtctgcacaggctccatggtacctgcctgccagggccaccatgaggatgccagcagcctcctctcctgctcagtgcatggctgtgctcagccagcagtgttcttgccattagctctgctcctctgcccagcccggaggttgcctcttacccaggatgaaaactggtgcagcgggggtgtaggtggcttgttacccagctccacttcctccagctcagctccaagggcctttgggctctctctttcctcattcttccctgctgggggtggctcctccatctccatcttctctggttcctcccgggacctagctcgggactccagctcaggaaggccagaggggtggagggctgagaaggcctcagtctcaatgttcaccacacggccaaagtgcccatggcccac

SEQ ID NO: 11693 - DNA, 513 bp, Homo sapiens
  MAP TO AL096870.3; EXPRESSED IN HELA, SIGNAL = 0.41; SWISSPROT HIT: Q14934, EVALUE 2.00e-03; NT HIT: gi14750673, EVALUE 1.00e-60; EST_HUMAN HIT: BG717314.1, EVALUE 5.00e-51
gaatgcatgccaggccgagggggtggaggtcggggaataccgataggtgcagcgccatagggagggggctctcccaaggccagacggcagcatggcggggcatcctctgagtccagttctgtcaaaatgggaagaggagcagagggagagggggaaagagagaagcaggtgagatggctatgttccttgagtggccaggccgcaagtccttctatgctccctgcccctcagcaaagagaccttctgagccacaagacaaaagcagagttggacctgggaagatggaggagattgaagcaggcatgccaggcctttgcccactggcccctggatcctaggaccgagggtacccgatccagtgggtcttaaggtgagagaggtgggtccagaggggctggagctggggctgggcctggaggcgtgtttcttgaggcactgggctggactgggggcgactcacacatgaacccaattagcagcggttcccaaacccccaaacggcgctggcaggag

SEQ ID NO: 11694 - DNA, 557 bp, Homo sapiens
  MAP TO AC005768.16; EXPRESSED IN HELA, SIGNAL = 0.56; EST_HUMAN HIT: BG389315.1, EVALUE 1.00e-103; SWISSPROT HIT: P36027, EVALUE 9.20e-02; NT HIT: M58833.1, EVALUE 9.00e-03
tgggtcgcttgatttccagtgttgaaaatgtaccagcaaaatatgaaggtactgaaagttcatctgtttccaactattctagtcctatcaaactcatgtttttatctgaggttaaaagtagtgaaggggtcaaatatactttaacttcagttggcacttcccattcaaatgttgttctcccttctgaaaaacctacaacccatcacgtaactgaagaaaaaacagaaacaaatgaggatatctcaaatgcgaactctgaaaattatcactccagtcattatgatactgatacttttcaaagagaactaaacaaattcagtcatgcaaaagaaactgcaggatcctctacaatgtttataggtgatataaatagtgataagccacaagaagaacctaaggacaattcaagcagtgctactgatccatcttttaaaagaaaaccaggtagaccaaaaaaaataggtccccaagttgtgaaacagattaagcgaccaattggaagaccaccaaagcctaaaattgatcaaacaaacatcactgtttgccagaatgagccc

SEQ ID NO: 11695 - DNA, 504 bp, Homo sapiens
  MAP TO AP001716.1; EXPRESSED IN HELA, SIGNAL = 0.6; NT HIT: L41944.1, EVALUE 1.00e-115; EST_HUMAN HIT: AA227143.1, EVALUE 1.00e-107; SWISSPROT HIT: P48551, EVALUE 1.00e-21
gcaccaagagtcatgcccagcatatagtaagcatggtgtaactgttagctgttattattgctgtcatcatcatcaactgcatcatcattcaatctcattaagtttattttttatttttttagaggcaaggtctcgctaagggctggaatgcagtggctattcacaggtgcagtcataatgcactacagtctgaaactcctgagctcaaacagtcgtcctgcctaagcttccccagtagctgggattacaagcgtgcatccctgtgccccagtgattaagttttattatgtagaaaataaagagcaaacagtacagctgatacggactctctctctctttttttttttttttaagaattttcataactttttagcctggccatttcctaacctgccaccgttggaagccatggatatggtggaggtcatttacatcaacagaaagaagaaagtgtgggattataattatgatgatgaaagtgatagcgatactgaggcagcgccc

SEQ ID NO: 11696 - DNA, 501 bp, Homo sapiens
  MAP TO AC011895.2; EXPRESSED IN HELA, SIGNAL =   1; NT HIT: L42812.1, EVALUE 0.00e+00; EST_HUMAN HIT: BI917862.1, EVALUE 0.00e+00; SWISSPROT HIT: P22303, EVALUE 3.00e-98
agggccaggaagccaaaggctcccacccggtagttcatggacaccagcacagtcctctcggcctgtaccaagaagcggccatcgtacacgtccaaggaggaggccccactgtagaagccacccccatagatccagacgaggacaggggtgggggatgtaggccgggggtatggtgtccacacgttgaggtacaggcagtcctcgctcagctcacggttggggttccacatctcggtgccctcaaaacctgggtatagggtgtccacatattggtagcagacactctggaaggttgtagcgtctaccacccctgaccaaggctgcttgggctccggtggcagaaagcgacggggtcccatgggtggctccgcaaaggggatgcccaggaaagcagagacagggcccccgggggtcttcaggcgaatgccccgcagccggcccccacgcaccgtcaccagcagctctgcatcctcccggccctcagcccccactcctccaccc

SEQ ID NO: 11697 - DNA, 513 bp, Homo sapiens
  MAP TO AL135999.2; EXPRESSED IN HELA, SIGNAL = 0.37; EST_HUMAN HIT: BG281442.1, EVALUE 0.00e+00; NT HIT: gi13236576, EVALUE 0.00e+00; SWISSPROT HIT: Q9R1U5, EVALUE 1.60e+00
agcctcctggggtggcaaggtgtagagaggggggcgttgaaaggacacccgctacccggcctgctttctaggggtctctttggattgaggacatcagcagcagtggaagggattttactggagacctgtcactgtcagagccttaaaatatcaccgacggggccttaatgtcaccgaggtagagagaaaaggcagtagccctagagactattgcgacacagtgtgcccctcataagtttttccagggaggggttctgtactgagttgacgccccaggagctgagcaccaggctttgcatccttgggaactcagcaaacgtttgttcagccaattgcaggtagcatggcccagggcttgattgaggtggagcgaaagttccttccagggcctggcacagaggagcggctgcaggagttggggggcaccctggagtaccgggtcaccttccgagacacctactatgacacccctgagctgagcctcatgcaggctgaccactggctgcgacgacg

SEQ ID NO: 11698 - DNA, 505 bp, Homo sapiens
  MAP TO AL138846.2; EXPRESSED IN HELA, SIGNAL = 0.19; EST_HUMAN HIT: BF966478.1, EVALUE 1.00e-94; NT HIT: Z19061.1, EVALUE 3.00e-08; SWISSPROT HIT: Q61772, EVALUE 9.00e-22
ggggaggatgatgtgggctgtaacagcagcttggtggagtgcaaagggcactggtcagagagtcaggaaactacaggcaccattcctagctccaccactaacttgatgtgcatacctggtcagatcgctctccctctggagcctcagtttccccatctataaaaataaggattgggatcatttgtttccaaagtttctcccagcgctgcatcttacaatttccggggtgtgcatggtgcatgagagagaaagcaggagtcactgctagcgctccacctcctggaagcactttggctctgggctgcccacccctttactcttgtccccagtgggaggagatcagcggcgtggatgaacacgaccgtcccatccgcacgtaccaagtgtgcaatgtgctggagcccaaccaggacaactggctgcagactggctggataagccgtggccgcgggcagcgcatcttcgtggaactgcagttcacactccgtgactgcagcagcatccc

SEQ ID NO: 11699 - DNA, 515 bp, Homo sapiens
  MAP TO AL122010.2; EXPRESSED IN HELA, SIGNAL = 0.48; EST_HUMAN HIT: BG675316.1, EVALUE 1.00e-79; NT HIT: X76168.1, EVALUE 3.00e-45; SWISSPROT HIT: Q9NTQ9, EVALUE 4.00e-59
  unsure 94
tcaacctccctcccctgaggctcaggacccagggaccaaactacccccaacctcccacattggcccctgggcgagcttcctgagcccccacagncacccttctcaccaccctgctacgacaaggatgccactgcccctgccttttttcctgggtggcctcatgtgggggggacctgttgatcttatctgctgatctcgcaggttatggatacccacctgcatccactggggccgacccagccttcattaggacagagttcccatcctcagggtgccctccctggaagaggacatatggtgggcacgtatcgggtaggcattcccggcaccgaggccgccggtgcctggggccgaagatctccatgcacctcttgcccaccaggtagaagacttcactgaggttgagcaggatgcagatggcagctgtggtcaccatgaagtaggtgaagaccttcttctccgtgggccgggagatgtaacagtccacagtgtgggggcaaggctccacggagcag

SEQ ID NO: 11700 - DNA, 537 bp, Homo sapiens
  MAP TO AC002511.1; EXPRESSED IN HELA, SIGNAL = 0.28; NT HIT: AF024690.1, EVALUE 3.00e-76; SWISSPROT HIT: O15552, EVALUE 2.00e-17
cccggcactgatgcctttctctcctgcaggtctctgtctgagaaagggacttgagtaaagttagaaactggcaacagtaacttcctgtatctgtgaggacaggaggagaaaggctagggaaactggagggggaattcccttgggaagccacgagttggtctcctccagagacacatgatggcaaacataatcactactgcttaatatcccgccccaggcaaagtcaataattgctctgggtagttcgagcaggtggtgtgagcaagccgtggtggcatcagaaagcacagtcctgggaaggggacggtgccggggaggatgtccgcatcctgaaggagagctggctgcgcgggctgtgagtgagacctccctgaccccgcccttttttgttcccctccaggatgctgccggactggaagagctccttgatcctcatggcttacatcatcatcttcctcactggcctccctgccaacctcctggccctgcgggcctttgtggggcggatccgccagccccagcctgcacctgtgcaca

SEQ ID NO: 11701 - DNA, 504 bp, Homo sapiens
  MAP TO AC008547.2; EXPRESSED IN HELA, SIGNAL = 0.4; SWISSPROT HIT: P09106, EVALUE 4.10e-01; EST_HUMAN HIT: BI752897.1, EVALUE 0.00e+00; NT HIT: AF007786.1, EVALUE 1.20e-01
ccaggaacaccaggcggacgcggcggctgggcggcccagaggcaggggctccttgccccaaggtcaggttgagaccccagcccagcaagatgggcacggaaatgttgggcgccggcggcagaattgaggggctaaagagatcctccatccttgtcccggaggaagaggaggcaccgaagagggcgggcaggacgcgggaaaccaaagtggaggcgaggcggcgcggggagcgacgctgggtctatacgagttcccaaagttagttgaaaaggcacacgcacagagagggagatggattcgggcggctttgcgcttagttgtttttgtcgattgtcctcgtgatttgtcactcaaatgtgggttgtacactcgaggaacacacatgattcctattctccaccttccccgcgtcttccctcccattcccggcgggtactcttccaatctctgcagcggcccccgacgctaccctcgcggaagccgcggacccctgggcgctgagaa

SEQ ID NO: 11702 - DNA, 507 bp, Homo sapiens
  MAP TO AC010320.7; EXPRESSED IN HELA, SIGNAL = 0.62; SWISSPROT HIT: P51522, EVALUE 3.00e-76; NT HIT: M27877.1, EVALUE 9.00e-52; EST_HUMAN HIT: BG027418.1, EVALUE 0.00e+00
tgcgactaaaggccttgccacactcattacatttgtaaggtttctctccagtatgaattttccgatgtcgtgcaaggtgtgcaattcgattgaagaccttgccacattcattacatttgtaaggtctttctccagtatggattctctgatgattggttagtgataacttgtgtctgaatgccttgccacattcactacatttgtaaggcttctctccagtgtggattacaagatgggctgaaaggcctgaatactcactaaatgctttaccacattcattacatttgtaaggcttctctccagtatgaattcttcgatgtcgtgcaagatttgaaagttgattaaatacttttccacattcattacatttgtaaggtttctctcctgtatgaattctccaatgttgtgctaggtgcgaattttgaataaagacctttccacattcattacatttgtaaggtttctctccagtatgaattttctgatgtcgtacaaggagcgcaatcc

SEQ ID NO: 11703 - DNA, 572 bp, Homo sapiens
  MAP TO AC005701.1; EXPRESSED IN HELA, SIGNAL = 0.38; SWISSPROT HIT: Q9NYC9, EVALUE 4.00e-97; NT HIT: gi15311285, EVALUE 0.00e+00; EST_HUMAN HIT: BE877016.1, EVALUE 8.00e-01
acctggggtagctgtgcccgaatatcttcagatccagtgaatatgctttccaggtgagtccatgttcgctgcacttcaaaccagatagagatgacagcgtccactgtggacagcttcttctgccagcccgacacctcctccaagaagaaagcaacatacttggacatcaccaggttctgaagttgaacttgattatcctccagaacctctatgaggtcctcatcagagcacaggagggggacattggtccgtgggtggggctcatactggaattccatgccagcccaggtagtctgcagctcctttaaggttttctccatacccatctcttttgcagctttgtccacaatgccccggacctcatcctcatagtggtgcagctggagctgcagcaggtgcgctagggtggtgtcctggtccatagtgaagctcacaccggtggcctgcatcagctgcctccagtgccgctcccggatggctggattctgcagctcagctactgccctcagggagctcagcgtgttccacacagtgctttccaggcctgtgaatgcatcccaggccctgacctc

SEQ ID NO: 11704 - DNA, 520 bp, Homo sapiens
  MAP TO AL133417.9; EXPRESSED IN HELA, SIGNAL = 0.4; EST_HUMAN HIT: BG743293.1, EVALUE 0.00e+00; SWISSPROT HIT: P11161, EVALUE 2.00e-18; NT HIT: gi14740084, EVALUE 0.00e+00
ggggtccccacaccacctccttctgagcctcccctttgccttgggttgatagtcaactcacctaagagagactagaatgggctaagttttaggaagaacctgcttctaggtggaaagggggcagtgctagctccaccaaagccctttgcccaacaaagggagagagggacaggaaagggtggtagtgtttgttgtgcagctccagtggacaaagggcctccgggacctttgggagctggtgtatcagcctgagtctcatctcaaggtgtccgggtccgagaggagcaaggggcgagcggccctccgccaagactgctgctgttactgctgcacagggtacccccaggctgcacgcccccagagcaggaggctgtagagggggctggcaccgatgcagagggggcactgcttttccgctctttctgtctcaggtggatcttggtgtggcgcttcctctcatcactccgggcaaactttcggccacagtagtcacaggcgaagggcttctcaccggtgtggg

SEQ ID NO: 11705 - DNA, 557 bp, Homo sapiens
  MAP TO AC005006.2; EXPRESSED IN HELA, SIGNAL = 0.37; EST_HUMAN HIT: AL530043.1, EVALUE 0.00e+00; NT HIT: AF182714.1, EVALUE 3.00e-18; SWISSPROT HIT: Q12948, EVALUE 6.10e-01
gcgcaccctaatgacctggggactgaagagaaaaaaggaacgaggatttcatctaaaagcataacgtgggcactaggcgaggaggaaagtggagaccacctggcacggggcagaggtgcctggagcccacgcttgagcatcggagaccctggcatcctagcagccgcgaccttggctctgccctgtctgagctggaaacacagcttagcttctagacatcgctggcacaggcctggcacaagtaagcagtgtcctcacctgtctgaaacgggacacggggtcggaggaaccaggatctagcctggccccaagcggaactctctggtggcccagaggtcgtcactggggagcccgcctcctgccctagcctcactggtgcggatgtgccgctgcccgccggagcaccatgatggcaggatgacctcagccgaagtaggagcagcagctggtggtgctcaggcggctgggccccccgagtggccccctggcagccctcaggccctccggcagcctggccgggcccgagtggccatggcagcactggtgtggctgctggc

SEQ ID NO: 11706 - DNA, 512 bp, Homo sapiens
  MAP TO AC005531.1; EXPRESSED IN HELA, SIGNAL = 0.62; NT HIT: U07977.1, EVALUE 1.00e-04; SWISSPROT HIT: P12978, EVALUE 1.00e-02
accccggcatagggctggaggggaaaatgggtgaggtcagagacaaagaagagggaagggtcaggcggggctccgggttccctgccacaagcctccgctggtgttctgcttttctcccgagagctcccgcccaccctgcaaccctcgcctggccccgctgccgttctcagctccctcccagtgcctggtggaggccggggctgtgtcccgaagggggtcggggcagcagaacctcagccacagccaatcacagcggggtccttcggggaggggcgtggcctgacaacttcggcgacgcggctggaccaatccggacggaggagagcgaagctcctctgcactgggcccaggtgcgctcctcagcgtctccgggtggcggggcgcgcgggatggaggagtcttgggaggctgcgcccggaggccaagccggggcagagctcccaatggagcccgtgggaagcctggtccccacgctggagcagccgcaggtgcccgcgaaggtgcgacaacct

SEQ ID NO: 11707 - DNA, 507 bp, Homo sapiens
  MAP TO AC022845.2; EXPRESSED IN HELA, SIGNAL = 0.64; EST_HUMAN HIT: BF336201.1, EVALUE 0.00e+00; NT HIT: AB057755.1, EVALUE 2.00e-09; SWISSPROT HIT: Q9AJ79, EVALUE 9.30e-01
aagtggctcgcctgggctcctctgtactacctattaactttgatggagaaagattccctgtatcactttcatattttgaggggaaggtttcagtttcttccttcagtagtttttctaagccagcactgaattcgaggaactctgatttgggttgaacaattgtttccctcacaatttcttccacttcctgagggaggcctttgccatattgagcaacaatggaagcaaatgagctaagcgtctggtctgatggagacatttgggcagctaaataagatccaacttcatgagttttatcaggaactacattggaggaataaaaatccttcctgtctggaactatggtgtccatcgtagcccatggtgatatcactcctggaggatttagggggctacatactggctgtactgcttcaggaaattctgggttcacttctccaggacctacttcccttccagctggataacttaaccatacttctccacacagcttctgtaatgcagcac

SEQ ID NO: 11708 - DNA, 543 bp, Homo sapiens
  MAP TO AC012678.1; EXPRESSED IN HELA, SIGNAL = 0.51; EST_HUMAN HIT: BG107777.1, EVALUE 0.00e+00; NT HIT: AB002705.1, EVALUE 5.20e-01; SWISSPROT HIT: P45815, EVALUE 3.90e+00
acgggcgcatcaaccacgtctttaaccactttgccgatgtggagttcctctccaccctctatagtctggatggagactgtaggcccaacctcaagaggatttgtgaaggaatcaataagttgctagatgagaaagtcctttaaatgccttccctcctactggactttgctgctttaaagttacagcactcaaccatgatctgggtgagaatcaagaacataagcagaaacccttgtcaaagatgtccatgttctttcctgttcatccctctgatgctgattctgatgctgaactgagctcaggtgtgtttttcttccaagctttctagcaaggtttctacttaaaatcacctgtgtgcaagcccaaaggacatttcatctattctaagcagaaaggctgttttgttcattacagtgagtgctgttcatctcatggagtgggaggagcactaaaccaggagacagaggacatggatttggtttccagcttaaccagttaggactctgtcctctgcattctggaaccatgatgcctgcctgcctg

SEQ ID NO: 11709 - DNA, 516 bp, Homo sapiens
  MAP TO AC006059.3; EXPRESSED IN HELA, SIGNAL = 0.6; EST_HUMAN HIT: BI825242.1, EVALUE 0.00e+00; SWISSPROT HIT: Q07954, EVALUE 1.60e+00
gcaaagtgcagcgccacgtcctccaccagcgagaactcagccgccggggagtcagttgtcttctcaaccagcaactgcggggacagagggcacaggagtgggtcaaggccagtgggcccctgcccgcccttcccccagcaccactcccagcattgccagccatccaggaggcagcccatcactcgtggctccactttacagcaacagagccgaaactagcaaggaagggattcaagcctgagtgagctgcctcagagctcaggctccactcgtgaccctctgaggctgaagatcaggtcctgtcactttctgggcctctgggtcatctcctgggaaatgggaaaagtcatcccaggaagggaaagggaaggaaaggggatgaaagagagaccacagtgaccaaccatccaggtttgccagggacctgggcattttctggggtgcagggctttcagtgctagaaccaggaccatcgcaggcacaccgggaccaggtggtcaccccaggagggccaca

SEQ ID NO: 11710 - DNA, 521 bp, Homo sapiens
  MAP TO AC006460.3; EXPRESSED IN HELA, SIGNAL = 1.6; SWISSPROT HIT: Q13506, EVALUE 9.00e-27; EST_HUMAN HIT: AU131373.1, EVALUE 1.00e-107; NT HIT: AF052744.1, EVALUE 0.00e+00
tagccatgcccacgagtgccatgatttccaaaaactcctcttctcctgcttcacagagttgctggacatcatcaccaccttgttggataaaggcatcaaaataagaaagtagattggctttttgtaatattctatacagctgcaactcccccagggtcctgggtaaggccgcagccattactctggatgggtttaacctgccaaaaaaaaaaaaaaaagtaaaaactcatcatacttgcttcaaactccttacaccaaataggttacactacaggttttaagaacaaaaacgagaagcatctgcatcgtgactgcctgtgaaggcagcattctctctacatactttatctcattctgaactcctaaaaaccttataggtcagtaactaaactgacgtactttcccaaaagagaataaatggtaagcaggaatctggaggttcaaaccaaggatcaaaccaaaggttccatgtcccgtatttttggctatatactttgctactgccaaggtttggacgcagg

SEQ ID NO: 11711 - DNA, 524 bp, Homo sapiens
  MAP TO AC005609.1; EXPRESSED IN HELA, SIGNAL = 0.74; SWISSPROT HIT: Q9Y5I1, EVALUE 8.00e-96; EST_HUMAN HIT: BG023736.1, EVALUE 1.00e-79; NT HIT: gi14861872, EVALUE 0.00e+00
gtacagccccacgcggaacgggatgcgcgagccgcccgccgccggctgcaattcatatgaaagccacgcgttgtagcctgagtccgcatccactgcgcgcaccttcgccaccacgtggcccgcacccaccgaccgcggtactagcttgttaactgcgcctcccgcgctgccagcctgagtcgccagcagtgccggcgcgttgtcgttctcgtccagcacgaacacctgcagcgtcacgttgctgctcagaggcggcacgcccgcatcgcgcgcgctcacctggaactgtagcagctccagctcctcgtggtccaacggctgcagcgcgtacaccttgccgctctccgcgtgcaccgacacgtagctcgacagcgcgcggtcgcccaaccgccgctccaccagcgagtaggacaccagcgcgttctcctgcgcgtccgcgtcccgcgccgacactgtgaagatgtggcagcctggtgggttgttctccttcacgaacacggtgtactcgggctgtgcgaacgcag

SEQ ID NO: 11712 - DNA, 541 bp, Homo sapiens
  MAP TO AC004805.1; EXPRESSED IN HELA, SIGNAL = 0.44; NT HIT: gi4757823, EVALUE 1.00e-97; SWISSPROT HIT: Q9Y2T1, EVALUE 4.00e-29; EST_HUMAN HIT: BG984045.1, EVALUE 2.00e-97
gaccccttccaaaaccggcgcttagtggatctggtgactcagaggcatcaaaagctgctgtcctctctctctctctcaacctcttctgagacactagcccgggataataagtaacccacattagtgaatactgcttgccactgtttgaagtcagcactggaagactgcaggtatttactgtatgtgcatcgctttccccctgtttcaacaacaaaaagcaagatcaaaaagggttcatggccagcagtcctaactcaacagacctgtcagtctctgcagcacacccatccacccatccaccatacttaaaacatctgcaaagtccacagcatcagcccacccgcccccgtcaaagtcttacctgtatccactgtcaacagtttccgtggacctcacactcgccgtggccctcagagttttgctggacaagccaaccacggttggcgaaagtttgcacttgaagtcggcacaagtccactcctcttcttcattcaaggtggggagatagccacacacgacctttaggctcccgagtccccca

SEQ ID NO: 11713 - DNA, 570 bp, Homo sapiens
  MAP TO AL136324.2; EXPRESSED IN HELA, SIGNAL = 0.47; NT HIT: AB041713.1, EVALUE 0.00e+00; SWISSPROT HIT: P43088, EVALUE 9.00e-70; EST_HUMAN HIT: AU140128.1, EVALUE 8.00e-41
caccgctcaatggccatcacactgcctagaagaagtgggcacagaccagaaaacaccatgcagataccaaaaatactgcaaaggacatttgattggtcaaagcggatccattctttatcagaagcatatacaaatactgctatggctccattgatgagatggccaaagaaatcagtgattaccaggccactggccaaaagcagaaacgatgccttggacttctgtctaaatctctgatatgccttcatgagaatggcgatggcaaggctgtttgacaagattcccactgtcatgaagattactgaaaaaaatacggaaagccggttttccgtctggcaggttgtgtttgaaagaagcgcagctgcaggagacactagctgtttggaattgttcatggacattgttgtggagataaaagccaaccactcaagtcatcttcctctcaaaactgtgcaggattgcagtccagacatctgtaggataaagaggagaggaattatgaacaccgcattactgctcatctgacgtttatgactgacgtgccccaccacccggtggtgggatgggttt

SEQ ID NO: 11714 - DNA, 508 bp, Homo sapiens
  MAP TO AC009516.17; EXPRESSED IN HELA, SIGNAL = 0.28; EST_HUMAN HIT: BI465158.1, EVALUE 0.00e+00; NT HIT: gi14777593, EVALUE 0.00e+00
accaggccgacactggagcgcctgtatctccttccaggaaggatggaggtcacacagggccttctgcgggtcgcgttgcagctgctgctgcctgtcctgcccgcgcgccgcctgctgcagcagctgttcggcgatcaagccggaggcatcgcgctcttgacacgcgcggcccaggtggccgcgcacttcgctattctcagcctccaccttccgcacccagtcggtcttggcctgcagccgcccattctcctccgccagccaggcgtttttgagcagcgccgcctgcagctgtgtctcggcctcctcgccacgtcgccgcgccggggccgcctgcgcgcccagctcctggcactcgcgccgccgctggtccagctcgcgctccagcgccagcatctgccgtcgcacctcctcgcaggttgcgctctggccgcccgcctcgggccaagcgccaccgttgccctgctgaagcatcaactgcctctgcaggcgcagcacttcccgctgggac

SEQ ID NO: 11715 - DNA, 509 bp, Homo sapiens
  MAP TO U73479.1; EXPRESSED IN HELA, SIGNAL = 0.95; EST_HUMAN HIT: BF955755.1, EVALUE 4.60e-02; SWISSPROT HIT: P25490, EVALUE 1.00e-03; NT HIT: AY029224.1, EVALUE 4.80e-01
agggtggcaaacgtacgcgggcacgtgcacgtgcttttggggccgacagacgcgccagttgcctaggcgcatgcgtctggctatcccagaagcacctgcgccttccggctcgtgctttcctcagtctcgcgcctttctctgcagctcgcgcctttctctgcagctcgcgcctttctctgcagctcgcgcctttctctgcagctcgcgcctttctctgcagctcgccccttcctctgcagctcgccccttcctctgcagctcccacctcactcccctcagcgttctttttcccacggtcttcccgttgccgctaacctaactaactctcagccatggcctccaacgaagatttctccatcacacaagacctggagatcccggcagatattgtggagctccacgacatcaatgtggagccccttcctatggaggacattccgacggaaagcgtccagtacgaggatgtggatggcaattggatctacggtggccacaaccatccgccattg

SEQ ID NO: 11716 - DNA, 510 bp, Homo sapiens
  MAP TO AL079336.5; EXPRESSED IN HELA, SIGNAL = 0.62; NT HIT: AE001547.1, EVALUE 4.80e-01; SWISSPROT HIT: Q20076, EVALUE 6.20e+00
tgggcaaatcccaagccctggttgaccatcccaggctgacaggcacgacagctcaaagctgaaaatgattctccatccacctccactgccaacttggctcatccctcatctttcatggctgcttcaacttgccatccaggttttggcttaactgtggactccccaaagtggtcttctctgacaatactatttaaagtagcccttccccaaatgttctatactatctttcaatatttaatattttgattctgtacatggcacttcttgcttcctgatattgtcattgtacatggacttgttcattatatgcctggcccccaccccagactgtgagctccatgaaagcagacatctcatctgatattttcaccacggcattgccagtccaaatcacgcctgacacaaagcatgccaccatctatctgagtcttcatcaggaaaacaaacttgcagagaggccagccaacaccaacatcactatcatcagcatcaggaacatcagtaccgcca

SEQ ID NO: 11717 - DNA, 525 bp, Homo sapiens
  MAP TO AC000359.1; EXPRESSED IN HELA, SIGNAL = 0.38; EST_HUMAN HIT: BG718594.1, EVALUE 1.00e-125; NT HIT: gi9966790, EVALUE 1.00e-128; SWISSPROT HIT: P22831, EVALUE 1.70e+00
ccggctgttctcccaaccctcatcacagacagcttttcacatgcaagtgcggcctggagggcttgtggcactgtgtgatggagaaggaggcatgttatatccacagggcacgcatctgctcttgggcatgggctgcaaccccatgaggggtgaggagtggttcatcctacagcactgcccaacctgggtcagcctcaggtcaaagactgggcggttcatctcagtcatctacggcaagtgctggacccaacacagatggagggagagagggctggctgttaaaaagaggaaaatgtgtttgggatcagcacagatttttgagtctgctaataaggaagatcctggggacccaaggggatcttttgtgccatcgagaaggacagaaaagcatgggtatgggatttaggggaaagttgcctaggtcttctccagacctaccatggtccaacagaaagtgatgaagtttgaggagggagggacagaagccccggtcataaaacatggaggaggggccgagactgaggg

SEQ ID NO: 11718 - DNA, 527 bp, Homo sapiens
  MAP TO AC004554.1; EXPRESSED IN HELA, SIGNAL = 0.2; NT HIT: gi14764512, EVALUE 0.00e+00; SWISSPROT HIT: P23920, EVALUE 5.70e-01
acgctggtggctttgggtcgggaaccgaaagggactcaggcaaaggtgccaggcggggctggcccggggtttgcccagggcagtggagagcaaagcccagctcacgcgccgccggtgcgctccaagtgccccggcggcggcaggagcagcagatccatcaccagccttctaggaaaatgggtctggggacctcctgcagccgctagaaccttcctccggagcccaagacgcgaagagggtcaggaagaggaggaggaaggtcaggcgctcgctgggttcccagctccagcctgccagcgccactcccccttcctagctgaggcgggagacgcagcgctcctgctcgctggctctggatggcctctaagactccagcaagctcctccttgcggcccgaggacagtcccgagggccagggagaaggctgcctgggcgtgcgcccagggcgcgtccaccgcgctcccggcgccgcgagaacttcctcccgctcctgagccgggcgcctgagctgcgcctccctgcactct

SEQ ID NO: 11719 - DNA, 508 bp, Homo sapiens
  MAP TO AC024049.2; EXPRESSED IN HELA, SIGNAL = 0.44; EST_HUMAN HIT: BE621358.1, EVALUE 0.00e+00; NT HIT: V00777.1, EVALUE 4.80e-01; SWISSPROT HIT: Q08274, EVALUE 8.20e-02
gctcggactccgcggtacaggacgtggacaccaggcccggccggcgtgctggccccggtgccaagtctgcgggcgcggggctggaggccccattgctcccggtccccgttcgcgcgcgtcggcccgggtcgccgtcctgaggttgagcggagaacggtgatttctaaggaaacttgagccaggtctaacttctttccaagcgtccgcttgtacatacgttgaacgtggttctccgttcccaccttcgccctgccagcctagagggaccgcgctgccgtcccttcccgggtggcccctgcctgcccccgccctccttcgttctcttctcagcctccctttccttgccttttttaacttcccctccccgttttaaaatcggtcttattttcgaagtatttataattattatgcttggtgattagaaaagaaaaccttggaggaagccccttctttccccagccggggtccgccctcagtcgcgagtcacagcatgagtcgctcgccagga

SEQ ID NO: 11720 - DNA, 517 bp, Homo sapiens
  MAP TO AC024052.2; EXPRESSED IN HELA, SIGNAL = 1.3; SWISSPROT HIT: Q10256, EVALUE 2.00e-14; EST_HUMAN HIT: AI073430.1, EVALUE 0.00e+00
tgagaacgtagtcccaaggccaggtttagttgttactgatgttttttaatgattacattgccagtaagctcttaacttataattgccggggacctgaggctccctcaaggtggtaacatatttataacgtgctttaatgctcttttcgtcctgaatccatgactgaatgtgtaatttccttgtccgaagactcatcttgcccacttaccatcctagagcataagggcaactctccctcaggaagaaaataagtctgcgtgccagtggtgccgatgaccagcacatttttcttcaaatcgatggaacattgatgtctccggagcatatctaggcctagaagcatatccatgggttgatcctcaagtatggagaaagagcactgtaagaaatcaccttcaatttgaatctgagctagatgaacacggccaataattctctgtgtgcccactcctttagcaaccccagcccaccgtcggtccaccagcctcatgatgttacatcgctcggcacaagcctg

SEQ ID NO: 11721 - DNA, 512 bp, Homo sapiens
  MAP TO AC003003.1; EXPRESSED IN HELA, SIGNAL = 0.62; SWISSPROT HIT: P47861, EVALUE 2.80e+00; EST_HUMAN HIT: AW963392.1, EVALUE 0.00e+00; NT HIT: gi7706558, EVALUE 0.00e+00
tgcctggcacttagctgctgtgatgatggcaaggtgtcaatagtgccaccaaactatctgtcacagaatcagtgagtatttcagagtgtggagaaagatggcaaaggtcattctgaagcagagtaaacaatgcaagaatctgcttacctgcaaagtggcccaggtctgccccgtatgtggctgtcttcattgttatttctggtggctctcaggtcttgagtcaagacgtcccagctctccactcatcgatattaaacccatcgagtttggcgttctcagcgccaagaaggagcccatccaaccttcggtgctcagacggacctataaccccgacgactatttcaggaagttcgaaccccacctgtactccctcgactccaacagcgacgatgtggactctctgacagacgaggagatcctgtccaagtaccagctgggcatgctgcacttcagcactcagtacgacctgctgcacaaccacctcaccgtgcgcgtgatcgaggccagggacc

SEQ ID NO: 11722 - DNA, 528 bp, Homo sapiens
  MAP TO AC022517.1; EXPRESSED IN HELA, SIGNAL = 0.83; NT HIT: AB020683.2, EVALUE 3.00e-76; SWISSPROT HIT: Q92932, EVALUE 9.70e-01; EST_HUMAN HIT: BE728932.1, EVALUE 5.00e-48
gctccagtggggatggcagccacagcgcctcctctgaggggaagtgagcaggcgggggcggcagctgtgggggcagcaggccgaagctcttcttcttccgctcgctcttggccttggttggccgcagcttgcccctcccgtcctctgtgggaagaggagagggaggtcagggaggagaacccgggctcaagtgctggtcccacgctccccagaaatcccccaactttgactgggatggtcgagggctccttccacccagagaggccacacgaacatgggtgggcagagaacacaggcttcgggccacctcagatcaccgcaggggcacctggccaggcacccccaggccttggtctccccacaacgcaggcgcagcagcggcacttgcctgccaaggcctgtgaggacccaccaggtgttgctctatgtgccttctggggtcacgggaggtgaggagacgcgtcaccaaacccagccaggggaggctgctctgtcttctgggctcccacctgggtgggccgtaccaaa

SEQ ID NO: 11723 - DNA, 500 bp, Homo sapiens
  MAP TO AL132654.12; EXPRESSED IN HELA, SIGNAL =   1; NT HIT: gi14770873, EVALUE 0.00e+00; SWISSPROT HIT: P37370, EVALUE 9.00e-03; EST_HUMAN HIT: AL043012.2, EVALUE 0.00e+00
cggctctgccaggccttcacctctgccacgaggctgtccaggatggctgaggtggtgctcggggtgcacgaagtctccagtgagaccaaccgttgctctagcacagccagctctgtctgtacaaggggccgagctgacctgcccggagaggcgctgtcatggcttagctccccagccaatgttgctaggcgctcctcgaggctctgcacgcgctcttccagcatggtcccaaagccgcccactccccacccccccatgtccaacctcagacagcatccccttgctccaccctctgtcccattgagcgtctccagaccctcaagcagcccgtccacacctccctcgagcatggcagcagagagcctcgtaagctcatccccggccggggcaccggggcccctttgggtctcggtgactgcctgcagggccctctcaaggccatccatacgggcattgatcaaggctagttgcccacagcagctgcccctgccagacacgct

SEQ ID NO: 11724 - DNA, 524 bp, Homo sapiens
  MAP TO AC006059.3; EXPRESSED IN HELA, SIGNAL = 0.61; SWISSPROT HIT: O60662, EVALUE 9.00e-16; EST_HUMAN HIT: Z25382.1, EVALUE 1.00e-36
ggcctggccttcacgcagaggccctgcccaggatcctcacaccgaccttgctgctccttactgtgccccaccccaacccctgtgcagggccagggcctccaacatatgccaacttggggctaccacacccctgaaattaagataccaaagttatgctgctttttggcagctgcctattgactgtcttcaaccttcaagtaggtggctatcagtcaacctccccagtctacatctcaccctagacccagtggcattcacttgtgtagacacaagccccttctgggccccaagactgtccacagtgcctagagcccagcattagctggcggctcccaaggctggtcaggcacctgcaggaagtatgcgctcatggggtcctctttgttgtcttcgttgtagaagaggcctccagccacgaagacctggttctccttggtaaccaggctgacgtggttcttggggacctggttggagagggaagcacagtagcactcgttggctgctggatcgtaggccacagcgcc

SEQ ID NO: 11725 - DNA, 507 bp, Homo sapiens
  MAP TO AC003966.1; EXPRESSED IN HELA, SIGNAL = 0.43; NT HIT: X91826.1, EVALUE 1.00e-108; SWISSPROT HIT: P51815, EVALUE 3.00e-37; EST_HUMAN HIT: BF091453.1, EVALUE 0.00e+00
tgttcatggtgtgggaaaagcttcagtcaaaatacaaatttacatacacaccaaagaactcatacaggagaaaagcccttcacatgtcatgaatgtggaaaaaaattcagtcagaactcccaccttattaaacaccggagaacccacacaggtgagcagccatatacttgtagcatatgcaggagaaacttcagcaggcggtcaagccttcttagacaccagaaactccacctgtgaagagaagcttgtccagtgtcctcattctgaagacattcaccaaatggagcttggcactaaaatttatgtaaaagaaaaatcacaaaccttgaaaaattttacatcagaaaatgggataaacatacatttcacagaaaataatcaagacttgctctgcagccactcagtagtcttctgtggtcacagaagtaaacattgttggctttgtattgatctctccagtcatttttgaacacatccaatagaaacattggcagcatggtcttccaa

SEQ ID NO: 11726 - DNA, 526 bp, Homo sapiens
  MAP TO AC005500.1; EXPRESSED IN HELA, SIGNAL = 0.42; EST_HUMAN HIT: AL041090.1, EVALUE 2.00e-38; NT HIT: gi14756466, EVALUE 5.00e-69
cgtcctcgttcgcgatgctgtgggcggcgacctcgttagcgatgccatgggcggcgtccggcttagcgattgcttgggcggcatcctcgttagcgacgacgctgtggagggcgtactcgttaacgacgccctggacggcgtcctcgttagcgacgccgtgggcggtgacctctttagcgacgccctgggcggcgtcctcgatagcgacgcagtggacggcgacctcgttagcgatgccgtgggcggcgacctcgttagcgacgccgtgggcggcgtcctcgttagcgatgccgtcggcgacatcctgggtagcgatgccctgggtggcgacctcgttagcgatgccgcgggcggcgtccggcttagcgatcgcgtgggcggcatcctcgttagcgacgccgtgggcggcgacctctttagcgatgccgtggacggcgtcctcgttagcgatgccctggacggcgtcctcgtgtgcgatgccctgggcggcgtcctcgttcgcgatgccctgggcggcatcctcgtt

SEQ ID NO: 11727 - DNA, 515 bp, Homo sapiens
  MAP TO AL031346.8; EXPRESSED IN HELA, SIGNAL = 1.3; EST_HUMAN HIT: BF913951.1, EVALUE 0.00e+00; NT HIT: gi14779283, EVALUE 0.00e+00; SWISSPROT HIT: Q08264, EVALUE 2.40e-01
tgagcccctgggtccctgacaatctgtcttagtggagaaatatcacagatcactgatcttctttcagagagggaacccccaggctcatgtgctgatgactgaggctctatttcaaactttctgggaattggatagtcagtcaaattgatctgtttcatttcaggagctgtgctgcttgatttcctttcccaggggccccagtggggattttctaatagagacccaatgcttttgttcagaaggcccctgctagctaattcattggtttgactaaccaagacattgggccttgtggttccttctaggctaccagccatcccctgatgctcttgagtactcctagaatatctcctgtcagggtggtggtggtaaccctgaagcacttcctgcaggaggcttgggaatttttcatttctaccctttcgttccccatggccagtgaaatctcccttttcttgccctgtaggatactgaggaaagccactgacatttcgtggcacggctgacccgaaact

SEQ ID NO: 11728 - DNA, 534 bp, Homo sapiens
  MAP TO AL139824.7; EXPRESSED IN HELA, SIGNAL = 1.2; NT HIT: gi11420990, EVALUE 1.00e-117; SWISSPROT HIT: P41968, EVALUE 8.00e-39
cagacaggcgtcgcacaccctgggtgtttggaaatgagtgcagagagcatgcagagaagccttcgctgatttctcccagtgactatttgggaaatcagagtttgtgacttacccatcttggaatcctttcagagaatctgttgttcaccaattttcccctttaaaaggctttgtaaacttaaaaacaaacgacaagtacaatcatggctgttaacacatttttatattttctaagtatatatatttttctttctaaacacctcacgtggatggaaagtcaaaagtgacccgactgatgatcatttccatggccctgcatcctatcccaagttcatgccgttgcagccacagagaatctccctaaaggtgttgcgcaattccaggctccggaaagcgtagatgagtgggtcgatgacggagttgcacatgatgaggaccaggtaggtgttgaagtgggcagtgtagcagatgcagtaggggttggtggggcaggtgatgatgaggaccaggtggaggaagaagggggcccagcag

SEQ ID NO: 11729 - DNA, 506 bp, Homo sapiens
  MAP TO AC008120.15; EXPRESSED IN HELA, SIGNAL = 0.76; SWISSPROT HIT: P19835, EVALUE 6.00e-04; NT HIT: gi13647848, EVALUE 8.00e-77
gcgagattcagaaaggtagttggaaggattaaagagtgttgtgaatgacaaagcactataaaataatatttattactgctgaacaataacaagtcttgtataattcaaaaaccaaaagcagatgtaattaagtaatgcaattgagatatgtgctttcttaacaagcttctaaaacaccagaaataataaagcaatgacttttaaaaacaccataatatagaattaattttgaataaaggaatgtaatatcttgcaggtattaatccaatatgacattatctgggcataaatatctattattttaaaatggttaaaataacatttttattaaaaataaacttcattccttaggtacatacccagttttagcaaaatttgtccagtatgtcattacaactgcactcagcatcacatcatttttggagaaattgcaaggaaataactctgtagggccaatcatggggattcccagtacatagggaacctcgtctccgtgggctgcatca

SEQ ID NO: 11730 - DNA, 515 bp, Homo sapiens
  MAP TO AL133232.9; EXPRESSED IN HELA, SIGNAL = 0.16; NT HIT: Z27495.1, EVALUE 4.90e-01
ccctcccttcctccttcggcagctgatggagcaagagcaagacagcagcaactgcatcatttattgagtgccaggtactttatattcatcctctcatccactcccacaataaccctgtgaggtgggcatccttgttaaactcatcttgtaggtacaggatttgaagatcaaccaggtgataaatttgctagaggtcactcagctagtaattatgtggaatggccatctaagtttagaacatgaggaaaatgttattaaatctattaaatctcttaggttttacttttctggtccggaaaatggaaacacttaaagctaccttgtagtattgttggaaggattgaggaagggatgtacagtgtctagcatacagcatgtaatacacactcactaaatgatacccatggtgatgatgatggtgaggctggtgctactaccgctgctgatggtggtggcgataatggtgatggcaatggtggcgatgatgatgataaaggtgatgctgctgctgctgc

SEQ ID NO: 11731 - DNA, 512 bp, Homo sapiens
  MAP TO AL355076.2; EXPRESSED IN HELA, SIGNAL = 2.5; NT HIT: gi14165462, EVALUE 0.00e+00; SWISSPROT HIT: P26599, EVALUE 2.00e-39; EST_HUMAN HIT: BG760544.1, EVALUE 0.00e+00
ccccacgggtctgctgtgtgtgccatggacggcattgtcccagatatagcagttggtacaaagcggggatctgacgagcttttctctgcttgtgtcactaacagaccatttatcatgagcagcaactcggcctctgcagcaaatggacatggcagcaagaagttcaaaggtgacagcagaagcgccggtgtcccctccagagtgacccacatccagaagctcccatcgacgtcatcgaaggggaggtgatctccctggagctgccctttgggaaggttactaacctcctgatgctgaaggggaaaaaccaggccttcatcaagatgagcacggaggaggctgccaacaccatggtgaattactacacctcggtgacgcccgtgctgcgcggccagcccatctacatccagttctccaaccacaaggggctgaagaccgacagctctcccaaccaggcgcgggacccggcagccctcaggccgtgaactcggtccagtcggggaacctggcct

SEQ ID NO: 11732 - DNA, 549 bp, Homo sapiens
  MAP TO NM_006994.1; EXPRESSED IN HELA, SIGNAL = 1.4; SWISSPROT HIT: P18892, EVALUE 9.00e-15; NT HIT: gi14751917, EVALUE 0.00e+00; EST_HUMAN HIT: AV651052.1, EVALUE 0.00e+00
gagtccctttgccgggtgggcgtcttcctggactatgaagctggagatgtctccttctacaacatgagggacagatcgcacatctacacatgtccccgttcagcctttactgtgcctgtgaggcccttcttcaggttagggtctgatgacagccccatcttcatctgccctgcactcacaggagccagtggggtcatggtgcctgaagagggcctgaaacttcacagagtggggacccaccagagcctatagaatcaattccttggactcacagccatgcagataagccctggccatctcagcagccaccgcacaacccccctaatgaaagacacgccctcctcccctctggtcacgtaagagaacatcttccagctgcctttttcacacccactccagccctctgccccagttttctcctcctcactagtctgtggctttagtagttcctttgcttgtaattatgggatgggatccaggcatagggaactagttgtttcatagctcccagtcaaaaagaaagtgagagaagctgttgggcagcgaacc

SEQ ID NO: 11733 - DNA, 562 bp, Homo sapiens
  MAP TO AC011506.1; EXPRESSED IN HELA, SIGNAL = 1.3; SWISSPROT HIT: Q05481, EVALUE 5.00e-21; NT HIT: gi14761534, EVALUE 4.00e-17; EST_HUMAN HIT: AI041519.1, EVALUE 0.00e+00
cctcctgcctcagcctccccagtagccgggattacacatgcgtgccactgtgcttagtttttttcttatgagatattggaaaatgatgagactttgctcattggaagagaaacagcaacagacactaaaataaatctgtaagaaagcaacagacataatcaaacagaaaacaaaactcatgggggaggataaatatttattcaaacatccgggcaattcctaccaagtgctttatgtgtatatgtcatctggtaacattggagaaaaaccatcattcactgtctcttggggtggaggatgtggacctgactctggaatcactgggaggtggtttcccggtgtgttttcaggtgacgcttgaatgtccccagctgacggaaggccttttgacaggtgggacatttgtagggcttctctccggagtgggtgcgctggtgaacgttcaggttccccttgtggctgaaaactttgctgcagtatttacatttaaacggcctctccccggtgtggatcctcttgtggccctgtaaggtggactcgtgggcgaaccgcttttggcaga

SEQ ID NO: 11734 - DNA, 503 bp, Homo sapiens
  MAP TO AL022312.7; EXPRESSED IN HELA, SIGNAL = 0.38; SWISSPROT HIT: Q09327, EVALUE 2.00e-15; NT HIT: L48489.1, EVALUE 0.00e+00; EST_HUMAN HIT: H92400.1, EVALUE 6.00e-60
cgttctgtcctggggcggagtctgtactgcgagttgagcttttcccaaggcgcatgttactcctggagccaagcctagcagtgcagccgcacagtcagggtggggtgggccaggcggagaagcaggctgcagagggggcagggtggtggcctggggatctcagggaagggctatgggagcacggcggtgtcctcagtgctggggctttcaggggccttggtaccgcgagttgactcttgggggcaggaggtcactccatgcaggggcagcaggtgctggccaccacattgtccagcaaggtggcagcagaggcctcctaggtccccttcctaggaaaggagcctgggctgccctgatgagtctcctgtctctctctctcccgcaggatgaagatgagacgctacaagctctttctcatgttctgtatggccggcctgtgcctcatctccttcctgcacttcttcaagaccctgtcctatgtcaccttcccccgagaactggcc

SEQ ID NO: 11735 - DNA, 508 bp, Homo sapiens
  MAP TO AC012313.5; EXPRESSED IN HELA, SIGNAL = 0.8; EST_HUMAN HIT: BE905729.1, EVALUE 2.00e-62; NT HIT: gi14755583, EVALUE 2.00e-62; SWISSPROT HIT: P03186, EVALUE 1.60e-02
ttggaggggcacatggggaggcttagggttattggagttggggtggggtgggtgggtgagtcaacatagagtaggccaaggcctgaaccttttcgggagcagtgattgaggccaacaccctctcctaggggtgtgctagggtttgcagcgttaatggggggctgtagacggcctggccaggtctgaggtagggggaggagggagtgctggagtgtcctgtgttgggaatggggactgtgaagggcagctggggagggatgggttagcgcgccttggagtgtggtgcactcgagccctgtcctgcaacaaggggtgaggggacagggacgttgggacagatgggggtcctcagttgacctctccctgccctcctcttgttctgtgcagatggcggctgcagaggctgtgcatcacatacacctgcagaacttctcacgctctctgcttgagaccctcaatgggcagaggcttgggggacacttctgtgacgtgactgtgcgcattcgtg

SEQ ID NO: 11736 - DNA, 526 bp, Homo sapiens
  MAP TO AL035703.17; EXPRESSED IN HELA, SIGNAL =   1; EST_HUMAN HIT: AI967980.1, EVALUE 0.00e+00; NT HIT: gi14726821, EVALUE 0.00e+00; SWISSPROT HIT: O09127, EVALUE 6.00e-45
cctcccacagaaggcaccgcctcgctggggtctgtttccctccctctcccctcccccatcttgctcccacgtccttcccaacacacggacacaggtggcctcgcatatttcctgatgtaggaacactggaggtttatccatcttcccaggggctgtgtgggtcactcaggtgcctgtgggctctgacgtccccccttacaccctggcagccctgccaagaccaagcaccgctgccggctgacccatgcccaggccatggcgcgctcacccacacaggcatcccgccgctcctcgtagccggcactgcacacgcatttgccgatgggcacgagccactcgccctccgcgctgcagtacatcttgggtgtgtcccgctcctctgagtgccgcacgcactggcccctcacctccaccagtgaggacgagtcggcccccgtcactgcctccgagaaggcagccagattgcgcaccatggcagggcacttcttatagtagatgcggagagagaggatggccaggcaggcac

SEQ ID NO: 11737 - DNA, 501 bp, Homo sapiens
  MAP TO AL121869.18; EXPRESSED IN HELA, SIGNAL = 9.1; SWISSPROT HIT: P05783, EVALUE 4.00e-70; EST_HUMAN HIT: BG335159.1, EVALUE 0.00e+00; NT HIT: gi14766685, EVALUE 0.00e+00
tgcccgtcttgctgctgatgactttagagtcaagtatgagacacagctggcgatgcgccagtctgtggagaacgacatccatgggctccgcaaggtcattgatgacaccaatgtcacttgactgcagctggagacagagattgaggctctcagggaggagctgctcttcatgaagaaccacgaagaggaagtaaaaggcctacaagcccagattgccagctttaggttgaccgtggaggtagatgcccccaaatctcaggacctcgccaagatcatggcagacatccgggcccaatatgacgacctggctgggaagaaccgagaggagctagacaaatactggcctcagcagtttgaggagaacaccacagtggtcaccacagtccgccgaggttggagctgctgagatgacgctcacagagctgagacgtacagtccagtccttggagatcgacctggactccatgagaaatctgaaggccagcttggagaacaacccga

SEQ ID NO: 11738 - DNA, 507 bp, Homo sapiens
  MAP TO D87012.1; EXPRESSED IN HELA, SIGNAL = 0.95; NT HIT: gi14777637, EVALUE 0.00e+00; SWISSPROT HIT: O95985, EVALUE 2.00e-22; EST_HUMAN HIT: BG910301.1, EVALUE 0.00e+00
ggccaccttccacttggggcccgaggtggggtccagcaccagcaccccgctctcacattccacgcactggccgatgcccagcatgctcagcgagtgctggcaggaggggtgcgtacactcgttgcagcccatgcctggcgggagaagggagccctgtaaaggcacgcccactgtgcccacctgccctctgctgcctgctcccaatgcctcaagctcctggatccctcgtcccagcagaaggaactcttcttggccttgctcttggggacagccttgctcatgtttcggctcctggctgccattacccctgttttctgcttacctgaaacctcctcaactttcaaggcccctcgctggcaccatcccagtgggtttcagctgactccatcccccctttgctttgctgccagcttgttactggtaatgccacatgaccctcatgtcactgggccacatggaaccaccctgtcagctactctggcggcagcaggagggcagggatggggt

SEQ ID NO: 11739 - DNA, 531 bp, Homo sapiens
  MAP TO AP000467.1; EXPRESSED IN HELA, SIGNAL = 1.2; NT HIT: AF027153.1, EVALUE 0.00e+00; SWISSPROT HIT: P53794, EVALUE 6.00e-18; EST_HUMAN HIT: M85743.1, EVALUE 2.00e-16
tcctcatcacgtggcgagacctcctctacttcaatctttgtcttttgtctctgctgccttgcagggttggtacagtaggcttcactagacttagctgcaactcagaatttctcctccagcacctgagtaaatgctgatggtcttgtggagagtggattaagagtacgagctaagttctcaatcccaattaagaagcggaaaatttaaactgtcttcttcaaagtttatcacaaccaccaccatcaagacagcaaaccaaaggacaaagactttgaccctgctgtgttgctctgtgtagtccagttcacgtatggtttacagacttggctggggttactaaaaataaataaaaagttggacacttctgtcattggagcgctattattcacaagttaccagaatgagagctgtactggacacagcagacattgccatagtggccctgtattttatcctggtcatgtgcattggtttttttgccatgtggaaatctaatagaagcaccgtgagtggatacttcctggcggggcg

SEQ ID NO: 11740 - DNA, 506 bp, Homo sapiens
  MAP TO AC009288.12; EXPRESSED IN HELA, SIGNAL = 1.2; NT HIT: gi14756466, EVALUE 4.00e-60; SWISSPROT HIT: P29720, EVALUE 2.00e-07; EST_HUMAN HIT: AL110383.1, EVALUE 9.00e-53
gcaggtccacctgggaggatgtcccagcatcagcttgacccatgctgtgatcaggcacctccatgcatcacaccaagcaagcccctgggtgattcacagtctccaccaccagggcactgaccttaactctgtgtttttctagctccccatgaggacaccgtacacgacatcactaacgaggacgccacacacgacatcgctaacgaggatactgtacacgacatcgctaacgaggccgccgacaagggcatcgccaacgaggatgccgcccagggcatcgccaacgaggacgccgcccagggcatcgccaaggaggacgccgcccagggcatcgccaaggaggacgccgcccagggcatcgctaacgaggccgccgacaagggcaccgccaacgaggatgccgcccacggcatcgccaacgaggacgccgcccacggcatcgccagcgaggacgccgcccacggaatcgccagcgaggacgccgcccagggcatcgccaacgagga

SEQ ID NO: 11741 - DNA, 520 bp, Homo sapiens
  MAP TO AP000356.1; EXPRESSED IN HELA, SIGNAL = 0.54; NT HIT: AF169559.1, EVALUE 0.00e+00; SWISSPROT HIT: Q03248, EVALUE 2.00e-07; EST_HUMAN HIT: AW271417.1, EVALUE 1.00e-125
ggggagcaacaggaccacgggactccccttctccatcctgcctcagcagaccacactttctggatagacaggtcgaaggggtcacagcagccaatgctgggctgtatgagtcattgtagcatctgtgaactttgccacagtactagaatcagtgccaagaggtcactgtcaacgagccttcctgatgcgttcctgccccatgactgccctccagtggcaagaggtggtggcgtgtaagtgatggggatttataaaaccagaacctctaaagtacatctgtgttttgctttcagatgacgggcaggtatgagatgtacgcacgggagctcgccgaagctgtcaagtccaactacagccccaccatcgtgaaagagtagccggcttcagtgcctgccttggggtgaggaagacacctctgccccagtggattagcaagtgtggcaggcttaacatgtccaggttctccccaataacattgtccaggttggttttaaaattcccaggcagggggagagtggca

SEQ ID NO: 11742 - DNA, 513 bp, Homo sapiens
  MAP TO AP000557.2; EXPRESSED IN HELA, SIGNAL = 0.2; SWISSPROT HIT: P34303, EVALUE 3.70e-02; NT HIT: gi14777593, EVALUE 0.00e+00; EST_HUMAN HIT: AW846330.1, EVALUE 1.80e-01
gcagggcttttgctggtgcccatgtgctggtagcaattttccttctccccaggctggtcactgactgaaggtggcctgtggttctggggactcttctgaaagagcaggtcctttctacagccctcccaggcctctgcaagctcctgggcttggctgccagcccctgaactcggacattctccttctgagcccaggttggacactggggattgcctccttgggggttcttcaaagaatgcttctaggaacttggcctggggctccccgcagcttccagggttgtgggggctggccttggcactcggaggagccagtgacagcttctgggggcagacggggaaggtgactctgtaggtggatgggtcgccacaagtgtagctaaagggtggagtctctggccatcggtgacacatgaagaagtcctcggggatctgagcaggcactgaatccagggactcaccacagagtgacatggttctcactgagaccttctgccacgtgaggggcacctgt

SEQ ID NO: 11743 - DNA, 516 bp, Homo sapiens
  MAP TO AC012398.4; EXPRESSED IN HELA, SIGNAL = 0.55; SWISSPROT HIT: P18899, EVALUE 3.00e-03; NT HIT: gi14756466, EVALUE 1.00e-66; EST_HUMAN HIT: AA219176.1, EVALUE 3.00e-71
cctggaaactgatgcccactgcagaaagtgttctgagccacatcccttagcttcactagtgcaggtccacctgggaggatgtcccagcatcagcttggcccatgctgtgatcagccacctccatgcaccacaccaagcaagcccctgggtgattcacagtctccactaccagggcactgaccttaactctgtgttcttctagctccccatgaggacaccgtacacaacatcactaacgaggatgcctcacacgatatcactaacgaggacgctgtccacggcatcgctaacgaggccgccgacaagggcaacgccaacgaggacgccgcccagggcatcgccaacgaggacgccgcccacggaatcgccagcgaggacgccgcccagggcatcgccaacgaggtcgccgcccagggcatcgccaacgaggacgccgcccagggcatcgccaacgaggacgccgtccagggcatcgccaacgaggacgccgcccacggcatcgccaacgaggacgct

SEQ ID NO: 11744 - DNA, 572 bp, Homo sapiens
  MAP TO AL139177.1; EXPRESSED IN HELA, SIGNAL = 1.3; SWISSPROT HIT: P08964, EVALUE 4.30e-02; EST_HUMAN HIT: AA381290.1, EVALUE 1.00e-115; NT HIT: M86780.1, EVALUE 5.50e-01
gcgtggagtctgccagtcatctgtcctgaggagaactccacagtaaacacacagaaggacaagggaatcggaagtaactcatgtacagtactttatgtacatctgacttcaccactccttcatccataagatacactttaaagaggaaaaaaattatgcaacgttttgtacaggtacaataccaacaaaaaggaagtttgcttgaaaagtctacagaaaagaatgctgaacactgaatagtgggatggaatagaagcagaaagacataggaagaatttctttcacctaacagaagtgaaaatacagaaagatgtcagtcaccttggatggaaatggatggacaatacttaccgatgtttcacagctggaacagtaggatccttaagaccaattttactgatttgactctgcacatcttgaatatttttaaggagttcattatttttgaaaatacaagcctctagtaatttgttttcctcagtgaattcctcctgtaccccatagccatgtgtctcagataactttattgaaaaagcatcaagcaggttttcacaggaggtgtcatcaccccg

SEQ ID NO: 11745 - DNA, 502 bp, Homo sapiens
  MAP TO AC018452.11; EXPRESSED IN HELA, SIGNAL = 0.92; SWISSPROT HIT: Q92793, EVALUE 5.30e-01; EST_HUMAN HIT: BG037060.1, EVALUE 8.00e-87
actggggcctcggcttgctccggcccagaacctggtggggctgaggaatcgaccgcctccgccacaaaggggttatgctgttgctagaaaaatccacctcgctctcgccgtccatagccgggcctcgaagtcagcgccgggaggagcaacaccgagttagtcttgcctaaagaggaaagaagttaggaaactgtgcctctggacaaccggggacgcctggccgactcgcgtgctcccagaccggcggtccccctgctgctgcgcaggacacgactgcaccgcacttacccgccctttctcgggcaaaaactgcaccactgcggtgcgcggttcccggcagaaatctgggctgccgcccaggcggattaatccaatcacctccgcgtccctcccgcgccaaaagaccacccgcagcaaatgagcccgccacccattcactgagtgcaagccgaggcacaagaaacttgggacgagttcagctttcttgggaaactcgccgcgg

SEQ ID NO: 11746 - DNA, 565 bp, Homo sapiens
  MAP TO AC007688.15; EXPRESSED IN HELA, SIGNAL = 0.59; NT HIT: gi11435919, EVALUE 1.00e-114; SWISSPROT HIT: Q9JHD2, EVALUE 1.80e+00; EST_HUMAN HIT: BF247305.1, EVALUE 3.10e+00
gcagttccagcgacagccccagtgggacgacccggtcgtctgcattgctctggtcaccaacgcatgggttttcctgctgctgtacatcgtccctgagctctgcattctctacagatcgtgtagacaggagtgccctttacaaggcaatgcctgccccgtcacagcctaccaacacagcttccaagtggagaaccaggagctctccagaggtacattcctgggggattcagggagcagggaggtgctcctacaggagaagcaggagaaaaatcatgcagtaggatgagccaagaggaaactaaaagaaaatggtcagatttggggtgggtggcttcatagttcaagcatagaaatgcagactcccagaatcaaggttaaatttttatgaaaaatgagttcttccaaagcatagagctttatggggagagaccaagacatacatgaatcaaaggccctaaataaagagggtatgactctgaatgttcacactggttaaagaaaggcatccactataaaatgagttaactggccctaaattaggcctggaccatgcgattttgcatga

SEQ ID NO: 11747 - DNA, 597 bp, Homo sapiens
  MAP TO AC016940.7; EXPRESSED IN HELA, SIGNAL = 0.51; SWISSPROT HIT: P42322, EVALUE 5.80e+00; EST_HUMAN HIT: AW274024.1, EVALUE 0.00e+00
tgggaaatgggccccctcaggaaccaaatggcccaagttgggagggcacctctgggaatgtcacatttacatcttcggctactacctggatggaaggcacagggattcttagtagtctggtttactcagataatggtagtgtaatgtctttgtacaatatctgttactatgctctgttggcctccctctcagtcatgtctccaaatgagccctctgacgatgaggaggagtaggaaggctcctcagattacaagtgtagactctgtgaacagttcagaaacactgcaaattcgtgaagtcacaggccactaatggcccataaaagttgccattttttaatgagaaacacatttttggtcttaataaagaaaaacaaaattccatggaaataaataataaacaatttaaatgagaactgttgtctgtgttttttttaaccttgtatattatatacatctcattggcagaaaccaggggaggctggaaatcctgtccaagacaggctttggtccccattgtccttgtttatttggagaagcagcattttcacacactcagcaaaggatgttgctaggaagtgtcgaggccaagcccagg

SEQ ID NO: 11748 - DNA, 592 bp, Homo sapiens
  MAP TO AP000359.1; EXPRESSED IN HELA, SIGNAL = 0.47; NT HIT: AJ271348.2, EVALUE 1.40e-01
tgccacagattctggaaggagccattgagtgagaagtcaggtttgttttgacatatttgtgagtctgtttgaaaaaaatactgaagtccagtagcagcatggagggttgtaggtaacttgcacactctggtttgagaccctcagggatacagtgtagtaaggagcttgacaaagataagacttcccagtagagaacccacctttaaaccacctggattgttaataccccacagtcatcagccagaagcaaacagtctctctgcaggatactaacatctttgtcatcaatctaatatttccatgcaatatatggtacttgttcaacagcaaccaatataagaggacaataagacaaagccgaggaaacaagacaacagaaatagaaccataggtgctcaagtcatgtgagttatcaacagtattccaagaggtaaaatttaaatgttgagcaaactgtagaaaagaaccagtttggagattccaaaactgaaaaacataacaaataactcaggatgggtatagcagcatgtttgacaccgcttaaggagagaatgaaacagaaggtaggtcacgggagaggcttcttggcctg

SEQ ID NO: 11749 - DNA, 537 bp, Homo sapiens
  MAP TO Z49236.1; EXPRESSED IN HELA, SIGNAL = 0.32; NT HIT: gi16157814, EVALUE 2.00e-25; SWISSPROT HIT: Q62137, EVALUE 6.70e-02; EST_HUMAN HIT: AW504016.1, EVALUE 3.00e-25
cagcgggagcacctctgcacagctctgcttcccactcatcagatggtgcagacttaagaagtcacactctagagcccagcctgtctccactgaccacatcaggctaaagaacaccttggagatgagatccatgaaaagagtgtagcctgacgttgtcaagcaagggctctgaaactggcagaaccacgttaagaaacaagctttgcctctttttagccatttgaatcttgaacacttagctcacctctctagacctctcaactggctcagcagccagctgagaactgaggaggcagtgccagggcatcctggagcccaccctccaacccaaagccagggctcaggcaagtggctggaagtaccaggcctgtcctcaccttctccgcccgccccagtactcgtgcaggtgccctcatagggtggccatgctcactgctcaaggtcacatgaccccttacacaacgtctcctaaatacctttttatctgaaggacttgagatcttagacacaagagctgcttcgacaaggccctgctcc

SEQ ID NO: 11750 - DNA, 518 bp, Homo sapiens
  MAP TO U82672.1; EXPRESSED IN HELA, SIGNAL = 0.4; NT HIT: M77481.1, EVALUE 0.00e+00; SWISSPROT HIT: P43355, EVALUE 1.00e-09; EST_HUMAN HIT: BG030623.1, EVALUE 1.00e-101
tccagggtgcccaggaccagaggagaggaggaggaggcggcagcctgcacacacaccaggcccagggcctcttgttgggcctcaagggcttcctcaggcttgcagtgcagactcctctgctcaagagacatgatgactctcgtcagggcaacaggcaggagtgtgggcaggagctgggcaatgaagacccacaggcctggggagagagggagtgtgtgagaggcctcagctgagaactgaaccttggagactctaacaaaggcctacttacagatcttctccttggtgctcctctgtggcctccagggaatcctgtcctctgggttggcctgtcccctgaaaacctgaaggaggaagtgagagggtactcagggtacagccggccagcagaggtcgattctacaggactgacagtagggaggtgaggccagactctgtggagtcctatgtgtcctgtggcaggtggggcccttggtgtgcattcagggcaaacattcactgctggcacaccctgtgca

SEQ ID NO: 11751 - DNA, 514 bp, Homo sapiens
  MAP TO Z84484.1; EXPRESSED IN HELA, SIGNAL = 0.35; NT HIT: AL163204.2, EVALUE 1.20e-01; SWISSPROT HIT: Q05152, EVALUE 8.00e-04; EST_HUMAN HIT: H64974.1, EVALUE 2.80e+00
cccctgacagctcccccgactatccctgtccctctgtggagaggctcctggagcaagtttagagcaccctaggggttgccataggaacaggcacggtccgctcacccctgcgagctgggcccaggtcagcctccccggagcgcaaggcagcagctgccttggacaacccttcctctcggcctctggcctcctggtcttgagctgccttagtcacctcggccgcgtgtttcttgtgaccttgcttcttgcggctgggcttcttgtcgtggtgggctttcttcctgagggctggctcccctgctgcttccaggggctccggatgctgggagataccctccttcccccttggcctcctgctggccttttctctgggctcctcagggcccgtcctcacgaagaagttcagcatggtcttcagccaccccttcttggtgtcttgcgaaggcctctgctcgctggggagaaaatctccggtctcctcgggagtgggggctgcagcggtggtgcagtgagc

SEQ ID NO: 11752 - DNA, 506 bp, Homo sapiens
  MAP TO AC018702.2; EXPRESSED IN HELA, SIGNAL = 3.6; NT HIT: gi4504806, EVALUE 1.00e-112; SWISSPROT HIT: O14072, EVALUE 9.30e-01
atggggcctccgctactgcccgtataagttaaagaaaggcctgttctctcaaacttcctcctctttcaccttcttctgcagtctatttgccagccaaccccagcccgggaggggatcagggccaccaggttgctggtaaggatgaaagactgagtgtgttaagactgttgaagtgagcctgtgtaagagaaggaaggattttgtggattgctacattgtgagtgtggggtgagtcccagaacctcgctatgtcagggaaacggaagcgtgtggtgttgactattaaagataagcttgatataataaagaaacttgaagacggaggttcttccaaacaactggcagtgatttatggaattggtgaaacaacagttcgggatataagaaaaaataaggaaaagattataacttatgcaagcagttctgattccacaagtcttttggccaagaggaaatctatgaagccatccatgtatgaggaattggacagggcaatgctggaatgg

SEQ ID NO: 11753 - DNA, 510 bp, Homo sapiens
  MAP TO AC005874.2; EXPRESSED IN HELA, SIGNAL =  14; SWISSPROT HIT: P09058, EVALUE 2.00e-54; EST_HUMAN HIT: BE731543.1, EVALUE 1.00e-127; NT HIT: gi14742855, EVALUE 1.00e-126
cgatgcgcccaatagcaagctggtccgtaccaagaccctggtggagaactgcttcgtgctcactgacagcacaccgtaccaccagtggtatgagtcccactatgcgctgcccctgggctgcaagaagggagccaaactgactcctgaggaagaaaagactttaaacaaaaaacgatctaaaaaaattcagaagaaatacgatgaaagggaaaagaatgccaaaatcagccgtctcctgggggagcagttccagcagggcaagcttcttgcatgcgtcgcttcaaggctgggacagtgtggccaagcccatgtctatgtgccagggggcaaggagatggagttctatcttaggaaaatcaaggcccggaaaggcaaataaatcctcatcctttctgtctttgcccatggaataaaggtgtctattgttctgtggcaaaaaaaaaaaaaaaaaaaaaaaaagtcatggggaacgtgcactctgaacgctactggtgcgaggctgaccttccc

SEQ ID NO: 11754 - DNA, 584 bp, Homo sapiens
  MAP TO AC013648.3; EXPRESSED IN HELA, SIGNAL = 6.2; SWISSPROT HIT: gi1351900, EVALUE 3.00e-18; EST_HUMAN HIT: BE906852.1, EVALUE 0.00e+00
tgtgtctgcgccgaaggtggaggctgacgtgagcctcccctccatgcagggggacctgaagaccactcacctcagcattcagcccccttccgctgatctggaggtccaggctggccaagaggatgtgaaactcccagagggccctgtgcatgagggagccggcctcaaagggcacctgccgaagctgcagatgcccagtttcaaggtacccaaagtggacctcaagggtccccagatagacgttaatgtccccaagctggacctgaaaggccccaaggtggaggtgacgtcccccaacctggacgtgtctctgcccagcatggaggtggacatccaagccccaggagccaagctggacagtacgcggctggagggggacctgtccctggctgacaaggacgtgactgccaaagacagcaagttcaaaatgcccaagttcaagatgccatcctttgggatgttgtccccaggcaagtccatcgaggtctcggtggatgtgtctgcgccaaagatggaggccgacatgagcattccctccatgcagggggacctcaagaccactgacctccgcattcaggcccctt

SEQ ID NO: 11755 - DNA, 503 bp, Homo sapiens
  MAP TO Z97986.3; EXPRESSED IN HELA, SIGNAL = 0.83; SWISSPROT HIT: P05903, EVALUE 2.10e+00; NT HIT: gi13648149, EVALUE 1.00e-16
cgaggccaaggcactctgggagaacatcgtggccttctgccgggaggtgaggcgccccctcgccctcttcctgctcctgagcctcctgctcccgccctccccttcctaggctttgggctctggcgatgggctggggaggagcccacaaggcctaagacgtgatggggagggcagcaccctccgccccgaggctccaagctcccaatggccctggggtccagcttggcctcctgacccttggtccttgctggtgaccgagatgcacgaccttcacccccctcaaccctccaccgtggccaggagggccccgagccccgtctgatgtgccgcaggaggcgagggcttcccaggggcagcgtggagaccccgctgaagtgcgaggtcgggatgtacccgtgctccgccctctagagtccaggatggcatcacccacgggtcaactggggcgcagcctgcaccctccccagcagggccagggccagagtcgtgctgccacccactgg

SEQ ID NO: 11756 - DNA, 500 bp, Homo sapiens
  MAP TO AL022319.2; EXPRESSED IN HELA, SIGNAL = 1.4; NT HIT: AF260316.1, EVALUE 1.00e-23; EST_HUMAN HIT: BG769829.1, EVALUE 3.00e-31; SWISSPROT HIT: Q9Z0W0, EVALUE 3.10e-01
gcctctgattggctgcaagcgaagtctccacttcaccctctgattggttgcaggccaatccttcatagggtgtaaccaattggaggactctaaagggcacctaggggtgttaccaaacatttgcgacttaataaaaccctaatagtggctcttgagccgcttgctccagcctgctcctgctctgtgggttgtacttttgggctttgatacatctgtgccttccttactctgttcttttgttgcattgtttgtgtgttttgttcaattctttgttcaacatgccaagaacctggacaactcacagccaagaccttccatctggtaacaagagaactcgggcaggaaggactgtgccccaccccacctgaggcttgagacacttcctaatgttcctgctgggccctggccctgcttggccccaactccttgtcccctcagctctgctttcgccgtctccaggacatgggatgctaacagaggccgtgggtgaggaggagctc

SEQ ID NO: 11757 - DNA, 500 bp, Homo sapiens
  MAP TO AC005768.16; EXPRESSED IN HELA, SIGNAL = 0.3; NT HIT: gi14781110, EVALUE 1.00e-129; EST_HUMAN HIT: BG912689.1, EVALUE 1.00e-113; SWISSPROT HIT: P46660, EVALUE 3.00e-03
cggaattcggccaaagctgccctctctggggcctttgtgcaatgtcacccctttgctcccaatccaagtccttccctgtcgcactttgcagctctctcactggcttcttctgggaacagtttctaataaatcccctgcacgcaaatcctcttctcaggtgccacttgtgcagatcaaccgccatgcaggagaatattgctctgtcccctcagccctcccacaccccagccccctcaccctaactgggctctgttgattttcctgcaggtgatttatgccctgaacacccgccaggatgaggctgaggccagcatggaggcgctgcgggaagcgcaccaggaggagctccagaatgcggtggcagagaccaaggccaggctcctgcaggaacagggctgcgcagaggaggaagcccttctacagcgcatccaggccctggagagcgccctggagctgcaaaagaggctgacggaggaggcgctggctgagtcggcctcgtg

SEQ ID NO: 11758 - DNA, 548 bp, Homo sapiens
  MAP TO Z98885.1; EXPRESSED IN HELA, SIGNAL = 0.69; NT HIT: AF005637.1, EVALUE 3.30e-02; EST_HUMAN HIT: AI693676.1, EVALUE 1.00e-05; SWISSPROT HIT: Q9WTN3, EVALUE 6.00e-01
tgctgcaaaacaaaccacccccaaaactttgtagctcaaaacagcagtcattccttttgttcacacatctgctatttgggcaggattcagcaggtacaactagactacttcctgcatccttatctggggcacctccactaggggctggaggagccacttccaagatggtgcactcacgtggctgggaccttgatccaggctctgggctgagggccttgggaacatcctcatggaatagtagccatgctgcaggagcaagggtctcaagagaagcaggtgggacctgtatcacttttcacatcctagcttctgaagtcacacgcatcacttctgccatagggacaagcctgtccagattcaagagttagggagaatacagaccccacctcttgggacatgtgttatcatcacattttaagagaagcatgctgtatgggagaagttgttgtggccactttgagaagatgcaagctcccccagtgtgcatacccattcccggctgtagggttaagtcaatttgtattcctaggtgcattccgtgcctgggt

SEQ ID NO: 11759 - DNA, 515 bp, Homo sapiens
  MAP TO AC004990.1; EXPRESSED IN HELA, SIGNAL = 0.4; NT HIT: gi16175845, EVALUE 1.00e-114; SWISSPROT HIT: P02458, EVALUE 1.60e-02; EST_HUMAN HIT: AW043603.1, EVALUE 3.00e-77
tggccgcaggctgaaagctcctttggtttcctaacgtcgtgttcccgtttgatatcccaagttgggcctgggcttatctggtgggaagggtcggagggtggggctggatgtgatggagagaatggagcgaggccgtcgtccagggagacgcctacttccggcagacctggggcggcggcagcgggagaactccagggggcgggttcgtctgtggacgggaagcacaggcgttagcagtggcgcacgcaggacgtccccgtgccctctctacgccggggacaggggcaggcagctggggcgattgctctcaggggccggagccaccgccgcccccacccccacccccaccctcactgccgagagggcagcggccgcgcccccggggatttgggggttccctccgccccgcttagcccccacgccccgaacctcgtccgtggaccggggaggccaacgcgaagcccaggcctaatcccttcgccttggccctgctaacttccgggggtgttctcggg

SEQ ID NO: 11760 - DNA, 502 bp, Homo sapiens
  MAP TO AL008726.1; EXPRESSED IN HELA, SIGNAL = 0.66; SWISSPROT HIT: P28225, EVALUE 2.10e+00; EST_HUMAN HIT: BG988533.1, EVALUE 1.00e-108
ccatcccccacactcccagctgtacctccccacctcttcctttcacccctgggacagcacccaggagggcgggagctgctgcgcagtggcggggaagcccagtcccatcttacctgaggtttgtctgaaatgacccaggcccaaggcagcaagaagagagaaagacagagatgagcttcagtgcccggggctgctgcccctttttttgtactcccttcccatagagcattagttcttctgacagccccctctggaaaaccagacataagctgaaaccccagccaatctcttggggctcctttaggaccagcttggagcttgttccactttggacacctggcctccacatccctggtcaggcttttccaaactagacccagaggacaggtctgtagatagccacaactgccataactgtgaaaagtatactggcctaggactcaagttctaaccccaggtcagctactccttctctgtgtgacccaggcaagggagtccccct

SEQ ID NO: 11761 - DNA, 505 bp, Homo sapiens
  MAP TO AC004659.1; EXPRESSED IN HELA, SIGNAL = 0.3; EST_HUMAN HIT: BG751054.1, EVALUE 5.00e-14; SWISSPROT HIT: O60412, EVALUE 2.00e-18; NT HIT: gi14767378, EVALUE 1.00e-94
cagaatgctggctccatacccagagtatcagattcagtcggtcaggtgggcatgataaggcacatgtctaatgagttcccaggtgatgctgatggggctgttccaggaaccacagtttaaggaccaatgatgtagagatgacttctccaggtagcgatggtaactgtaacttgtcggcaaagaaatccaataattagccaaaatgcatgatttcttgagttccctgggtttgaataaaggatattgcagtcattctggggaatgcttatttggagtaaattttgtgtggctgttttttttcctccttctcggcaaacccagcggccccatggaaagaggaaaccaaacagaagttggaaactttctcctcctgggattcgcagaggactctgacatgcagcttctcctccatgggctgttcctctccatgtacctggttaccatcatcggaaacctgctcatcatcctgaccatcagttcagactcccacctccacacccccatg

SEQ ID NO: 11762 - DNA, 549 bp, Homo sapiens
  MAP TO AC010328.4; EXPRESSED IN HELA, SIGNAL = 0.44; NT HIT: gi14754695, EVALUE 0.00e+00; EST_HUMAN HIT: AI907468.1, EVALUE 0.00e+00; SWISSPROT HIT: Q14589, EVALUE 3.00e-40
tgctcacctggcaaatcaccgaagaattcatactggggagaaaccttacaggtgtacagagtgtgggaaagcctttagggtaagatcaagtctaactacccatatggcaatccacactggagaaaagcgttacaaatgtaatgagtgtggcaaggtcttcaggcagagttcaaatcttgcaagtcatcacagaatgcataccggagagaaaccttacaaatgagtgtggtgaggtcattaggtacaattcactcctttcacatcagttaatttcattcttgacagaatccttacaaatgtagtgacagtggccaatccctcatgagttgaagcattaatagatatgagaggccataagcaagagacatcatgtaaacatatgtggcagagggtctatccaggcctcgcaggttactaggcatcaagatttatatctttgatgaaacgaaacaaatgtaatatgcatcctgaggccattacccagtgaccgatggtaagtgaggattcctaggaggaataacagtctctggtttccctgtttgcctttga

SEQ ID NO: 11763 - DNA, 506 bp, Homo sapiens
  MAP TO AC004231.1; EXPRESSED IN HELA, SIGNAL = 0.42; NT HIT: AF137286.1, EVALUE 0.00e+00; SWISSPROT HIT: Q99456, EVALUE 5.00e-10
gctggccaaaaacctggggggaggatccaattttgagtggagaaagtgaacttttcaactgcgacacccatcttgcagcctatataagtttagctttctggcttgctggcacaacttcctctccagttgtggccaccttccccaggccatggatctctccaacaacaccatgtcactctcagtgcgcacccccggactgtcccggcggctctcctcgcagagtgtgataggcagacccaggggcatgtctgcttccagtgttggaagtggttatgggggaagtgcctttggctttggagccagctgtgggggaggcttttctgctgcttccatgtttggttctagttccggctttgggggtggctccggaagttccatggcaggaggactgggtgctggttatgggagagccctgggtggaggtagctttggagggctggggatgggatttgggggcagcccaggaggtggctctctaggtattctctcgggcaatgatggaggcc

SEQ ID NO: 11764 - DNA, 500 bp, Homo sapiens
  MAP TO AL121749.7; EXPRESSED IN HELA, SIGNAL = 0.93; EST_HUMAN HIT: BI833289.1, EVALUE 4.00e-36; SWISSPROT HIT: Q64739, EVALUE 2.70e+00
ccaaaccccgtccctgtccccaagggcagactcggggtaaggggaccaagacctccgacgcactcagcgccatggggacagccatggccaacactctgtctctgcggtcaatcccaaggttaccaaaactctccatccgcagagagcgcgcacagcagtgcggacactcggggactgccttaaggaaggctgagccctgggagcgcgtggactccgccctaccgcccggcgattggctcgcggggctgggggcggagaccgagtccgcgctgtataaatattcatgagccggcagcgcggcgcgagcggggctggagccgggaagttgggctaagggcgctgctcccgccgaggaggaggcggcggctgggcgcgggccgcgccactcaggtgtccgctccgccttccggtctggatttgctcctgggtgtccagcaggaaggagactgtgtgcacctcgcccgactgcggccggagcgcggcgctgacttttccaggcg

SEQ ID NO: 11765 - DNA, 521 bp, Homo sapiens
  MAP TO AL163202.2; EXPRESSED IN HELA, SIGNAL = 0.63; NT HIT: AL163202.2, EVALUE 0.00e+00; EST_HUMAN HIT: BI064298.1, EVALUE 5.00e-45; SWISSPROT HIT: P42825, EVALUE 1.00e-02
gggacaaacactcatcacacagccactgtgttctggaatcctatctaaaggacaaatattcggagcctcttagaagtgttctggaatcctatgtcagggacaaacattcagaaaccagcagcagtgctctggaatcctttgtgagggacaaacaaacagagcccagcagctgtgttctggaatccgatttgatggacaaacactcagaacccagcagcagtgttctggaatcctttgtgagggacaaacattaagatcctcagagaagtgttctggaatcctatgtgagagacaaacactcagaacccagcagcagtgttctagaatcctatgtgaaggacaaacactcagagcccagcagcagtgttctgcaatcctttgtaagggtcaaacactcagacgctcagaacagtgctctgtaatcctatgtgagggataaacactctgaaccctgcagcagtgttctggattcatatgtgagggacaagcattcagatcccgatagccctgttctgcaatgc

SEQ ID NO: 11766 - DNA, 522 bp, Homo sapiens
  MAP TO AC007281.3; EXPRESSED IN HELA, SIGNAL = 1.1
gcctttgcaattttagcagctgtggttttgtggacataatattagccagtgaatatagcaggaatttctgaagtcaataacattacctgtgctgtctttgatctatacagtcagtagtgcctcagaagcatgttctagcaaggaaacaatctgaatctctttgctcttaaggtagtgcctccattcccatggtcaagaatctgtttcagttaaaaccgtatgcccactccaaggtagtgttaaatttatggcaatgaatgctataacttgctagttatttccagcttttaatccagtgcctaatataccataaatggttgtaaatatatgattacaaaatagatgtaatatccctctatgtaaaacagcttttgtattctcgggaaggagaagtaacacattcatgaaaactagttatatgtgaggtaagctaagtacacttaatacaccatcagtccatctcaccaaaaaggttataacattttatagacatggtcgcagttgcatgagatcactttctcc

SEQ ID NO: 11767 - DNA, 553 bp, Homo sapiens
  MAP TO AP000344.1; EXPRESSED IN HELA, SIGNAL = 0.5; NT HIT: AF312032.1, EVALUE 2.00e-62; EST_HUMAN HIT: AA382351.1, EVALUE 3.00e-59; SWISSPROT HIT: Q9I4D3, EVALUE 3.00e+00
tgctccagcctcacccatcacaatctgcagagtcatcacgaaccagaaattggcttcagaggctgcagccagaccctggcaaaacccaggagtggccaaaagattctctgtttgcagaattggctagtgtcacaagcgggcatgtgatcgagcagtggatcaagagaagaactaatccttaccttttatattttgcgaacacagcaccgtaaagtcttcataggccaagagccagggccgtttcccgggttgcaaaggtcagctggctagggcaacaggcaggatggttaacaggcacgtgtgtgtgcgtgtgtgtgttgtgctgagtgagtgagactagccttgcggatgtgtggtggtattgtggtggacctttactggacactctgccggaaaactgaagtggcacttgtgctttagtccagctggatatccctttcaccctggcaattcatcaaccagaggaaggaaaaataagacgtcgtaaagcgagagaagtcccttatgagtctttcgactctcacgtctaattaggcgcaattggagtcccacg

SEQ ID NO: 11768 - DNA, 501 bp, Homo sapiens
  MAP TO AL163246.2; EXPRESSED IN HELA, SIGNAL = 0.46; NT HIT: AL163246.2, EVALUE 0.00e+00; SWISSPROT HIT: P39458, EVALUE 2.10e+00; EST_HUMAN HIT: BI756280.1, EVALUE 7.00e-04
tgccattcagcaggccctgagttcttgtcctgcaatcagaaagaatgaggcacatagacaagtggaggatgagcaagaagaagagctttattgagcagtagaatagctcagagacctgctgtagatagctcttttctgtagccaggtgtctggacgagtgttcagccctcagcagagtgtagaaagccctgggttaggttgctcccctctgcagacaggtctccctggagtggaagctcctctctgccgctggttgtcccaacactctccagctatcagcagagagagtagctcttagctcctctctgcagctggttatctgcttctctgctctgctctgctctggctaagcccagggcttctatgggcctcagagcggggaagggcatgctgattgttacatgggcagccatgggcaggcccatgtaaaagcaccacgagatccccctcagaactggcagcctgccgccaggcttcagaccttccccggcctaaaggtgg

SEQ ID NO: 11769 - DNA, 524 bp, Homo sapiens
  MAP TO AL137861.1; EXPRESSED IN HELA, SIGNAL = 0.46; NT HIT: AL163202.2, EVALUE 7.00e-62; SWISSPROT HIT: Q28833, EVALUE 3.00e-03; EST_HUMAN HIT: BF943304.1, EVALUE 4.00e-58
ggacaagcattcaaaccacagcaggagtgttatggaatcctacatgagggacaaacattcagacaacagcaagattgttctggaatgctctctgagtgacaaacaatgagaccccagcagcagtgttctggaatcctaagtgagggacaaacattcagacaacaaaaggagtgtcctggagtcctatgtgagggacaagcactcagaagcccacagcagtgttatggaatcctatgtgagggacaaacatgcagacctcagcagcagtgttctgggatcctatgtgagggacaaacattcagaccccaggagcagtgttcttggatgccatgtgagagacaaatcttcagaccacagcaggaatgtgctcgaatcctatatgaaggacaagcattctgactcttgtagcagttttctggaatcctatgtgagggacaaaccttcagacctcagcagcagtgttctgggatcctatgtgagggacaaacattcagaccccaggagcagtgttcttggatgccatg

SEQ ID NO: 11770 - DNA, 518 bp, Homo sapiens
  MAP TO AC005300.10; EXPRESSED IN HELA, SIGNAL = 0.53; SWISSPROT HIT: Q60760, EVALUE 6.80e-02; NT HIT: gi14776795, EVALUE 0.00e+00
gtgctggtgctgctgtcgccggagcctctccggccgcggaaggagcccccgcggaggaagaggggctgcagccgggcggctgccgggggcggcgggaaggaaccggacgcggaggagaccgagcgagggtggccgagcgccgggcgcattgtcctccgaggggctctggggccgcccagctgttccctccccgccaaccccgggcgggcgaggcgggctaggcggccgaggggagccggggcccgccgcctccccagcagtggggactcgcacctgggccgggcggcggcgagatccggactggagccactggactgggcgagccgggccgggcggcagggagagggggcaggcggtgaaccgagcggaccgcggtgaagacaggcgaggcgggggcggggcggggcggggcggggagcgagtcccgccgggagggagggaggctggcggcggggaaaccaggactggattcgagggggagaggaagcagcgagaccagaggaggagaaagcgcggcg

SEQ ID NO: 11771 - DNA, 587 bp, Homo sapiens
  MAP TO AC009079.4; EXPRESSED IN HELA, SIGNAL = 0.35; EST_HUMAN HIT: AI267659.1, EVALUE 9.00e-07; SWISSPROT HIT: P30667, EVALUE 3.80e-01; NT HIT: gi9629818, EVALUE 8.70e+00
cctggctccaacaaagcgcccggcgccggcgcgcgaagccggcctcggggggacgagcgccctgcgcgctgccgctgccgctgccccaccggcctctgccctccccggccggaggcggctctcgaaccctcgcggcaggcgccgcaggtgcggcctctgggggggaggaggagctgggagccccgggtccgccgtacgcgccagttccctggttccctggctccctggccccgagtgtcgtgccggacgccggcccaggctttttacacttttttgcctgtgagttcttaacggcgttttggcgagggacgcatcgtctccattatattaatgagaaacagattatgcaacctagatgatgcggggctttaaaccggggcctctggttctgaagccctgtgcttgccacgacacccacaatgccgcccttgggtcctgcccagtggactgtatgtgccacaataactagaagagagggttttaaatgttctcaccaccaagagacaatacgtttgaggtcgaggacatgttaaacactctgacttgatcactatgcaatgtatatgtccatccatgctgcacaccgc

SEQ ID NO: 11772 - DNA, 524 bp, Homo sapiens
  MAP TO CHR14.3; EXPRESSED IN HELA, SIGNAL = 3.4; EXPRESSED IN HEART, SIGNAL = 6.4; EXPRESSED IN FETAL LIVER, SIGNAL =  28; EXPRESSED IN LUNG, SIGNAL = 1.9; SWISSPROT HIT: P00167, EVALUE 8.00e-43; NT HIT: M25765.1, EVALUE 0.00e+00; EST_HUMAN HIT: BI560725.1, EVALUE 0.00e+00
ggcggagtcacaagctctactccacccgacgaggctgtgtgtgctgggcctggctcgcagccaaccgagacggccgagcagctggacgaggccgtgaagtactacaccctagaggagattcagaagcacaacgacagcaagagcacctgactgattctgcaccacaagtgtactatttgaccaaatttctggaagagcattctggtggggaagaagtcttaagggaacaagctggaggtgacgctactgagaattttgaggatgtcgggcatctttgagatgccatggaattgtccaaaacatatatcattcaggagccccatccagacgacagaccaaagttaaacaagcttcggaaactcttatcactgctgttgattctagctccagttggtggaccaactgagtgatccctgccatgtcagcagtggccgtcgcctatcaaggcacacatggcagaaggctgaacctcctcagaagccagtgcaggaaaatcctgctttagacacaggcaaaaagaagcc

SEQ ID NO: 11773 - DNA, 508 bp, Homo sapiens
  MAP TO CHR14.3; EXPRESSED IN FETAL LIVER, SIGNAL = 1.2; EXPRESSED IN HELA, SIGNAL = 1.2; SWISSPROT HIT: P49719, EVALUE 1.00e-16; EST_HUMAN HIT: BF969337.1, EVALUE 2.00e-62; NT HIT: AF006305.1, EVALUE 2.00e-62
ttgatgaaattttggacattggaaattagatccacatagtttaatttcataattcttgacatgatggaagccttcagatttattaaaactacctggtagctatagaaagatacatagctattaaaaggtacataatctagcttagaactttgaggctagaaagtatatccctttatataagagagagaaaaagaattctatcaaatgaccattctgaagatagaacatatctatctgtagacaatacatttcatggcattagacatataaaaggtgtgtgctattttttttaatggttagaatttttgtaaaatctgattcttaatattcttagttactgaatcaaatggatggatttgatactctgcatagagttaaaatgatcatggctacaaacagaccagatacactggatcctgctttgctgcgtccaggaagattagatagaaaaatacgtgagttaagattctttacctactgtccatttccctttgtgcccatttctttt

SEQ ID NO: 11774 - DNA, 584 bp, Homo sapiens
  MAP TO CHR19.3; EXPRESSED IN HEART, SIGNAL = 1.7; EXPRESSED IN HELA, SIGNAL = 1.8; EXPRESSED IN LUNG, SIGNAL = 1.5; EXPRESSED IN BONE MARROW, SIGNAL = 2.2; EST_HUMAN HIT: AV647389.1, EVALUE 0.00e+00; NT HIT: gi12741684, EVALUE 3.00e-36; SWISSPROT HIT: P02845, EVALUE 5.00e-03
ggcatctctcaaattcccagtgacatacaccttggggtcacaatgacaacaaattcacacgcaccctccatcaacaatatcaccaacgcgcgcgcacacacacacacggaagcagccacaaacctcaaaattaaggcatactacacacagttcggcaaatggtagtaaacacacacacacacaccccaaggggacatacagtcacaaccgcggtccaggaacctcacactcgcaaacacagtgcccaacccggtcacaattaaactctactcacacccgcacaaacataaacaaaaagtcctcctccccgccctcacagttccatacacggtcgcacagacacacgcccccagtcacaaccgtacacactcctcacaatcgctccttagcctgttccccacgcagcccacacaggtcgggagttcctgtcgcgccaggctccgagccgcctcacttacgcctgttcggatagggtcagctccgttctactagaatccacacaagtcgaccctagctatctcacaaagccccaaggccgcttgcccaaatccgcgggaagatcccgcccactcctcaagagacaa

SEQ ID NO: 11775 - DNA, 552 bp, Homo sapiens
  MAP TO CHR16.3; EXPRESSED IN FETAL LIVER, SIGNAL = 0.82; EXPRESSED IN PLACENTA, SIGNAL = 1.4; EXPRESSED IN HELA, SIGNAL = 1.9; EST_HUMAN HIT: AA708475.1, EVALUE 2.00e-01; SWISSPROT HIT: P04280, EVALUE 2.00e-01
gagagagccagtggtgaagggaggaaaagaagtgtctggaggctgggggcgtaccttggccatgacttcatcatgaccctccaccatcttccggagcttgatcagatgccacaggtcctggacgggccgggcagtgccctggctggcttccagcagctgggcagtggagggcaggtcctgcagcagggccagctggttctccaacttgtcgaggcggctcaccacgtggtcgaagacattgctgagcctcttcatggggttgaggataggctgggcgtctccttccctgggcatgatgaccacctgcgaggtctgcaggaagtcctcatcgcctgagaggactttcttgagctcggccatgtggatgtgctccaagatgccgtgcagcaggaggtgcagggccttgaagttcagcaccccgcactgtgggatggcgatgttggccagctcggtgaacgtgagtgagaagctcatcctgccagggtgggtcagtggggctggggttccaggtgtcctcaaggacaaggggtagctttcagtggttccgagagc

SEQ ID NO: 11776 - DNA, 546 bp, Homo sapiens
  MAP TO CHR16.3; EXPRESSED IN HELA, SIGNAL = 0.9; EXPRESSED IN PLACENTA, SIGNAL = 0.97; EXPRESSED IN BONE MARROW, SIGNAL = 0.94; EXPRESSED IN FETAL LIVER, SIGNAL = 1.3; EST_HUMAN HIT: BF962847.1, EVALUE 1.00e-108; NT HIT: D86330.1, EVALUE 2.00e-03; SWISSPROT HIT: O97647, EVALUE 9.00e-02
tgaggtccctttcgtgagtctgcacggagccgccgtacaccatgaaagcgctcacttgtttaaagtttgctctaactttgtacattttttcctttttagttttggctcttggtgctctgagagctaccacttcctgccagctggttcgttaccgcagggaaaatgagggacttttgggggcagatgtgtttccattccactatcataatgcccctaaaaatccttattgctcttgcagtattcctcgggggtccctgggccagaaagacatcagctcggagttcctccagcaactcaaagaagagagaaagctgttccccaaactcttccgctgtagcgccttctgggtccctggtagatgccttcttgtgctcaaaaccggttatcactgtgaaaaattgaaagacgccatgcgcagacactggttgctaaacgtgcttttgccctccaggggcagacgctgagatccggcctgggaaggagtacagctgtggctccccatcagcgtcagcatttgctctggggggttgtagggggaggtaggga

SEQ ID NO: 11777 - DNA, 523 bp, Homo sapiens
  MAP TO CHR19.3; EXPRESSED IN HELA, SIGNAL = 0.97; EXPRESSED IN FETAL LIVER, SIGNAL = 1.1; EXPRESSED IN PLACENTA, SIGNAL = 1.1; EST_HUMAN HIT: AA934128.1, EVALUE 0.00e+00; NT HIT: gi11425216, EVALUE 1.00e-130; SWISSPROT HIT: P49305, EVALUE 2.00e-03
aagagggatacaacctggggactgatgggctgtgtttggagactgggttgcagtgggtatccccctatgattgggaccccagaagggattagaactggttggttaactcctttccttgtggtctgcaggccatctggacccgcttctttcctgcctccgaggctctgaggtctgttttggcccagggaactctaggagacctccgggtggctcgggcagaatttgggaagaatctcatccacgttccccgggccgtagaccgggcccaggctgggggggccctgctggacatcggcatctactgtgtccagttcacctccatggtctttggagggcagaagccagagaagatttctgtcgtgggaaggcgtcatgaaacaggtaccatctatcctggaatatttcatggtgatgggaatgattctgtctctctgggagcactgaactgaggacaagtctccaagtcaatgagaattagatcagacacctagaggaacaactttccatgaagccagagaggatc

SEQ ID NO: 11778 - DNA, 556 bp, Homo sapiens
  MAP TO CHR18.3; EXPRESSED IN BONE MARROW, SIGNAL = 1.5; EXPRESSED IN PLACENTA, SIGNAL = 1.2; EXPRESSED IN HELA, SIGNAL = 1.3; EXPRESSED IN HEART, SIGNAL = 1.7; EXPRESSED IN LUNG, SIGNAL = 1.3; NT HIT: gi16157591, EVALUE 1.30e-01; SWISSPROT HIT: P09805, EVALUE 2.70e-01
atggtggatgactcctctgcttcctctctagtagctgcagctctctaccaagccctccaccggaccctgtgggcggcggctgtgggctgagtcctctttgcgtgccacggaggatatggaggtatggaagcggctccaggctttgctgtcgggttcacaccctgttcctttaaaggtgacaaatcgaacacacagggtgtgtaccggagtgatttctgttttctggagtggttgatgaatgactgatattgattcaaaaatatcaatttctctccatccttggaaaagacaaaggatttatgtataagatttttacatggatttatgcacaagtgtgggttctgaaagaagaacatgcagcctctccaatgcagctagtttagaagttggaaagggaattcaggcagagtaatgtcatgagaaaaaaaaaaatcagtgcttgggagcactgccttccagccacagcaccttgagccttggtttccccatccgaaggtgtagatggggaatgcttgccaggatcccctttgataactgagttggctttcaacatgca

SEQ ID NO: 11779 - DNA, 562 bp, Homo sapiens
  MAP TO CHR14.3; EXPRESSED IN BONE MARROW, SIGNAL = 1.2; EXPRESSED IN PLACENTA, SIGNAL = 0.94; EXPRESSED IN HELA, SIGNAL = 0.86; SWISSPROT HIT: P49356, EVALUE 3.00e-10; NT HIT: gi14752271, EVALUE 6.00e-44; EST_HUMAN HIT: BE261324.1, EVALUE 1.00e-76
tgaagtagtgtcgtgaccgcctgctctccaagaggccaggagaaaccctggcttctctcaccttgctatccattcagcagtgccctcaaagaggtctggagtgatgatgttggtcagcgaggctacggaggcagcacagtatgcgcttctggaaagacagaaacgggaaacacattaagctctacggaagagctaatgaggctcagtgaactccgcgggcggactgctcgccttgcctagtaagctgtaatcacctcctgtcctcactcttggcacacggtcagtcctcctgggtctccaactgagaggtgtgacattctatttggatagagttgctcacggcatggcttcagtgaaagaacatgacattctattctccctacctccacatggtccaatctacatcagaggaaataacagccatatcaattcatgtcaaaagtggattcagctcttctttcaaagacctataatggttgccataaatctatggtatcattcaggtacttctgatatgctcattcatttggatgttagtactgtttcagagccaggatttctg

SEQ ID NO: 11780 - DNA, 502 bp, Homo sapiens
  MAP TO CHR16.3; EXPRESSED IN HELA, SIGNAL = 0.95; EXPRESSED IN BONE MARROW, SIGNAL = 1.1; SWISSPROT HIT: P46676, EVALUE 9.10e-01; NT HIT: U40146.1, EVALUE 4.80e-01
aacaatctcacccccatcagtgataaactgggccaggatcaggaggcatgtgtctcctccattagactaagagtttgcagtattagggaaaatggaactctgctctttcctctccaaatgggacttccccaaatcaggaaaatgtgaccctgccatcagattgggagttttcaaggttgagatcgatgagtctgtctctttcatcaggctgaaaaccctccaggtatgagatgggggtctcttccgtctgatcaggagctccctgagagtggggatgatggctgcttttcatctctctcctcccagagtgctcagacaaggctcagaggatgtcgagagctgaaaagagtcctgctgaccatcctaggggcgggcaaatttcagcctggactcggaagacctgcccttgcccaaagcacctgaggagagtgggatcagtgtcagccacagcaggttccagagagacacaggtgaggaagactgttgtgagatgtatggaccc

SEQ ID NO: 11781 - DNA, 534 bp, Homo sapiens
  MAP TO CHR16.3; EXPRESSED IN PLACENTA, SIGNAL = 1.2; EXPRESSED IN HELA, SIGNAL = 1.1; EXPRESSED IN BONE MARROW, SIGNAL = 1.5; SWISSPROT HIT: P51828, EVALUE 2.00e-19; NT HIT: gi4557254, EVALUE 2.00e-87; EST_HUMAN HIT: BI910966.1, EVALUE 1.00e-54
cccggtaatcatttctgctgagcgagaaccacgtggcaggggcaccaggtgggggctccctggatcacgcggggcatggagcctcccacctagggtggccacaggcagtggatcagcacaggaaaccatgaaccttgtggccgggcccaccctagaaacacattatggcttttcttgttcccttgtatgtctgcccacgcagggggtggcgagggagccaacctaaggatacgcactgggtgggctgctgtggtgcagggttccgggggctgtacggcctggggcagcatcttggggcaccgggctcaccaggctgcatccacaggtgcccttcttcctgttcattgtcttcgtggtgtacacactactgcccttcagcatgcggggcgctgtcgccgttggggccgtctccactgcctcccacctcctggtgctcggttctttgatgggaggcttcacgacacccagtgtccgggtggggctgcaggtgagggatgggctaaggcctctgggggaggttttgtggtctgggtc

SEQ ID NO: 11782 - DNA, 597 bp, Homo sapiens
  MAP TO CHR14.3; EXPRESSED IN FETAL LIVER, SIGNAL = 2.2; EXPRESSED IN HELA, SIGNAL = 1.5; EXPRESSED IN HEART, SIGNAL = 1.6; EXPRESSED IN LUNG, SIGNAL = 2.1; EXPRESSED IN BONE MARROW, SIGNAL = 1.9; SWISSPROT HIT: P35928, EVALUE 5.80e+00; NT HIT: gi16189350, EVALUE 4.00e-73; EST_HUMAN HIT: BF594255.1, EVALUE 0.00e+00
catgtgaatgtgcttctgggggtgtgtgctgtttgggtgaagtttattctcttggcccatttcttttcaggttgctgagtcattaggaatcacagaattcctacggaagaaagaaatacacccagacaaccttggacccaagcacctcagccgagacatggatggggagcagctagagggagctagcagcgagaagagggaacgtgaggtgggcatggctgaagtgggtgccaggtgactgtgcacggtgaattagcgtggtttggcttcttctgttcacaccaggaagaggaggtagcggtttgcctattccttcctattctagctgattgggtcttctcttcacaggctgcggaggagggactggcctcagtgaaaaggcccagaagagaagccctgtccaacgataccactgaatctcttgctgccaacagcagaggccgggagaagcccaggcccttgcatgctttggccgctggtgagggtaaaatgctgtttgtggggtgtatccatggcctggcagccctgctgacatgcacagatgtacccaggattgccatttttcaggttgggtgacctgtgctggatttaagggga

SEQ ID NO: 11783 - DNA, 564 bp, Homo sapiens
  MAP TO CHR18.3; EXPRESSED IN PLACENTA, SIGNAL = 1.8; EXPRESSED IN HELA, SIGNAL = 6.3; EXPRESSED IN HEART, SIGNAL = 3.8; EXPRESSED IN FETAL LIVER, SIGNAL = 3.6; SWISSPROT HIT: Q00566, EVALUE 1.40e+00; NT HIT: AF120989.1, EVALUE 0.00e+00; EST_HUMAN HIT: BE878549.1, EVALUE 4.00e-86
tgccactttttggtcaacaggaactattttgaggggaaaaagaaaaaaggagacaattaacaccaaagaaaccttttgtaaacagccccagtgggtcagaaagtatgatgttcactgacctagagagatactgaaatgctgttttctactgtgcacaatttacttatgctctctcttgctgggacagggtgggcagggtatggggacatgcacgggacatttggacaaccaaaattccagtcacttaattatgatgtgagatactttttgaagagctttcgaagtagcatatacatgcgataagtaaattaaccaaccttattttgattgagaggatcgtttcgcagtctctgtttgttcttctgtaatttactaggcatcatctttccagttctgaagtcaaaactgctgagatcaacagtatttcccaggtaccttgccaactgaggcttgcttctgaacttcttaccacttggactagaagaaagtaaggttaattgaacaaaaggcaacaatattctccacataagccttttcttcatgtcttcccctaccctcaattga

SEQ ID NO: 11784 - DNA, 527 bp, Homo sapiens
  MAP TO CHR14.3; EXPRESSED IN PLACENTA, SIGNAL =   2; EXPRESSED IN HELA, SIGNAL = 2.1; EXPRESSED IN LUNG, SIGNAL = 2.6; EXPRESSED IN FETAL LIVER, SIGNAL =   2; EXPRESSED IN BONE MARROW, SIGNAL = 3.3; EST_HUMAN HIT: BF038174.1, EVALUE 7.40e-01; SWISSPROT HIT: P22695, EVALUE 1.10e-01
tctgatcctgaagcctttgcggcctcatttcgagaacaaggtgctggcggctgggaaccagttggctgggttctgccggggagacccctggagctgtgcagccctctctgggcttaggtttcctgccaagacacgtggacccccacatgcgcccgctcaaggctaccagcctcttctgtgtgggcaggccttgcacctacagccgcaggacatcctccaagagcctggcctggggctgcggaggctgccacggctcccacggctcccacggatgctgagtgcgcgagggctgcaggtcccacatcctgtagtccagccagctgcaaaggctgccctgcacctcagaggaagggcaggatttcaatctgcgcaggaggcaggacgggggggccacctgagggcctgcaatgtgccttctgcacagcaagtggtcctggggccacaactccagggccagggtggtaaagcgctgcagccggtggggagggtggggaggtggcaggaagccccgactccatactcaggtg

SEQ ID NO: 11785 - DNA, 585 bp, Homo sapiens
  MAP TO CHR19.3; EXPRESSED IN HEART, SIGNAL = 2.2; EXPRESSED IN HELA, SIGNAL = 3.3; EXPRESSED IN LUNG, SIGNAL =   4; EXPRESSED IN BONE MARROW, SIGNAL =   3; EXPRESSED IN PLACENTA, SIGNAL = 2.2; NT HIT: gi8923076, EVALUE 2.00e-99; EST_HUMAN HIT: BI837733.1, EVALUE 2.00e-87; SWISSPROT HIT: P34092, EVALUE 1.10e+00
gtagacacacgatgtccccgtgttccgcatcctcctgcctcagtcgcgcctgcaggcctttgccctccgccagtctcgctctgccgaccgcatcaactgggtgtcggaaacagggatcccacccgccggcgcctctccgtccctgacagaggcctgggctgcagggacgcgaggaggcggccctcacgatcaggggcctcagggtctgggtgggtagggtgggtaaggcccggaggtcgcagcgctcacctgagcaggcgccctcagagcggctgctgccgccatgactctgggcggggggggaacgcgggctcggcggtgttcctgtcgttgtcctgtcccgggtcgcgaccagcggcgtcgccgaacctcagatccgcctgtgtgcaatggccacaaccactcctcccgagctcgtccagacccagcatcgccggatggacctgacaggccaaaatggctgccacggctaggacgccggaagtcctggcttgactttacgtgccccggcaatggcacggcttctctgaagcttcattggctcagccacgttaccatttcgcagggcggattctgggtaatgta

SEQ ID NO: 11786 - DNA, 571 bp, Homo sapiens
  MAP TO CHR14.3; EXPRESSED IN HEART, SIGNAL = 1.6; EXPRESSED IN HELA, SIGNAL = 4.2; EXPRESSED IN LUNG, SIGNAL = 4.7; EXPRESSED IN BONE MARROW, SIGNAL = 4.8; EXPRESSED IN PLACENTA, SIGNAL =   4; SWISSPROT HIT: P32934, EVALUE 6.30e-01; NT HIT: Y10196.1, EVALUE 8.50e+00; EST_HUMAN HIT: BF125625.1, EVALUE 2.00e-01
agtgattaatggtgcagggcacctgtagggtttcataactgttagggctcatcaccatcatcattattatgagaggtggctggttctatctatggtgctaccagagatcatacaaatgaccctgaccccacagattcgttattatggcatgaacggtgggcggggaggaaggaggaagtccataacaaagtgtcactattttaaccaccaaaaataagttcaaagacccttttcaagccttttattattataattagtcatagtaaggccaaactgaaaccccaggaagccctcccttcctgacctatgtgctgtgctgggttctgatttataagagttcaaggaggcagaggaaccagacattaaagcacaaatccactctggccctaatactagggcaaaggaaaatgctgccacctcccctggagaagacagcggtagaggggcagctgcaacctcttccacagagcaccgctttgtggaaacagaagtctcctgaagctgtgcccaagcagcgctgagcctgcatcatctccctgtgttgatttacagagaagccacaccttggatc

SEQ ID NO: 11787 - DNA, 574 bp, Homo sapiens
  MAP TO CHR16.3; EXPRESSED IN HELA, SIGNAL = 8.9; SWISSPROT HIT: Q13084, EVALUE 2.00e-05; NT HIT: gi14777207, EVALUE 0.00e+00; EST_HUMAN HIT: AI289267.1, EVALUE 0.00e+00
ccccaaagagaacaccagtcctcaaagcaaagatacacacacacagcctggcccagactttactcgctcccggccccacgggcacaaggaacactgccgcaaacgtcggggcccagcctgagaggagcctctgggcggcccaggcctcctggggatccctgccaagctggccccgggctggaaggtgcatgggcagcacacgaaaccaggatccacccactgcccaccggtggccctcacagctccccgggatctgtgtcctcagtgcaaagggcctggcagggaaagctgggcctgttggtcaggcatggaggagctgtgtggtcactggccactggctctcttctgcaccaccgccggctctgacagtgcctgctgctgcagctgctggatcagctccgccacatagatcttgaacaggggtacagggtcctgaaggagagaggggctcatggtgaggccagggaagcccagggcagctggagttccgacggggatgggatcagcagctgccgcccagaggaaccggggcatgagaggccctggagggcagagtcctgtcggtgagatgagg

SEQ ID NO: 11788 - DNA, 537 bp, Homo sapiens
  MAP TO CHR18.3; EXPRESSED IN BONE MARROW, SIGNAL = 0.73; EXPRESSED IN HELA, SIGNAL = 1.3; SWISSPROT HIT: Q20405, EVALUE 5.00e+00; NT HIT: gi11496534, EVALUE 2.00e+00
tctgtcccttcaaagttggcagcacttccttgtaaaatgttttggtccaggacctttttgtagttccactgtaatgtgtcatatgataaataggaaattatccttcttttacagtgaatttttaataaatataaacccaaatatttgatgttacaaagggaataagataccatttagctatagactaataattaagatgataattattacattccatatacttttgagtcggtctatctaataggttatacagaaatatgtacaagagacagcaccagtgtgtttcatcttaagctctctcacaatctctgcactttttatcccttaggacatacgggacggttattaaagtctctgtgcttcatcagtctttccttcctgttgctgcacatcattttccacatcacgttggtgagccttgaagctcaacatcgtattgcacctggctacaactgtgagtattatggtgttttcttttattgttttcttttatttcttttatatacgtgcataataaagctgtgtgtcatcgcacac

SEQ ID NO: 11789 - DNA, 528 bp, Homo sapiens
  MAP TO CHR14.3; EXPRESSED IN PLACENTA, SIGNAL = 0.89; EXPRESSED IN HELA, SIGNAL = 0.92; NT HIT: gi4502354, EVALUE 3.20e-02; SWISSPROT HIT: P03376, EVALUE 4.30e-01; EST_HUMAN HIT: BE181010.1, EVALUE 7.40e-01
ctgggatggaaactggaatgagtggattaagattataggaagtagattataggtagttctggcaacatattattggtctttgtcctggccaggtctttgctgtggttgtttaaataaattcataagctttaacaagtaaacatgattcttgctagctgccagccagtggcaggagcttggtataaaggtaaccactgctgggatgctgaaggtgttgtaattggttttcttgcctgtagatcagcatcctgctgaagactttgtgggtttcctcaagtccttcgagggtatcaataatgagggaatgccagtaattcctgagagaagttggccctgcttttcagtctattcctacaaacgcccaatcactcctttgactgggacccgaacttttctcctggatactgctcacactggatacttggccgaatcctatgcatttcctgtcattaaccaataacctctggataccactggaactatccatccttggcttttccctgggtctccccattctgtggagttttg

SEQ ID NO: 11790 - DNA, 563 bp, Homo sapiens
  MAP TO CHR16.3; EXPRESSED IN BONE MARROW, SIGNAL = 1.2; EXPRESSED IN HELA, SIGNAL = 2.2; EXPRESSED IN PLACENTA, SIGNAL = 1.3; EST_HUMAN HIT: BE407697.1, EVALUE 1.00e-128; NT HIT: gi13627994, EVALUE 1.00e-48; SWISSPROT HIT: P41950, EVALUE 3.10e+00
tgaggtcaaaggcagtgatgtcctcctggtcctcctaggagaaagagtggtgtgccgagcacggtgtgagtgggctgccctctccacttgcccctcacccacccaggctgccctcacctgctccagactccgcagcacggcccccgaggccacttccagaatgttgactctggtgccacagacgcagaagaggtgctggccagtctggtccagctggggacagagaggtctcagccaggcaacattcagcaccccccgcggcctctggctgcccgccccactgcccttccccaggctggtacctgtgcttttccgcccttgtagaaaggctcaattttgcgctccacagcatagctggaaggagagcgggaggcgaatgagcaccacccaccccctcagtccccagggccccgccctgtgctaggtgctcctctccaagtgaccccaatggcccctgcccttgagtttctgggcaacagcagggacagggcatggggtggaaccagcagtactgcagggggctgtagctaccgtcgtcactgagaagtagagacccgcagctg

SEQ ID NO: 11791 - DNA, 597 bp, Homo sapiens
  MAP TO CHR18.3; EXPRESSED IN PLACENTA, SIGNAL =   5; EXPRESSED IN HELA, SIGNAL = 4.9; EXPRESSED IN LUNG, SIGNAL = 5.4; EXPRESSED IN FETAL LIVER, SIGNAL = 4.9; EXPRESSED IN BONE MARROW, SIGNAL = 4.9; NT HIT: AF099810.1, EVALUE 5.70e-01; SWISSPROT HIT: Q55680, EVALUE 2.00e+00; EST_HUMAN HIT: AV700111.1, EVALUE 2.10e-01
ctcccttctgctttctctgcaaaccgtagtgctttcccgctgctttccttgaactctctcctagacacacagacaaggtctgatgactccaattattggacttccccgcatactccagttcactcccctctcctggatcagatccatgagctgttagctcctgaaactgttccacctcagaaacctctatctcaagccccagggtatggctctattcccatcacctcttctcttccactttctagtgatttctagaaaacctttcctccctgcttacagatgccccctaacttgcagacaccctctaagtggtcctgagatagcaacctgattccttcacagccttggcatgaaatttaggaagccaggagtgtcccagagggcaacatggagatgcagagagaacaggtggctcaggggaggcctagggtcaggaattgagtccagagagggtggccccctcatcaatagaggcaaaacatcaggggccttgaaattcagcagcaagtctcagcatattggtccaaaggacaagtgcaattagacacatctcaagaaagaatggtgcggaacattcggggacagcctctctattcc

SEQ ID NO: 11792 - DNA, 589 bp, Homo sapiens
  MAP TO CHR14.3; EXPRESSED IN FETAL LIVER, SIGNAL = 0.95; EXPRESSED IN HELA, SIGNAL = 1.6; NT HIT: AJ250280.1, EVALUE 0.00e+00; SWISSPROT HIT: Q02280, EVALUE 4.00e-48
ggtggctaaaaagaggtttggattatctgtggaatccatttatcctgatgttttcaaaatatatgacccacagtactcagaaaaccaaaacgaaaaacttacctcatccacattttcaaaggcattgatgatgtcataaggtaaacaagacagcagatcgatcacaaaccaagttttcagatagttcatccttatgagcttagggtcagaaatgacctctccaccgggccccacgaaagtcgtgtgaaaatttaaaacgatgtcaaccagaaaaataacgtccaccacactatccagtaccagccaggctatgttgttctgctttgttttgaaggaaacattataaggaaccataatggcggtgtagaaggtaagaattaaaatcacccaatcccaagtagttttaaaagcacaataatgtaaaataatgtgtggtggcgtctttggcgcttcttgtttatactgaggaaggatatctgatcccagctgaagaacctaaaagagagaaaatgtatttatacatgactaggttatctctgcacagtcagtgatgaattcaaatctactggcagtcaaaccacagccagtc

SEQ ID NO: 11793 - DNA, 591 bp, Homo sapiens
  MAP TO CHR18.3; EXPRESSED IN HELA, SIGNAL = 1.4; EXPRESSED IN PLACENTA, SIGNAL = 0.83; EXPRESSED IN BONE MARROW, SIGNAL = 1.1; EST_HUMAN HIT: BG620761.1, EVALUE 0.00e+00; NT HIT: AB058733.1, EVALUE 7.00e-50
aaaatgctaaggcaggcaacatttactcactttttacacacttctgtttcatataggcaaacatgacagaaggtatagaaggaagtgtttttattataagaaatgcttagaatgaatgaaaatatttccagtaagtgcagagtaataagttctgcgtttctagtgaagtcttgattatagagtaaattaaatgacaatacatctgtttttgtggattaaaaaaaagtcttactttcaaaggtgattctccacctacataaacgaaaaatacacggtgtctcttctgcatatgttcaaacatttgttgacttggaagtggccgaattagagccctgttgcacaacaaaacaaaaaacaaacttgaattataaactaaagtacataatttactatttatactataactaatcatgtctcaagttattaagtttcaataatatatcaactgcattttaagtatatcacaaaatccacatgaatataataaaactgtggtccatgactactattgcacatacataaaaggttaatatagtacccacaatttaatctatcagtttcaaaataagtgtcaaaacatccattcagaga

SEQ ID NO: 11794 - DNA, 561 bp, Homo sapiens
  MAP TO CHR18.3; EXPRESSED IN HELA, SIGNAL = 1.6; EXPRESSED IN BONE MARROW, SIGNAL = 1.3; SWISSPROT HIT: O50161, EVALUE 3.10e+00; EST_HUMAN HIT: BG283349.1, EVALUE 1.00e-122
catttatttcttttgaaaatgagggtatttataaaagtgaccttccttacttaactattaataaaaatcactaaaacatttcactattatgacttatataaataatgtataatattctacattgaatagagtaacgtataatgcacttgtggcctggcataaagtaaaagcaactaatagtaaataactaccatatgctatttttacttacctcaaggagacctgacaagtacttcacacagatatctagaggctttgtgagaggagagtgtgagctccatcccggaaacgcagtgaggttagccatccctcgtaaggtccgctcaagggacggcaggccatagaaatgaggcgcatccgtcactttcagacactggagcagtttcagagccagctgcgtttgaaaaacgtaaagaagttccgagcatttcctatgtatgcaaaagagggaaaatcaaccaccaagaaagtataatgggcttaatgggctatcttactggctataaaaggttacttaaactcatagtaatagaaaaaaatgaaccagacaaaatggcagaa

SEQ ID NO: 11795 - DNA, 554 bp, Homo sapiens
  MAP TO CHR19.3; EXPRESSED IN HELA, SIGNAL = 2.6; EXPRESSED IN LUNG, SIGNAL = 1.7; EXPRESSED IN BONE MARROW, SIGNAL = 1.5; EXPRESSED IN FETAL LIVER, SIGNAL = 1.5; EST_HUMAN HIT: BI906307.1, EVALUE 1.00e-128; SWISSPROT HIT: P03338, EVALUE 4.10e-02; NT HIT: gi15303440, EVALUE 1.00e-35
atcctctgcccatttcacagagaggagcaaaaggagaggcagagtacccaagcctaaacagggtcacacatgccccacgagtaggtctgggattgtacgcaggtccctcaaatgacttacaacagcacggacctagaaaaaaagcgagtggagaagggcaaagcgggtggagcctaccttcttggagaagaggatttgggtggaatctccagcctcctctacaggagcccagtgcaggaggacgtcattgtcctagggtaaggagggaggcggggttagaggcgctccccaaaccacattcccaaaactttccgttgcaaatttccaaactttcccagtttctaccctcagcctttcaaagtcccgcccctcattccagttcccacacccagccttcttcaggtcccactgctgaccgccagaccaaactcctacagctgccgcctgcatcccagaccgcctgcatcccgctcggagcgggtccgagccctgctccctcccagcgcaccttttccacgacacggatgacaccagcgatgagagagtctcggtcc

SEQ ID NO: 11796 - DNA, 561 bp, Homo sapiens
  MAP TO CHR19.3; EXPRESSED IN HELA, SIGNAL = 1.8; SWISSPROT HIT: Q03405, EVALUE 4.00e-15; NT HIT: U09932.1, EVALUE 4.00e-88; EST_HUMAN HIT: AL525211.1, EVALUE 0.00e+00
tttctcaatcactcgcgttccatgctgcgctggaggggtgtgtgggttggggggaagctcaccttcccacaagcgcacgatcgtggtcctgcagaggtcctgtcccagggcgcactcttccacacggcaatccccgttggtcttacactgcatgcaccgcaggccccaagaggctgggggaaggagggagaggagaggagaggttaactacgcttagctccaagacccccgctcacccctgcatgtcccaataccaacaccaagtctccaggccccgtccattcagattcgtgtccatgttctgctgggttccggccggcggtacttccagtctgtccgttgtccacgttctacctccaccccactaactgaacgttctatccctgcccacaagtcctttcccaaagtcctgccttggcccgtttttcctttcattctgtcctcgtgaggcgtatatcctgacagtcgtatccccgccctctctatcagtacgttctattcctgctcctattaggtctttctcaccgcaccggccctcggtcgattacgcctctccagttc

SEQ ID NO: 11797 - DNA, 600 bp, Homo sapiens
  MAP TO CHR16.3; EXPRESSED IN FETAL LIVER, SIGNAL = 0.82; EXPRESSED IN BONE MARROW, SIGNAL = 1.5; EXPRESSED IN HELA, SIGNAL = 1.1; NT HIT: gi6677632, EVALUE 4.00e-42; SWISSPROT HIT: O13089, EVALUE 3.00e-04
ttagagcgaaggctgaaacggacccccacctgtcttgggcgacaagcccactcccttcccactgctcagggggcctaaggggcaggggtggcccccacagggctgctcacctgggggcagcttggttgctgggtgtccggcccctggcgagtagatctcacccttggagccaggctggcagaccatgtggttggtgaccaagtggctgtagaggatgtcccttgtggtggagatgaagccacagctgtggcagacacctgtgggccatggcgaggtggtcaaggcccagggcggggaggcgggacccacacaccccccggcccctgcggtgcctaccgctcagcgtgtccgtgtgcaccttgaggtgccgctcgcagttggccttggtggtgaaggccgacaggcagatcaggcacacgaagggccgctctcctggaacacagggcgcgtaagagcggtgcccgggccagcttaaccttgggactccagggatgaggaaggcgactgggcccagggccgtgatctgtgccgggggaccctgtgctgaagggtctttaaacccctcctcctcctcctccgccttttgtctctcgggacagc

SEQ ID NO: 11798 - DNA, 573 bp, Homo sapiens
  MAP TO CHR16.3; EXPRESSED IN HELA, SIGNAL = 3.3; EXPRESSED IN PLACENTA, SIGNAL = 3.4; EST_HUMAN HIT: AL596779.1, EVALUE 7.00e-63; SWISSPROT HIT: O95255, EVALUE 8.00e-18; NT HIT: AF168791.1, EVALUE 2.00e-65
gagaaaggaagggacccaaggcatgagccaccattttggtttcccagggtggcccacgccccgacttaccactccggaggcctgctgggcagcgttggtagctggcaagacaaagcagagaagccagtaaccaaacagcactccagatgactggactccctttttcctctcggtgtgaatcaggaacactgcgaagctctggacgggaaagtcagggaggccccttaggggagggtgggaggctgaggggagcctcttctcttccccttgttctccactgtggcaggcaaagcagcagctgggaggaagccgggctccagactgaaggcatcattaccatcgtggtgagccacacagtaggatgaatgaggaattctggggcctcaggcgttccctgttggattttccaaagagcgacagccacgctggaggtacacaggactatgagggtgaatccaagcacctgaggatacaggcttagataagcttggggggcaataagagaggtcacagcaaactggtaagcagccccatgtccaactgggagctggttctgcaacatcctggctgata

SEQ ID NO: 11799 - DNA, 581 bp, Homo sapiens
  MAP TO CHR19.3; EXPRESSED IN HELA, SIGNAL =   1; EXPRESSED IN LUNG, SIGNAL =   1; EXPRESSED IN FETAL LIVER, SIGNAL = 1.2; EXPRESSED IN BONE MARROW, SIGNAL = 1.1; EXPRESSED IN PLACENTA, SIGNAL = 1.1; SWISSPROT HIT: Q15942, EVALUE 7.00e-03; EST_HUMAN HIT: BI826417.1, EVALUE 8.00e-69
gtggcctaggttctaaggggaggtgtttcctctgagtattctgggattcgcagtccgcagacaggacctcggggctgcccctgggagcgcgccctctgccgctggagcgttggagaacgttagcgccccccttgccaccgacgctgggactacgagctctaaaaggccgtctgctcaggctgggaaggcagacggtgtatcagaccttgcgtgctgggactcactttcagcctgcaggtccagcgccggggacaggccccaccaggacacggagccgaagccgctgccggagccggcaggtgtggtcatcaccctgcggaaaagacattctgggaatcgcacacattgcccgccccgctcccctctcaccgcccctcacttctcgcccctttgcctccacatgataccttgcccacacctttatcctccaaatatcccgggacgccccttcctctctgctcagtgcagcactgtggacccgcggcactccacaaccgctgcccagagtccccgcccttttcgaggaatcaagcaatggaagcatgtgggatgggaccacagcgagcaactgaccaatgaga

SEQ ID NO: 11800 - DNA, 588 bp, Homo sapiens
  MAP TO CHR16.3; EXPRESSED IN PLACENTA, SIGNAL = 1.1; EXPRESSED IN HELA, SIGNAL = 1.1; EST_HUMAN HIT: BE185395.1, EVALUE 2.00e-23; SWISSPROT HIT: P16303, EVALUE 4.00e-16; NT HIT: D21083.1, EVALUE 2.00e-47
  unsure 141
tgaagttctgcccctgagtcacacatctatcctccttagttaggaccctgtgtgtgcatacccatggcccaaagtcacgccggtctagggtgctggtctcaccctcagacaggcagagttggggacacggttgtgacctanggtgggaatcacaggcgctgtgttgctctctcccccagagttacccccacacacccacggtgattgatggagtggtgctgccaaaaacacccgaggagcttcaagctgaaaggaagttccacactgtcccctacattgtcggatttaacaggaaggaatttggctggtttcttccaacagtgagaaggcgcaggcctcttggagggactcacccacccccatcagccctcccacctctgatcccaggagtgcttccctctccaagcactgctctgagtcctgggcagctgttcccttcagcaggagttaacatttccatggaaaccttctccaggagggcacagttgtcaccgggatatcagggccctgggatcccctctccccagactctctgattgtcttcctattgaagaatcctgaagtgtctgtgctgggaggaccagtaga

SEQ ID NO: 11801 - DNA, 503 bp, Homo sapiens
  MAP TO CHR19.3; EXPRESSED IN HELA, SIGNAL = 1.2; EXPRESSED IN LUNG, SIGNAL = 1.6; EXPRESSED IN FETAL LIVER, SIGNAL = 1.1; EXPRESSED IN BONE MARROW, SIGNAL = 1.8; EST_HUMAN HIT: BI560259.1, EVALUE 6.00e-23; SWISSPROT HIT: P90587, EVALUE 6.00e-04; NT HIT: gi14746548, EVALUE 1.20e-01
ccattttacaggagatgctggaacttcaccttttgtggacttctctgcacaatgatttccactagtggctcacattgaaacaaatgcatctgaggcccagcccagcccacaggccacagctgatggctccctcctgcctgcctgtccccagcctcctcagagcacctatgaccaagctacagacgtgtccacatggatgctggcttatgtggaattcaggaagtcatgaatggggacgccccacccaaactcccttctggcctcctggggtccaactcacttagtgatggtgagcagcgtggcctgggatgtaacatcccagatcttgatgcacctgtccaatgagacagaagccaccctctggctgtcggggtcaaagcagcatgacgtgatggaccttgtgtgatgatctgcagaacacggaggaaagggacttgagaccacgccttccacctgctgggctggaggactcccacgacttccccagccagtgacgattacaa

SEQ ID NO: 11802 - DNA, 509 bp, Homo sapiens
  MAP TO CHR16.3; EXPRESSED IN HELA, SIGNAL = 4.4; EXPRESSED IN FETAL LIVER, SIGNAL = 4.7; EXPRESSED IN BONE MARROW, SIGNAL = 5.4; EST_HUMAN HIT: AI125587.1, EVALUE 4.60e-02; NT HIT: M69135.1, EVALUE 1.20e-01; SWISSPROT HIT: P15570, EVALUE 2.80e+00
tcagcaaaaacacatcccaggaggcacagaatccagcacccaccgcgcttcattgtcatccccttctgtctccgactccgcattttctgcttcctccaagatagcccctgtctgcctcaaaggatcatggaaaagcagagcctctccaggcactgccatctctctggaggtgctgcagggaagttgtcattgtttttggtaattgtaactgggacaaaggttttcaaaaatattttcaattccccaagtgtgtactgtcattgctgccacaggtaaagtataattgcagtgcggtggggaggtgaggtcgcagggtcccgagcccatatctcagacctggccgcctccctccacacactccctggccgtgacagtcactggtttccacagcccagcagcagggaggcgcctggtgggtgtgttacattttgatctgtgagagagcacctgtaaggttaggaagttgtcaggaggtggggtaaatgctctggtgtggaaagaggactcca

SEQ ID NO: 11803 - DNA, 595 bp, Homo sapiens
  MAP TO CHR16.3; EXPRESSED IN HELA, SIGNAL = 0.87; SWISSPROT HIT: Q37372, EVALUE 2.00e+00; EST_HUMAN HIT: AW300141.1, EVALUE 5.40e-02
ggaactgcatgcacagactcagacacacaaattaaccccaaatgtatacactgagtttaaaactatgtatgggagctattaaagaaaacattaatttcatccaagactagaaaataaacaacaaaatattcacaatccagtaatttaaagtaagactctcatggtagcaccgtgtagaagtaagtaatcagatactatttttaaaaagtgggaaaaaatgaggctatgtttttccaacactctcaactcactggatccttaacgtacctcctttgcaaagagcagcaatttgaaagtgtgatttttgcccccctcagtttcactaaaaaccaaaaaatatatttcatgcaaatttctcagcaagcacaatttttaattaaaaaaatcaaatgtaccattagccaataagaggtgataagaatacataaaactatcacactaagtaattattggtgtaagaatgttggtctagttttccaaatgaagagggttcataataaaattcatgctgggacacttgtaattgaaaacccatttaaatagctcaattccattattttaatagatgaaaatcaggtttctgcttcccacccat

SEQ ID NO: 11804 - DNA, 515 bp, Homo sapiens
  MAP TO CHR14.3; EXPRESSED IN HELA, SIGNAL = 7.4; EXPRESSED IN FETAL LIVER, SIGNAL = 2.2; EXPRESSED IN LUNG, SIGNAL = 4.1; EST_HUMAN HIT: BE778374.1, EVALUE 0.00e+00; NT HIT: X95586.1, EVALUE 0.00e+00; SWISSPROT HIT: P28074, EVALUE 4.00e-55
caaggatcatgtggttgcagcttaactcaccagggcctctcttatcccagccacagatcatggtgcccatggacagccccatgcctttgtactgatacaccatgttggcaagcagtttggaggcagctgctacagagatgcgttccttatttcgaagctcatagattcgacattgccgagccaacagccgttcccagaagctgcaatccgctgcgcccccagccatggtgcctagcaggtatgggttgatctctatcaccttcttcaccgtctgggaggcaatgtaagcacccgctgtagccctggagtcagctgcaactatgactccatggcggaactgttaagatcagaggaaaacacaaaacaggccacataagaccacaaaaacactcctacatacttctttttgcatcaatccaaacccagcacatctctttctccgtccttttatacttcacagtatacttctatacttcaccatatattaatgtcacccgagcttcacatcaatccct

SEQ ID NO: 11805 - DNA, 519 bp, Homo sapiens
  MAP TO CHR14.3; EXPRESSED IN BONE MARROW, SIGNAL = 2.1; EXPRESSED IN PLACENTA, SIGNAL = 1.7; EXPRESSED IN HELA, SIGNAL = 1.9; EXPRESSED IN FETAL LIVER, SIGNAL = 0.89; EST_HUMAN HIT: N25467.1, EVALUE 1.80e-01; NT HIT: X99063.1, EVALUE 4.90e-01; SWISSPROT HIT: P51789, EVALUE 1.00e-03
ttccccaagtacaagccaaggcaagttcctggggccctgtctgttcattgaatcactggaccaggggaggagccatgagcagagagcccccagtctctgggggtcctgcctccctggatcccacataaacagaggagcagcacccacagcctcctactcttcctgctcccttctcattcttacccttttttggggaagtccaggaccccaagaatcctgggtctcactcatcccctaaaaaaaccttagccctggggcaacgatttccctattgtcccagccccacctgcggggagtaccaaaagtacaagaattacccaaccagtgagtgggtcaatcgggttctccctggggagtatgacactccccgacgagcaagggaagtacactcactccccaggacggctccgcagacgcagaccgaagcttatggtgggagggtgcattctaggaagaggaaatgggtaaggacattcactatgcattagctcaccactgacccttcatgcaccttctcat

SEQ ID NO: 11806 - DNA, 597 bp, Homo sapiens
  MAP TO CHR14.3; EXPRESSED IN PLACENTA, SIGNAL =   1; EXPRESSED IN HELA, SIGNAL = 1.9; EXPRESSED IN FETAL LIVER, SIGNAL = 0.78; EXPRESSED IN LUNG, SIGNAL = 1.8; EXPRESSED IN BONE MARROW, SIGNAL = 1.4; EST_HUMAN HIT: BG715654.1, EVALUE 2.00e-88; NT HIT: M91004.1, EVALUE 3.70e-02; SWISSPROT HIT: P20186, EVALUE 1.50e+00
gttcagggctctcattctgggacacgtataggggaggggaggctgaaaattgtgaggagggggcggtcatggcacagaacttgctatccccgtggacgtggcggacagcggacccgctagtcacagctccacaaggtctcgctccgggcgcctccgagggccgaacggtcagccccgcctcgggccttcctccccggcctcccaacccggggctgggatatgccccagaccccgcagcctcagcgtcaggatgcacaggctgacgggagctggccggtacctggtcataaggggacttctccagcatctgcgtgcatagatcggcgcagagctggaacttcctgcgcctaaaatagctccaggccaggagcagcggctccatctccgagctcatggctgccggtgcggccagcgaaggcccagcgctccaggagagaggtgggcgtggagtgaagagctggcggcgtccgactctgcccggcaacccgcgacggctggggccttgtccgagaggtgcccgcagcgcgcctgagaacaggaaaaagaaaaacaaccgcaagcagaactcggctacagggcttgcctaaacttggttgg

SEQ ID NO: 11807 - DNA, 578 bp, Homo sapiens
  MAP TO CHR16.3; EXPRESSED IN HELA, SIGNAL = 1.3; EXPRESSED IN PLACENTA, SIGNAL = 1.6; EXPRESSED IN HEART, SIGNAL =  13; EXPRESSED IN FETAL LIVER, SIGNAL = 1.3; EXPRESSED IN LUNG, SIGNAL =   2; SWISSPROT HIT: P92485, EVALUE 2.00e-39; EST_HUMAN HIT: AW266489.1, EVALUE 6.00e-17; NT HIT: gi5835820, EVALUE 2.00e-22
ttggtgataaggaacccagcgaagatactgccaattatcaggcatttaactgagttaattaggaaggggttattttcgttactaatgatcaggtttgtaaagcggggttgtcctatcagagcgaagaaaattaattcggatactatagacagctgctagggagtttgcaataagagtaatacagagggctcagccgttggtatatgatgtgtttgcggttttgataataagatctttagaataaaagcctgtgaggaaaagcatacctgtaagtgtgaggctaccaataattagggaggaggaagtgaggagtaaagtcttgaatagatctcctgttttttggatgtcttgttcatcattgaggttatggatcatggatcctgaacatataaataatacagctttaaaaaaaaggcatgggtgcagatgtgaagaaatgctaggtatggttgattaatgccaattgtgactattataaggcctagttggcttgaggtggagaacgctacgatttttttgatgccattttgtgttggagcacagattgctgtaaataaggtggtcatagcccctaagca

SEQ ID NO: 11808 - DNA, 509 bp, Homo sapiens
  MAP TO CHR16.3; EXPRESSED IN PLACENTA, SIGNAL = 0.96; EXPRESSED IN HELA, SIGNAL = 0.89; EST_HUMAN HIT: BG718223.1, EVALUE 2.00e-35; NT HIT: gi16164460, EVALUE 1.00e-108; SWISSPROT HIT: Q46100, EVALUE 1.20e+00
cagccgagaaagcaggttaccaaggaagaaggcattttcttcactttatgtcactcacccaaaagaccagagagggaggtggtgtcagccgcttgggagacaccacaggtttctcccctgatccatgaaccttgatccacagcccaaatggccgcacgcagaccctggggccccagaggaagggaatgaaaggagccccccagcttcccacgggtaccttctgtctgacgtctatgctcagtgactgtcctgagccctggctttcatgctcttggttcagcatggaggacacagccttggccagctggaggagctgctcggggccaccctcgccttgcagagctgtggggattttctctgacacggcagcctggaatgctacatcctcaacacatgtgtctccgagtgccacctgttaggaaatcagaaatatgctcagaacctgctaggaagaagctggcctctgaagtcaggggtcttcatgtggggtcagagaggcttggatgcct

SEQ ID NO: 11809 - DNA, 541 bp, Homo sapiens
  MAP TO CHR18.3; EXPRESSED IN HELA, SIGNAL = 1.6; EXPRESSED IN PLACENTA, SIGNAL = 2.1; EXPRESSED IN LUNG, SIGNAL = 2.4; EXPRESSED IN BONE MARROW, SIGNAL = 1.6; NT HIT: U18671.1, EVALUE 3.30e-02; SWISSPROT HIT: P26927, EVALUE 3.90e-02; EST_HUMAN HIT: BI013137.1, EVALUE 3.00e-03
cttgcaaaattccctcttgctgtgtcttgtttttagagtcctgcatgcaacagcctccgttccttctttgcctctccatccctctatctctcttcaaacctcagaggattctacagatgtctggagatgcccacgggactgcggcccagcctggagacttagggagctctcggtcttggtgagcaatgcatgttgccccagagtcccctggggagaaacatctccccacagaaaagctgggttctgaaccatggagattgcttgagtccaggagttcctagtgtgaacaggggtctcattgagcagtagtgaagtcagaagagctgagaatctctgcgaagtaaggacacaagaaaaagagaagacgatgcaggacacagcatctgggagcaaagaagtctggagaagccggagcctagagtgcaagtgaggcagtgggaggagtcgccagtctatctggctgaggtcagcagatgcggggctcccgaagctgggcccagggctttggttcctatcttgcaggcagtgggaggttattgaa

SEQ ID NO: 11810 - DNA, 503 bp, Homo sapiens
  MAP TO CHR14.3; EXPRESSED IN HEART, SIGNAL = 3.2; EXPRESSED IN FETAL LIVER, SIGNAL =  10; EXPRESSED IN HELA, SIGNAL =  26; EXPRESSED IN PLACENTA, SIGNAL = 4.4; EST_HUMAN HIT: AW403789.1, EVALUE 0.00e+00; SWISSPROT HIT: P26599, EVALUE 3.00e-60; NT HIT: X60648.1, EVALUE 0.00e+00
aaaatctctggtcagttaaggtcacttcagctgctttttaaagtcgctttttttggaatgatggaagttgtcgccagggggcccggctgtggtgggcctgtgcccatagatggtggacttggagaaggagacccgcaggtggtggttctcccagatgtcgtggttgtgtagggcaatgggggtctggaccgcctcctccacggagcgcatttggatcagcgccatcttgcggtccttctggaagaacttgaatcctatgactatgcccccatggctggaggagaggaccttgagatcttcctcggatactgagggcgggatgttggagaggtgcacggtggccgagggcgggaatatgttctggaagttcttgaagcctggcttcttgaagcggtgcaggggcgagttgccatagtccttggtcaggccctggtcctcccggccctcgcggggcagctgcacgttctggtgcttcaagggcgtgatacggatgagatgcggat

SEQ ID NO: 11811 - DNA, 570 bp, Homo sapiens
  MAP TO CHR14.3; EXPRESSED IN FETAL LIVER, SIGNAL = 4.3; EXPRESSED IN HELA, SIGNAL =  12; EXPRESSED IN PLACENTA, SIGNAL = 3.3; SWISSPROT HIT: Q15427, EVALUE 1.00e-30; EST_HUMAN HIT: AL554469.1, EVALUE 0.00e+00; NT HIT: gi16162253, EVALUE 0.00e+00
tgacacaggcaactccaaaggttatgcctttattaattttgcttcatttgatgcttcagttgcagcaattgaagccatgaatgggcagtacctctgtaaccaccctatcaccgtatcttatgccttcgagaaggactccaagggtgagcgccatggcttagcagctggacgacttctggcagctcagaacccgctctcccagcctgaccgccctcatcagctgtttgcagatgcacctccttcaccctctgcccccaatcctgtggtatcatcattggggtctgggcttcctccaccaggcatgcctcctcctggctccttcccacccccagtgctgcctcctggagccctcccacctgggatacccccagccatgccccaccacctatgcctcctggggctgcaggacatggccccccatcggcaggaaccccaggggcaggacatcctggtcatggacactcccaagctcacccattcccaccaggaggagtgccccatccagggatgtctcagatgcagctggcacaccatggacctcatggtttaggacatccccattctggacac

SEQ ID NO: 11812 - DNA, 600 bp, Homo sapiens
  MAP TO CHR16.3; EXPRESSED IN HELA, SIGNAL = 4.3; EXPRESSED IN HEART, SIGNAL = 8.2; EXPRESSED IN BONE MARROW, SIGNAL =   9; SWISSPROT HIT: P38198, EVALUE 7.70e+00; NT HIT: AB009270.1, EVALUE 0.00e+00; EST_HUMAN HIT: AW511632.1, EVALUE 0.00e+00
actggaagagtcatgggtggtcactctcggcaccatttactgtaacttagtttatccctgggggatgggactgtgcaggggaggagtttttcctactggattctactgacaaacactgttttcatcttctaggtacattgaacggaaagccttccttgaccgagtggatcacaggcagtttgaaattgagcgagatctcaggctgagcaaaatgaaaccttgatgttacgggctaaatcaagagcagcttaatcctgtttacaatgtgagctttttgtgcgtctgtgaaatgttttacagtgtttctcatcatctgtttcccagcaaggtcttttttttttctacattgaagttctgtctatgtatcttaatcacaaatggtttcattcactttacttttaaaaatttgtccttaaatgaataaataaaataaaagttggtcctgtgagaggataatgaagatgacgacctcgctcaccttccctttattctgccgcaaagtcccacccagttcaagacagcacattccaggtctgtccaggctggcagaggtcttgccaggcatggtgaagatagctgaccaacctgggtgtgaatttt

SEQ ID NO: 11813 - DNA, 501 bp, Homo sapiens
  MAP TO CHR19.3; EXPRESSED IN LUNG, SIGNAL = 2.5; EXPRESSED IN HELA, SIGNAL = 2.5; EXPRESSED IN PLACENTA, SIGNAL = 2.4; NT HIT: gi14572198, EVALUE 0.00e+00; EST_HUMAN HIT: AW206860.1, EVALUE 2.00e-69; SWISSPROT HIT: P20813, EVALUE 2.00e-04
atgctccgtactcaccaaccatgcccgtgccacccctgactctggaagtctgcctcattctgtttggtgaagcttccccaagtaccaaggcaagaagcagctcaccctcagaccccattcgtctgtgtcttaccctcagaaaggatttgagtaggcctcttctatccatctgcagaaggtttcccaaaaggggcagagggcggggccctggtgggaggcggtcatgggtgttagggtggcgctgaaccaggagtagcaagagtcctgtgaggagtgcaaggaagaggaggacgctgagttccatggtcctggtctgactgccctgcaccctgctgcagcctccaactgggccttttatcctgaccctgcctctgcaccctgttataaaatttcatccattccccacctcctttttcatcatcatccaggagcattagcttagaaaaagttgttagggaacccagacttcctgcttgggcaacccagtgacctgatgcctat

SEQ ID NO: 11814 - DNA, 574 bp, Homo sapiens
  MAP TO CHR19.3; EXPRESSED IN HELA, SIGNAL = 3.2; EXPRESSED IN LUNG, SIGNAL = 2.2; EXPRESSED IN FETAL LIVER, SIGNAL = 2.7; SWISSPROT HIT: P22579, EVALUE 3.00e-09; EST_HUMAN HIT: BF365505.1, EVALUE 0.00e+00; NT HIT: gi15302718, EVALUE 1.00e-111
ccaaaacccacaaggaattgtaatctgagttcttacctggtacgtgtgcaggatctccaggaatgacctgtagatttctgggtggtctaggaagcgggttttaatcttattcacatagctgatggcgttgttgaattccacggaatcggactccaggggcacctggggtttgtcctctttatacggcacctgctgcttgaagtcctctgcaccgtccccgtggttgtgcgaattctcctgacaaggcgacaatgagttactgccaggcccgacactggaaacagattgtgaaaaacaccaggcccagccactgtctgcacaggaacagaaaaaactcagcacggagccaagctgtattagagacagggaaaggttacttctgagagcctggaggcaagcagggcggggtgcacaggtgagtcttcccagctcacctccacccgatccttaccaatctactcaaggaacacaacaagttcaacgagcaccttgcatttggaaaacttcacattcaggagaaatgtacaaagtggatgtttaagcctctgtggtgccaagtgctgggctgcatata

SEQ ID NO: 11815 - DNA, 551 bp, Homo sapiens
  MAP TO CHR14.3; EXPRESSED IN HELA, SIGNAL = 4.8; EXPRESSED IN LUNG, SIGNAL = 4.3; EXPRESSED IN FETAL LIVER, SIGNAL = 1.6; EXPRESSED IN PLACENTA, SIGNAL =   4; NT HIT: gi14750002, EVALUE 1.00e-120; EST_HUMAN HIT: BI793194.1, EVALUE 1.00e-119
atttcaccctcacccctctccctggaatggttttccctgactcaattatttaaacaaatttatatagagcatctctatgaacaattcttacctttccctttgtgctttttttgtttctgttcactcagcttatccaatggtaaatcactgagatccaaactatataaattcctagctaaaactttagttaatgtctccatagtcagtgaccactcagtggccaactcttcccaataggtcagcgatgacaatactgacagtaagtcatcccaaagttctcgggagatgtacacatttaggtttgctttgatccaggcaactataagggtctataaagacaaatatcagaaataacaataaaatgtgtttagtgtgtgacttcaaaatcagacattcaattcttaaaaaaattacttaaaaacaagcaacatttaaaatcgcatgctttttttaatagataatactacttgtaaaagcaattcatgcaatcattagaatctactataaatttcatttcaacaactgccaactcccaacacccagcaatctaa

SEQ ID NO: 11816 - DNA, 540 bp, Homo sapiens
  MAP TO CHR18.3; EXPRESSED IN HELA, SIGNAL = 3.2; EXPRESSED IN LUNG, SIGNAL = 3.8; EXPRESSED IN BONE MARROW, SIGNAL = 3.7; EXPRESSED IN PLACENTA, SIGNAL =   3; NT HIT: L33260.1, EVALUE 8.00e+00; SWISSPROT HIT: P38335, EVALUE 3.90e+00; EST_HUMAN HIT: AA662107.1, EVALUE 7.60e-01
agaagaggcatgagcactggcctgggtgtcagcaggacattttagaggtctgcatgtattagcaaaaactggaggaagatgtgtgggataggagagagagcagaaagtaaatctgagaaggcaggttttaggagccctgctaaagagttggatttcatcttgtacattctgaagattcattgaaagattatatgctaagacttgacagtgagaatgggatgaggaaatggatgagaatggaaacagaagatcatagtgacagcgcttatggtcagttgaggaaggggttggaggagaaagaggggtcagggatgacacttaagatttcaggttggagagatgaagatgctatttctcccaacagagaacaacaaagacagaatgggttcaaaggcaaggtaattttaaggccaaatggagatgtttgggtttctatttgcagtcagaaatacagtagtctgcctcaagaaagaagtctgggaaggaaactcagactagtggtcacccaacaattcttatggctgctgtcacaaggatgaa

SEQ ID NO: 11817 - DNA, 517 bp, Homo sapiens
  MAP TO CHR14.3; EXPRESSED IN HELA, SIGNAL =   1; EXPRESSED IN PLACENTA, SIGNAL = 0.98; SWISSPROT HIT: P46939, EVALUE 3.60e+00; NT HIT: AF031382.1, EVALUE 8.00e-03; EST_HUMAN HIT: BF376527.1, EVALUE 1.00e-57
tcactgagtgggcagtgaaggggggtgatagccctgtagcttggaaatgttttgtaaaatattacttttgcattatgttttatttctttataatttaaagcatatcagaaaatataagtatcataagtatcatagtatataagtatcaatttggatagatatctaaatttagatagatttataatttagatagatttatcataatttagatagatatctaaatatctttgtctagtgggaaaataacaaagtatttgttaacttaagaatttattaagaattggtccccgtgttaattggagaatttttttgtcttcaagatcaatgtggtaaaactcattgcagcgttgaagaacttaactgacgtttcaccagatttggacatcaggctgaagatggaagaatcccagaaggaacttgaatcatatatgatgagggctcagcagttactggggcaaagagagagccccggtgaactcatttcaaaacacaaggtgggaatcttttcaaccatcaa

SEQ ID NO: 11818 - DNA, 574 bp, Homo sapiens
  MAP TO CHR19.3; EXPRESSED IN FETAL LIVER, SIGNAL = 0.81; EXPRESSED IN BONE MARROW, SIGNAL = 1.4; EXPRESSED IN PLACENTA, SIGNAL = 1.3; EXPRESSED IN HELA, SIGNAL = 1.6; EXPRESSED IN LUNG, SIGNAL = 2.5; NT HIT: gi14765008, EVALUE 0.00e+00; SWISSPROT HIT: P42679, EVALUE 7.00e-41; EST_HUMAN HIT: AW337493.1, EVALUE 0.00e+00
taccctaaaatggtgagcgggggtcccagggaggcactgggttccgggcaggtccagaggctgtggccctgacccctgcccacgcctgctgtccgcagtcactgaaagaggtgtcggaggccgtggagaaggggtaccgcatggaaccccccgagggctgtccaggccccgtgcacgtcctcatgagcagctgctgggaggcagagcccgcccgccggccacccttccgcaaactggccgagaagctggcccgggagctacgcagtgcaggtgccccagcctccgtctcagggcaggacgccgacggctccacctcgccccgaagccaggagccctgaccccacccggtggggcccttggccccagaggaccgagagagtggagagtgcggcgtgggggcactgaccaggcccaaggagggtccaggcgggcaagtcatcctcctggtgcccacagcaggggctggcccacgtagggggctctgggcggcccgtggacaccccagacctgcgaaggatgatcgcccgataaagacggattctaaggactctaggcgcctgtgtgtctctgtgtc

SEQ ID NO: 11819 - DNA, 502 bp, Homo sapiens
  MAP TO CHR14.3; EXPRESSED IN HELA, SIGNAL = 1.4; EXPRESSED IN PLACENTA, SIGNAL = 1.1; EXPRESSED IN BONE MARROW, SIGNAL = 1.5; SWISSPROT HIT: P39612, EVALUE 7.00e-01; NT HIT: AB032264.1, EVALUE 1.20e-01; EST_HUMAN HIT: AL520587.1, EVALUE 7.00e-01
gaatgtgattcagcaagaggcaaacataaggagtgttatctttgcctaccaaaaaagtgccattgtagtttgttagccttgacagcctgaggaatcttgctaaaatatcaagttccaagggaaggtagtaactagtatactacagtgctcacagaccactgtttttttgcttatagtgttggcacttggcacagacacaacataacagatggcacaaatatatcaattgttctcaattcaagaacagtgtcacacgcagaactcaattatgcacatatggatacagaagccctttgtacaagaagttttatcagctacctctacatctgtgcctttattatttataccaacaaagcctcttcaggaattctttctgaggtaaagctactccctttaattataaagcaccagggtgatttgctcaacactaaagaccacatgaaatgggaaaacaatattgaaggctgacaacctgggcatctgccaacactgatcccagaat

SEQ ID NO: 11820 - DNA, 563 bp, Homo sapiens
  MAP TO CHR14.3; EXPRESSED IN FETAL LIVER, SIGNAL = 3.3; EXPRESSED IN PLACENTA, SIGNAL = 1.2; EXPRESSED IN HEART, SIGNAL = 3.4; EXPRESSED IN HELA, SIGNAL = 3.2; NT HIT: AF109907.1, EVALUE 0.00e+00; EST_HUMAN HIT: AW952724.1, EVALUE 0.00e+00
gattttccgcagatttccagtggccccactgatcccttatccactcatcactaaggttagtttaaattgtaggctttgacaatacctgtgtttactgctgattgttgatttgtcattcttgtctatctgatttttcactatttaactttagattgttagatttgttattgtggatattctgtttacttatttactctttgagacctatacagaatatctaacctttaactgtttatattgaagtagggtgttctttattcattccctcctgtgcccgttttcttttaggaggatataaatgctatagaaatggaagaagacaaaagagacctgatatctcgagagatcagcaaattcagagacacacataaggtagtattcttgtcttttcacttgataccaatctagactttttacagaatccaaagcaaagagacaaaaaaaatcaaccttaaattagaatataattttaaatgttttttataggtttaattgatatttagatagaaaaaagaaacagaagaccaataccatattaaagtggtccttgacatgttgtgctt

SEQ ID NO: 11821 - DNA, 593 bp, Homo sapiens
  MAP TO CHR14.3; EXPRESSED IN LUNG, SIGNAL =   2; EXPRESSED IN HELA, SIGNAL = 2.2; SWISSPROT HIT: P05199, EVALUE 2.00e-25; NT HIT: gi14746842, EVALUE 1.00e-79; EST_HUMAN HIT: BG336679.1, EVALUE 1.00e-79
ttgatctatgcgagcactctgtagtaaggagagatgctagtttcttctttttccagaggaggaaacaagttcagagatactgtgttactgtcaagacttgatccaggtcttaggaccctaaattgtatactatctctactttttatacccacttaaagtgagtatttccctatggagatcttttattgttaaggaattattgtagccaaattatgttatttactaaaatgtaaaaacattttttataaatctcttatctttgaattgttgagcttttcattttatttctaggtttatagcattcttcgtcatgttgctgaggtgttagaatacaccaaggatgagcagctggaaagcctattccagaggactgcctgggtctttgatgacaagtacaagagacctggatatggtgcctatgatgcatttaagcatgcagtctcgtaagaataccttcttgactctccttctaccttgatatcacaactcttggcctgatatttaacagcatagcatccatgtataaaatacttgccaaatttagattaaaatattttgtattggccagtaaatgggccaatcctatatggtca

SEQ ID NO: 11822 - DNA, 575 bp, Homo sapiens
  MAP TO CHR19.3; EXPRESSED IN HELA, SIGNAL = 1.8; EXPRESSED IN FETAL LIVER, SIGNAL = 1.2; EXPRESSED IN PLACENTA, SIGNAL = 1.1; EST_HUMAN HIT: AW452532.1, EVALUE 0.00e+00; SWISSPROT HIT: P22670, EVALUE 4.00e-13; NT HIT: gi15303230, EVALUE 3.00e-49
ttagcaaaacctggaccctgagctgccagggggccgggaaaggggaaggatgtagggcagtgtctgcagctcacagaggcatttccctccctgcggcctcaggggcctgcactccccagccccagcccgggaccagcccctttgcccgtggggtaggagggggagacacacacctcttgagccacgtggactggctggaggccctgcacggtcagcggctgcaccgggccgggtttgggcgcttgtggagtggcctggaccacagatctctgggaggggaaaggcaacaataagatgaccatggcaacgatggccgtcaacctacccagcccctgcacaggtgagcttctgtaaagctcacagcagacccataagcaagaggccaccattctccagccaagcaaggagggtgctggatccattactgataaagtgaggctcccaggaagcagcagggctgagttgaacctgggactaacttcggggtctctgctctccgccccctctccctacgggcccctgaagctgtgccaagaacccgcaggcaaggccttgggttatctttcgtccccaca

SEQ ID NO: 11823 - DNA, 599 bp, Homo sapiens
  MAP TO CHR14.3; EXPRESSED IN LUNG, SIGNAL =  11; EXPRESSED IN FETAL LIVER, SIGNAL =  11; EXPRESSED IN HELA, SIGNAL =  10; SWISSPROT HIT: P28074, EVALUE 1.00e-51; NT HIT: X95586.1, EVALUE 0.00e+00; EST_HUMAN HIT: AI193132.1, EVALUE 0.00e+00
aaagtgcttggaggagggacagtgtggacaaaagatgcaacacaggctgagattgagtagtgagtagtgtaatgttaacatccaagaaagtaaaacaaatagtcacctctgcagcagctcattaatgactggtaacacatagaggtcaatgtgccagagcttaaaaaaaagtactgatacaattgaaggcccttccactataaataggatggaggatgggtcactgtgtccgtattaccaatgacagtcaccccaagaaacacaagcagctgcatccaccctctttcagggggtagagccactatacttctcatgtagatcagccacattgtcactggagactcggatccagccatcctcccgcacgtggtagaggttgactgcacctcctgagtaggcatctctgtaggtggcttggtagatggctcgacgggccagatcataggcctgctccacttccaggtcataggaatagccccgatccatgaccccatatgcatacacagagccagaacctacagagaaggtggcccctgaaatccggttcccttcactgtccacgtagtagaggcctggaaagggagatgaggttagcagga

SEQ ID NO: 11824 - DNA, 539 bp, Homo sapiens
  MAP TO CHR14.3; EXPRESSED IN HELA, SIGNAL = 1.4; EXPRESSED IN LUNG, SIGNAL = 1.6; EXPRESSED IN BONE MARROW, SIGNAL =   1; NT HIT: gi15809021, EVALUE 5.10e-01
tatggtcgagcccttcagagatgtgctgttcttggcagactgtgtttttaggcaatgttgacttttgcattaacttaccattgtggacccactgattgttatggatgtaagagaggaagagcctttcagaggaggactgcctatggaaccagagctgctattttgattaatgtgaccagttaagctaaacaaagagattggctgtaactgggtaaaatcagtcactccagatgccccagagagaccagcttctggattcaaagtgaatacaatctccaggttgagagggacagctatggatgggggctctacagagaaacaaatccctcgctcactgttgtaggggtggaatacgttcatgaaggtgaaacggcaatacatattcctaacttgaaattctccatactgtctgacataaagatcccacctctgctctacgaatcgatgtagtctagagaccatgtaaatatctgagaggaggggaaagggcatacacaggcctatcacatttttatttaagggtggaaaagatcagcaac

SEQ ID NO: 11825 - DNA, 537 bp, Homo sapiens
  MAP TO CHR18.3; EXPRESSED IN PLACENTA, SIGNAL = 1.1; EXPRESSED IN HELA, SIGNAL = 1.8; EXPRESSED IN LUNG, SIGNAL = 1.5; EST_HUMAN HIT: BG482355.1, EVALUE 4.00e-55; NT HIT: AF061979.1, EVALUE 1.30e-01; SWISSPROT HIT: Q03692, EVALUE 9.90e-01
ggtcccttctctaacctggctaaatcacaccaccctatggttcactgaggctgtttccctgcagggatctcagtgtggatgctggcttgagtcctgctcagttccaggtgcggcccatccctcagcactatcagcattacctagccactcctcgaatgcaccactttcccagaaactcctcctccacacagatggtaagtgaaagaagacggactcccttgcgcctattgagtgccagtggtggtctgaggcctgcggtcccctgtgccctggctgctacatggcctggctcccctgtatccttggctcccctgtgccccggcttccacatgacccagctcacctgtgtatcaatcccccatgccctgactcccttgtgccctggccttcttgtgtcctggctccctggcagatcaacagctcccctctcttcccagcttctattctctgttatcagccccctatgccctgactcccctgtgccctggcccccttatatgctggctcccctgtgccccggcttccatatgacctagc

SEQ ID NO: 11826 - DNA, 526 bp, Homo sapiens
  MAP TO CHR14.3; EXPRESSED IN HELA, SIGNAL = 0.96; EXPRESSED IN FETAL LIVER, SIGNAL =   1; EXPRESSED IN PLACENTA, SIGNAL = 0.97; SWISSPROT HIT: P04175, EVALUE 2.20e+00; EST_HUMAN HIT: BF835202.1, EVALUE 2.00e-04; NT HIT: L11910.1, EVALUE 3.00e-05
gcaccgagaagctgagtaccctgtaaggacttcctgacgcttaggcatgggttaattcaggactaggaaatgggcctgaggagcaatcagccaaacacaaagtttgagaggggccaagtagtaggaaaagttcagggtctctcctgaggagaaaaaatcaaagtgggaggcagcctcaggggtatcctgagaaaaagaggcaatgacactggatattgggtagcgaagaggatagacacagatgcagaaaattaaggaggggagggagaaggcttacaacaatacaccttcctcatctgtggcttcctcaccattggtggggcaagtaccaatccagaaagatccagtccagtggttttcagtacttccagcatcagcatcatcatatcccaaatgcaaatcgttggtctccaccctgaactaacagtatgagcaactgtggggtggggctcagcaatctgggttttaactagccctcctggttattctgatacacgctcaagtttgagaatcacaggtctcccca

SEQ ID NO: 11827 - DNA, 595 bp, Homo sapiens
  MAP TO CHR18.3; EXPRESSED IN HELA, SIGNAL = 3.3; EXPRESSED IN FETAL LIVER, SIGNAL = 1.2; NT HIT: gi13647868, EVALUE 1.00e-128; SWISSPROT HIT: Q99708, EVALUE 1.00e-62; EST_HUMAN HIT: BF792238.1, EVALUE 1.00e-128
ccggtaaaatgtgagaatcgtcctataaatacagacacctgaaggaagaaataagtttttttccaaaacaattcaatctatttaaaaaagtaaataatgacattcaatctgaagtcattaaaaaagtggagatcctgtttatggtgtacacaccttggttgttttgtagagactttattttaccagttctacatggatttaactgaagaactgatgcaagttcacatcctccatggtctgacctggtttgtatttttattggctcatgagaaccagcactctaaaacagaaataattgttagctctaaatgaaatcacaagcaatcattttaatcaaaatccttgaacatttaacacaaacctttatgtcatctaaaacattctcagtctccaaactttcacgtggacgtagaggaattttaaagacagcattttcttcttttatttgtaatgatggtttattgtctggagagcatttattcaagggctgaaggatgatgcattcctgtgaacagggctcccctggggaatctttgggcaacgtgcagttgccatctgaggccttacggcttgaggaaaagccctttggaatggt

SEQ ID NO: 11828 - DNA, 565 bp, Homo sapiens
  MAP TO CHR14.3; EXPRESSED IN HELA, SIGNAL = 0.94; NT HIT: gi8394102, EVALUE 5.40e-01; SWISSPROT HIT: P16292, EVALUE 2.40e+00
ttccaggatgaggttgaaggcacaatcttttcaggccaaatctcttgggcagaattgaagagactgcaaaaaaaatatggaagttaccctcaccgtttctgggatgtctgaattcctccctctctggaatggagccgctggaaggctccataatcctccctctcctggctcagaggcccagctacactttctaaaacaacccagagccatctgatttcaagcatgtaccggctcgtgtgtggaagacagtaattacctccattccagttaggaaagctgaaacctgcctttttcatgcctcaaacaattatcgaagtgccttttgaagctctggatagaagagaaaagcaaaacaaaccaaagagccaattagagcctgggatttgagggtggcttagttttgtgcagtgggacttgggaggaactgtgggagagggtcagaggtcaccccaaacctccagctgccaaccaactttgcctgtgccaaaagaacattattttgcattgaaaatcaaggctcctctccctgactcaggaacaatttgcaggaacaacctctgcatca

SEQ ID NO: 11829 - DNA, 576 bp, Homo sapiens
  MAP TO CHR18.3; EXPRESSED IN PLACENTA, SIGNAL = 1.2; EXPRESSED IN HELA, SIGNAL = 1.1; EXPRESSED IN BONE MARROW, SIGNAL = 1.2; EXPRESSED IN HEART, SIGNAL = 1.9; EXPRESSED IN FETAL LIVER, SIGNAL = 1.2; EST_HUMAN HIT: BG718347.1, EVALUE 2.00e-47; SWISSPROT HIT: P20131, EVALUE 3.20e+00
tagcaatgggctttacccagtttttttttttaatggaagaatgattttacattaaaaagtaaatcattattgaaatgttaagtcacaaataactgatcatactgtaggattctgcaagtattttgaatgtttttagttgctaatacatcttctccataaatcatcacttttcaaaataatacagaaagaggagtcgtcatgcccagcagatggcacgttggatttagtctgtgaatctgaattggatggtacagatatggccgaggcaaatgcccatggagaagaaaatggaggtaagtgtgatgaattccaaaatataatcccttgttctcttaaaagttatatagaatgccaatgattcattaattgaatttcccaccattatcaatacagttttcttctaaatttttaccgctgagatttatcatcaaggtgttttgattcaaaaaggataaaatctaaaagaagtatatagttctttgcttttgttgttttttaacagtacatatttccctgaataattttcttaaatacttctttaagtatcaacatatttctcctgcaaagtgagagggt

SEQ ID NO: 11830 - DNA, 521 bp, Homo sapiens
  MAP TO CHR14.3; EXPRESSED IN HELA, SIGNAL = 1.1; EXPRESSED IN PLACENTA, SIGNAL =   1; NT HIT: AE000349.1, EVALUE 1.30e-01; EST_HUMAN HIT: AJ003631.1, EVALUE 2.90e+00; SWISSPROT HIT: P00748, EVALUE 1.30e+00
tttgtttatgtggggaagggcagaaggagaattattttgctttgtttttgagatgtgtcctaatccagtagagatcaggatgagagcaatgaccttgtccgtcaggatagtccgtcgtcccacttaatgagggaagacattggatgatattatcttccttgtgatcatcactcaagaaaataattgtggactcagctttagtccacattactttggagttttgctgtattttcacctcaagtattgtaaccacaccattttgtggctccagacccaccatggcttccaaaggctatgcagaatcattaggaagctacaagccttcccactagcccacactgctgctgcagtatgcacttatctggatcacccatgagatcaacttgcaaacaggaactggcttatgaagccatgcttgctctgagaaacataatggtcatctcactgccagtggaatgtaatatttgatgtcatgacacccttcctgtccaacttggcattggcagttggtttgacttggt

SEQ ID NO: 11831 - DNA, 600 bp, Homo sapiens
  MAP TO CHR16.3; EXPRESSED IN LUNG, SIGNAL = 4.6; EXPRESSED IN BONE MARROW, SIGNAL = 1.3; EXPRESSED IN HELA, SIGNAL = 9.2; NT HIT: gi16179468, EVALUE 2.00e-96; SWISSPROT HIT: P49588, EVALUE 1.00e-28; EST_HUMAN HIT: BF311447.1, EVALUE 3.00e-96
ggaacctgaagcctagggagacaaagtaactcattcagcagcggcagagctcgaggctgagttttctacaaggacatctccccttcagagagctgcctctcctttttaatgtgcaaagcttgtaggaaacttgtaccctggctgcaaaaatactcctacgagggtacccgatggccaggaaagcaacaggtacaagcaacagctccctcggcttcagaaataccatggaacccaacccaaaggtgtgtcaggtctgctcccaaggcctggagcactgtggggcaaaagcagctccccggctccacgcctggccctcctcggctaacaaggaagaactgttggctcacatcttcactgctgtcatccaccttcaccaggtagccttcgtcatagatctggcctccttgctcagcatagaaacaggtcttgtccagcaccactccacactcctggcctgtggacacctcttccacgaacatcttctccctgcgcagagccatcaccgtagccactgtgttctcaaatactgctcaagggaaatgcatagaaaggggacagtggggtcaatgaccttttcactccttcttggctgacttttgc

SEQ ID NO: 11832 - DNA, 515 bp, Homo sapiens
  MAP TO CHR16.3; EXPRESSED IN PLACENTA, SIGNAL = 2.8; EXPRESSED IN HELA, SIGNAL = 3.9; EXPRESSED IN LUNG, SIGNAL = 2.7; NT HIT: X99832.1, EVALUE 0.00e+00; EST_HUMAN HIT: AW377560.1, EVALUE 5.00e-39; SWISSPROT HIT: Q29611, EVALUE 1.00e-10
gaagctctgcggtctcactctattctcctgtcccaggctgtgctcctggcggacatcctccccacactcgtcatcaaattgttggctcctcttggccttcacctgctgccctacaggtctgggtgagggtagtgggaggcagggtgggcaggagctgagaaaggggaggctgggatggctgagatgctgagagtagagaccgaccttccccctcccttcccttctcaccccctcagcccccgggttctcgtcagtgggatttgtgctgctggaagcttcgtcctggttgccttttctcattctgtggggaccagcctgtgtggtgagtgtgtggttctgtgtcagatggggagccccgaggaaccacatcagagcatttgtgggaagagtctccccagcctcccagaggaaagggattcattctgtcacccttagaagcctgctagggctatcagcagtaggcgatgggagactgggacaatttggaggggtaggcagtggaggagatgggagaa

SEQ ID NO: 11833 - DNA, 530 bp, Homo sapiens
  MAP TO CHR18.3; EXPRESSED IN PLACENTA, SIGNAL = 1.4; EXPRESSED IN HELA, SIGNAL = 1.5; EXPRESSED IN BONE MARROW, SIGNAL = 1.8; EXPRESSED IN FETAL LIVER, SIGNAL =   2; SWISSPROT HIT: P45443, EVALUE 1.30e+00; NT HIT: M11506.1, EVALUE 5.00e-01; EST_HUMAN HIT: BE962790.2, EVALUE 1.90e-01
gggctgagaaggaacccactgggtgtgcaggttcatggcctggtgggtgcaggaggcttcagattggaagggacaggaagacactgaagcagtgacggtggctgctcttgggaggactttgctgctggaggacagaacaggtgtgcccactcctgcaccttgtgccatccaggaaacagctggggtgatgacggatgagactggaatggtgggtgctcctggggatgaagagaagagggcaggagaggaattgtcaatctttgtttgacccttgctgtgcatccgctttctaaacattcaggtgcctggactcaacctcagctcctccagcacaagtgactttccctgttgacagtgtcagactaatgtgtcatttagagggaaattctttaatggcaagcaggtttttcagttgagttgagaccaagagacctagctaattttcgggtatctagctaatttaatttgtctatgaaaagtttccaaagattaacattttcaaaggtaagacctaactccaagggcccaaa

SEQ ID NO: 11834 - DNA, 560 bp, Homo sapiens
  MAP TO CHR16.3; EXPRESSED IN HELA, SIGNAL = 8.3; EXPRESSED IN HEART, SIGNAL = 8.7; EXPRESSED IN FETAL LIVER, SIGNAL =  14; EST_HUMAN HIT: BF111863.1, EVALUE 0.00e+00; SWISSPROT HIT: Q9QZ67, EVALUE 6.20e-01; NT HIT: AJ271736.1, EVALUE 0.00e+00
attgtggccaccttcataccagtctgtcatggaacacttaagccgcttgagtgtctgctggtactcccagccctgccatgcctgagccccctgcacacaaggagccaggagtaatcagggcagacccattagggcacggggacttctggattgtgaaattggctctctgggggccaaggccttctaacgttggtggaagtggctttggcttattgggtcggattctaggccattcgttccaacctttagagacatcccagctttccctagcccagagtctgcagcccctccaccatcccacatcctccccctccctttcctcatgaaccccagtcgcgcctctgccttctcaaacccctccaccatcccacaccctcctcctgcccttcctcatgaaccccagtcgcgcctctgccttctcatccctgcgcaccacacaggctcgctcgtgcccggtgaatgctgaggctgctctgcacgtggagtgtggccctgtgggcaagggctgggctcttggaggtaggggagctacaggggcgactgggaggaggatgttgtgt

SEQ ID NO: 11835 - DNA, 590 bp, Homo sapiens
  MAP TO CHR18.3; EXPRESSED IN HELA, SIGNAL = 0.99; EXPRESSED IN PLACENTA, SIGNAL = 0.95; SWISSPROT HIT: P41479, EVALUE 1.10e+00; EST_HUMAN HIT: BF132909.1, EVALUE 1.00e-92
cctcagcttcagtttcctcgtttgacgaccggtctgagttaaacttacctccttaccaggatggaataagataaggcccttaagcacagccccaggcacttaggaagccctcagcggtgcttgttgctgctgttactctggcctgtcctggggtgccaggaggagggtgagggtgccacaccctcacctatagcaactctttgcttcttttctggcctccccactcttgttgcatcccggctgccttctgttctgagcccccaagtctctgcacccacccctccaccgtcctggcccctgtcaccaccctcttgatttgtgagcatcacgggggtacatgctaagtcctgagcctcctttctctacaggtcaccctgccccatctccatctcctatgagatgagtgactcccaagaccccaccacttcccctgtagttaccacccaggtagagctggggggctgcagccggcaaggtgggggcaatgggttcctccgttttcgccagcaccaggaggtccaggccttcctcagccttctgggtgagtttggagggctggcacgggaggggccgtgaggtcaagtgtgaaa

SEQ ID NO: 11836 - DNA, 573 bp, Homo sapiens
  MAP TO CHR14.3; EXPRESSED IN HELA, SIGNAL = 1.7; EXPRESSED IN BONE MARROW, SIGNAL = 1.2; EXPRESSED IN PLACENTA, SIGNAL = 1.2; EST_HUMAN HIT: AV654587.1, EVALUE 7.00e-66; SWISSPROT HIT: Q03503, EVALUE 3.00e-06; NT HIT: gi15828471, EVALUE 2.20e+00
tgcagtacctgatggcaatgtattcttcataactgtttgtttatttttaaggccatggtaggggaggagtgtgtaggtgccatcgtttgcaagttggatatgcacaaaaagatgttccgcagaggttatatagccatgttagccgtggattccaaatacaggagaaatggcattggtaagaaaaatattattttatggaaagaatgcctaagctattttcatttttgttgtgttttgaaataaaagacttaaatgtaagtatgtagaaatgaaagaaactaagggaagaaaattaaggcgggttttaatttttaatttcaaaatggtatttttaaaaagttcttaaaatgaattttttctttattaatgttttgtttgacagtttttcgttttaacaagtagccgatcatcagctttcacctgcagatttttttaatcacattcaaaatgctttgcattatgctaagtaccacaagaaatactgcaatttataattacattatgatggtccttcatgccagccttcaagcacttgtctgtatttgggttaagtggacctcaatcaagccaaaa

SEQ ID NO: 11837 - DNA, 600 bp, Homo sapiens
  MAP TO CHR16.3; EXPRESSED IN HEART, SIGNAL = 2.2; EXPRESSED IN HELA, SIGNAL = 2.6; EXPRESSED IN BONE MARROW, SIGNAL = 4.2; EXPRESSED IN PLACENTA, SIGNAL = 3.4; SWISSPROT HIT: P02810, EVALUE 3.90e-01; NT HIT: gi14776074, EVALUE 1.00e-85; EST_HUMAN HIT: BI907290.1, EVALUE 2.00e-85
agtaaaagggagggtggagggccctaagacaggccgcgagtgtggcgcccaggacagggattcgcccagacggcgggagcgcccttggggatgacggcgggaggctgggcgcccccctggtggccgtactgggcggtgccgccgctctccgcacatccttcgcggggccctgtgacttcgttaccctcctcttgaggccacgccgccaggtggcctgaatcgagggtcgggactccatcgtcgcgctctgcccctcgcccgcccctctcaggctctctgactgccacccctgcctgcctgcccggccctgcacaacatgcagccctccggcctcgagggtcccggcacgtttggtcggtggcctctgctgagtctgctgctcctgctgctgctgctccagcctgtaacctgtgcctacaccacgccaggcccccccagagccctcaccacgctgggcgcccccagagcccacaccatgccgggcacctacgctccctcgaccacactcagtagtcccagcacccagggcctgcaagagcaggcacgggccctgatgcgggacttcccgctcgtggacgggtgcgtaattgctgcaagggg

SEQ ID NO: 11838 - DNA, 573 bp, Homo sapiens
  MAP TO CHR16.3; EXPRESSED IN HEART, SIGNAL = 1.6; EXPRESSED IN HELA, SIGNAL = 3.9; EXPRESSED IN PLACENTA, SIGNAL = 1.2; EST_HUMAN HIT: BG748478.1, EVALUE 3.00e-96; NT HIT: gi14776207, EVALUE 2.00e-96; SWISSPROT HIT: P10911, EVALUE 6.00e-04
gggtgtgaagaagaaggcagaagaggctggccacccaccagcccccaactctgcaggttaacctcaaggaacaggggcagctggtgcgacaggatgagtttgtggtgcgcactgggcgccacaagtccgtgcgccgcatcttcctttttgaggagctgctgctcttcagcaagcctcgccatgggcccacaggggttgacacatttgcctacaagcgctccttcaaggtaggcctgcccaccccaggccccaccacttgttttcccgccccatgccttaccaagcccctctctcccgctggccacagatggcagaccttggtctcactgagtgctgtgggaacagcaacctgcgcttcgagatctggttccgccgccgcaaggccagggacacctttgtgctgcaggcctccagcctggctatcaagcaggcctggacagctgacatctcccacctgctttggaggcaggccgtccacaacaagggtgggtccatgcccctccttcacgccacactcccctcactggagagcttacattgacccacaggagcccagagacctgggaaaagctc

SEQ ID NO: 11839 - DNA, 599 bp, Homo sapiens
  MAP TO CHR16.3; EXPRESSED IN HELA, SIGNAL = 1.9; EXPRESSED IN LUNG, SIGNAL = 2.3; EXPRESSED IN PLACENTA, SIGNAL = 2.6; NT HIT: X56163.1, EVALUE 0.00e+00; SWISSPROT HIT: P01764, EVALUE 1.00e-49; EST_HUMAN HIT: BG756124.1, EVALUE 1.00e-120
gctcacactgacttcccctcactgtgtctcttgcacagtaatacacagccatgtcctcggctctcaggctgttcatttgaagatacaaggagttcttggcattgtctctggagatggtgaatcggcccttcacggagtctgcatagtatgtgccaccaccagtaccaatagctgatacccactccagaccttttcctggagcctggcgaacccagtgcatagcatagctactgaaggtgaatccagagcctgcacaggagagtctcagggaccccccaggctgtaccaagcctcccccagactgcaccagctgaacctcacactggacacctgcaaacagagagacacaaaggtcagaaattgccacacatcacatacccactgtttctctcattcatgcccattcacactcaatatctctagttctccatgaatcaccttttaatatagcaacaaggaaaacccagctcagcacaaactccatggtgattcctgtgtgttcagtcctgatcactgaatggaaacacctgggaatcccaaggctggggctccactcccagagctgcagggtcagggctgggctggttttcatcaggaga

SEQ ID NO: 11840 - DNA, 512 bp, Homo sapiens
  MAP TO CHR18.3; EXPRESSED IN HELA, SIGNAL = 1.8; EXPRESSED IN PLACENTA, SIGNAL = 1.4; EXPRESSED IN LUNG, SIGNAL = 1.6; EXPRESSED IN BONE MARROW, SIGNAL = 1.6; EXPRESSED IN FETAL LIVER, SIGNAL = 2.4; NT HIT: gi16163711, EVALUE 2.00e-43; SWISSPROT HIT: Q9P2G3, EVALUE 4.00e-14; EST_HUMAN HIT: AL552067.1, EVALUE 3.00e-43
aggtggtggagaagatggtgaggattcttaacagctgcagctttgctcccttcctctagggagtttgtgctcatgcttgtggcattcctcaggggatggataaggagaggggctggggtatcactgtgaagccaaatccccagacagttgatgagtgatcgctctgctacacatgtccccagttagctcaatgattgaccctctctccaattgtcagccccatctccttactacttcatttgtccccgttgcacagaaatgtattttccacactaattacaaaatggactgctactgatgcccttcattacacacatacttgttgagcacctccaattaagttgttcaatagttaccattcggattccactggtcctctccacccaacacgaacaagaagttttccacctccacaacgcagtggtgggcactgttgtatggcataactgaaattaagaaaaaaaaaaaagacatatgaaattttccatctcaggatttgctaccttggctca

SEQ ID NO: 11841 - DNA, 519 bp, Homo sapiens
  MAP TO CHR16.3; EXPRESSED IN HELA, SIGNAL = 4.2; EXPRESSED IN HEART, SIGNAL = 9.1; EXPRESSED IN LUNG, SIGNAL = 2.6; EXPRESSED IN FETAL LIVER, SIGNAL =  15; NT HIT: AF069074.1, EVALUE 0.00e+00; EST_HUMAN HIT: AI131292.1, EVALUE 0.00e+00; SWISSPROT HIT: Q91661, EVALUE 7.20e-01
ctgtcccttttaccacctgcttttcctcaccccccagatgaggccagaccatggacactacacccagcaatagagacgggactgcggaggaaggaggacccaggacaggatccaggccggcttgccacaccccccacccctaggacttattcccgctgactgagtctctgaggggctaccaggaaagcgcctccaaccctagcaaaagtgcaagatggggagtgagaggctgggaatggaggggcagagccaggaagatcccccagaaaagaaagctacagaagaaactggggctcctccagggtggcagcaacaataaatagacacgcacggcagccacagcttgggtgtgtgttcatccttgttctttgtgtgtttttgttcgggcatgtgtgtgcttgcctgtgcctgcacattcatgagcctgagagagcatctttgatgtgtatttgtgtttggtgtatgtatctggggcagggagtgttcctgctcttgcagggtctacgctgtgaatgcagc

SEQ ID NO: 11842 - DNA, 589 bp, Homo sapiens
  MAP TO CHR16.3; EXPRESSED IN HELA, SIGNAL = 1.1; EXPRESSED IN BONE MARROW, SIGNAL = 1.3; EXPRESSED IN PLACENTA, SIGNAL = 1.1; NT HIT: gi16081186, EVALUE 5.60e-01; SWISSPROT HIT: P39806, EVALUE 1.50e+00
atgttccctgagtcattgccagcacagtgacaagctccccagagaggcagcccactcgtgagcccagctcacttatctcatcttcctgcgttggggaggaaactgcctccagagaccggaattcctggggcctgcagggatacccccgatgctgcagggggagggacggagctcccaggccccttcctaccagaacgttctacaacccccatataaattcttagaacccagagttccacggagcatgaaacagtcatctgctttcactttcatgttattgaaatcatgtgacatcacaaggtcacagggctggaccaagaagggaacaagacttggatctccttccaaggtgtgcaagagggccatgttgtaacatattaacagtatctttcataaaagaggggagacagccagtggtgatgaagagagattttttttttaagttttcaattaaggaacttgaaattctgaacatttacatgtgaaattcagctgcagcatatctggatataaataatacattgaaatttatgtagttaagctttacaggagtcggacaagctctgaaaggatttgcatttcattccgt

SEQ ID NO: 11843 - DNA, 577 bp, Homo sapiens
  MAP TO CHR18.3; EXPRESSED IN PLACENTA, SIGNAL = 1.3; EXPRESSED IN HELA, SIGNAL = 1.8; EXPRESSED IN HEART, SIGNAL =   2; NT HIT: gi15305008, EVALUE 2.00e-74; EST_HUMAN HIT: AW663350.1, EVALUE 3.00e-74; SWISSPROT HIT: P20591, EVALUE 4.20e+00
ttcctcagagacatgaccccctgaagttctgaggttggctacatgtattgattttaattccaagacaatagaggtgttttatttgtaaaatttctatcttataaatacctaataagaatcctcatttaactacatgcattaattagaaatacttctaacaaaatgaatctgagctttcactgatcaataaccacacacaaatgtttgattctctaagtcattctactttctagtttacagacaattcttagaggaaaagtttagctattcacatcccctttctctcgctgcctcatcttggcccttggaggagtcttacctgcataatgtaccggaatctctatctttggcccaatgacatagtgaccctcctccaagctgtgggcagtgatggtggtccactggcggcaggaatgaatcagcagatagtcattttcccgcagcccttctacgcactctcctaggaaatacaattttatatgagaaacttagaattcataatctgctttctccatactttgcaataaaatttcattagttaaaacttgactaatgcagaagttgacagttcatccca

SEQ ID NO: 11844 - DNA, 570 bp, Homo sapiens
  MAP TO CHR14.3; EXPRESSED IN HELA, SIGNAL =   2; NT HIT: gi14751050, EVALUE 1.00e-48; EST_HUMAN HIT: BG984961.1, EVALUE 1.00e-107; SWISSPROT HIT: O75843, EVALUE 5.00e-12
acagcagtgaaaggtcaccccacctgcaggaaggggtcgctgactccagatatgctgtgttctgtggagtatcccattgtcaccagagtccggaggatgtgtaccagctggggtaccacctggagggagggcacaactttgggcattcgttctaatcctctccagctaaagccccattccttccccactgaccctgtcttccaggcccagggcctgccccttcaccagcccacctttcggaagtgcctgagggctgcagggcttcgttcgcagagctccgtgatcagcgtgatggtgcccagcaggatgcctggggtcagcgtcggggaagtgaatggtgggggccaggggcaagagagtctattgcgtgtgtgcctgtgtgtgtgcactacccttctcctgtgagctggggttcccatccgattttcaattcttctgtccatagacctgaagcaaaggatggggggccccacagccttaccatggtgacgctcatgaagcagttgggcacagggtgggaggaagacactggagagttcagggaccttccggatcatgtgcactgcagtc

SEQ ID NO: 11845 - DNA, 567 bp, Homo sapiens
  MAP TO CHR19.3; EXPRESSED IN PLACENTA, SIGNAL = 0.9; EXPRESSED IN HELA, SIGNAL = 2.2; EXPRESSED IN LUNG, SIGNAL = 1.6; SWISSPROT HIT: P10387, EVALUE 1.80e+00; EST_HUMAN HIT: BF893888.1, EVALUE 1.00e-116; NT HIT: AB055390.1, EVALUE 1.00e-117
ccagagttccacttcccaagaggggaaaccgaggtcagtcactcactcaggctgctgtctggcagggcggattctggctcctgccccaccagctccatcaggtcactagcctcgtaccagttgagggaggggcccactgtgctgctaggtcccctgacactgcagagggcctctgacagcaactccagggggccgctggtccctcggggtctctgcagcagtgcccgaagctccaccaggctgcgcagcgccaggagctagagagaggttaccagacggagctggcaatgatcccacctccaagccctaaccagggcagggcactgggccaggggcagcctctccctctcgctgtctaatcctcctgaaaacccacccaagggaagtgcccgggctgccccagaccctcccggcgcaggctgcctgccaacgttgcctccatgggggttgaggatgagtggggcctcgtacctcctgggccaggtcctcagcggcctccaacaagctgtgcaagggctcctgggcttggcccagtgccaaccccagggattcctggggagaaagacc

SEQ ID NO: 11846 - DNA, 509 bp, Homo sapiens
  MAP TO CHR14.3; EXPRESSED IN HELA, SIGNAL = 1.9; SWISSPROT HIT: Q9Y2Z9, EVALUE 2.00e-11; EST_HUMAN HIT: AL521052.1, EVALUE 0.00e+00; NT HIT: gi16190891, EVALUE 1.00e-105
caaggttcgttttccgattggcctattttctccgcgcattttatttccggttctgaggacgccgcggaagcgggacgggattggagtgctctgctccggacgcactacgtaggtgggcctgcgggagttctgagtgcgacggcgcaggtctgcaccatggcggcccggcttgtcagccgatgcggggctgtgcgtgcagctccccacagcggcccgctggtgtcctggcgcaggtggtccggcgcctcaacagacaccgtgtatgacgtggtggtgtcgggtggaggcctggtgggcgctgccatggcctgtgccttgggtaagcccttctccaggctactagtggccggaaaccgggccgcggaggcacgatgagagccgtgagagccctagcacgacttgcccaaagacaatttctcaggtctcgcgacgcttctcccctcccctcctagaggaaccccagggcacgccggaatgcgtgtggtccttcagggtccattagggtcaaa

SEQ ID NO: 11847 - DNA, 546 bp, Homo sapiens
  MAP TO CHR14.3; EXPRESSED IN PLACENTA, SIGNAL = 1.1; EXPRESSED IN HELA, SIGNAL = 1.5; EST_HUMAN HIT: BI836525.1, EVALUE 7.70e-01; NT HIT: AL163285.2, EVALUE 5.20e-01; SWISSPROT HIT: Q60793, EVALUE 8.80e+00
gtttttccccgatcaccatctagttagccaggatttgaaagcaggggattcccctcttctggctggcatgaagcatcatcaaatccatgagcgtcaatctccagggccttgctgtaaatcactcccacaacatagaaagcctggtactcacatccatatgggtcaaatagaagaggtgatcttgccccaagaagctgattcccaagttccctgtccgttgatccaaggcatccactcaggtgcttgtgttggtgacaaaagagctccccagagggctgtcaggaagctgatcatgtgatagatcctctgtgtagctctggccctttcaccagcctcaccctttgacagttattactgctgcaataaattcttcagtaaaacaaacaggcacgctgtaaatttattagtctgggcactctgtgttacttaacgtaatggccagtcttaaacaggtaactactgcagtaaataaaccagtttatttaggcactgtcagccctaagtgttcacgggggcctggagaaatggcattggcctttataagca

SEQ ID NO: 11848 - DNA, 514 bp, Homo sapiens
  MAP TO CHR16.3; EXPRESSED IN HELA, SIGNAL = 1.3; SWISSPROT HIT: Q9ULV5, EVALUE 5.00e-31; EST_HUMAN HIT: BI822952.1, EVALUE 1.00e-57; NT HIT: AB029347.1, EVALUE 0.00e+00
gctttctccctccagtgatggcaggaggtaagggggacagggctgcccctgaggggcctgtgggggagggcctggcagcccagatggctgtaggggtagagggagaagtcagtgccagggtctggttgaagcttttctctggtgcagggagaagggcctggcactgctcaaagaagagccggccagtccagggggggatggcgaggccgggctggccctggccccaaacgagtgtgacttctgcgtgacagcccccccgccactgcctgtggctgtggtgcaggccatcctggaagggaaagggagcttcagccccgaggggcccaggaatgcccaacagcctgaaccaggggatcccagggagatacctgacaggtgagcagagccccagctggcccatgagccctgtgatagaacagcccttaccagcccacaaagcttcctagccatttgactccatgatactcacctgatttcttggccccagcatcagagttctgtggaaagcagagcc

SEQ ID NO: 11849 - DNA, 545 bp, Homo sapiens
  MAP TO CHR14.3; EXPRESSED IN PLACENTA, SIGNAL = 0.88; EXPRESSED IN HELA, SIGNAL = 1.2; EXPRESSED IN LUNG, SIGNAL = 1.8; SWISSPROT HIT: O14074, EVALUE 1.30e+00; NT HIT: AF152864.1, EVALUE 1.30e-01
caaagacaacgaagacgctgcgaagggccaaggtcttcatcacagatcggggttccctgacgggctctgacaggatcttttgtcaggagcagagtgttcgggcagttcttacccagtattttgtgtggaacaaactagtgcacttttcactaggtcacttcgtatggaaaagattgctacctgaaggcgtgttagggtcacaatgtcccaatagaacccgctttctgagaccctgaccgcgcggtgatccagccgcgggatggagtctagcccctgccctggccttggcgcctgctccgcagcgcagtgttgcactcttggttgttgtagtgagactgcctttccgacagttgcaagcgctgttgcatcgttcgaatgcgaagtcgcagccctgggaacttgagggtttacaggacacagacattcattttgttcaaggaagcgcaattcgattatttccaggtgttattttcgaaaacatagtataacataggaatagttgtttttttcacttctgacaagaatccaccagacccattagtgct

SEQ ID NO: 11850 - DNA, 589 bp, Homo sapiens
  MAP TO CHR16.3; EXPRESSED IN PLACENTA, SIGNAL =   1; EXPRESSED IN HELA, SIGNAL = 1.2; NT HIT: AF208541.1, EVALUE 8.80e+00
cagccacactcccctcttagcaaaccctcttctcccccttatttagctaagagtctgcttggcatatgtggctttaataccagggatcccagaggggcgcagttcaccaagccagctcatttattcattaatttgttttccatatttccaaacagaatgcgacggttccaggcaaagcaaatcaatattgtgctccgccattcatcttcattcgcgccacatccgcgcgctatccccggcgcttctcgcccaggctcctggtaatgggttcccggacgctgacaaataggattctcggaggcagccacgccacgttagcagattaaatcattaatacccgcatcggtcatttttacgagcctgccttaccccgaactcctcaccaccccggtgttgagtacactgttagtgatgcaggcagacacggagaggatgaaattgccacttctgatattttattggttgcaagcttcaagatactgattttcccactgctttcctaaaatcaggtatattgtccagagttgcagaaattattgagatgaaggctgaatacggacttactgattctatccacaccacttgccag

SEQ ID NO: 11851 - DNA, 594 bp, Homo sapiens
  MAP TO CHR14.3; EXPRESSED IN PLACENTA, SIGNAL = 0.92; EXPRESSED IN HELA, SIGNAL = 1.3; NT HIT: AE007010.1, EVALUE 2.00e-03; SWISSPROT HIT: P29376, EVALUE 3.00e-01
tctcggtgtccccttagttggaagctcggggagccctgcagtggctggactgggccgcggctcagccatgtctgcagatccgggcgtctgtacagtcctatgggggtcgataaggaaatgggatgcttttcacataaatatgatttgcacatcctgggactccatctgtgcagcaaaaccctttctccccggaggctggagggcggggccgacggggcgggcagaggtggcgcaaaccagcacccgcgttccccaggagaaacatttttatcgcttccggaaatacgatcgagctgtcaaagctcatgaactccgctagtaaattgtgaaacagacgtctcagttctgttcggagccgcagaaaacatgacagctgtaatcaattagggtggttcctgcctcaagcgccggctgcctcggattccaacggctttcctggcggctgtgagcgcctcgggatgcagaccctggccccgcgtcctgctccctgactcctccgagctggcgccgtccacgggctgggggcgatatgacagcagcctttccgccgtagcctgcaggcctggcgccctgcgcggaggaagaggcctcgct

SEQ ID NO: 11852 - DNA, 506 bp, Homo sapiens
  MAP TO CHR16.3; EXPRESSED IN HELA, SIGNAL = 1.4; SWISSPROT HIT: P01374, EVALUE 4.70e+00; EST_HUMAN HIT: AL043102.1, EVALUE 1.00e-57; NT HIT: gi14779824, EVALUE 1.00e-57
attttataactcagtttatgctgcacagtatctccctcatgatgtgttccatggtacccttgtcttgtaaggttcaggagggcccaatggtatagaccgactaaaagccaccagttttggttaccaggaaactggggaatctaggcttatgatttcatcattctgctggaattaaacactggcatgtgtgtgtttctaaggaatagtagcattaaataatttcattgtctggattttttttgtaccatagcctactcatgaaggttacttctcttgtttggatatctggacgctgtttttggactatctgacaagtaaaattaaaagtcgtcttggagacaaggaagcagttctcaacaggtaaactcctcaaacactgaaaactagatatggtcattttgccagttattctagtggcctaagggacagccatgcatttggaccttttcagtgaagctgagtcatgtaagctgtttaggcaataatgccattgagcatttcctttt

SEQ ID NO: 11853 - DNA, 539 bp, Homo sapiens
  MAP TO CHR18.3; EXPRESSED IN HELA, SIGNAL = 2.1; EXPRESSED IN FETAL LIVER, SIGNAL = 1.9; EST_HUMAN HIT: T89551.1, EVALUE 2.00e-72; NT HIT: gi14762659, EVALUE 2.00e-68
tacaggattcccaaaggagcactttaaagtctcttgcatgtaaaacagtaagcatcttgagaatacaaatgatgcaacctgattttatttaagtgctttttataattgttttaaatccacctagagtatacagaatgtgaatatcaagaaacccataaccgtgactttatcctgataggaagcagaggaagaggatgaaaaatgtgccagtgagcttgagtccttggagaaacacaagcacctgctagaaagtactgttaaccaggggctcagtgaagctatgaatgaattagatgctgttcagcgggagtaagtttatctcaccaagatttatacgtttattttcagattattaatttaacagttccataaaattagatctatttttatttgctttaatttatagtatacagctatttaggatggaaagaatggtatatagaacttaagtacaactgcttataactcgagaactttccctatcaacagatacattctgttagtattagagttactgtccaccaagaaatcattaatcg

SEQ ID NO: 11854 - DNA, 564 bp, Homo sapiens
  MAP TO CHR16.3; EXPRESSED IN HELA, SIGNAL = 4.1; EXPRESSED IN FETAL LIVER, SIGNAL = 6.5; SWISSPROT HIT: P50226, EVALUE 1.00e-47; NT HIT: U34804.1, EVALUE 0.00e+00; EST_HUMAN HIT: AL531355.1, EVALUE 1.00e-125
gtgatggtggtaagggaacgggcctggctctggcccctgacgcaggaacatggagctgatccaggacatctctcgcccgccactggagtacgtgaagggggtcccgctcatcaagtactttgcagaggcactggggcccctgcagagcttccaggcccggcctgatgacctgctcatcagcacctaccccaagtccggtaggtgaggagggccacccaccctctcccaggtggcagtccccaccttggccagcgaggtcatgctcacctcagcctgctcacctcccatctccctccctctccaggcaccacctgggtgagccagattctggacatgatctaccagggcggtgacctggaaaagtgtcaccgagctcccatcttcatgcgggtgcccttccttgagttcaaagtcccagggattccctcaggtgtgtgtgtcctgggtgcaaggggagtggaggaagacagggctggggcttcagctcaccagaccttccctgacccactgctcagggatggagactctgaaaaacacaccagccccacgactcctgaagacaca

SEQ ID NO: 11855 - DNA, 585 bp, Homo sapiens
  MAP TO CHR16.3; EXPRESSED IN FETAL LIVER, SIGNAL = 2.2; EXPRESSED IN HELA, SIGNAL = 1.5; NT HIT: U63610.1, EVALUE 2.20e+00; SWISSPROT HIT: P17656, EVALUE 2.60e-02; EST_HUMAN HIT: BI907373.1, EVALUE 6.00e-54
atgtcacaggatggaaaggcctagtgtgggccaagcctccctggaagggtccccttcaggcctgcacccttggtggggattctgtgctctccttttcccgctgccctgtccctgcagggtgctgctatctggactgagagcatcttccctgaggcccacgtgagctcctgcttgcttctggctcacttcttgctttggccttttcctccagacctggtttgggccttgccattctcttttcagacccaagaagcacagagagtgtttgtcttttacctcggctctgcccctcatggagcagtgggcacctcctttattcagcacatggaagctgcaggcaaggcagaaatcggcctttcagttttcccagcaaagcagaaagccctgttcctggctggatgcctgggacctgcctcctggggacagaggagcccctctgaggccagctggcgtcctgacgccatggctgccacgtgggtaagcacctcctggggatgcagcaccaagccagcccagctctgagaaatgtgtctgggcagcagctgctgcagagcccctgccaccagggtgtattggtggagcatc

SEQ ID NO: 11856 - DNA, 510 bp, Homo sapiens
  MAP TO CHR19.3; EXPRESSED IN PLACENTA, SIGNAL = 2.7; EXPRESSED IN HELA, SIGNAL = 3.6; EXPRESSED IN BONE MARROW, SIGNAL = 3.3; EST_HUMAN HIT: BF691479.1, EVALUE 8.00e-47; SWISSPROT HIT: P52738, EVALUE 1.00e-04; NT HIT: gi14523053, EVALUE 5.00e-47
agctgcattgagtttttggggatgttttacatcttccgttatgtttcataagtccgttgtacctctctttgactcttctcataatgccatgtctttctttataatgaagggactggatttgaattctaggatatgctcatgataaatttgttttgttacttcttttgtaagcagggcattctatttctaaaccaaatgtgatctcctacttggagcaagggaaggagccctggttggctgacagagagctaacaagaggccagtggccaggtaagtgaggcacagcaggtaatgcgtgatttggctggtagagagactgcatcttttagatgctatctgggaaactctcctcacaggcttttggcctgttgtgcaaatgtaagaccttttctacatgagctttcaaatgatcctacctttcccctttacctaacacactttgcctacttttctcctcttatccttctctctcagttctaaccagctggtgccctcctccaccctttctag

SEQ ID NO: 11857 - DNA, 517 bp, Homo sapiens
  MAP TO CHR16.3; EXPRESSED IN HELA, SIGNAL = 1.4; EXPRESSED IN PLACENTA, SIGNAL = 0.91; EST_HUMAN HIT: BG119212.1, EVALUE 4.60e-02; SWISSPROT HIT: O60879, EVALUE 8.30e-02
gacccagctgaagaggactggagtgaacagggagaggctgagggaggtcaggagggcaggacacccacctcctgaatcttcaggaccccttgctctcccttatccaacaggcttgaacctgaataggggcattcctgaccccatggcacttcccctgccccccacctgcctagagccatgggcagtgggcaaagctggaagaaaccctcgtgcacagcttcctcaaagctgtacttatcctatgccatggctgtcctggccacaccttctgggggactctgccacctgtgtgcacacctaggggaccaggtgcacacggtctgtcctccagctcctctcctgcctgcctcctggcaccttaagtggaggtggtgggagctgggaccagtgcagcacccttgccagccatggtgggggaggacagccagtgtctcttcatggagatcctgcagcaggtggtggcatgccccagggtcccgtctctgtctacctacctgggtttgggaaactggagtca

SEQ ID NO: 11858 - DNA, 543 bp, Homo sapiens
  MAP TO CHR18.3; EXPRESSED IN HELA, SIGNAL =   1; SWISSPROT HIT: Q9H3N8, EVALUE 5.00e-30; EST_HUMAN HIT: AI419768.1, EVALUE 1.90e-01; NT HIT: gi14251204, EVALUE 0.00e+00
tacagtgccatatagccccctccaaaatttaatacttaaactttttgtgtttatttttccccagttgtatacagtcccctgaaataacaaaagcttattttaaggatttagaaataaattaaaatcggaaaagactgtcttaaataaagacatataacttacccacaaagaagtcagagatggccaagttaagaaaaaaataactacttcgatgtctaaggtttttgtccaccacaaaagctaaaatgaccaaagcatttcctagcattatagcaaaagctactaaggacataaaaaatgctaaagtaacacgagtgcttagtgataaattgattgtgctattagtatctggcatcacatcaaatgatgaagaaggtcaaattagcaaattaatccagccagacaattctgacaagtatgttttctaatcacatacctaaaatgtgtagtcttccactcaaaacaacactgttttaatctaatgctgatctcatagtacttcctgattcttgataaagtaagcttgtggtaacagtttccctt

SEQ ID NO: 11859 - DNA, 531 bp, Homo sapiens
  MAP TO CHR16.3; EXPRESSED IN LUNG, SIGNAL = 1.4; EXPRESSED IN HELA, SIGNAL = 1.9; EST_HUMAN HIT: AW502279.1, EVALUE 2.00e-53; NT HIT: U94847.1, EVALUE 5.00e-01
ttgccagatggggaataaagctagagattcaatccaggacatgagatctcctctgccttactaacttttcaggcagggaaccctcacattcctgcttccttcaggcaggtctgatccctacctctctaaacctgaactaggtagctgttatagtctacagccaggcagaagggacgcacagaaaaaaaaggaaaaatctaacaccttttcaccatccagctacaatcacttccggatgctattttgtacgtgtcatatgctacatacactatgcccaaaattcatttaacaattacagctaagtggacatgaactctgtaagccccaaatacctgatggaaatctttgccactgcttttaccatcgccactgaaatccacatgcgaaaataggcagcgtaataaatgcctgtctgcctcaggaccgtgccgattcacaatctaaaatgaccaaaaataacatgtttaataagggaagataaaacaaaaaaaaaaagtaaggtttcaaaaaagaaaatcaacctccaaggca

SEQ ID NO: 11860 - DNA, 548 bp, Homo sapiens
  MAP TO CHR16.3; EXPRESSED IN PLACENTA, SIGNAL = 1.1; EXPRESSED IN HELA, SIGNAL = 1.7; EST_HUMAN HIT: BF813986.1, EVALUE 3.00e-77; NT HIT: AB011128.2, EVALUE 2.00e-74; SWISSPROT HIT: P55299, EVALUE 1.00e+00
ccctgcaacgtctctttttcagctggccttctgtgtggtttccttctctctctacttgaaactgaccacctctccagacacacctgctccccttgggcccggcactccccgtttccccaggacacgtccaattcagctgtcactgctgcggctgcccaaagcatcagccctgccagccccagagtcccccgagccacgccatcagcctgagggtggctggcagccccgagcacacagatttgggttatggcaacttagacgtctcctcagatattgcggccttccccgacagcgtgaactccctggagggtgtgggcggggacgtccgcaccccagacaagctcatcgaccaagtgaacgacaccagtgatggccggcacatgtggctggctcccatcctgccgggcctggtgggttcccggcagcggccaccgcagctcctggccctcaggcgggcagggggactttctttccctggtctcagtgacacgtctttcttccaggtcaagttaatctcaagccaagatgcttgggagctgtcagaaagg

SEQ ID NO: 11861 - DNA, 576 bp, Homo sapiens
  MAP TO CHR19.3; EXPRESSED IN BONE MARROW, SIGNAL = 0.76; EXPRESSED IN PLACENTA, SIGNAL = 1.1; EXPRESSED IN HELA, SIGNAL =   1; SWISSPROT HIT: P13983, EVALUE 5.00e-05; NT HIT: gi14767579, EVALUE 4.00e-39; EST_HUMAN HIT: AA382331.1, EVALUE 8.00e-38
cattgctcacctcccatttccctttgcaaaggccacatccacttccctttgcaaagccccacccactacatttatgaagccccacccacatccctttgcaaacccccacctaccacatttgtgaggccccattccatctctgcttacctcccactttctttgaaaggccacacccacttcccttgtaaggtcacaccccctccctctgctcacatttcacgtcctttgaaaggtcacacccactttcctcacaaggccccacccacttcctttcctcacctttcacttcctttgagagtccccacctacttcctttgagagttcccacccttgccaggtccgacctcctccctctgctcaccttccacttaggccacgcccacttttcttgcaaggccccgccctcccctttccccagtgcccacctcccacacttacagagtacaagttgttgttcttcttcattggcagtctgtactggatgatcgcttttaggggctctaggctgctctgtggaatctgaaagaaagttccctgtgggcttcatggcaacccagccctgggaaagactaaagc

SEQ ID NO: 11862 - DNA, 509 bp, Homo sapiens
  MAP TO CHR16.3; EXPRESSED IN HELA, SIGNAL = 2.8; NT HIT: gi7662353, EVALUE 0.00e+00; SWISSPROT HIT: P53129, EVALUE 1.10e-01; EST_HUMAN HIT: BI830846.1, EVALUE 0.00e+00
ttgaggggcataggagacacttggagttctgcgtcagcatgcaggggtcatggaggggctagtagatatttggtgggtccttggggatgtgggattagttaggagttcacatgcagatgacccaccaggggctccctttcaggatccaaggacaaggaccagccacccagcccatcaccaccgccccagtcagaggccctgtcaagcacctctcggctctggagtcctgcagcccctgagaatagtcccacatgtagccctgagagtagctctggaggccagggcggggaccccagtgatgaggagtggcgcagccagcggaagcatgtgtttgtgctgagtgaggctggcaagcccatctactcgcggtatggtagtgtggaggcgctgtcggctaccatgggtgtaatgaccgccctggtgtcctttgtgcagagtgcgggagatgccatccgtgccatctacgctggtgagcaaacaggtgggaggcagaatgggggacagtgact

SEQ ID NO: 11863 - DNA, 578 bp, Homo sapiens
  MAP TO CHR18.3; EXPRESSED IN HELA, SIGNAL = 2.7; EST_HUMAN HIT: BG529568.1, EVALUE 8.10e-01; NT HIT: AF074901.1, EVALUE 1.40e-01
caggctcctggacttgagtgtttcctgtttgtcatttatttaggctgaaggagaaaaaattgattcagaagaggcactgatctatgaagaggatttcaatggaggagatggtgttgaaggcgagttggaagaaagcacgaagttaaaaatgttccgcaggcttgcctctgtggcctctaagctcaaggagttcattggcaacatgatcaccactgctgggaaagtcgttgttaccatcttactgggctcctcgggtgagtgtctcccacactggctgcacgtagcaaaaggcacaagcagtgctttggtgaatgagagaaatggttgaagaagaaatgaaggaaacagtctgttccaccacatgaatatcataactgtagctcttgtaaaactggccacatgtacaaaccacacaaaataatttttccgggttagttctagttttgatgtttttagatggtttctgttaacctctgcaaaataatctttttctatatatgctaagcgactccattttctaggtttagattagaataacaacaatcctcttccttagagctttggaatggtgacctgct

SEQ ID NO: 11864 - DNA, 583 bp, Homo sapiens
  MAP TO CHR16.3; EXPRESSED IN HELA, SIGNAL = 1.5; EXPRESSED IN BONE MARROW, SIGNAL = 0.82; EXPRESSED IN PLACENTA, SIGNAL = 1.5; EST_HUMAN HIT: BI771118.1, EVALUE 5.00e-42; NT HIT: M32993.1, EVALUE 0.00e+00; SWISSPROT HIT: P11597, EVALUE 3.00e-12
actaacaggatgggcacgagcaggaatgggggccacagggtggtgtacttactctcgctccccttggagatgcaggagcagcttatggaaagacaggtagcagtcaggggcatcggtccgcactctaccagagtcacaggctgcagggagacccgacatgacctcagggcagcctccgctatcagatggtatccacatgctgcccaggccagtcaagagcttggccagctctggggtccccacccctgcaaacttcccaggctgggcctcctttggtggccccagaaccctctgcctgcacaacctccccctctgctgaggccaagccctggagtccagctcccacttccccagaggacgcttgacacatactcagctgtgtgttgatctggaggtcaatggcagagtcgatctcgaagtcaatggactgatcaatacccagcctggaaagagccaaggacccaggaccctcattcagccctccagcccagagagggccagggcatggggcatcagctgacaggaatgcttaccaccaggcagtggtgtagccatacttcagggtccccttgaagaccacaga

SEQ ID NO: 11865 - DNA, 500 bp, Homo sapiens
  MAP TO CHR16.3; EXPRESSED IN PLACENTA, SIGNAL = 0.93; EXPRESSED IN HELA, SIGNAL = 1.6; EXPRESSED IN FETAL LIVER, SIGNAL = 1.4; EXPRESSED IN BONE MARROW, SIGNAL = 1.3; SWISSPROT HIT: Q98157, EVALUE 6.00e+00; NT HIT: gi14778833, EVALUE 1.00e-53; EST_HUMAN HIT: AV721636.1, EVALUE 2.00e-53
aaagaaaaagaaaacaggaggattgggctatttccacatcagggtcccatttaatacccccttaaaacatcagctttccttccagagactgatcattgagaaagcagtactgctgacatagatcctgcctacttataaatcataatggttggtaatctccattaaaaagaataaattttccccactgtggttcagatgacgagttccagttattacagagaaatttcatggacaagtactacctggagtttgaagacacagaagagaataaactcatctacacacctatttttaatgaatacgtaagtagatttctatgtctcctaccaggaggtcagagtttttaaaaatttaaatttagattcaaaagacattgaaatttgctgccttttaaaatatgccaccagtacacttccaggaatcctcattagcatctggtttaagttcattttcctctgcacagcctttggggctattttccaaaaggctttcaggcaaat

SEQ ID NO: 11866 - DNA, 501 bp, Homo sapiens
  MAP TO CHR16.3; EXPRESSED IN HELA, SIGNAL = 1.9; EXPRESSED IN PLACENTA, SIGNAL =   2; EXPRESSED IN BONE MARROW, SIGNAL = 2.1; EST_HUMAN HIT: AI633722.1, EVALUE 1.80e-01; SWISSPROT HIT: Q9ZT48, EVALUE 4.60e+00; NT HIT: AJ298105.1, EVALUE 1.90e+00
gagagcagtccacttgagccggtgcacaagggctggccctgggaggggcttagcaagaaagaagggtaggcattccaaagatggagggcacagcccgtgtgaggctcggtgctggtggagatactctcgaacagggagaggatagtgaggaaagccgagaaaaaggaagcttgtccctggatcgtggagggcctgaaggtctactgaagcagcgtggtactaaagcgtcttggagtcagtgggggcccgggaaggtgactgagccagtggcagtgtgtgcctcccgtgtgtgcaccagtagtcaccgagtgcagaggggaaagtctcagagccaattaggaggtaagtctaggcgtgcattcataagggggtaattgcaaatgttgcaagcaaagaggtgagaggcacttcagaggaagagttcttaagattccataattggttatatagaggatgaatgagaaaaaggaaaagaggatttccatcttcattcctgggaaa

SEQ ID NO: 11867 - DNA, 569 bp, Homo sapiens
  MAP TO CHR16.3; EXPRESSED IN HEART, SIGNAL = 2.3; EXPRESSED IN HELA, SIGNAL = 1.2; EXPRESSED IN LUNG, SIGNAL = 2.1; EXPRESSED IN PLACENTA, SIGNAL = 0.97; SWISSPROT HIT: P36225, EVALUE 1.10e+00; NT HIT: gi13129147, EVALUE 3.00e-73; EST_HUMAN HIT: BG115897.1, EVALUE 5.00e-73
tttgtgtcacttcgctcaggacttcatttccctgtagggagagactggtggacttagcttgtggcaacaattaacactgtgtgccagagaggagggcaggatacctgaattgaaggttccatcaagagcacaggcaggggtgattgaaccaagccttcaccgcaccgagtttgccctactgcagtcacccacaccgcggctcgcttacggttggagaaatcaaggccctaccggggccacctctctgttgtgggcgtggacgaggctggggtgagcctgccggagctgcagttgccagcgacatgttcaaggtaattcagaagggtccgtggggccagccagccggagcttgttcaccttcagagtctgtgcagcaccgaaaaaggactcacctcccaaaacttccgtgaaggttgacgagctttcgcgagggcaaatcgcagtgtgtggaggagtcaaggaaccagcttgaagaaagcttctcacagctccgacacttattgcgagccatacacaagctggtgtcaggacacgtactcccaaagtaagcccaagatgcaaagtttggt

SEQ ID NO: 11868 - DNA, 542 bp, Homo sapiens
  MAP TO CHR18.3; EXPRESSED IN PLACENTA, SIGNAL = 1.3; EXPRESSED IN HELA, SIGNAL = 1.1; EXPRESSED IN LUNG, SIGNAL = 1.1; SWISSPROT HIT: Q9QYB8, EVALUE 1.30e+00; NT HIT: X56494.1, EVALUE 2.00e+00; EST_HUMAN HIT: BF839768.1, EVALUE 3.00e+00
tctttcctcatctatgggcgttttctctatcatgcaaatgacagtagataataccctcatgactacaaggttaccactttgtgaccacatattatggttctgaaattcaaactacgctctttggtatcatctgttttctccattttgtcattggttcagtagcagctttgatagttctgtctccaaaaattctggtactccttgtatctttatgtgtccctttctctactcagtgggatgtgttggagacttttcctccagcccctttcccaggagcaagcaagcttgcccttcacaaagctggtgcatgctctagcaaaccctgtgttgaacaccatgaaaaccaacgctcagacgccaagcgtttggtgcttaagaagaacgacagttctgttggctcctacagctcattcctcctttcactttgttgagataaatttcctatttatgaccgttcccctttggaaagtagacagcctgaggttacgtgtgttttttaagttgctctgttaggtgtaactggcctgcagtgtctctcttcc

SEQ ID NO: 11869 - DNA, 597 bp, Homo sapiens
  MAP TO CHR14.3; EXPRESSED IN PLACENTA, SIGNAL = 1.1; EXPRESSED IN HELA, SIGNAL =   1; EST_HUMAN HIT: AW810442.1, EVALUE 4.00e-58; SWISSPROT HIT: O26541, EVALUE 1.10e+00; NT HIT: AF036128.1, EVALUE 3.70e-02
ccctccttccaaataggagctgtggttggctgagttgtgtctgtgatttagcaagagtgaggcagcatcctagtcttagaagaactgtagggcaaggtcctgaacaggaggacaaagtacagtccagtttttaaaatgaagcataaaatgagaaccagaatacttgcaaggctaacccagaactttgctgaggcccataacgttggagtagaactgattaaatcctttccacctatggtcagagttagtcttaaaagtcagaagtgtcatagcctagagcaggtgaataagtagccccagccatggggagcagacatctgcaaggcctgacacacccctgactaacagctattgactcttcatctaggagtcattcagctccagtaaaaggcatctgactaagtttggtcctgcatctctttcccaggccacagttaagatggaggaatatagtgaccttctgaagagcactgaggcttggatagaaaataccagtcatttgctggccaatcctgctgactatgactctttgaggacactgagtcaccatgctagcactgtgcaggtaagtgttcttccaggttttctgccactcat

SEQ ID NO: 11870 - DNA, 519 bp, Homo sapiens
  MAP TO CHR19.3; EXPRESSED IN HEART, SIGNAL = 4.7; EXPRESSED IN FETAL LIVER, SIGNAL = 6.3; EXPRESSED IN HELA, SIGNAL = 7.7; SWISSPROT HIT: Q15717, EVALUE 3.00e-60; EST_HUMAN HIT: AU123765.1, EVALUE 0.00e+00; NT HIT: gi14757941, EVALUE 0.00e+00
catttgaacatgtcggttgcatcccagagtataaaaaccttctcacttctcattcagacaaagacaaacacttgtgaaaattggcgcaaaatgagttgtacactaacaagaaaagtttcaactccttcactcttaattatctattccgtacaaaaaaaagcatgagcgagttatttgtgggacttgttggttttgaaggaaacctgtaagattttgtcccccaggcggtagccgttcaggctggctatggccatcgcggcttcttcatagtttgtcatggtcacaaagccaaaccctttgcacttgttggtgttgaagtcgcggatcactttcacattggtgacggcaccaaacggcccaaacatctgccagaggatcccctcgtcggcatcctgccccaggttgtagatgaaaatgcaccagccggaggaggcgtttcctggcacgttgacgccagagagcccgctcatgtgatcgacgcccatgggggagaacctggcagacagagagcaagcgtca

SEQ ID NO: 11871 - DNA, 546 bp, Homo sapiens
  MAP TO CHR19.3; EXPRESSED IN HELA, SIGNAL =  18; EXPRESSED IN PLACENTA, SIGNAL = 5.1; EXPRESSED IN HEART, SIGNAL = 4.7; EXPRESSED IN BONE MARROW, SIGNAL =  14; NT HIT: gi13654959, EVALUE 2.00e-80; SWISSPROT HIT: P53680, EVALUE 1.00e-22; EST_HUMAN HIT: BG333638.1, EVALUE 3.00e-80
gttggagacttgtggaagggaagtcactccacaggggtgctggagggacccgggatgaagcgtgtggccaggccggcctggcttgggtctggggagcagccgagacccctggaagtcaggcagcagggaggccctgagccctatctcccctctgggtggatgggtggggccgttgggcagcacccaacccgccctctctgcctctctcacttcctccttctcctcctgctgcccccagatccgctttatcctcatccagaaccgggcaggcaagacgcgcctggccaagtggtacatgcagtttgatgatgatgagaaacagaagctgatcgaggaggtgcatgccgtggtcaccgtccgagacgccaaacacaccaactttgtggaggtgacgcccgctccatgcctcctgcaccccgctgcttcctcgtgccctacttcgccactccctgcccagcttctagttgcaagaaccccttggaccctctatccatcctatatcattcactcaacctgctttgagcttgcttgcttcttcccttcctt

SEQ ID NO: 11872 - DNA, 551 bp, Homo sapiens
  MAP TO CHR18.3; EXPRESSED IN HELA, SIGNAL = 1.1; EXPRESSED IN FETAL LIVER, SIGNAL = 1.2; EXPRESSED IN BONE MARROW, SIGNAL = 0.74; NT HIT: gi16164199, EVALUE 1.30e-01; SWISSPROT HIT: O15084, EVALUE 5.00e-07; EST_HUMAN HIT: BG545518.1, EVALUE 4.00e-21
ttttgttgtttcctacattgccttttctcaaattaatctgcttcttggtatattattatagcttcaaggtttttttctttctaaaatattcactaattcacatttcaatactaatgattaggataaagatggtgatagagcagttcaccatgcagcttttggagatgaaggcgctgttatagaagtactacatcgaggtagtgctgatttgaatgctcgaaacaagcgccgacagacaccacttcatattgctgtcaataaaggtcatcttcaagttgtgaagactttattggactttggctgtcatcccagtctccaggtaaaacctttaaagaaacacatcctgcaggtattgctaggatcctattaaagggaaacattaagttctatggtaagcattcctttgttaccgttctcatatgtcatagtaaatgataccaaaggcgtaagatgttacaaaattggcagctatttcttttttaaaaagttgtttttttttagggaaaatgccaatagattgggttttgattgggcagggagaatgaggactt

SEQ ID NO: 11873 - DNA, 523 bp, Homo sapiens
  MAP TO CHR16.3; EXPRESSED IN FETAL LIVER, SIGNAL = 4.1; EXPRESSED IN HELA, SIGNAL = 1.9; SWISSPROT HIT: Q61127, EVALUE 3.20e-01; EST_HUMAN HIT: BE049621.1, EVALUE 0.00e+00; NT HIT: gi14777231, EVALUE 0.00e+00
ctccactgagcctctggttcccatttcccaggttctccagagagcgggcatccagagaggagtcctgggagagcgggcggagcgagcgagggcccccggactggaggcttgagagctccaacgggaagatggcttcacggaggtcagaagagaaggaggccggcgagatctgaacccgtctcccgggtgctgtaaatagtctgataaacgttcacacagtctaaaattaccctttatatttgctgaatacaactcatcttttgtagtttaaaatttctattgttttggagctagctgtgagtttctagaagtgtacagagttgctcctgtgttcccgggtcatgttgagtaggaataaataaatctgatgctgcctcctgaggctgcggggggtttctgctgtcctctgcgtagaggcttttcactgtgaccctgtgccagtgccaccagcacctcacagaaaccgtgacttactcgtgggtcacgtcttgtcttctggcatccagtagatggcagggcactt

SEQ ID NO: 11874 - DNA, 516 bp, Homo sapiens
  MAP TO CHR19.3; EXPRESSED IN PLACENTA, SIGNAL = 1.2; EXPRESSED IN HELA, SIGNAL = 1.2; SWISSPROT HIT: O75437, EVALUE 1.00e-18; EST_HUMAN HIT: AW051899.1, EVALUE 4.00e-67; NT HIT: gi14767957, EVALUE 1.00e-66
cactgatgtggatattttgccactctattttctcagagttagagaatacattagaaaatgttcatgtgttgacaattattttattggataatttcaatcactcttataagtcagaaccagttctatttactctaattttaccttgagtcaaatgaaaaattctgccgatagccactttgtaaatatgtgtgtttgtgtgtgttttccagggactgttgacatttagggatgtggccatagaattctctctggaggagtggcaacacctggacattgcacagcagaatttatatagaaatgtgatgttagagaactacagaaacctggccttcctgggtgaggataactttaatacaaaattcctcacataaactaaagcttttatttttctttagaatgttttctggtaatttacgcattcagatttctgttttcaagaaaatactggggatttgtctgttgagaaaggaatttcttcaagatgtttcatcttgacctgaactttccacattcctg

SEQ ID NO: 11875 - DNA, 535 bp, Homo sapiens
  MAP TO CHR19.3; EXPRESSED IN HELA, SIGNAL = 1.5; NT HIT: AF105007.1, EVALUE 0.00e+00; SWISSPROT HIT: P27544, EVALUE 3.00e-20; EST_HUMAN HIT: AL134368.1, EVALUE 1.00e-100
gaactcctgggtgtgtgacctggctggtcaagggcagcgtctgaagagctgggtgggtgagtggggtggggtggctatggctctctgggcctgtttcaccccatcccagcggaatctccctcaggaatctccgggcccacatcccctcctcagccttcctgcctctggtctgtcccctcgtcggacccctgagcactctgaccttggaaccctgagcactccgacctgatgtgatcccctccacggcctcctctgtgccccgccgcaacatcagcctccgcactctgtgtgggctgtgcctcggccccctgccacccgatcctgtccttaccggaaggcgtaggaggagacgatgaggatgagagtgaccacgtggtggagcagcatgaccaccgagtccttgcgccaggtgtccatgtatagcgtagcgtagatggagtggccatagaagcttccctggagcaggtaggcggctgcaatgtcccgtggcactgccatgcccggcgtccagtctggggagagccaaatctcacag

SEQ ID NO: 11876 - DNA, 501 bp, Homo sapiens
  MAP TO CHR14.3; EXPRESSED IN PLACENTA, SIGNAL = 1.1; EXPRESSED IN HELA, SIGNAL = 2.9; NT HIT: gi12963480, EVALUE 0.00e+00; SWISSPROT HIT: P52081, EVALUE 1.40e+00; EST_HUMAN HIT: AW062518.1, EVALUE 0.00e+00
caaaagaaagataaagggcggagtcctataaataaagggaatgtaaacatggagactgaaccaaaggcaagttacgggaagataagaatatctgaagagaattccattcaacttgatgattttacagaagcatatgaaagtggacaaaaccaagcatattctcttgaacattttagtcctgtttttcctaaaacagaaaatagccacattcacataaactctgacaaaggtcctgaagaaaatacaggatctcaagaacttttcagttctgaagatgaactgccaccaaatgagatacgtattgagttgtgtagctcaggaatactgtgttcccaactaaacaccttccacaaaagtgctattaaaagaagctgcacctctgaagataaagtgggccagtctgaagctctatctagagtccttcaagtagctaagaaaatgaagttgatttctaatgcaggagattctgttgtagaaatggatcagaggaatgtgtctgaa

SEQ ID NO: 11877 - DNA, 513 bp, Homo sapiens
  MAP TO CHR19.3; EXPRESSED IN HELA, SIGNAL = 3.7; EXPRESSED IN PLACENTA, SIGNAL = 1.4; EXPRESSED IN LUNG, SIGNAL = 2.7; EXPRESSED IN FETAL LIVER, SIGNAL = 2.8; EXPRESSED IN BONE MARROW, SIGNAL = 2.1; SWISSPROT HIT: Q92947, EVALUE 2.00e-26; EST_HUMAN HIT: AA703236.1, EVALUE 0.00e+00; NT HIT: AF012340.1, EVALUE 0.00e+00
taaactttgggctggactggggaacacagaaagcatagggagatgacggtggtcacagagggggacagtcaggctggccagggatcagatctccaggtgaagcccagggtctggcgggggtccaggtggccacttatgctatctttgagatagggacagaataggctcaggggacagccccacccttgagttccagacctcagagactgtcttccttccaccaggccccatgggcagccactcacccagctggggcaggtacttctgccgctgttcctcgctgccataggcatagatagggtgcatgacgagggaggactggacactcatcgccgacctgtagccactgtccacccgctccagctctcgggccaggagcccataggccacagacgaaaccccagcacagccatatcctggtggtagtaggaggggaaagcaggacaatagagaacagggccctgcccagctaagacccaagagacagggctgaataaggacacacaaggaggc

SEQ ID NO: 11878 - DNA, 572 bp, Homo sapiens
  MAP TO CHR14.3; EXPRESSED IN PLACENTA, SIGNAL = 1.1; EXPRESSED IN HELA, SIGNAL = 1.5; NT HIT: gi13654827, EVALUE 2.00e-47; EST_HUMAN HIT: AW975834.1, EVALUE 0.00e+00
agaattgtctgccccaagtgtgaaagtccctttcatttatgagcagaaaacagtttgcagcttgtgaaaagttttctaccttctcctcctcaagattctaaatgctgcattcagcccaggcaacttgtttattttatataacaagattaggagctcctagatcatagtaggtactcaacaaattgttatagcctgcccttcgctacttactgtgaaaatgaacgattctcagactggtcagtcgttgtgccattatccagtattcactaagcgtgctcagtgacctcagtgtgaacatcactccatgtctcttacagcataagtgttacattgtggccacagttgaccgggacctgaaaagaagaatccgtaagattcctggagttcctatcatgtacatttctaaccataggtgagaaatttcccttggagaagggaatagaaatatataattgatatcaattgaaaatgaggataagtgataaggttataaaggatttgaaagaaattattgtatcaaatgtttacatagttatatttgaagaaatgagacaaagcaagagcaagagcaa

SEQ ID NO: 11879 - DNA, 552 bp, Homo sapiens
  MAP TO CHR14.3; EXPRESSED IN PLACENTA, SIGNAL = 1.8; EXPRESSED IN HELA, SIGNAL = 4.3; EXPRESSED IN FETAL LIVER, SIGNAL = 1.3; EST_HUMAN HIT: BF993063.1, EVALUE 0.00e+00; SWISSPROT HIT: P38650, EVALUE 2.00e-24; NT HIT: gi15300984, EVALUE 2.00e-86
aaaaatcagcaaatggcacctttgtcctatggatacatccaggtagtaaggtgttctcacaggcgtgtccagagggctcacggaaggcacagcagatgtggctgaatttcctgatttgagctgatcctgaaatgctgagcatttgctgagtgggtactttgggaagaacagtccaggcaggggagggcgtctctgagtccatgcttccacccagcacccacccctctgtacctgtttcagcacccattggccaggccatccaccgcctgctcctgatccaggctttccggcccgatcgcctgttggccatggcccacatgtttgtttcaacaaaccttggggagtctttcatgtccatcatggagcagccgctcgacctgacccacattgtgggcacagaggtaatgtcctggtacagcccgggcttcccacgagactccatgcccacctccccagccacaggtggcagcagccctggcatctgctctcactccgggctacagtctcctcctaagaccaggaactcgctgcagattctcaactcctggctgc

SEQ ID NO: 11880 - DNA, 563 bp, Homo sapiens
  MAP TO CHR14.3; EXPRESSED IN HELA, SIGNAL = 1.2; EXPRESSED IN PLACENTA, SIGNAL = 0.83; EST_HUMAN HIT: BF030120.1, EVALUE 2.00e-01; NT HIT: gi11466252, EVALUE 2.00e-03
cagcgccttttaaggtcaagccagttaccatacacctgaacccagccaacagcacaggatgtttacagataaaaggaccgacccctgtcctaaagaattgagcccttggctctgctagcatggctggttggaaaattattatgctacttgaatcctcataaaaatatattcctaaaatcctaacactagacagttttagaatcaataaatgtatattaaaattacaagctgttctaccccaaccctgaaagaaaccattctagaaacatgaaaaacaaaaaagagcaaggcatgtttcctaaggtaagtcacttcctatttgaatcatttatttatataacaagcctttctggactgattaaggaaactgccagttacacttaccagctgttcctcaggttggggagaagcatggcgttttcctcctgctttacatgtgagtgcctgtgctggagatttttgtcctcgtatccaaattctctccctttctgtcagtctctggaaggactcgatgctcaaagaaaaacacttctcatcctgaaccagtggcaaagggaagaaaa

SEQ ID NO: 11881 - DNA, 522 bp, Homo sapiens
  MAP TO CHR14.3; EXPRESSED IN HELA, SIGNAL = 0.87; EXPRESSED IN FETAL LIVER, SIGNAL = 0.82; EXPRESSED IN BONE MARROW, SIGNAL =   1; EST_HUMAN HIT: BF976356.1, EVALUE 1.80e-01
ttgtcgcaattacagaccaaagacaaagcaatacagacctcaggcctcttgctgatgtaggtcttgatcatattactgggcaagcagtgcagatcagtggcaaagtgctgaccaagggtgatagaaatctaaaatgggaggtagaagtaggggatggcagatgtcaattatggccttaggatcagctataatggagggactgcatcttgcttcactagtcctcttgccttggacctttttggaaatgcaactaccacaatcttgaaggagactctgcgacagattatactcatacctcctccgtcagggaaaaatggccatcttgttctcagaaaaatagaggctccagagtgtaccaagtgaaacagataatgaagggcaccagcaggctgcgtggtgtgaggggtgggctcattagactgttctcactcaccactttagacctctcagcttcactcgtctcttgtgccaactgtcacctcagcaagcagcttcctgaaggcacaaccagatggcactttg

SEQ ID NO: 11882 - DNA, 506 bp, Homo sapiens
  MAP TO CHR19.3; EXPRESSED IN HELA, SIGNAL = 1.5; EXPRESSED IN PLACENTA, SIGNAL = 1.6; EXPRESSED IN BONE MARROW, SIGNAL = 0.95; EXPRESSED IN FETAL LIVER, SIGNAL = 1.5; NT HIT: gi15304432, EVALUE 1.00e-104; EST_HUMAN HIT: AI224527.1, EVALUE 1.00e-36; SWISSPROT HIT: P45561, EVALUE 2.40e-01
aaagacagcccagacacctgagaggagctggacacctgataggttcaagctctctctcacctgagcccagctgagatcattatggactacaatacccatgacacccagggagcaatggccttgagaatacggaaagacagccctgaggcctgatgggaaacgtagtcccctccttctcacctctctgctcacctgtgttctgggctcctgactccagtgctggggactcctggggggctttcctcccccagcctcagagggaggtcctcggcggggagtagggggtcgggagagggtctggcgttgggggccccaatccagaggaggtcggacatcaatgcgactcaacggggtgtgaggtcgggcagggggtgctgtgtctcctgagggggcagggggtcgccgcgcaggggcagaacggggacgggggaggctcagaggcgagggagggcgagagaggggggtgaacaggctgtgggaaggagagaatcggggaactgagtcaa

SEQ ID NO: 11883 - DNA, 595 bp, Homo sapiens
  MAP TO CHR16.3; EXPRESSED IN HELA, SIGNAL = 2.6; EXPRESSED IN PLACENTA, SIGNAL = 2.4; EXPRESSED IN HEART, SIGNAL = 1.9; EXPRESSED IN FETAL LIVER, SIGNAL = 1.6; EXPRESSED IN LUNG, SIGNAL = 2.7; EXPRESSED IN BONE MARROW, SIGNAL = 1.9; SWISSPROT HIT: P58226, EVALUE 8.70e-01; NT HIT: gi16165918, EVALUE 0.00e+00; EST_HUMAN HIT: AU140726.1, EVALUE 1.00e-129
agagtgtgtgaccgtgttggcgctcaggtcccaaggccctgcagccccacaggcacctggccgcttctgggggtggtgggatcgtttctgttccacatcagttctttcttgggcagcagtcggaggctccagcgctcttggtgactgcatcacaagttaggagggatttgcccagccctgtgtggagcacctttcccgggtgtgtctgagcagagcgctctgctgtcctgaatgtgagcttatttgagccttggccatctgaggacctgtcttctgtttttcagaggattaccccaatggcacctggctgggcgacgagaacaaccccgagatgcgggtgcactgcgccatcatcccctccgacatgctgcacatcagcaccaactgccgcacggccgaggagatggtgctcacgctgctggactacctcttccaccgcgaggtgcaggctgtgtccagcctctcggggcagggcaagcacgggaagaagcagctggacccgctcaccatctatggcatccggtgtaagtcgggccccatcttgggggactggggtgtgcggggagctgggtcaggacccacatttcactgctga

SEQ ID NO: 11884 - DNA, 586 bp, Homo sapiens
  MAP TO CHR19.3; EXPRESSED IN PLACENTA, SIGNAL = 1.8; EXPRESSED IN HELA, SIGNAL = 1.4; EXPRESSED IN LUNG, SIGNAL = 1.9; EXPRESSED IN FETAL LIVER, SIGNAL =   3; EST_HUMAN HIT: AI126407.1, EVALUE 0.00e+00; SWISSPROT HIT: Q11020, EVALUE 1.50e-02; NT HIT: gi14760563, EVALUE 0.00e+00
gtgaagccaaaccgctctacccttcccaggagcccctggcgacagcgacagggctagcaacatcaggcacctgcttgctgcaaggcctggggttggggggcggggggagctgcagtccttcagggtcgaggcaacttgtgggtctggggtgcaagggctaagtggggcagaaggactcgtctaaaggatgggaaataaatataacgatatcctcctccttctggctgcaaatcgtttttatgggaacctgcagggtgacccggcaccttgctaactgggcttagagtctaagggcttgggggctgcatctgatacaggttggagtttggggtgggagagtcctaggaagggggccccaagtagaaatgagagaaatcaggaagggatatcgggggcgtccacgggggtgctccgactggccttgcacccgtaccccagctctgcaccccccgtcacgagcagttcaatgcccgtgcagaagttggcttcggaggccaggaacactgccgcagccccgacctcagcgggctggcccatgcggcccagtggctggggagaaaagaggggggaaggaggtcaagaggag

SEQ ID NO: 11885 - DNA, 534 bp, Homo sapiens
  MAP TO CHR16.3; EXPRESSED IN HELA, SIGNAL = 0.95; EXPRESSED IN FETAL LIVER, SIGNAL =   1; EXPRESSED IN BONE MARROW, SIGNAL = 1.2; EXPRESSED IN PLACENTA, SIGNAL = 0.98; SWISSPROT HIT: P35582, EVALUE 6.50e+00; NT HIT: AE001895.1, EVALUE 1.30e-01; EST_HUMAN HIT: BF925245.1, EVALUE 1.00e-08
atggcaggttttgtacagcctttgtaaagacattcttcaatgctgccttttaaaatagaaatgttaaatcctgtaactaatcaacctatgccttgttagagggctgacattttcaataattcctttacaaagggtagtgagatgcatcagatcccccagtggcccccaagtagggacagtgacagtcagcagttctttacggacacctgctccgtggcaggttctccgccggccctggctgcgggcggccctcatctaacaagatgcttcggtccatgggtggaggacaaaggcctatgggcttggggagcgagttctttcgtctcctacatgaccttcatctgctcgcgtttgccatgaagcgcatctgggttggaaggagatggtggtttcccacggaagtgtggtccctaagtgacgcctctgctgcctacatcagaatctcccaggcttgctccacagtggtcccgtcacgtggtgcagactcaggcgctgtcttgtgtgtgcagaggcaggcttggtcttgtgtgctct

SEQ ID NO: 11886 - DNA, 547 bp, Homo sapiens
  MAP TO CHR19.3; EXPRESSED IN HELA, SIGNAL = 1.3; EXPRESSED IN FETAL LIVER, SIGNAL = 3.1; EXPRESSED IN PLACENTA, SIGNAL = 1.3; SWISSPROT HIT: P05362, EVALUE 3.00e-54; EST_HUMAN HIT: BI772468.1, EVALUE 0.00e+00; NT HIT: X59288.1, EVALUE 0.00e+00
agcaaggtccacttcaccagacacccccacctctgttttcctgcagggactccagaacgggtggaactggcacccctcccctcttggcagccagtgggcaagaaccttaccctacgctgccaggtggagggtggggcaccccgggccaacctcaccgtggtgctgctccgtggggagaaggagctgaaacgggagccagctgtgggggagcccgctgaggtcacgaccacggtgctggtgaggagagatcaccatggagccaatttctcgtgccgcactgaactggacctgcggccccaagggctggagctgtttgagaacacctcggccccctaccagctccagacctttggtgaggattgaagaagccagcagggagaaggtgggggtggggtatcctgcaatgcggtgcctgtggccacaggatcttttgagatgggtgtggccccggctaaggggtgcatgtgttctaggcgtatgtgacctaggctgctgagtggccctggaagaggatctcgcaggagggggaatgaaatgccccagagaa

SEQ ID NO: 11887 - DNA, 559 bp, Homo sapiens
  MAP TO CHR16.3; EXPRESSED IN PLACENTA, SIGNAL = 2.4; EXPRESSED IN HELA, SIGNAL = 2.8; SWISSPROT HIT: P25340, EVALUE 6.10e-01; NT HIT: AL163213.2, EVALUE 3.40e-02
ttattggtatgctttggggtgagtttttttaagatttataccagggacccattttgccccagagagtcacaccatgctttcttcagtattaatgaatccaaaggctaaatgcccaggactcaggtgcatgccgatatttatattgatactcatgatcaatttcttctctactttcacacgatgtatcatttttcaaatgtaaagattttattatgtagtgctttgtttctagatagaattctatagctctattcatttctcatattaacaggataatatttaaatttgaaaaaaacagacatggaaatataaaatgagaaaactacaagactcccccaataaataacacttatctcccatttgacaaatattagagaagctttgacacacaaagccttttaaaaagccatccgtccaagttgaaacccaatggtcctgagaaatagataaataaatttcacttgctattaatcgcaaattactttttcctttaaaaaaattaattaaacacactacatgaaataaatatttcaggcgaccagcagcaaaatgggaaaat

SEQ ID NO: 11888 - DNA, 513 bp, Homo sapiens
  MAP TO CHR14.3; EXPRESSED IN HELA, SIGNAL = 1.8; EXPRESSED IN PLACENTA, SIGNAL =   1; EXPRESSED IN BONE MARROW, SIGNAL = 1.3; EST_HUMAN HIT: AU129292.1, EVALUE 0.00e+00; NT HIT: gi14752976, EVALUE 0.00e+00; SWISSPROT HIT: Q63634, EVALUE 2.10e+00
tttcttcaaaaatactggggcaataataaaattactgtatagtctgtcttatatgatcttgaaaattcatgaaaaatcttctaaggataaataaaaataatttttacatttctacaggttggtatcatacgtgatcgtttgattcagttcatctctaaattgcagtttgccgtgactgtgcttttgacatcatggacagagaaaaaacaacgtcgaaaaacaactgccactttatgtatactcaacattgtcttttctccattcgtgttggtcatcatagttttttctacactactctcttctcccttactccctcttttcacccttcctgtgttcttggtggggtttccccgacctattcagagttggccaggagcagcaggcaccacagcctgtgtgtgtgcagatacagtgtactactaccaaatggtgcccaggttgactgctgtactgcagactgcaatggcagctggaagtttaggtaagtaaatgggttgtgctcaagaatttctc

SEQ ID NO: 11889 - DNA, 547 bp, Homo sapiens
  MAP TO CHR14.3; EXPRESSED IN HELA, SIGNAL = 3.3; EXPRESSED IN HEART, SIGNAL = 1.7; NT HIT: gi9506548, EVALUE 9.00e-83; SWISSPROT HIT: Q9JHU4, EVALUE 8.00e-47; EST_HUMAN HIT: AI371996.1, EVALUE 0.00e+00
ctgccaccttcagcctttagagtatgtaggaattgactcatactcttaaataagcaaaaatggagcgccactagggttatcctgttaataacgtgttgttttttcaaatatgaatagtttttgtctcgctagatattttgcaacatcaaaatgttccattgtaatggcatattttagtttacttagttttgttactttatgtgaaaaccattaactctttctctgttaatataggtctaaaacaggctttggaaactgtgaatgactacaatcctctgatgaaagatttccctctgaatgatttgctgtctgccacggagctggacaaaataagacaggcgcttgttgccattttcacacatttgagaaagatccgaaacacaaaatatcctattcagagggcactgcgtttggtggaggcaatttcaagagacttgagttctcaattactcaaagtattgggcactaggaaattgatgcatgttgcttatgaagaatttgaaaaagtaagtttgaatatataagacaaccaacctcaagacattga

SEQ ID NO: 11890 - DNA, 586 bp, Homo sapiens
  MAP TO CHR18.3; EXPRESSED IN HELA, SIGNAL = 0.98; NT HIT: AL161517.2, EVALUE 5.60e-01; SWISSPROT HIT: P53087, EVALUE 1.10e+00
gaggttccgttttgaagcactgtcatcctcagataatgtttgctttcatgaaaaatgatgtgtttatctctgtagtcggaagctttctcttttgaaatatctcagataatttgaggtgactaggtggtatttcagggtgagtttcatcctcaaatatgtgtccttagaggccaagttaaaggaaaaaaaacactgcccgatcataaaattcacatttgagtcaaaagaattaaatttgccccctacctgtgcttccagccatgtgtctccagactccttgatggatgatttgtggagtcaccgacctgctgctgtaaaaaccataaacctcaataaagtgatgtggaaatgtagtgtacagctgcagacttttaaaagtaagaagaggaaggaacacatgttcgtcttcctcccccagaagaaaaacaacattggattctaaaagatggcctcctcctttttgctcccactgaatgccacagctgttaatggacagtcttagaggagatgatggggtcatcagtctgtttctggagcattccgaggctttagatagggagcagcatgattctagcagtgctgcgtg

SEQ ID NO: 11891 - DNA, 515 bp, Homo sapiens
  MAP TO CHR14.3; EXPRESSED IN HEART, SIGNAL = 4.6; EXPRESSED IN BONE MARROW, SIGNAL = 5.7; EXPRESSED IN FETAL LIVER, SIGNAL = 3.1; EXPRESSED IN HELA, SIGNAL = 5.1; SWISSPROT HIT: O43516, EVALUE 1.90e-01; EST_HUMAN HIT: AW956539.1, EVALUE 0.00e+00; NT HIT: gi14150182, EVALUE 0.00e+00
tagctttaacaagggcagggaaagggcaaagcagttgaggcctggtcagttgaactcatcctcaactgggagccacttctgggccagggcaccaagcctcagtccctgccaccgtgtcacctgtgcatcctctgtttctctacagagattggtacaagcgcaattttgccatcaccttcttcatgggaaaagtggccctggaaaggatttggaacaagcttaaacagaaacaaaagaagaggagcaactaggagtccactctgacccagccagagtccaggtttccacaggaagcagatggagctcctttcacaggggctctgagaaaaactggagctgatctcaagaagccccacatcttcctaaggggccccatggcctgtttgggggcagggtaggtcctggggcactgtgggccgcctgcctgctgatgtgggctctaggccagcttgttgtcacgtacgtggtgtgaaataaagcccaagcactgggtgcccgtttcctgtgtttcgaat

SEQ ID NO: 11892 - DNA, 527 bp, Homo sapiens
  MAP TO CHR14.3; EXPRESSED IN HELA, SIGNAL = 0.97; EST_HUMAN HIT: AW246988.1, EVALUE 0.00e+00; NT HIT: gi7305458, EVALUE 5.00e-01; SWISSPROT HIT: O00192, EVALUE 7.40e-01
gagagttgagggtgcagagggatctgaaagggggaaccaaaaatatcgggctttgaaattctgtggattttcaaaggcggttcccaaccttgtcaaaaactacagtgggtgcgcgatctaatctggctcctataggtggcgctgtgacaaggtgcggtggccgggagaggcggctgggggactcgaagactgcgggaaattttctgcgactccgacgctaacccgctgctcccagcctccgcttcctgttttcgagggattagctaggactgtgcaacaccagtctccgctctcggagtcggcacgggggctggtgggtggcgggatgaactcggggaaggcgacaggctggaaacgcagctcctcgactttgcagcgcaccaaccccctatcgccccgtccgctgctcaggtgcgaggattcgccagacgccacaggactgggggcgactcgcaagggcatcatgccacctagaggaaacgcgcagtgagtgagccctgggtcactgaaaatgggagaacgttcga

SEQ ID NO: 11893 - DNA, 576 bp, Homo sapiens
  MAP TO CHR19.3; EXPRESSED IN HELA, SIGNAL = 1.5e+02; EXPRESSED IN HEART, SIGNAL = 1.3e+02; EXPRESSED IN LUNG, SIGNAL =  67; EXPRESSED IN FETAL LIVER, SIGNAL = 1.4e+02; EXPRESSED IN BONE MARROW, SIGNAL =  47; EST_HUMAN HIT: BI551285.1, EVALUE 0.00e+00; NT HIT: gi14767743, EVALUE 0.00e+00; SWISSPROT HIT: P29316, EVALUE 1.00e-64
gcccaaccagaaattgacagagaggcatgtatatggtgaaaagatatatatatatatattcagaattaggcagctgcactcagtttagataatcccaattttgttggcaacatccaaagcatcgtaatcaggagtcagtcgaacatataccttcttctctccatcaggccgaatcagggtgttgaccttggccacatcaatgtcatagagcttcttcacagcctgtttgatctggtgcttgttggctttaacatccacaatgaacacaagtgtgttgttgtcttctatcttcttcatggcagactcagtggtcagcggaaacttgatgatagcatagtggtcaagcttgtttctcctgggagcgctcttccgaggatatttgggctgtctccggagtcgcagtgtcttcggccgccggaaggtgggtgacgtgtggatcttctttttgtggctgtggacacctttcaacactgccttcttggcctttaaagccttcgctttggcttcggctttaggaggggcaggagcttccttcttcactttcggcaccatcttgtgaaaagggtccaaaacaaa

SEQ ID NO: 11894 - DNA, 583 bp, Homo sapiens
  MAP TO CHR18.3; EXPRESSED IN HELA, SIGNAL = 1.9; EXPRESSED IN HEART, SIGNAL = 1.7; EXPRESSED IN LUNG, SIGNAL = 2.5; NT HIT: AF308871.1, EVALUE 5.60e-01; SWISSPROT HIT: P25794, EVALUE 2.50e+00; EST_HUMAN HIT: BF835734.1, EVALUE 7.00e-66
ttgacaaaggagctgagtggtcaattaagcacaatgcctttttggaaaaacaaaaagcctaaaagtccttcagggcacagtagaggtgctggtggttcatctgcaagagtctgagggtaccgcagaacacttgccagccatgccacggggtgtctgggaggtgccagtggaccccgcagggcacccttagagtgtgctaatgtgttgtttacagaagcttttcggttccgagggggatcattggtcctcagctgggtactacttgggctccgacagatctggcaggtttggtacactgtaacaagacccatgccattgaaaaacacttctggatgcccttcgcagaggctatagtagccccgcaagtcaccctgggggtcctctgggtctacaatgaggggctgggggaagcagaggataagactgttcaccagactcagatttcaagaatttttatgccactactgctggttatcaagcccaggtaaacctcataaggccagctcagtccgtcccagacacaatccagctattttaacaaatgcctaaggcatggaaagagtggctgcttccaagaaaacag

SEQ ID NO: 11895 - DNA, 505 bp, Homo sapiens
  MAP TO CHR16.3; EXPRESSED IN PLACENTA, SIGNAL = 0.83; EXPRESSED IN HELA, SIGNAL = 1.2; EXPRESSED IN BONE MARROW, SIGNAL = 1.1; EXPRESSED IN FETAL LIVER, SIGNAL = 0.79; EST_HUMAN HIT: BE281345.1, EVALUE 1.80e-01; NT HIT: AF177401.1, EVALUE 4.80e-01; SWISSPROT HIT: P10186, EVALUE 7.00e-01
tgctgagtgaaactgcttgggcagatgagccctccgggaggagctctgggacctcataatgccagacagtctgcagtagctgggggttttggacgggctcggagacctggacggcacgagtagcttcaaggtacttggtggtctgggccagggcagcctctgggagctgctctacagactgccacaggtccagtggtgatgaaccaatttcctgcagaagagggggcagaggggctctgctggcttccagccccgcctcccactctcagtcagccacccgcctgctccccagcttcctgctaacctccccttccttcctcactcactgaggtgaacatggcatcatgaaggccactccagagcaccatgtcctcggttttggggatggttttaaacttattctggagagaagcctgcaaggtgggggtagaaaatgagggctgtgagcctggagggggcagtgtcccccacacctgcaaagaaacctttccaggctgtgttctcc

SEQ ID NO: 11896 - DNA, 587 bp, Homo sapiens
  MAP TO CHR16.3; EXPRESSED IN BONE MARROW, SIGNAL = 1.8; EXPRESSED IN HELA, SIGNAL = 3.6; SWISSPROT HIT: P07207, EVALUE 5.70e+00; EST_HUMAN HIT: BI915597.1, EVALUE 0.00e+00; NT HIT: gi14042969, EVALUE 0.00e+00
cctaaaactccgggaaaaccttggacatagaactggcagcctcttgggattgattcactgtttaaaggccacttctagactcgcagacacagttctgccccctccgccccatcccctgggaagagctgctttggaccccactgggcggggaagccgaggctcaccagcggcactgtagtctatcctccacattcgctgtgacgccggccggtctggacacgggatgacgaatgagacgacgaacaccacaaaaaggcagagaaacaatgaaagaaaaaacgccgccgctcggcaccgggagagccgggactgtggaggcgcgcttttcacgttatcctcattttttgatggatttcccagattttcctgcgattttctttcttcatttttcaaggggtggatttcggcctctaagtccttgtggtccaacatcacgggcacatcccaaagtttaactcctggtcactgtgtcgataaagcaagaggtcggcgaggccagcagtcccacggcacaaagctgcagcacagaggggtctgctggcgtcggcttcttggggactggctgcagctctaactatgggccacca

SEQ ID NO: 11897 - DNA, 529 bp, Homo sapiens
  MAP TO CHR18.3; EXPRESSED IN PLACENTA, SIGNAL = 1.4; EXPRESSED IN HELA, SIGNAL =   1; NT HIT: AF153245.1, EVALUE 2.00e+00; SWISSPROT HIT: P10225, EVALUE 8.40e+00; EST_HUMAN HIT: BG545618.1, EVALUE 7.40e-01
ccattgtgacacaggcaatctcatatccaagaatgccagatatgacattgaaagagaacattctaactgactgctaatgagtatgatcatagctgcaattcagtctgatctctgaaatggtatttctccagatagcacagacttcctttaagggtaatgtcacagccgactaagatctcatcgaagacgtctaatgtccattgaaatcattttaatgctcttggctgaagtcagcaagctgtcatttaattacgcaggatttctgattgctcatcatcacccctgttctcattcagctcttcacccttgtgtgtctcctctatggagagcttccattcatctgaatagcagctttagtcaaggaagatgtgagtgagtatgagaaggaagatgatcttcagaatatgaaaaaaaattagactgtggcagagctcttttttctgaaattctcatagcattgactcacttaccaacttgcttatgtgatagtacccattttacaatttttacatttcccccttttctcaac

SEQ ID NO: 11898 - DNA, 501 bp, Homo sapiens
  MAP TO CHR14.3; EXPRESSED IN HELA, SIGNAL = 1.1; EXPRESSED IN FETAL LIVER, SIGNAL = 0.87; EST_HUMAN HIT: BE082798.1, EVALUE 7.00e-01; NT HIT: AF210660.1, EVALUE 1.90e+00; SWISSPROT HIT: P08955, EVALUE 2.40e-01
catgtgtgatttgctttgcctcccgcctggcacagcgtctgacatgatcacccccatgtggtctgcatgggagatgcgtgccagctgtcacctttctcctggctgccctcatggccaagtgtgccagtgtccacccccgtgcatctgccttggcacagactctgaagcctgacatgacatcaagaggctgctccaggtctcaacaaacaccaagactcagccttacaagtcctggcacccaggctcccagaattcagagaaatgtttggtggccaacaaccctgatgctgatagcagagtggatgtcacctcagagacaatcctggggctccagaatgcttcatgctcaggtttctaatgagctgcttgtgtttagaggaaaagcaatccaaaggtgagggtgaaggagagcactctgaatctgaagctggtaaaaataaaaatatttttcaaaaagtaaaaataaactcccgcctcaaaggggcctttgttctttgtcct

SEQ ID NO: 11899 - DNA, 502 bp, Homo sapiens
  MAP TO CHR14.3; EXPRESSED IN HELA, SIGNAL = 1.3; EXPRESSED IN FETAL LIVER, SIGNAL =   7; EST_HUMAN HIT: BG618796.1, EVALUE 0.00e+00; NT HIT: gi4503948, EVALUE 0.00e+00; SWISSPROT HIT: P10215, EVALUE 5.30e-01
catcttgccccatcataacccaaatagcatcaaagtggcagagatgggactaaagttaaagcaagcatcaaagttattacttttagggtaatgggatgaatttgaagagcactatgtcaaccaaatactaaacttcatggaataactgtgtttgtgtttctgtggaggagttgcggttttgtttgttttaatttggcccacgctgccccaatggaggaaattttaagataatcattaataaggcaacagcttccaggattaaaatacctataccatctatacggagttacaatgaggacaagacccacatagaccacaaaggaaaccgggaccagaagcttccagtgcattttcacagatcgttggtacgatacgctttggttaaaacgttggacacagctcataatgtcttccaccgtcagttcattctgtgctcgttcaggtgcgtggaagctatggttctgcagacctgaaaatgatgggcactctcaaatgtttctgg

SEQ ID NO: 11900 - DNA, 559 bp, Homo sapiens
  MAP TO CHR14.3; EXPRESSED IN HELA, SIGNAL =  15; EXPRESSED IN FETAL LIVER, SIGNAL =  29; EST_HUMAN HIT: AV726412.1, EVALUE 0.00e+00; NT HIT: gi16306559, EVALUE 0.00e+00; SWISSPROT HIT: P09896, EVALUE 4.00e-59
ttttccctcgggtaacttttctatggcttcaccattttctcttcaaaattgaagaaaaatatcccaaagtttagaactggatcacttggccctttctcttcttatctcctcccagttcaaaatgcttgcatctcttaatggccagcatcctcttggatctgcagttaggctcaacacattccagccttagcacaatcttctttgtggtcttagccttcttccggaaaattggctttgtctgcccaccatagccactctgcttccgatcatagcgcctccttccctgggcatacaaagaatccttgcccttcttatactgtgtcactttgtgaggctgatgcttgccacacttcttacagaaggttcttcgggttttaggtacgttgaccatctttgcagcagggctgttttgtctatatgatgaaaactgtagtaaaatatttaaaataagatagcagacgttaaacattccgaaaagtgaaagtgctatacaagtatatacaggaaaaccgtacacataaatgagtaatatataaatccaccacgtactctttttcca

SEQ ID NO: 11901 - DNA, 545 bp, Homo sapiens
  MAP TO CHR14.3; EXPRESSED IN HELA, SIGNAL = 1.2; EXPRESSED IN HEART, SIGNAL = 1.8; EXPRESSED IN FETAL LIVER, SIGNAL = 1.3; EST_HUMAN HIT: BF681523.1, EVALUE 0.00e+00; SWISSPROT HIT: Q9NQX3, EVALUE 5.00e-18; NT HIT: gi14746749, EVALUE 0.00e+00
ctcttgaagacccgcatttctgtctgtttacattttgaaaaggtctacaagggcccaactgtatacgccatgatgcttatgctgctgtaataagagtatttctttctaggtaatcaaatgagcagccgtctgatgagcatgcgcagtgccaatggattgttgatgctacctccaaagacagaacagtacgtggagctccacaaaggcgaggtggtggatgtcatggtcattggacggctatgatggtcaccagcaggagaaagctttgatgcatgtccacatatcattgactgtatcctgtaatatgcaacggcacagctagttttcccgatttggataaaagttgatctgtatagtcaacatcttgaactatatttcaaatgaatttaaatatcttttaaagaaaaaaacacctaaaaataaatcttaacagaaaattctgttctgattatatcaaggcaaatttttcctttcttgcaaattgctttgtgtgttcaatgctaggtctgatagcgatagcttttagtagacagcggtaggtgcct

SEQ ID NO: 11902 - DNA, 535 bp, Homo sapiens
  MAP TO CHR16.3; EXPRESSED IN HELA, SIGNAL = 2.6; EXPRESSED IN LUNG, SIGNAL = 2.6; EXPRESSED IN BONE MARROW, SIGNAL = 2.8; EST_HUMAN HIT: BI918538.1, EVALUE 7.00e-72; NT HIT: gi13629959, EVALUE 5.00e-72; SWISSPROT HIT: Q12846, EVALUE 1.00e-18
gtcacccatcagattccaggctgagggctccccagaagctcaacaggagtttctgacctgctgtcggtctccctgtgaacagttgccccactcctgtccaccccccagatcctgaaggacacgcaggtgactcgacaggccttaaatgagatctcggcccggcacagtgagatccagcagcttgaacgcagtattcgtgagctgcacgacatattcacttttctggctaccgaagtggagatgcaggtgggtgccccgcgcagccccagacgtgagaaccaggctcagtccaaactgccagcctcccgccacccttagattctctccctgaggcttttgtgtcttccaggtttggccatgcccccagattggtgcttattcctatccttagctgtaccccgagaatggcacctgcctctgctgctacacagatgcccactcccttctgcatagcaccctgccccctctccaaaacttgagcctgcccaggtctggccccagccctcactccccctccactaacagcatccaccct

SEQ ID NO: 11903 - DNA, 501 bp, Homo sapiens
  MAP TO CHR16.3; EXPRESSED IN HELA, SIGNAL = 0.95; EST_HUMAN HIT: BF129114.1, EVALUE 1.10e-02; SWISSPROT HIT: Q10487, EVALUE 1.20e+00
ttgagccctcctgattgatgggctctgttaggggctgaggaggggaccgtatctttggatgtctgcctgctgcccggcagggacccagggccattgccccatctcagctttcctgtgcctgatggctctagaggcagcaggctcccctctgatggggcccaagactaatgcttccatttatttttgtgagcgctggaaactgccatggcttataactgtcagcagctgccactgaagaaagccacgctttgctgaggttgctctttctgggaaagggagaatgatgacatttctaatagctgcctcccctttcacagaggcaaatgctgtgtacccagaagctacctccaagagccggtacttaattacttttgactttgcaaatgacaggagggagagaggtaagaagtggacatactttcttggttgaagatgcgttgagtctgacctaatacaggaatgtcttgccttttgtaagacgaccttaggtaaaggtttggg

SEQ ID NO: 11904 - DNA, 510 bp, Homo sapiens
  MAP TO CHR14.3; EXPRESSED IN FETAL LIVER, SIGNAL = 1.1; EXPRESSED IN BONE MARROW, SIGNAL =   1; EXPRESSED IN HELA, SIGNAL = 1.3; EST_HUMAN HIT: BI860943.1, EVALUE 0.00e+00; SWISSPROT HIT: P32985, EVALUE 7.10e-01; NT HIT: X66250.1, EVALUE 3.00e-05
gacaggaattccaaaagtttgacaattttgtcacagcatttaatctcctattcactagaatgtcttgaatgatgcttatgaaaatctaacacgctataaagaagcagtcaccagggcagtggagagcatcacttccctcgaagccatcattataccctacagagtagatgttggtaatccagaagaatctttagagatgcctcttcgaaaacaagaggaattggaatccacagtagcacacatccaggacctcactgagaaactgggaatgatatccagccccgaagccaaactacaacttcagtatactttacaggaactagtttctaagaactcagcaatgaaggaagctttcaaagcacaggaaactgaggcagaaaggtaggtcctcttccaaaggtaatctttaagaacataaaatattgtttcaagatataattaaactatattttaatagttttaagaacataaaatataggtttttttctctgtcattaacacctatgcatt

SEQ ID NO: 11905 - DNA, 532 bp, Homo sapiens
  MAP TO CHR16.3; EXPRESSED IN BONE MARROW, SIGNAL = 1.6; EXPRESSED IN HELA, SIGNAL = 1.9; NT HIT: U38906.1, EVALUE 1.30e-01; EST_HUMAN HIT: AI680624.1, EVALUE 3.00e-31; SWISSPROT HIT: P48742, EVALUE 7.50e-01
acctgggcagtgagtttttgtctgaacaattgttttgagggcatggaaacctcagtcttacctgagtccaggagggcatggttgaggcctctgcaggccagctagcatcctctgggtgggccccgggctgaagcaccaggggatgcccccattcacttggctggaaggccagggaaggccggagctgattttctcattatccccatatgtccagggtggatttggaatcacatggctggcaggaactctttccagctgaggaacaagattgcctagatccgaaggctgtctaacatgttagcaaaattagtgcttaccaatatttttgaggatctgtggttgggtattttgtgttttttcttctgccaaaacaagcttgctaacttctttgcttctctgtttcctgcaaagaaaagcaagggaggggggacgccaaatcatttgcacatttcacgttgacggagccctgtgctagcacgatcggaggtcagacgggaagccaggcttctcgggcggggcttgtaataacaga

SEQ ID NO: 11906 - DNA, 574 bp, Homo sapiens
  MAP TO CHR16.3; EXPRESSED IN HELA, SIGNAL = 1.6; EXPRESSED IN FETAL LIVER, SIGNAL = 2.5; EXPRESSED IN BONE MARROW, SIGNAL = 0.93; SWISSPROT HIT: Q12849, EVALUE 2.00e-07; NT HIT: gi14776045, EVALUE 2.00e-74; EST_HUMAN HIT: BI057100.1, EVALUE 3.00e-74
gtcaattgttttcgaagcccgaggtgataaagcagaaatacgagacggggccttggtgagtgtgggagcaggggctgggggtgacaacagctgaatagctctgacagcactgtgccctgcccctacagcagcaaggctgatgtggtggacagtgagactgtggtacgggctcgtgggttgccgtggcagtcatcagaccaggacgtggctcgcttcttcaaagggctcaacgtggccaggtgggtgtggcagggtgggtgggcccaattggacaggcctacccaggaggcactaacagcactggctccacaggggtggtgtagcactctgcctcaacgcccagggccgcagaaatggcgaggccctcatccgctttgtggacagcgagcagcgggacctagcgctgcagagacacaagcaccacatgggcgtccgctatattgaggtggggctttgggctgggagcggagcagggccaatctgagtcaggcctgagacccatgggctgctgctctctgtacccacaggtgtataaagcgacaggggaggagtttgtaaagattgcagggggtga

SEQ ID NO: 11907 - DNA, 583 bp, Homo sapiens
  MAP TO CHR16.3; EXPRESSED IN FETAL LIVER, SIGNAL = 5.6; EXPRESSED IN HELA, SIGNAL = 4.6; SWISSPROT HIT: Q14694, EVALUE 2.00e-24; NT HIT: gi14775392, EVALUE 0.00e+00; EST_HUMAN HIT: AW055061.1, EVALUE 0.00e+00
attcgtgtgcagtgctgttctcactctgctgcctgctgggctctcttccagtggtctaccatcacggcaacagtgcgacgggcggccattacactacagacgtcttccagatcggtctgaatggctggctgcgcatcgatgaccagacagtcaaggtgatcaaccagtaccaggtggtgaaaccaactgctgaacgcacagcctacctcctgtattaccgccgagtggacctgctgtaaaccctgtgtgcgctgtgtgtgcgcccagtgcccgcttcgtaggacaccacctcacactcacttcccgcctctctttagtggctctttagagagaaactctttctccctttgcaaaaatgggctagaatgaaaaggagatgccttggggttcgtgcacaacacagcttctgttgactctaacttccaaatcaaaatcatttggttgaaacagactgttgcttgattttagaaaatacacaaaaacccatatttctgaaataatgctgattcctgagataagaaagtggatttgatccccagtctcattgcttagtagaataaatcctgcaccagcaacaacactt

SEQ ID NO: 11908 - DNA, 600 bp, Homo sapiens
  MAP TO CHR18.3; EXPRESSED IN HELA, SIGNAL = 1.1; EXPRESSED IN BONE MARROW, SIGNAL = 1.2; SWISSPROT HIT: P45377, EVALUE 2.00e-51; NT HIT: U37100.1, EVALUE 1.00e-54; EST_HUMAN HIT: BG682196.1, EVALUE 3.00e-40
aaccatggccacctttgtagagctcagtaccaaagacaagatggccatcataggcctggagacctggaagtctcctccaggcaaagttgaagaaactatgaaggtggcccttgatgtgagatattgccacattgactgtgcctgtctatgtgagaatgaagatgaggtggggaagccatccaggagaagatccaagagaagactgtcaaacaggagtaccgctttatcattagcaagttgaggctcaccttctttgagagaccccttgttaaggaggcctgtcagaagatccacaggtacctgaaactgaactacctggacatctgttttattcgctggacacagggattccagcctgggcagtagtttctccccaaagatgataaaggtaatgtcatcagcattaaagcattctttgttgcttgggaggccatgaaggaggtggtggacaaagggctggtgaatgttctctaacttcaattacttccagagactctggaacaaacctggactgaaatataaagcagtaactaaccaggttgacttatctaacgcaagagaaactgatccagtcctgccactccaagggcatcaactgtt

SEQ ID NO: 11909 - DNA, 547 bp, Homo sapiens
  MAP TO CHR18.3; EXPRESSED IN HELA, SIGNAL = 2.3; EST_HUMAN HIT: BG818887.1, EVALUE 0.00e+00; SWISSPROT HIT: P70362, EVALUE 2.00e-52; NT HIT: gi16166906, EVALUE 0.00e+00
tggaatttggagtaggtggccacttgaaggttgacactctccacctagaccaggctgccttcttccaagagcaagttctgcatcatccagtgtgggaggtagcagatgccctcatcagccacaaactccagcacgccacagtgcgtcatgcggtccaaattcttactggtcagtttgaacagcatgggataggtaatgttaagttggctgagttggtccagggctgagggcagcataattatcttccctcctttctccacatctgacttgtcattaggccctgctagcgtggacacagagaagcagcggtagtgtgtggagaagcggttttggaagaccctgggaattaggtggttgaacatgttgaaagagaacatgatggacaccacctcacagacaccgcttctctcagggaatgcgacaaaggcaccctgccgaccgctgtcctcgctgccgccgccaccccagtgtgttgtttttaaccttgacttctaaaagatcagaatgcagatctccttaagcataaaattcatcaaaaagtgtactc

SEQ ID NO: 11910 - DNA, 588 bp, Homo sapiens
  MAP TO CHR18.3; EXPRESSED IN HELA, SIGNAL = 0.92; EXPRESSED IN LUNG, SIGNAL =   2; EST_HUMAN HIT: AI024247.1, EVALUE 2.10e-01; SWISSPROT HIT: Q09101, EVALUE 7.50e+00; NT HIT: K03028.1, EVALUE 5.60e-01
gctggcttacagctcatcatcaaatcctaacaacttctctaacagagaaagtaaaattatgaaaattccatacaaggaacacatttcattaaagttgaaagggagagtaggttaagagttacatgatgaatggccccaaaactgcttattaaagaataaacggccatgaaaatgttgtcaatcaacaaggcctactttttacttttttctctttttcaatccaattcaaaaaatcctggttatacccagccctcaccagccagggggtgtaaggaaggttatatgaatactgacagatgaatttttgttggctagataaacccgttttgtaactgcagaatctcagcagcatttggatgtcttcccccaattctagaatcttcttggagcacatctgctctcggggtccccgtgtttgctcctgcacgctccattttttatcaacctcctttttcctcaactcagtttccaggcctatctgtgggtatcctcagtctcacttgaaggtaaggaggatgatttgtcgaaaacgtttaactaatggatttctcacttctttccgctggaagtcacgtcccatagcagtca

SEQ ID NO: 11911 - DNA, 566 bp, Homo sapiens
  MAP TO CHR19.3; EXPRESSED IN HELA, SIGNAL =   6; EXPRESSED IN LUNG, SIGNAL =   5; EXPRESSED IN FETAL LIVER, SIGNAL = 2.4; EXPRESSED IN PLACENTA, SIGNAL = 1.1; EST_HUMAN HIT: BG393526.1, EVALUE 1.00e-55; SWISSPROT HIT: P02831, EVALUE 3.00e-04; NT HIT: gi14764015, EVALUE 7.00e-56
atgacagatcacaaccagcgctgagacaggtccctcttagcagatgccaccccttccctgggacaggagctttgggaatgaccttacgtgtctctgagcagagcagcagcccccacccccaaggattcattgcaggtccctggtaaaataaggagtaaacccaaacctgcaggctttccgcacccctcctcggctagccgaggcaccactggtaaccaccttgacccctggctggccaaagccaggagaaactgcccccagaaaagcaggatgagcccgcgtggcccctggagccccgggacgctgcaggtacctggactcggaaccgccacatggtgcccacggggatccccgggatgggtccgtagtggttggacgggacgatggtacattccttggtgcggcccacacaggccatgccctgtcccaggcacagacacaaagaacaacagcgtgagccctggcaggcggggaggggccacgggcacgtgggaaggacccgcctcaccttgccccagtcccgctgtgaggacgatgtggccgaggccatcttcgccttcttcttg

SEQ ID NO: 11912 - DNA, 586 bp, Homo sapiens
  MAP TO CHR18.3; EXPRESSED IN HELA, SIGNAL = 1.1; EXPRESSED IN FETAL LIVER, SIGNAL = 0.97; EXPRESSED IN BONE MARROW, SIGNAL =   1; NT HIT: AL161532.2, EVALUE 5.60e-01; EST_HUMAN HIT: BE515311.1, EVALUE 1.30e-02; SWISSPROT HIT: P21877, EVALUE 9.70e+00
ttttctgtgcagtgggaatgactaataccaaatcattaacagaaggatttggctaagaaaacaggtgcaacggtgaaagttttgatggtggacaaaaagcatttgactatttgtttttttgagagtttcaggcaaaagctttgcctatagtaaagtttaccgtatgttttctagtaatttttaagaaacatctctacaagtaagcattcaaaagaatgatatgtggtatctacaaggtaggccagatcctggtgacatatctcagatttgtctttgttgttgtcttctggtctccctataagggaagcagagataagggaaagctgaacagcccttgatgctctccacttcttattttggtggtttcaagtctttcactgcccctgtcattcagaaagagcttactctggggcttcttgagggtccagactcatacttaacaccctgattaacagcccaattgtgttttgattcatggctagagtgtttactatcatctctcctaaagagccattggtcagtaaacatgggaataaaaagtgctgcttcttgtccatgaatcatctcattttccccaccacattct

SEQ ID NO: 11913 - DNA, 540 bp, Homo sapiens
  MAP TO CHR14.3; EXPRESSED IN PLACENTA, SIGNAL = 1.6; EXPRESSED IN HELA, SIGNAL = 1.6; SWISSPROT HIT: Q9WTX6, EVALUE 2.30e+00; NT HIT: U82668.1, EVALUE 3.30e-02; EST_HUMAN HIT: BG106434.1, EVALUE 3.00e-99
tgaactgtgagcctgtttgcgtcctctgtgcccgggaatactgtacctgcttactcgcagatcggctgcttggaaacctgtggcaccaggtcacgtgattgttgctatgagtgtggaggtgcatttctcttttctttcttccttcttctgtcctgattttgtttcttttaactggggaaatgttgcaggttcccaggtctttgcaggcccaagtctgaaaactttggactccctggcttatctttggatttctcttagggcaccacacctcctattgaggctgacactctggactcttctgacgcgcaaggaggtttggagcccagggtggagaaaactaggccggagcccacagaagtcctgcatgcctgcaagacccaggtggccgagctggagctgtggctgcaacaagccaacgtggcagttgagccggaaacattaaacgcagacatgcagcaggtgctggaacagcagctggtagggtgccaggtaagactgagaagtcagagttcatggtttgcctctccaccaatcatctgc

SEQ ID NO: 11914 - DNA, 541 bp, Homo sapiens
  MAP TO CHR16.3; EXPRESSED IN HELA, SIGNAL = 3.4; EXPRESSED IN FETAL LIVER, SIGNAL =   3; NT HIT: gi14772922, EVALUE 1.00e-101; EST_HUMAN HIT: AW328232.1, EVALUE 3.00e-99; SWISSPROT HIT: P47835, EVALUE 7.00e-23
tgcactgtcctgacttgctctagtgagatataagagaggcacaatctgctttccttttgatggtgtgcagcagcatgatggccgcgcgaatttccaagaagaggatgttggtcgctgatggcatcttcaaagccgaacggaatcagtttcttactccggagctggctaaagacgcttctctgaagctcaggttcaagttacacccatcacgacagtaacaaatatcttagccaacagaacaaaaaatgttcctggtgagaacagccagggattctggaattgactgctgtagttcagaagagatttggcttcccacagggcattgtagagctttatgctgaaaaggtggccccagaggtctgtgtgccattgcccaggtcgagtctgcagtacaaactcctaggagggcttactgtgcggagggcctgcgatggtgggctgtggttcatcatgaataggggggccataggctgccaagctgtggtttctaggagactctgaggacagagggtcaaatccatgagtttgtggatggcctgat

SEQ ID NO: 11915 - DNA, 534 bp, Homo sapiens
  MAP TO CHR18.3; EXPRESSED IN HELA, SIGNAL = 2.2; EXPRESSED IN LUNG, SIGNAL = 3.7; EXPRESSED IN PLACENTA, SIGNAL = 2.6; SWISSPROT HIT: Q05877, EVALUE 5.80e-01; NT HIT: gi14755362, EVALUE 5.10e-01; EST_HUMAN HIT: BF820096.1, EVALUE 4.80e-02
atttggtgtggaagaggcagaaaatagcaggtcccgagggaaagataatgtttgagaagcaaagcaagaaaagatgatgacaaacacaacactcaaaggccctagacataatcactttttttttactgtcatgaacatttaaacataacacattttctttttttctaatttcatctccctcttccttccctggtctccaaagctgcaggcctgagtggactgctcccgggaagccactttcatggcgtcccctctcaagggtgcccatctacctggagcgtcatcatcgtcactgctggagtcatgtctcctgttgccaatccaagctctggagacacaagtaccacaagaaaggtgttacccagaggcacttacccatcctccctgctgcaggggaggccacaccagctgccacagcaactccctgctccgtcctctgctttctcagaactaacctgggctctctggaatcagagaccttcaacaagtcactgctcacatttgcaaacgttcacatcaagagaggaccccctt

SEQ ID NO: 11916 - DNA, 590 bp, Homo sapiens
  MAP TO CHR16.3; EXPRESSED IN HELA, SIGNAL =   1; NT HIT: AF217490.1, EVALUE 0.00e+00; EST_HUMAN HIT: BF932656.1, EVALUE 3.30e+00
  unsure 524
  unsure 565
tggagttggaggaggatgaccttagtttgcgtctttgtcccactatcattatatccaacttgtgtaattagaaacactatttaagtctcagtttcgtctcctgtcaattgggaaaatatcgtgaggcggagatgtgagatgtgatcacgtttataaagtctgcggcaagaggatgataaagtcacttctcaactccttctcaactcctcctcctggcttattaatgcccatcctttaacctgtcctctgctttatctcttggaatccttagggcctttttaaccccatatacgaagcaaacctatgtgtatgtgtttgtgtgtgcatcaattcatatggtcctctgcagccttgcaaagtcgattcctgacatttccgtagactgttttttttgttttcagcaatactctccagcagcaaaacccaatccgctcatattcttgcatttgctgcagcaaaacctgacctctctttgtgttacctgagtcttgacgaagaagactgaggaaaggcccccccccccncccaccaaattgtcccgttgtctcttggctggtcttgccangctggcacacagcttcctctgacca

SEQ ID NO: 11917 - DNA, 509 bp, Homo sapiens
  MAP TO CHR16.3; EXPRESSED IN HELA, SIGNAL =   2; EXPRESSED IN BONE MARROW, SIGNAL = 2.5; EXPRESSED IN LUNG, SIGNAL = 3.2; SWISSPROT HIT: Q13671, EVALUE 6.30e-02; NT HIT: AF275873.1, EVALUE 3.10e-02; EST_HUMAN HIT: BG912728.1, EVALUE 4.00e-21
aacaactcctgtccacggtcacctccctgcctcggctccttctagccaggactgtcctccctcagaccagtggctaacccaggcctggccttgagctgggttttccctgcctgctccctggaactccagtctcttccttcctttcttagcatcccatcccgactgggaagcctgtggggagagctgcgtgcaggggcttgctaccctgagacaccagactcagtttcctcatctgtaacgtgtttgtgggagaatgcagggtgcagtggggggtgggggctggcctgactcttctccagggattctttctcctctggcagcccatgaatctgtcgtagcagatacccacaaacaggccacttacgggcagggtatctctcgtggcggcagtctaagtgaaagtcctcctcgctcccgtccctcttctccatcctggaaagaaaaaaaaacaaaaacaaaatcctaggtaggaaagagaaggatgagtgggcagagacccaaaacctgaa

SEQ ID NO: 11918 - DNA, 544 bp, Homo sapiens
  MAP TO CHR18.3; EXPRESSED IN HEART, SIGNAL = 3.5; EXPRESSED IN HELA, SIGNAL = 1.5; EXPRESSED IN PLACENTA, SIGNAL = 1.1; EST_HUMAN HIT: BG568716.1, EVALUE 0.00e+00; SWISSPROT HIT: P55289, EVALUE 2.00e-32; NT HIT: AJ007607.1, EVALUE 0.00e+00
ttcttttattcctgtgaaggctgagatattttaataacattaatatgtagtacccttttctcaaaattttgatgcatagtctaatttttcaaatattttacttaaacatatttgtagaaggaagttctagtatagacccttaaatcatctacttccaaaacatatccttcaaattttaaacctgcttcattgttaatatatctttgatgtaaattaatatgcaataccttctggagacatctctggtacaatggcctcataaggttcatctaggaattttggttcattgtcattgatatccgaaactttgatgacaaactcagactcaggttccacagcccttccagtagcgatgtctattacctgggctcttaagatgtagagggatcgctcctctctatcaagcttctgtatggcatatatgtcacctgttctttcatcaatgataaaagtacttccagctccagctcccaaaagcttgtactggaaagaattgtttccattgtctaaatcagatcttagctgcaaatggaaagagggatca

SEQ ID NO: 11919 - DNA, 537 bp, Homo sapiens
  MAP TO CHR19.3; EXPRESSED IN HELA, SIGNAL = 4.9; EXPRESSED IN BONE MARROW, SIGNAL = 2.3; SWISSPROT HIT: Q15907, EVALUE 4.00e-31; NT HIT: gi14769067, EVALUE 1.00e-105; EST_HUMAN HIT: BF346300.1, EVALUE 1.00e-106
tactgcctaggtgagtggggaggcagggtgacaggctcccacatgctctcagggaccccgcccacccacctggcccatcccaaggccactcctcagggaagggaagccagggctgtggccggggccccaacactgtgaggggcctcctgccttccagacacctctctgatgcctgcgtctccgtctgctcacctgcgaaggcgcgggcctcgtcagtgggcacagcccgcaggtggcgcaggtcactcttgttgcccaccagcatgatgacgatgttgctgtctgcgtggtcccgcagctccttcagccagcgctccacgttctcataggtcaggtgcttggcgatgtcgtacaccagcagggcgcccactgcaccacggtagtacctgcagggtcaggggcccatgagcctctctggaggacaaccatgggcagcggcagcctcacgggataacagcacacatcacgcccagggtgggtcgtccagggccgagccaaggggcagtcattgtggcctcaagggaagggtgtgtgtct

SEQ ID NO: 11920 - DNA, 507 bp, Homo sapiens
  MAP TO CHR14.3; EXPRESSED IN HELA, SIGNAL = 1.3; EXPRESSED IN BONE MARROW, SIGNAL = 0.61; SWISSPROT HIT: Q9Y2Z9, EVALUE 6.00e-32; NT HIT: gi14749362, EVALUE 1.00e-111; EST_HUMAN HIT: W88950.1, EVALUE 0.00e+00
ggggagtgatgagaagttgctttgcacttgaggggcttatcacttgtcaagatcagtgtaggcaagttgggtagcattagcctaagctttggttacaaacaaggtttctttattgaatttttaattccctgctactcacatttcaccttgtttgtcttgtggctgatgctgctcagtggagtgatgctgaccacacggacttcatcgacacagctggtgccatgctgcagtatgctgtcagccttctgaagcccactaaggtctcggctcgccagctgcccccaagcgtagccagggtggatgccaaaagccgagttctgtttcctcttgggttgggacatgctgctgagtacgtcaggcctcgggtggcgctcattgggtaagacgataacagagcagggccactcccttctcactttgctgccagaggtcacacctgaactctgctttattcttagggatgcagcccacagagtccatccgcttgcaggacagggtgtcaacatg

SEQ ID NO: 11921 - DNA, 515 bp, Homo sapiens
  MAP TO CHR19.3; EXPRESSED IN HELA, SIGNAL = 1.9; EXPRESSED IN LUNG, SIGNAL =   2; EXPRESSED IN FETAL LIVER, SIGNAL = 1.9; SWISSPROT HIT: O25254, EVALUE 5.50e-01; NT HIT: gi15305980, EVALUE 0.00e+00; EST_HUMAN HIT: BG718958.1, EVALUE 0.00e+00
gcagctgtgtcctctgagtgtgtgtgtgcttgctcctcctcagaacatggtgatgagttttcgagtctccgaccttcagatgctcctgggtttcgtgggccggagtaagagtggactgaagcacgagctcgtcaccagggccctccagctggtgcagtttgactgtagccctgagctgttcaagaagatcaaggagctgtacgagacccgctacgccaagaagaactcggagcctgccccacagccgcaccggcccctggaccccctgaccatgcactccacctacgaccgggccggcgctgtgcccaggactccgctggcaggccccaatattgactaccccgtgctctacggaaagtacttaaacggactgggacggttgcccgccaagaccctcaagccagaagtccgcctggtgaagctgccgttctttaatatgctggatgagctgctgaagcccaccgaattaggtgagtggtcaccctggggaggctgcgactggaggcttcacctag

SEQ ID NO: 11922 - DNA, 556 bp, Homo sapiens
  MAP TO CHR18.3; EXPRESSED IN HEART, SIGNAL = 6.4; EXPRESSED IN FETAL LIVER, SIGNAL = 6.7; EXPRESSED IN HELA, SIGNAL =  13; EXPRESSED IN PLACENTA, SIGNAL = 2.3; EST_HUMAN HIT: AW471281.1, EVALUE 0.00e+00; SWISSPROT HIT: O14834, EVALUE 7.00e-28; NT HIT: gi14760611, EVALUE 0.00e+00
cagtatgcaaaacgcacaggctcacaggataaacaccttcgttttactccaagggtaagaattaactttgactaggaaaatcagtaatctattcattaagtttcctgagaacaaacaagtaggcctgctcctctcaccacgtgcttgtttatttcggtgagttaagaccatgttatcaattccatctcagaggtgctccagccctggagcttcctgtattttccaaaggctttaaatagcttaaaacgtttccatacaaaaagggctccacgacatttatccgcgcagactgagggcgcctcagtagcggtacttggtggagtagtccttgggggacaccaccaggccgcggcctttgcgggccccgcggtacaccgtctcgatgatgtccaccatctcctgcttgtcctccatggcccagttaatcttgttgttgttgccagtccccaagtcaatcatgatgtgcttgttcctgcaacgagaaacaagggcatccattctcatagaagtctctttaaaaaagaattccttgaaaacaatgccgtatttttcccac

SEQ ID NO: 11923 - DNA, 507 bp, Homo sapiens
  MAP TO CHR19.3; EXPRESSED IN HELA, SIGNAL = 2.2; SWISSPROT HIT: Q9Y3A6, EVALUE 8.00e-15; NT HIT: gi14759759, EVALUE 2.00e-99; EST_HUMAN HIT: BF724969.1, EVALUE 2.00e-99
gtggacttcacgctggagagccctcagggcgtgctgttggtcagcgagtcccgcaaggctgatggggtacacacgtgagttcagtcttgatgcctgcctgggttcagttacagccctgcccttcccaggcggcctcaggttaccgccctgactgccccgctgagtcggctggctggccaccctgggtcatgtctgtgtgtctgtctgcccagggtggagccaacggaggccggggactacaagctgtgctttgacaactccttcagcaccatctccgagaagctggtgttctttgaactgatctttgacagcctccaggatgacgaggaggtcgaaggatgggcagaggctgtggagcccgaggagatgctggatgttaaaatggaggacatcaaggtgtgtccaggctgcgctggggccactccttccagatctctaggattcacctggggtgccccccttgggctgacccagcctcccctccgtagttgtgccctccaactgaat

SEQ ID NO: 11924 - DNA, 506 bp, Homo sapiens
  MAP TO CHR19.3; EXPRESSED IN PLACENTA, SIGNAL =   1; EXPRESSED IN HELA, SIGNAL = 5.7; EXPRESSED IN FETAL LIVER, SIGNAL = 2.2; NT HIT: gi15306461, EVALUE 0.00e+00; EST_HUMAN HIT: AI799580.1, EVALUE 0.00e+00; SWISSPROT HIT: Q13263, EVALUE 3.60e+00
ctgaccctctcctccaactgtccccctaccccaggaggagcagcagcgcctggccgagctctccaagtccaacaagcagaacctcttccttggctccctcaccagccgcttgtggcctcgctccaaacagccctgaactctgggcctcctcaaactcagtgcctgggtccagggccccagtgcttccagaccaagacttgggccaccacttgtccaataaagtacatcccagacgccacacctgctgtgtcccgagagtctccagatgggggcatcagggtgaggtccgggactcttgggtcatcgtcccacagtggctgatcggctgccaagcacagtgggggtgctttgttggatcagagcagatttttcaccctggtctcggaatctaaaaaccctcgctgtgtcttcctgtgtgttgcgtgatctgtgaaaaatacatctccctctgaccacagactcctcatctgtggagaagggaagagaggatggcacttggctttaaa

SEQ ID NO: 11925 - DNA, 550 bp, Homo sapiens
  MAP TO CHR19.3; EXPRESSED IN HELA, SIGNAL = 1.6; EXPRESSED IN LUNG, SIGNAL = 1.2; SWISSPROT HIT: O97159, EVALUE 4.00e+00; NT HIT: gi7661935, EVALUE 2.00e-43; EST_HUMAN HIT: AW068873.1, EVALUE 3.00e-43
aagtcgaaggtttggcattgtcgagttgagttgccattttggaactggtccttgaccccaattctggagctcctgctcacagcctccctctcctttgtcatttggacccagagagacccaagttgtgcggggttcctcctccgccttttgggcttgcggcccagatagctgacccggagttgctctttgcaaggacgggtttgcctttgtttcatgggaggttgttacttgtaaggaacagtgtgtgccctgcagctcttaatgatgttgtaaaactcatctctccctaataggcggttaaagaagaggggcaagatcctgatgaaattggcatcgagttagaagccaccagcaagaagtcagccaagagatgtgttaaaggtattgtacatatgctgcttggggcttgagtgttcagagaatttagagaaatggtgtgtagtgtgctcttcccgccttctaggctgggagaatttctctggtactcggtgtccctccactaagagttagctttgctcgtcaccacctaacaggtagctctgtcaagggc

SEQ ID NO: 11926 - DNA, 580 bp, Homo sapiens
  MAP TO CHR14.3; EXPRESSED IN HELA, SIGNAL = 1.1; EXPRESSED IN BONE MARROW, SIGNAL = 1.3; EXPRESSED IN FETAL LIVER, SIGNAL = 0.83; SWISSPROT HIT: O79436, EVALUE 6.40e-01; NT HIT: gi9964314, EVALUE 8.60e+00; EST_HUMAN HIT: AI655778.1, EVALUE 2.10e-01
tccatctgccacacaagaagaatgcagagaaaaaaagttagatatagatttgtctgtaccatctaactctagatagggtatttaggaattctgataattgataattaagtagctttactttatttataaagactctgctcagaggtatccagagctgttttccttccaaactattatcaaacataccttctaatttaacatgtcttcagagcctgcaactgttagtgtacaacataaacagggtgaaaaggatactgttgggtaaatattgcactctaagatgtaaaattgcataaactcaggcaaagaaaaaaagactactaagaaaagtttgtgttgagtatggacttgtaggagagtgccatcctttacatattgctcttggactagaataagggtagacagtagtattatattttccagtgaccacaaaaaactgggcagttctaactgaagaccctactttagttagtggtgccacacaagaggactgtgatgctggtctttggataaaagctcttgtttgtgaccactaatttgttgtctagctttatatcctaggaggcaaattgcacatgta

SEQ ID NO: 11927 - DNA, 516 bp, Homo sapiens
  MAP TO CHR14.3; EXPRESSED IN HELA, SIGNAL = 0.94; NT HIT: M29979.1, EVALUE 1.90e+00; SWISSPROT HIT: P01479, EVALUE 4.20e-01
gaagtgtggcttagcatcctgtaaaagttcaaccctgcagggactcgaggtccttctttgacatgaacacatttgggcactgtatcttttccaccaagatctccaaaatctgaagccaattaaaagcaaagatcatctagagtggaaatcaaggcacactggacagggcagggggtcagggagctgccaccctcctctccacaaagtttgcaagcccggtcagatgggggcactcactttgtcacggtgctgcccccataattgcaataggctcttttgttactaaacagacccagccaaaacaaaagggatactgtttcttttatgagtaatgtgctaactcacccctggaaaaaaaaaaaagttcaagtccaacctagggactgagacagcataagatttattatgaaggctacagaaattattcctccttcacagcacttaaattgtctaattattcacagctgtttccaatttggctcaggttgttaattaaggggtgttcgtcttctcctc

SEQ ID NO: 11928 - DNA, 518 bp, Homo sapiens
  MAP TO CHR19.3; EXPRESSED IN HELA, SIGNAL = 1.1; EXPRESSED IN BONE MARROW, SIGNAL = 1.2; NT HIT: gi15303975, EVALUE 3.00e-45; EST_HUMAN HIT: AW962055.1, EVALUE 7.00e-66; SWISSPROT HIT: P17024, EVALUE 5.00e-17
tcatgagaggtaatactgacccactatacagagagacactagaggtgatccaggcagcatatctcagtctctgaaatcaccaatgagaggcatgtccttgttggctgtcactttactgaatatattcaattctagcatcagaattgctgtgatggagaaagtgagtgtagacagaagacaagaggctgaccaagtcattgaataaatttttggagtccacagcatcgtgtgaacttctgaagtgagtatagattcctaatgctgttggtctgaaccttcctcctctgccatgtgggatgtttcaggactcagtgacctttgaggatgtggctgtgaacttcacccaggaggagtgggctttgctgggtccttcccagaagaatctctacagagatgtgatgtgggaaaccttcaggaacctgatgtctgtaggtaagggtgacatcatttcttcacttagtcaattatagaacaagtgtttcttggtcttctgcattgctcaatgatttggaacatgg

SEQ ID NO: 11929 - DNA, 595 bp, Homo sapiens
  MAP TO CHR19.3; EXPRESSED IN PLACENTA, SIGNAL = 1.2; EXPRESSED IN HELA, SIGNAL = 1.3; EXPRESSED IN BONE MARROW, SIGNAL = 1.3; SWISSPROT HIT: P51869, EVALUE 1.00e-16; NT HIT: AF221943.1, EVALUE 1.00e-42; EST_HUMAN HIT: BI759580.1, EVALUE 2.00e-50
gagctgtgctcagttgttgcagaacatgttgggatatataggagccatgtcaaggcgtgctggggagtgctgtgccctgttaggttgtgtcattgctctactgtgctgttgcagcctgggctggtccttcttcctctatcctcccttcgtcctttgcccttggcccccttcctgctatgctgggcatggagtagggaaagtgctggtagggagccttgccttatacctgaagttcctctcttgccctctacatggcccctgatggtcctcattcatgccagctgctattgcgcccaaggatgatctctccatcaggttcctgaagccctggctgggtgagtacctgcaggtgaaaggggctggggacaaccttgagcaggggtggggaaggtgctgctcttgcccactgtccttggctgccctactaggagaagggatactgctgagtggcggtgacaagtggagccgccaccgtcggatgctgacgcccgccttccatttcaacatcctgaaaccctatataaagatcttcaacaggagtgtgaacatcatgcacgtgagttccttgaactctgggtcccagcaggagtcttgg

SEQ ID NO: 11930 - DNA, 544 bp, Homo sapiens
  MAP TO CHR18.3; EXPRESSED IN PLACENTA, SIGNAL = 0.86; EXPRESSED IN HELA, SIGNAL = 0.98; SWISSPROT HIT: P13697, EVALUE 5.10e+00; NT HIT: gi15925705, EVALUE 8.10e+00
tgtcagagcccttacctttaagtctacatagtagatcacaagtaacaaataataataatatgatagaatgtgtatacatgctaagatagaagttcccatgaaggaaggagcaaacaagaggattggaatgaggataagttggtatgggagatatcactgcctcggaactcagggtataaggctgcaactcgctccttatacaattgctgcacaagcaggaaggcgacttgccacaaagcccaaggcaagaaccctgttaccagaatcaggggtgagataacaggatcagcagcagctctgaagcctttgtctctagctccttaaatcttcctctcttcctccccaccagagacaactcaattgtttctagagtttcaggtgaaagattttggtcccagttttaggtattgggagtgaaattcaactactacatcaatggactgactctaatttttgagaaaacgtaacttcatgttggcaatgtctctatcagaacaatatcaggtgaggtagagtgaagatacaaagtagaggtccgaaaggg

SEQ ID NO: 11931 - DNA, 581 bp, Homo sapiens
  MAP TO CHR14.3; EXPRESSED IN HELA, SIGNAL = 3.3; NT HIT: gi11434083, EVALUE 0.00e+00; SWISSPROT HIT: Q92524, EVALUE 1.00e-15; EST_HUMAN HIT: AA846885.1, EVALUE 0.00e+00
agcagtcatgttgttttattctctacaggtatgttcgcaattcgtgctgatcatgattttgtagtacaggaagacttcatgaaagcagtcagaaaagtggctgattctaagaagctggagtctaaattggactacaaacctgtgtaatttactgtaagatttttgatggctgcatgacagatgttggcttattgtaaaaataaagttaaagaaaataatgtatgtattggtaatgatgtcattaaaagtatatgaataaaaatatgagtaacatcataaaaattagtaattcaacttttaagatacagaagaaatttgtatgtttgttaaagttgcatttattgcagcaagttacaaagggaaagtgttgaagcttttcatatttgctgcgtgagcattttgtaaaatattgaaagtggtttgagatagtggtataagaaagcatttcttatgacttattttgtatcatttgttttcctcatctaaaaagttgaataaaatctgtttgattcagttctcctacatatatattcttgtcttttctgagtatatttactgtggtcctttaggttctttagcaa

SEQ ID NO: 11932 - DNA, 577 bp, Homo sapiens
  MAP TO CHR18.3; EXPRESSED IN PLACENTA, SIGNAL =   2; EXPRESSED IN HELA, SIGNAL = 2.2; EXPRESSED IN LUNG, SIGNAL = 1.9; EST_HUMAN HIT: AA490716.1, EVALUE 2.10e-01; NT HIT: gi15297480, EVALUE 1.40e-01; SWISSPROT HIT: P16779, EVALUE 6.40e-01
ttcagttctgggaaccttgcaggaattctgtgcactaaagttcccagggaaagagaatgctctttttcatctttactgttccactaccttaagaaaaatgagccccagaggattgtactcttgcatacctggggaggcttcctgccaactgagcagggtttccaggtaagaaagggcattggctggatgtaggagagggcagagagcttgtctctactagaaccctcaaatggtgttggggaaactgttcagtaggctggacatgggttaaagagagaatcattggcttttttacttcttcatccccctttccaatttccttcctactttgcagtccatcgatttccaacttctccctgttctttcccatgcccagttttctcacaaactcaaagtgaaagccttgcccagccaagccttgtgctcgaggacctaccttccccaccctcccctccatcatttttcttccctcatttactactagtgtaaagggatttcctataagggtgctctagctaatctaacaagccaattcatgcttagatgtactgatttgagcagagacagcctcccatac

SEQ ID NO: 11933 - DNA, 584 bp, Homo sapiens
  MAP TO CHR16.3; EXPRESSED IN HELA, SIGNAL = 2.9; EXPRESSED IN LUNG, SIGNAL = 2.9; NT HIT: gi11431596, EVALUE 0.00e+00; EST_HUMAN HIT: BF435450.1, EVALUE 0.00e+00
aaaacaccccaactcattgcaatgcagtccaaatgtttgcaaccaaagatgtatgaaaatatttcaattgaaactgctttttttttttttaaaaaaacaaagcttttgatcattcccttgtcaacataattggcagatctactctcaaacacacttaagagtattccacacaacatgttcggaattcagatttattgatttccattgtattgactttaaaaatggtatgaagctgactgcaagaaagggaactggtaattttaagttaaaattaagctaatggtgaaagtacatcacctctggcttcagtcaccacatcacctcagattgaatatagattttttatgaacaaagttccagaactctgaaatccagggatgctgcaggcctctcccggcaatgtccttcactttgggtcagtctcctgggccagaggtgaaagtgctttcaaaaatactgccatttccccagcacagtgtctttgattgcatccacatattgagttggaacccagtacacccagtagtaagaggcttccgtggggcccaactgaaacgcctggaagggaaaaaggaaaaccaagc

SEQ ID NO: 11934 - DNA, 520 bp, Homo sapiens
  MAP TO CHR16.3; EXPRESSED IN HEART, SIGNAL = 8.9; EXPRESSED IN FETAL LIVER, SIGNAL =  12; EXPRESSED IN HELA, SIGNAL =  24; SWISSPROT HIT: Q99613, EVALUE 7.00e-10; EST_HUMAN HIT: BG678218.1, EVALUE 9.00e-87; NT HIT: U46025.1, EVALUE 4.00e-85
cctcgtgcctgtaggatctcattcagtttcttgataacaacagcatgggtgatctcagttcccttggcaaacatttttggcttctcctgtatcagtacatatcccgtcatgtacatgccagcgggaaactgtccttgccttttccccacaaggggacctttatgtcctcccaaactgttccccaattcattttacctctgaaaccctcaccttaaccaacggcactccgccccggaccctttcccactccccgccttcattgtcctcctcctcctcatccaggcgcttggatttcctgtcgtgcttcttcttagctttgtcctcccgtttcttctcggctgccttcttgtcctcatctgtggtgggtgccctgccgacagacatgggagaagatgacagatcagcccctccccacctctaaggcttcttcctcccatcaacttcctcttttcctccagcagctcctgggtccaagttatgctctacaacaatgacctagagggcacagtgaaccataacc

SEQ ID NO: 11935 - DNA, 518 bp, Homo sapiens
  MAP TO CHR14.3; EXPRESSED IN HELA, SIGNAL = 3.4; EXPRESSED IN PLACENTA, SIGNAL = 2.6; EXPRESSED IN LUNG, SIGNAL = 2.9; EXPRESSED IN FETAL LIVER, SIGNAL = 2.6; SWISSPROT HIT: P48971, EVALUE 2.80e+00; NT HIT: gi14720104, EVALUE 4.90e-01; EST_HUMAN HIT: W39130.1, EVALUE 7.30e-01
tagatgcccactgaaaacccatctcctgtaatgaaaccacaactatcttcctggaagtaaaattacatcacctcacccgtttgcccttttgctcctccttggttctaaaccctgtagttctcaactcagggtatcttgtgaaaccttgtgtcctttattcttgggcatggcttcagcgtgggtgtcctcccccgtatatactgtcttacgtgttgaggcatgtttgtggttattttgcccaagggaagacaccatccgtgtagtaaggcattggcgtcattccagtggcttctggatctagctagggccatgatggtgtcagtccccatgctacagccaggtcctcttgggtaggtgttactgctgtaggcctctttgcagggccccattgcaggctgataagatgccatccgagtacacagaggtcttctgcaggctggcctttttcccagctcttccagctgtgtttttccccctacccaaatgctccagctccacctccacctccatagtgccat

SEQ ID NO: 11936 - DNA, 560 bp, Homo sapiens
  MAP TO CHR18.3; EXPRESSED IN PLACENTA, SIGNAL = 1.5; EXPRESSED IN HEART, SIGNAL = 1.9; EXPRESSED IN LUNG, SIGNAL = 2.8; EXPRESSED IN FETAL LIVER, SIGNAL = 1.7; EXPRESSED IN HELA, SIGNAL = 1.2; SWISSPROT HIT: P16067, EVALUE 3.10e+00; NT HIT: X53330.1, EVALUE 5.30e-01
gacaggctttatcattggggtaatttaacattatgcttcttacatggatttttgacagatttttactcagacttaaggtgaacattccaaaactcagtattctttcaagtatttcacatctctaagggtcattccacaattctgcacaatgcattctttttgaatcccaaaactcttaacccagctcagtttagaacccatgagcaatttacctttggatctgctctgttcctgtgcacctcttcttggaatataaatttctgagcctcaatgtgccctgatgctgttctcttctagaagaaagaaaacattactatgatgaagctaaaacttacaggagttagatgatcgtatattgccgcttcttaaattccttgctttggtttgttttacaggttttgtccatttgggtactgactacatagaccatatttatgggactagcctggttcatagtctgaacaggtaacatcctaaaaggtgtgactgcaggacccaaagatggccaccctcccatcaccaagagacccttttccttaccctccctacccaacctcttc

SEQ ID NO: 11937 - DNA, 505 bp, Homo sapiens
  MAP TO CHR19.3; EXPRESSED IN FETAL LIVER, SIGNAL = 1.8; EXPRESSED IN BONE MARROW, SIGNAL = 1.1; EXPRESSED IN HELA, SIGNAL = 1.3; NT HIT: gi13129115, EVALUE 1.00e-66; SWISSPROT HIT: P17024, EVALUE 4.00e-12; EST_HUMAN HIT: BE389582.1, EVALUE 2.00e-66
aaaatctatttaggacagggactatgtctctgttatttctctttgcattcagagttgacattgccaatgctgcaaaacagtaagtacaaaacatatcagttccatagaaggctgcaagggatgaggccagtcttacctactgtggccaggttcttgtagttctccagcatcacgtcactgtagaggcttctctgagttgagtccagtaaagtccactcctcctgggtgaagtccacagccacatcgtcaaaggtcactgaatcctaaagcatcacacacatgctggttggagccaagtaacaagcccatcagcgttcgctggaggatgaggaagggggacccaatgcctatgcaggattccaagggctgcagtgaccagccccaggttttaagggtcctagaaactcctcgcaccctaaacatactcactgtcatctcctccactcatagtgcattaatggcacttcttgaatatgaatttatctcagcacaaccagactaggag

SEQ ID NO: 11938 - DNA, 578 bp, Homo sapiens
  MAP TO CHR16.3; EXPRESSED IN LUNG, SIGNAL = 1.1; EXPRESSED IN HELA, SIGNAL = 1.1; EXPRESSED IN PLACENTA, SIGNAL = 1.2; NT HIT: AF336873.1, EVALUE 0.00e+00; SWISSPROT HIT: P47498, EVALUE 2.90e-01; EST_HUMAN HIT: AW468682.1, EVALUE 0.00e+00
aatgacaaatggcctccaaggattttgcaataggcatgatcttattatctcagatcatggtcggattcctggggaatttctttcttctctaccactatagtttcctttgtttcaccagaggtatgttacagtccacagatctgattctcaagcacctgaccatagccaactccttggttatactctctaaaggaatcccacaaacaatggctgcttttgggttgaaagattccctcagtgatattggatgcaaatttgtgttttatgttcacagagtgggcagggctgtgtgcactgagtgtcttccaggtcatcaccatcagccccagtgaattcaggtgggcagagctgaagctacatgctcacaaatacatcaggtcttttatcctggtcctgtgctggattctgaacacgctggtaaatattactgttcttctacatgtgactggcaagtggaacagcataaatagcacaaagacaaatgattatggatattgttctggaggaagtaggagcagaattccacattcattacatattgtcttgttatcatcccttgatgttttgtgtttggggct

SEQ ID NO: 11939 - DNA, 501 bp, Homo sapiens
  MAP TO CHR16.3; EXPRESSED IN PLACENTA, SIGNAL = 5.2; EXPRESSED IN HELA, SIGNAL = 5.5; EXPRESSED IN LUNG, SIGNAL = 5.9; EXPRESSED IN FETAL LIVER, SIGNAL = 2.9; EXPRESSED IN BONE MARROW, SIGNAL =  14; SWISSPROT HIT: P27918, EVALUE 8.00e-02; EST_HUMAN HIT: BG757374.1, EVALUE 1.00e-121
gatagtggtgaggtggagggcgtgaggctggaatgcattaaacgaatgggaggtggagcagggggtggtgagaggacagctttccacagggcagaaacagcacatgcaaaggctgggaggctgggaaggctgggaggctgggaggctgagaaagctttcacgctgcacacgtgaaagtcttgctgcttgttctcatccagggaagcggagctcagaccttacccagggcctccccatttcccctccactcagcccttctcctgctgcccttccaggatgaaaacaactcatctctgctgaataactacgtcctgggggcccagctgagtcatgggcacgtgaacaacctcagggatcctgtgaacatcagcttctggcacaaccaaagcctggtactgctgggggcgcccccgtttccactgcacccctgcccctctgtgactctcctgttgaacactggtttgactagacccaaacctgtggaaccatcttggaaatcca

SEQ ID NO: 11940 - DNA, 553 bp, Homo sapiens
  MAP TO CHR19.3; EXPRESSED IN FETAL LIVER, SIGNAL =  49; EXPRESSED IN PLACENTA, SIGNAL = 5.6; EXPRESSED IN HEART, SIGNAL =  26; EXPRESSED IN HELA, SIGNAL =  44; EST_HUMAN HIT: BG281864.1, EVALUE 1.00e-101; SWISSPROT HIT: P05426, EVALUE 8.00e-58; NT HIT: gi15431300, EVALUE 1.00e-101
caaaagatgcttcgaaaggcaaggaggaagcttatctatgaaaaattgaagcactatcacaaggaatataggcagaggtacagaactgaaattcgaatggaaaagatgtcaagaaaagctggcaacttctatgaacctgcagaatccagactggcgtttgtcatcaggatcagaggtatcgatggtgtgagcccaaaggtccgaaatgtgttgcagcttctttgcctttgtcaaatcttcaatggaacctttgtgaaggccaattaacatgctgaggattgtagagccatacattgcatgcgggtacctaaatctgaagtcagtaaataaactaatctacaagcgtggttatggcaaaatcaataagaaacgaattgctttgacagataacgctttgcacgatctcttggaaaatatggcatcatctgtatggaggatgtgattcatgaggtccatactgttggaaaacgcttcaaagaagcacataacttcctgtggtccttcaaagtatcttctccatgaggcagaatgaagaaacagaccacccatttcg

SEQ ID NO: 11941 - DNA, 522 bp, Homo sapiens
  MAP TO CHR14.3; EXPRESSED IN HELA, SIGNAL = 1.1; EXPRESSED IN LUNG, SIGNAL = 1.9; EST_HUMAN HIT: AI969318.1, EVALUE 5.00e-73; SWISSPROT HIT: P36377, EVALUE 8.30e+00; NT HIT: gi16162507, EVALUE 3.00e-73
ttagacacggctctgtgtgggcaaacccacccaagactttcttctttctttagtagcagccctgtcgtgtcattttcatcattgtgggaccaaacagacatagcaaatataagatgccacagaattcctttgcataatttgtgatgaaagtagtttaaacttcagaatgatttactgcaggtctcagggaaccagcatgaagaactacagaacgtcagaaaacacatccattcctgtttcaccaacatttcctgttttctgctacctcatcctggcttaaaagtagctaccaatccaaactttgatggaaaattgaaaggtttgtgtcttttaatgaatatgtttgcatcacttagtctgattataaaaatgtcattttatctattgggcttatggctgatagtttagtttatccactgataggaggctgatgattagaaattgtcaggagaatagggcatcctgggctggtgctcctccttggtgaactgtgggattctatgggcgctggatgtatacact

SEQ ID NO: 11942 - DNA, 576 bp, Homo sapiens
  MAP TO CHR16.3; EXPRESSED IN HELA, SIGNAL = 1.6; EXPRESSED IN LUNG, SIGNAL = 1.6; EXPRESSED IN PLACENTA, SIGNAL = 1.2; EST_HUMAN HIT: AI857618.1, EVALUE 0.00e+00; SWISSPROT HIT: P54366, EVALUE 6.00e-03; NT HIT: AY005471.1, EVALUE 2.00e-93
gcctctgatccagcaagaagagtttaaagcaattgctgagttttatagcactcgtgacgtcaggtccaaatgagaaattgactggcactccgggccaatgggaggcggcgagagcggccgcgattagcataatagtatagaaacaaggaaacttttcggagctgtcaatcagggcccaatcagctgactgtcagctgggacgggctggcttaacccttcctgcgccgctgcctacccgggagggaacgaggcccggcgcaaagtttggtgtaagaggggaaggagtttttccagaggggcttcggcaatccgggcggacctgggagggcggtttgcttttctttggagcgcgagacaggcctcccatccggagccccagctcgctgggggctcactcggctgggattggcctgattcccctcccctgcctgccctccacccccaggattgtgaattcgcctcccagcttttcctcctcgcaccaactctggtacccaggtgtcttccggggaccttccttccctgagcctggccgtgcccggcgctcaaacttggccccaactctttgtccgtctc

SEQ ID NO: 11943 - DNA, 545 bp, Homo sapiens
  MAP TO CHR14.3; EXPRESSED IN HEART, SIGNAL =  10; EXPRESSED IN HELA, SIGNAL =   2; EXPRESSED IN FETAL LIVER, SIGNAL = 1.6; EXPRESSED IN LUNG, SIGNAL = 1.3; NT HIT: AF031424.1, EVALUE 0.00e+00; SWISSPROT HIT: P17931, EVALUE 1.00e-29; EST_HUMAN HIT: AI440027.1, EVALUE 2.00e-91
ttccagtttgaacccattctgatttatttgctttccattcagaaaaatttcctaggtactgtattatgaaattatttgctttttagaaaattacatgttctttacacagtgcaaatgtacagctttaatcattttaataactggtctttggtttaaaacagaattgctttagatttccaaagagggaatgatgttgccttccactttaacccacgcttcaatgagaacaacaggagagtcattgtttgcaatacaaagctggataataactggggaagggaagaaagacagtcggttttcccatttgaaagtgggaaaccattcaaagtaagttattgctactattatatattgataatgtatatttctcatgaggaatcactctaaaaccccaaagcacttgaagtgagagtttttatcacctctcctaaggtgcctaaccagtttatcttctccctgcccaggggaccaggctcagcaggctgagaacatggccaggagtggcacactccccagttcctttcaggcacctctccatcatcact

SEQ ID NO: 11944 - DNA, 552 bp, Homo sapiens
  MAP TO CHR14.3; EXPRESSED IN HELA, SIGNAL = 1.4; EXPRESSED IN PLACENTA, SIGNAL = 1.4; EXPRESSED IN BONE MARROW, SIGNAL = 1.4; SWISSPROT HIT: Q9Z6K9, EVALUE 7.90e-01; EST_HUMAN HIT: BG720860.1, EVALUE 3.10e+00; NT HIT: M68896.1, EVALUE 2.10e+00
ctgggattggagagctcaaggaagcaatgacaccttggctttgcagttccttgactctctcaacaccatactacactcctacaactcacttgtatagctaacgctcaaactcctcacactgaaagacttcccactcccatgatctcagactttgccttgttgctgtcttgcccctttacttttactggtgaatgagctctccagtcctgtgatccagtgtccattactgactctacctcccagtgccgggacagcagggtctgaagatggactccacacttaacatcagcaccaggaaccaagtcatcaccacagagcccgtggaagtgattatagctacaggtttgctgcaccttccctgtggaagactgatgtgggcaagtgctttcatggtcatggtccttgaatcttgtaccggaaacacccaggtcaatcatgaagggaactgagtcagagtcaggaggtgaaacgtaaggaaatggggctggccagaggcaggcacagtgcacacggctgccagggcctcactcggctttctcctcggtgtgagga

SEQ ID NO: 11945 - DNA, 566 bp, Homo sapiens
  MAP TO CHR18.3; EXPRESSED IN HELA, SIGNAL = 1.5; EXPRESSED IN BONE MARROW, SIGNAL = 1.1; SWISSPROT HIT: P97526, EVALUE 4.00e-14; EST_HUMAN HIT: BE779692.1, EVALUE 4.00e-49; NT HIT: D26141.1, EVALUE 0.00e+00
aaaaccaagagtgcgtttcgtaaaaagaaatatgcaaagaaaataatgaaaatttttttttttagtagtttagcaatgcctattggacttacattggtgatgatttgatggagtgaatttaccagcacatagtgaaatgtagaatgtgaattctgcaccaggaagatctatagaaaaagaaaaaaaagcagattatttctatgagaaaaatactcagtaatacaaatgaagtcaaaaagaacagcaaatagaaagttttttaaaaaacactaagtttttaaggtcttgaaatgaacatcaatacgtaatagtgagaaatgccgatagaggtgaacctgttatccctctagtctttccgtttataaaggataatggcatcagtaaacatagttagataaaaaccaatgccctcaccttaaactgttggttgttgtgagggcttacacgaaggcaagaaacaaggcagtcaatcataagatccacatctgcaggctgactgccccttgagactggcttacttggattaaaaagcaggttctataaaaaccccaacagaaaacaaaagc

SEQ ID NO: 11946 - DNA, 525 bp, Homo sapiens
  MAP TO CHR18.3; EXPRESSED IN HELA, SIGNAL = 0.91; EST_HUMAN HIT: BE783151.1, EVALUE 4.00e-98; NT HIT: gi16178116, EVALUE 3.00e-98
tagcatttgggttttccaggttaattcctatccctaacaggtagtacagactgacccaaattaaacacatgctggttggttgtccatgaaagaaatatggatttaaacagatataaaggatcagatataaaggatgcttgaccttcctgataatattgacaggaaaagctaaagtttttctcatgtttgaccaatatgaaaacatacaatggacactcatctccaaaactataagacaataaacaatatagaacaagcaatactctccccattacaaagaatattagagaaaaaataccacaaaccttgtgtgttcttgaaggacataatggcttgtctgtaggggtttggcgcatctgaggcatctgtcagattggccaacaccagcagaagcaggagactctggttggccagaggggaagaaagctctggagaggcagccgctttgctgcccacaccacctagtgtgaagacagtccagagtcctgctggggaggaaaacaccctgttaggatgtgctgccac

SEQ ID NO: 11947 - DNA, 500 bp, Homo sapiens
  MAP TO CHR14.3; EXPRESSED IN HELA, SIGNAL = 1.6; NT HIT: gi14748497, EVALUE 2.00e-80; SWISSPROT HIT: P30072, EVALUE 1.80e-01; EST_HUMAN HIT: AL600322.1, EVALUE 0.00e+00
tgtaaacttatggctttggatttcaattttatcctttgcctaaagaaatctctttacaaaatctaaactatgaaaactatggtagtttaaaaaacatgcttcaaaacttaattttatttcagacagtgtttaagaatgaaagcctcaacgcagaatcaaaatctggctgcaaacttcaggagcttaaagctaagcagcttataaagaaagacactgccacctattggcccctgaactggcgtagcaagttgtgtacctgccaagactgtatggtaaagtatctgattgtgctcagtgttagcatgttttgtgtactggtgccccaaaataagaacacctggggaaaacattcaatttttgtaccagaggaagaaaggaaaataaaaagaacacctgaacaatatatttatgaaattaatgtttaggagaccctccaaatttttacattaagcaaatttatgacatagtacttacagttggaatgtttgtggaagaaatgg

SEQ ID NO: 11948 - DNA, 553 bp, Homo sapiens
  MAP TO CHR18.3; EXPRESSED IN HELA, SIGNAL = 3.1; EXPRESSED IN FETAL LIVER, SIGNAL = 1.3; NT HIT: gi9630525, EVALUE 1.30e-01; SWISSPROT HIT: P18128, EVALUE 1.80e+00; EST_HUMAN HIT: BE893259.1, EVALUE 7.80e-01
tctgtgcagacagacttgccctgagggacatgggtctccgccatctacacagacctgacacctatcaccagtcccctttcccatatgcctgattttttttttttgcctcttttcatctttacacagacctgtttcctaatgtcagttaacgtcattggccagcgaatggatttctatgccatgatccacgcctgctggctgatcgctgtcttatatagacgcagaaggaaagccatcgcagagatctggcccaagtactgctgcttcctggcatgcatcatcaccttccagtatttcatctgcattggcatcccacctgctccttgccgaggtgagcctgcccttcccttgagccgtctacttttagaagaagccattactgagcggacggctgggagaagagtggtgaagaagagtattgattgtgctgttcgccacttccctccctgcagattacccgtggagattcaagggtgccagcttcaatgacaacatcataaagtggctgtacttcccagatttcattgtgcggcccaaccctgtgtttctcgtc

SEQ ID NO: 11949 - DNA, 516 bp, Homo sapiens
  MAP TO CHR19.3; EXPRESSED IN PLACENTA, SIGNAL = 2.3; EXPRESSED IN HELA, SIGNAL = 2.7; EXPRESSED IN LUNG, SIGNAL = 2.5; EXPRESSED IN FETAL LIVER, SIGNAL = 1.1; NT HIT: gi15302735, EVALUE 8.00e-43; SWISSPROT HIT: P02671, EVALUE 7.00e-03
gtgcaaccatgtccagagtggggtcgccagctgcttcccaggctggggacacagagtgaagtccaggacagaacacaatgcttagtcaagagacctggtcaggcctagagcccttggcaaggccctttccctctggtctcagtgtccctgctgtaaaataggttgactgagttgaccgagccaaggatgtgtgtgctgttggcctgccggccaggccccagggcaggcttcctgggacatcagctgtgtgggctccagggggagaggggaccttgaattccacctctgggcttgagctctagggcctctctctctcccctgttgttggaaggtggctgcatgcagggtcttccaatatggctgtcctggaggtgcccctgctgtcaggcttccgggcagacatcgagagcctggagcaggtgaggcagcgccggtgagcagcggtgggcagggatctctgaacaataggtagggcttaggcacccagggtcaggctggctggcagtccagaccttt

SEQ ID NO: 11950 - DNA, 599 bp, Homo sapiens
  MAP TO CHR16.3; EXPRESSED IN HELA, SIGNAL = 1.1; NT HIT: AF389851.1, EVALUE 9.00e-03; EST_HUMAN HIT: BF364992.1, EVALUE 8.00e-66
tcttggtcctttgcatttccatataaagcttagaatcgccttctaaatttccgtcacgctagcaaacaaacaaaacctgcagggatttcattgagatctaatgtaattggcatctttacaatattcagccttccaatccataaccatggtatttttctcttcataagttagtcaaattgttaatagaagcaatgtcaaatctagaaattattttattataaactctaatttttgttttcttttgaaggccactcaatgacaaaaatagtaacagtgggaattcagctttgaacaatgccacacctaacacaccaagacagaatacatctactcctgtgagaaagccaggacctctgccttctagcctggatgacttaaaggtgacaattgcaactggagcttattcacccctaagtaccacaaacatgtaaatgatttgccagcgttgtctagcagacattaagtagttttcagtagacattcaactttaccaacaatatgataatctttataaaaggtattttctttttacttccactaagttttcttgtaaaacaaccaataactctcatttactgagtgtgtaccttgtgcaggca

SEQ ID NO: 11951 - DNA, 541 bp, Homo sapiens
  MAP TO CHR14.3; EXPRESSED IN HELA, SIGNAL = 1.3; EXPRESSED IN PLACENTA, SIGNAL = 0.92; EXPRESSED IN LUNG, SIGNAL = 1.3; EST_HUMAN HIT: AA469281.1, EVALUE 1.00e-79; SWISSPROT HIT: Q9JHU4, EVALUE 8.00e-20; NT HIT: gi13384735, EVALUE 2.00e-53
aagtggggatgggtagaaggtgtggtatgtgtgcataaagcacacttaccaatccacgccttttcccactggtggacttcagagagcacaccagtggagagtgttggggaggaggatattttatagcagaggttacaggttgtgaaggattggtgattcagtatccaaagatggagaagacagcctaacaagtgatctgtggctgggagaaagtgagaaagtgagattctgagaagagagatatgaaggcttctagtccggaactgtgtatcttttatctgaaacacctaccactttctgattgacttgctttgtgagctaacttttagaagaaacactgttctctgatataacgttgtctgtagattgaaagaatattgggcgtccgtctgcaagctggcctgagagcttggacgcaggttcttcttggacaagctgaagataaagcagaagttgacatggacacagatgctccacaagttagtcacaagcctggtggagagccaaagatcaaagtgagtgcttctgtggcattctattt

SEQ ID NO: 11952 - DNA, 522 bp, Homo sapiens
  MAP TO CHR14.3; EXPRESSED IN PLACENTA, SIGNAL = 1.1; EXPRESSED IN HELA, SIGNAL =   1; NT HIT: J05096.1, EVALUE 2.00e+00; EST_HUMAN HIT: BG778812.1, EVALUE 1.20e-02; SWISSPROT HIT: Q46124, EVALUE 2.10e+00
aattttcctacccacagccctcagactctggtctgatatttgcccgtgagagaagaaattctgaactatgctggcaattagaaaagaaaaccctatgtggtaatttacataattgactatcgcaagtttatagtaataaagaattttcccaattgcaggcaggcctagaatataagtatgtgttgatctctctcctggtatttaaagatgtaggaaaacttgaagatgctcagaatagacttgctatcaaacagctcatcaaagagattggggagcctcgaaattatggtttaacagacgaagaaaaggcagaagaggagcggaaggctgcggaggagcggctggccagggaggctgctgaggaagcagaacgcgagcaccaggaggccgtggagatggcagagaagatagctcgctgggaggagtgggtgagtggtgagtgtgtttgtgagtctgtgtatctgtggaacaggggtgcggtgcctggcaaagccatttaggccagttccacttcccatcctg

SEQ ID NO: 11953 - DNA, 547 bp, Homo sapiens
  MAP TO CHR14.3; EXPRESSED IN HELA, SIGNAL = 1.1; SWISSPROT HIT: P05806, EVALUE 8.80e+00; NT HIT: AB023215.1, EVALUE 5.00e-41; EST_HUMAN HIT: AU131383.1, EVALUE 8.00e-41
aagaactcatggtccaaaatacgttcaacttatttataatcattttaatggtagcatgtaatgttattgagtataattaagccaccatgttacagtttatttttgtttttacagttaactttctagttactgaacttgattctgtttttctttagaacgttatcatttgtcttataagattgtacgaacggacagtcgcctagtacgcagcattctgacagcccatggatttcatgaagtaagtttatttttaatacctcacctgatctgctcataagctgaaaatcccagccacctaactgactttaccagttaacagggccagctccaggaagtacatgggaccaatgcttagtggtggtccagaactcagattgaattttggagtggctttaccagtttctgcttgcaatacatggaaaacgtttccagatgattttagaaaaaaattttttcttgctacgttcttgggcttgggctaggggcaccgttgcccataaggaattgtctgacacccaattaaggttctttgattgcaggcaactga

SEQ ID NO: 11954 - DNA, 570 bp, Homo sapiens
  MAP TO CHR19.3; EXPRESSED IN HELA, SIGNAL =  12; EXPRESSED IN BONE MARROW, SIGNAL =  26; SWISSPROT HIT: P42428, EVALUE 1.10e+00; NT HIT: gi15302322, EVALUE 0.00e+00; EST_HUMAN HIT: BG325197.1, EVALUE 0.00e+00
ttcccacactcccatctctgaactaaccaatctctcctttcctcaggctgcatagagcctggacctgggcactggggtgagctgagccggacaccagtcccatctaaaccccaggacaaagtggaagcagctgaggcaacaccagtggccctggacagtgacacctccggggctgaaaatgcagcagtgagtgctatgctgcacgctgtagccgccagccgcctgcctgtttgcagccagcagcagggtgaacccgacttgacagagcatgagaaagtggccatcctggcccagctgtaccacgagaagccactggtgttcctggagcgcttccgcacaggcctccgtgaggagcatctggcctgctttggccacgtgcgtggcgaccaccgtgcagacttctactgtgctgaggtggcccggcagggcactgcccggccccgcaccctgcgtacccgcctgcgtaaccggcgctatgctgccctgcgagagctgatccaaggtgtgggggccagatgggcgacagtgggcacatatggggagggaggggagactgaggcagagggaatt

SEQ ID NO: 11955 - DNA, 513 bp, Homo sapiens
  MAP TO CHR18.3; EXPRESSED IN HELA, SIGNAL = 1.6; EXPRESSED IN BONE MARROW, SIGNAL = 1.3; SWISSPROT HIT: O43520, EVALUE 6.00e-37; NT HIT: gi5031696, EVALUE 1.00e-115; EST_HUMAN HIT: BG948953.1, EVALUE 0.00e+00
cttctggccactgtcctctcccacgcatgtgtccccagtgctgtccatggtgctcctctggtgcttagctggagaatggccctagcagcaggactctgcatcgagagggcaccagcaatgccaggagacaggctatagtccaagtaatgacctgcacacggcaggcagccccactcacccagaaaatgagtgacggcttccacttaccatatatctgcccgttgatacagcactttttaaaggtcatgatattttgtgtgagtgtccccgtcttatcagagaagatataatggatctgcccgagctgttcattgagtgtggtggttctagcttttgcgggtgtgtccttctcagcatagtacatttgcaggtcccagttgatgaagtgactctgtccaagacgaatcacttccacgctaggaagacagaagattattttccgtagagagctcggatacgagtggcaagtagtagagattttattctcattgtacagacgagagcaagctgctt

SEQ ID NO: 11956 - DNA, 548 bp, Homo sapiens
  MAP TO CHR18.3; EXPRESSED IN HELA, SIGNAL = 1.4; EXPRESSED IN FETAL LIVER, SIGNAL = 1.6; EXPRESSED IN PLACENTA, SIGNAL = 1.5; SWISSPROT HIT: O13433, EVALUE 6.00e-01; NT HIT: gi12545411, EVALUE 8.10e+00; EST_HUMAN HIT: BE966125.2, EVALUE 1.20e-02
cagaggttctggtttctggggcttcttcccaagctgtcatgctaaaaaaaaggcttaagacaatttagcatatattaattattgtatgtgattcattattcaacactgattccacccaggattattgataaggtgtatgtcacacctgtttctctctttcctactcaatggtcacaacacctgcctacacctgggtggcaggtattggcgcctagtgagtcgccgccagattcccagcttcaaatggcatctagcaagcagcccacgacccatcttccaattttccactacaatcctggggagtatgagcactcctattgccaatctccttagctaaacttaaataaacacaactcacatttccctaaaatggcatccaagtggtcagaaccatttgcatatttcttgatgaaacagaagacatacaagccgtgaaaaggatggaattttaattttgataatgggtgacagcttggcttctctcccaatgtggtctagtttacttagattttcctagttaagctaaaagtctttccctccctttggag

SEQ ID NO: 11957 - DNA, 558 bp, Homo sapiens
  MAP TO CHR14.3; EXPRESSED IN HELA, SIGNAL = 3.4; EXPRESSED IN HEART, SIGNAL = 3.7; NT HIT: gi12963662, EVALUE 2.00e-09; EST_HUMAN HIT: BF313805.1, EVALUE 0.00e+00; SWISSPROT HIT: P40081, EVALUE 2.70e-02
tgcacccttcagcattacactgtcagttgtcagtcgctcttcttaccttgaagcagccgcaccgggcaccccaaggctctgcaatcgttttaggacctcaggcacctctgggtacagtcggacgtcttggccccgcctatctcgtacagttccatcactggagagggcaagagtgcgctcagccctggctgggtcctatctcgcccccagtcttccctgtccctacctcacctgctcttatggaacggagggtctacgtgcgtgtcgacccagaaaggccagagagtgtaatctgcgagaggaaggagagggaaggttcagcctggggcgggagatgcagggattcgggagctgctgttagggatgtggaaaaggagagcaccttacgaaattctccccttcccgtccctcacccaaatcaaagactgccagcttcggtagccgcgccatgacccgcaccgcaggctgcgcgcagcagaggtggggcttcacccggggccttagagagtgcggaacctccggcagctaaggcagccaccctgcctgccatagacaaat

SEQ ID NO: 11958 - DNA, 549 bp, Homo sapiens
  MAP TO CHR18.3; EXPRESSED IN HELA, SIGNAL = 0.89; EXPRESSED IN PLACENTA, SIGNAL = 1.2; EXPRESSED IN LUNG, SIGNAL = 1.1; SWISSPROT HIT: P52848, EVALUE 8.90e+00; EST_HUMAN HIT: AI768071.1, EVALUE 7.70e-01
tgggttcgattatgatgtgcagtcaggtacaaactgacagacgaacaactttctcccatctcgcggctgctccttgtttacagtgctttcagactccatggaagtttctctaaaggcacctgtgtggtgtctcataagagtccgggctgccaagcgcctcccgtgtcatttctaacaggtgtggaaggtgaaaggaaggaacatgaaggaaaagataagacacgaagagaaggagccatgtggaaaaacctggagtgcagaagtgttcgtctgaaaggctacgatgaccgtgatgagtaaattattttattcctaccattatacaataaaatactatccagttcttgtgtttataggagaacaaatgactgtttctctatttccattcatcttctatttttaaaataaaaactttatataagcataggatacttaaaaggaccaagatatattttggcttgtgtttacatagggacatgtttgaaaacatagcattttttaattggtaaaataggtaaaaacaactggagaggaagtttcatgcttggc

SEQ ID NO: 11959 - DNA, 537 bp, Homo sapiens
  MAP TO CHR14.3; EXPRESSED IN HELA, SIGNAL = 1.2; EXPRESSED IN FETAL LIVER, SIGNAL =   1; EXPRESSED IN PLACENTA, SIGNAL = 1.1; NT HIT: U20975.1, EVALUE 2.00e-03; EST_HUMAN HIT: AI695908.1, EVALUE 3.00e+00; SWISSPROT HIT: P55017, EVALUE 3.00e-03
ctctgtggggctatctgctcaccttcctcactgctgtaggtttcatccttatcggtgactactccccaccccaccctccacactgggctctattaatcaccattcctctcaggcccttcccagccctacctctggcttctaggagctgatcctaaaacctcttttctatctctcttttcctgaaagtggacgaaaaatgtctcctaaccttgcactgctaggggtggtatgtgtgtgggggtggagtgaggagtaagaagggaatagagagaatggagaaaaccataaaatgatgtcctggacttctagacctgcatcttatgacactagtgtggagactcactcctgacctttcatctcccccaaagccgagctgagtatcattgcccccaccatcgccaacttcctcctctgttcctgtgccctcaactttggctgtctctacgcctcccttacctggttgtctggttagtgtgggcaggtgttcaggtaagctctagggctggaaagacctggggagttgggagagcatccttg

SEQ ID NO: 11960 - DNA, 544 bp, Homo sapiens
  MAP TO CHR18.3; EXPRESSED IN FETAL LIVER, SIGNAL = 2.6; EXPRESSED IN PLACENTA, SIGNAL = 1.6; EXPRESSED IN HELA, SIGNAL = 1.5; SWISSPROT HIT: Q92804, EVALUE 1.00e-06; NT HIT: AF044581.1, EVALUE 8.10e+00; EST_HUMAN HIT: AV706010.1, EVALUE 7.60e-01
gacgcacctcagcttttgaggcctctgcccttggtgtgcttctacatccctgaccttccagccaagccaggcctggctgctctgggatttgtcacctccaggcctttgtttctggggccccccctttcccagtcaccactgaaatcctggctcgagtccccttggatgtcactgcctccatggtcaccgctgaactcctggctcgagtccccttggatgtcactgcctccatgatcacctctgaaatcctgactcaagtccccctggatgtcactgcctccatggtcaccgctgaactcctggctcgagtccccttggatgtcactgcctccatgatcacctctgaaatcctgactcaagtccccttggatgtcactgcctccatggtcaccgctgaaatccaggcttgagtccccttggatgtcactgcctccatggtcactgctgaaatccaggctcgagtccccttgcatgtcactgcctcatggtcacattcggggaccctctgcattagacatctcttcctcctctgaactcccagcac

SEQ ID NO: 11961 - DNA, 592 bp, Homo sapiens
  MAP TO CHR14.3; EXPRESSED IN LUNG, SIGNAL = 1.5; EXPRESSED IN HELA, SIGNAL = 1.2; NT HIT: AF286643.1, EVALUE 8.80e+00; SWISSPROT HIT: P20267, EVALUE 3.90e-01
ctggggttcagtccttcctcagactctgctgttgataccttacatggttccatgctggccccaaggacgtgcccttcgttggtgccgaatgtcatttggtcatagaggctgaaagtcattctggagttgatgtttccaaggtcaaaaaccttgctggggctgtggaaagagctcgttgtttgctggcctgctttgttggtgaccagcattgcacatggctttcttttcagatcaaaccctacctggagaatttccagaagcaacagcaccctcaggaggcggcctgcagccggagccctctccagggcaggtgcctgagggccgcccatgggacaggcccgattgtacccacggtgcatgtcatctgttccactcctgctgactccggtgcgttccgggaccaccttgggaggtgatgcctgccccaggaaggaggctctgatgcaggtcagtgcccatggctcctgaagggaagtcgtctgtgacatcttttctttctttacagcaggcctcgcatggctggcctcttgctccacttgtagcaaggcgcagagggctctctgagctcatgccaacgtcagggaaaggattc

SEQ ID NO: 11962 - DNA, 518 bp, Homo sapiens
  MAP TO CHR14.3; EXPRESSED IN HELA, SIGNAL = 0.98; EST_HUMAN HIT: W20430.1, EVALUE 0.00e+00; SWISSPROT HIT: P52952, EVALUE 5.50e-01; NT HIT: gi14749604, EVALUE 4.00e-91
ggggtctggttcttctagccactaacaaggaatcatcctcccttccaactccattgagacccaaaccctgaccagcacgtgtctaatcacaccgtctgacccagaggctggaagaggggttgtatcaggaggacctgccctgcccagcctcagagggatgtcatgatagccaggcactgagcagtccctctttccacaggctcctctgctgtttaatggctgccgctctggggaaatctttgccattgatctgcgttgtggaaatcaaggcaagggatggaaggccacccgcctgtttcatgattcagcagtgacctctgtgcggatcctccaagatgagcaatacctgatggcttcagacatggctggaaaggtaggggatcatggactttctcaggccacagggtctcgtggcccagtgccctgccaggtgaaagggttctgctgaagaggtcctcacaccaagaccccaggcaggggaatttcgctgaagaccaagtgatttgtaggccctgcat

SEQ ID NO: 11963 - DNA, 533 bp, Homo sapiens
  MAP TO CHR19.3; EXPRESSED IN HELA, SIGNAL =  23; SWISSPROT HIT: P15265, EVALUE 2.00e-01; NT HIT: gi14785880, EVALUE 0.00e+00; EST_HUMAN HIT: AW474819.1, EVALUE 0.00e+00
agggaggtgtcatcgtcaacggggtgtccactctcacctgcaggggcggccccaacgcttgggtactaaaacgatgatactccaggaactcgagagtcaggtgtgctctccctcaaaggaagtgtttattttttggagctcaaagaccccagaaaaaagcaaccccccccgcaaaaaaaacccataacaacaggcagcacatgccccccacaccgcaccccatgcccaatctcagggtgggagacaagaggggggactcattgtccggagggaggctctggagggagacagccctgggtcaacccgactgtgtccccacacccaggacttccccatggcccctccagacctgctccagaggcccttctccggctaccccgtgctctccccgctaaccgtgttgccccatgacccgctcagaactgatgagatcaagggaatgttcaagcgaaaagccgagcaggacggaccttccaagatgtgcctaaaggaccagaagagggactcagggcagactggaggcagcagacact

SEQ ID NO: 11964 - DNA, 514 bp, Homo sapiens
  MAP TO CHR16.3; EXPRESSED IN HELA, SIGNAL = 5.8; SWISSPROT HIT: P22695, EVALUE 1.00e-12; NT HIT: gi14775826, EVALUE 1.00e-47; EST_HUMAN HIT: AA994837.1, EVALUE 4.00e-64
atgaatgccagaagatgaccaaatttgtataggcttgttgctttctaggttttaaaaatgttgtctttactgaaagtgcatttccctaaatgcttcttcacttatctcacagatgtcattgaaaatttgcatgcagcagcttaccggaatgccttggctaatcccttgtattgtcctgactataggattggaaaagtgacatcagaggaggtaccaataaaacatattttgaaatgtgcttgtttttcacattaaattgaacatctcccatttcaggtttgtttgttaatttttccttttatcttctaactttaagaaattcagcgtgctagctttttcatccacctgctttttaactaaaattttatctgaacaatttttgtgtctcctttaagaaatgttttcatgactaaagggacatgatcattacagaaaaattaaaaagtaaaatcaaacaaaatgaagggaaagaaaacatctcacatacctaaaggcactcagtgttaatacctgg

SEQ ID NO: 11965 - DNA, 544 bp, Homo sapiens
  MAP TO CHR19.3; EXPRESSED IN HELA, SIGNAL = 1.4; EXPRESSED IN LUNG, SIGNAL = 1.5; SWISSPROT HIT: Q9DBS5, EVALUE 8.00e-11; NT HIT: AF166267.1, EVALUE 1.00e-35; EST_HUMAN HIT: AA613202.1, EVALUE 0.00e+00
tcgtggagtagctagtgggggcgtctgtggaagttctggtgggtctgggggctctgtggagggttgggggactgtggcattctaaggagggtctgggggactgtgggattctaaggaggatcttggggactgtgggattctaaggagggtctgggggactgtggggctctatgaagggcccagcaccccccgcctcgccctgcccgtggcacctggctctccgccggtgggtcgtactgtcgcagctgccccaggaactccaggtggcgcttctcctcctccagctgggccacggactcctcgctggcccgaagccgccgctgcgtctcctccagttcctcccgcagccacacgttctcctgggccagccgccgggcctgcgagcgcagccgctgcttctctgcctccagtgcacccacatgtgccgacagggccagcagcacctgcccggggtgggggtcccaagtcgaggttggttcctgccctgccagacggcccctgacccagcccaggcctcgagtcaggccgtagcaccccactacta

SEQ ID NO: 11966 - DNA, 583 bp, Homo sapiens
  MAP TO CHR14.3; EXPRESSED IN HELA, SIGNAL = 1.5; NT HIT: gi14784173, EVALUE 0.00e+00; SWISSPROT HIT: P08567, EVALUE 1.00e-04; EST_HUMAN HIT: AI632698.1, EVALUE 0.00e+00
ttgtcagcttttactaattccaaagaagttaagagagaacctcataagaagagagttttattcaacattatggcatggccagtgtaattgttccaacaaagggaacctactttggtgcccgaggaaatggctgtttgtgatgctggggaaaagtcaagatgctgacgcctaatggctgttctagcctttccaggtttgtaacatgaagatggggaaggaaatggcaccactgctgtttgtaatctgaggaactcttggcagcattcactctccaaagcagtacaaaacttacaaagaagtcaaaagtcttaacactcccattctccaggaactcttgtctgtgtcatctggtaggagggaggaatcctggttccctcaggtccttgtcatgttagctttttgatagcttcaatccactcggctcgctcagccttgctgctggcctgaatgtaatagtgtgtgtcatccttagtaatcactttgaagaggtttccctggacattccctttaacccctaggcagaaaaaagggggaaaaaaatcagtgattgaatagccatgtctgctttcatcttgaaccagca

SEQ ID NO: 11967 - DNA, 583 bp, Homo sapiens
  MAP TO CHR14.3; EXPRESSED IN HELA, SIGNAL = 2.5; SWISSPROT HIT: P40809, EVALUE 3.30e-02; EST_HUMAN HIT: U82984.1, EVALUE 2.00e-91; NT HIT: gi16185406, EVALUE 1.00e-91
tgagggtggaatggaatctctgtgacaggggactagatgaaggactcttgagaagctgatgttcaggaatggtcacaggtcccagtaaactcactttaatatctgatgtctgtggtgttgaaaaggtgtttggggtcaatgttttcttgctccaccatcatgaactgactccagtacaccaggggcagggaaagcaggcgcttgatcaccttgagttgacacttgatgtcctgtaacattgtcactgggtctggactgggcacagcatgggccactactgtagggccaaagactttaaccagattggcaacatccattttagtatgtgaaatctgagccacactctgcaccaacctaggacaacaaggcaactcttttgcttctccaatgctcaagtgaagtcacatctgcctattacttcccagcattgactgactataagaaagaacatacctgtactctctgctctgcagcctcctgtactcattactacttttagcgttctccaggcttttaatcaactttaattgtgcatgagggttttaataaaactacatatatctccccttccttctccttgagt

SEQ ID NO: 11968 - DNA, 554 bp, Homo sapiens
  MAP TO CHR14.3; EXPRESSED IN HELA, SIGNAL = 0.89; SWISSPROT HIT: P40276, EVALUE 5.30e+00; EST_HUMAN HIT: AW752500.1, EVALUE 2.00e-01; NT HIT: gi11466624, EVALUE 8.20e+00
caaggccttcccaaactaatcaaatcaattggcttcctacttttttgtgctgttttcatttgtgagatagtaggccaggtaaatcttgaaatctaaagtattctgtttgtaagcatcatccacactagaagagacaaacttttctgtacactgtcaggatacattcttttcttagagcaaatacatacttcttcataagtgttttatgctacttcaagtaagacatgtccttcgtgttccttggtactataaacatacctacaaaaacagtgaatgaattatctttttaaaaaatattgaatgctccagtattttttctatttattctttcaaataattcaggttaaaaatccacctttttttttaatctgccttatattgtgctgcaattcttagctttagagactgcatattggtaccaactttatgaaagtataagtttatatctcactcttagcagtttagacttgatacaattttatataagagtttaaaacttaaaggcttatagttaaaataacctgtggcacataaggcaaatactgagccccata

SEQ ID NO: 11969 - DNA, 593 bp, Homo sapiens
  MAP TO CHR19.3; EXPRESSED IN FETAL LIVER, SIGNAL = 2.8; EXPRESSED IN HELA, SIGNAL = 3.2; SWISSPROT HIT: P98187, EVALUE 5.00e-48; EST_HUMAN HIT: BG742486.1, EVALUE 0.00e+00; NT HIT: AF133298.1, EVALUE 0.00e+00
tcctgtttgttcttcccaggaagctttctatgcaatcacctctaaaatttatctgacttgtccctcccttcttcgagcaccttccatggctccttagtgccctctgtatcaagtccggtccttcaatctgacatttgacctgaagctccattttacctcttgaattcagatcccagagaggcccacctcgctcagcaggagcacatcaataaagtccaaagtcttggacttggccttggcttggaggaagtcatcaacaccctggctagtgagggtgcggcgccgctcctggatgacggcatctgtgaagtcgtgcaccagtctgcaggccctgtggaagcgccgtccacagggagtgaggaagtacaggaagtccttgtaccggaagaactggttattccgtttcactacaagggcactgagctccatgatcgcagtaatatattcactgggcttcctgcagggccagtccagagagaggaagcagctccttacccacatgaaagcctgggagcaccttccagccagaatcccaggaccacattccatgcagaaaggggtgtcctgcaagcgcacttcactctctgcctccc

SEQ ID NO: 11970 - DNA, 553 bp, Homo sapiens
  MAP TO CHR14.3; EXPRESSED IN HELA, SIGNAL = 1.5; EST_HUMAN HIT: AU129896.1, EVALUE 0.00e+00; NT HIT: gi14753315, EVALUE 0.00e+00; SWISSPROT HIT: P57189, EVALUE 6.80e+00
agttctctggtcgtgcttgccaaaatggtaagatttagacatggaagtaattaaccaaattccaccttggaattctctctataatatagttctattaagaaacattttcattttcattgctgctagtgaacacaacaaaattatctacatttaaagattacacggattcaaaaggaagtatataatccaagacaaaaagagtaacaaaaacagcaaaaaagctcaagtaatttccattttacttcaagtcataaaagactgaaaaaaatctacctctgtgataaacaatgaaaagctgttctccatgtcctgccattgacaccacaggtccagcaaggctgaatacctctttttgaacccctccaatagtaaacaatcgaagaagcagggcactagtagcggcagcagcccatccttgaccgagacatatggcttcaatatcctcattctgaggcaagtctattatccactctttgcttgaatcccaagaactaaagtgcaggcagtgaagcttgctaaaaattaaaacaagacagaaacaatcaaactttca

SEQ ID NO: 11971 - DNA, 504 bp, Homo sapiens
  MAP TO CHR19.3; EXPRESSED IN HELA, SIGNAL = 6.2; SWISSPROT HIT: Q15102, EVALUE 1.00e-45; EST_HUMAN HIT: AI360144.1, EVALUE 0.00e+00; NT HIT: gi14756113, EVALUE 0.00e+00
tgcccatccctagtgttttctgcagctggaaacttcatggtggtgggtggaggacaggttggcacagagaacaagatactcaaatgcttgtttccttactacgcctcgtgttcctgctcagggcctgcttccgcgaggccaacatcccaacccacttcgggagaagaaccgacaggtgaacgagctggtacgggcggcactggctggccaccctcgggcccacttcctagatgccgaccctggctttgtgcactcagatggcaccatcagccatcatgacatgtatgattacctgcatctgagccgcctgggctacacacctgtttgccgggctctgcactccctgcttctgcgtctgctggcccaagaccagggccaaggtgctcccctgctggagcccgcaccctaagcatcctgctgccttcccacaacattaaactctccttcctcagtgtgctgtttcctgctttatggtcgaacctgtctgggtatctgggtaccacc

SEQ ID NO: 11972 - DNA, 556 bp, Homo sapiens
  MAP TO CHR14.3; EXPRESSED IN HELA, SIGNAL = 5.5; EXPRESSED IN FETAL LIVER, SIGNAL = 2.3; EXPRESSED IN BONE MARROW, SIGNAL = 2.4; EST_HUMAN HIT: BI767234.1, EVALUE 2.00e-97; SWISSPROT HIT: P17520, EVALUE 3.10e+00; NT HIT: U89432.1, EVALUE 2.00e-13
tctcaattgtcaggaagggccacaggcaggtaaagaatccaaagcagctttgtaacttttacgggtgaggacatgaaggcatgaggaaagggagtcaaagataacgagggcccacatctcaccacatcttcagtgctgaggtagggagccatggtggtcagagtgcgcagggagtagaagagcagcccaggagagcccacctcaccaagagtctcattcagaagccgaagaagctcccggtggtggggttggaaggcctcgggccgggaggtcaccaccacacttagcagcaaaagccccatctgtccaagaatagaggatgggagagcaagcttacaaggtctatccagcctctcaggccctccctcctgccaaccatgtgatggtacctctctctctgggctgtgggggctgtgggtactgtgctgaagcagctgcaaaagctgtggccaggcctccaagccttcctttcgaaaaatggtggctgagagctgggccaggctgaggctcacacagtgcctgcaaacaggagagatctcctccaatcacccttcaa

SEQ ID NO: 11973 - DNA, 501 bp, Homo sapiens
  MAP TO CHR16.3; EXPRESSED IN HELA, SIGNAL = 2.2; EXPRESSED IN LUNG, SIGNAL = 1.8; EXPRESSED IN FETAL LIVER, SIGNAL = 2.4; EXPRESSED IN BONE MARROW, SIGNAL = 3.2; SWISSPROT HIT: Q05531, EVALUE 3.50e+00
ctggcctctcaccttctcactgggattgggcatttctgtggctataggacaggaacccagctggctgaatgctgcctttgatgcgagccagaactgccttcgtgctgggggaaggcaggccggatgcaggctctgaggccacgcgcttggggccccactgggcactgtggccctgtaggctcctgaaggacaagggtggaggaagcagggccgggagtttagcaaaatgtattgttcttttcactacctgcagccctgcctccgtcaaaggcccatatggtctctgtcctggaccatcacacccttccctcctccattcaatcctctgagcatccccagggctgttgtcctgaagcccacctctgatcttgacccacttctaatcttgaagctccagaagcccatcagtgcccccaccccaaatctttccttgcacacaagattaagtaaaaaatttctgatcatggttatgaagagctctcccagtgcaactccaaactt

SEQ ID NO: 11974 - DNA, 585 bp, Homo sapiens
  MAP TO CHR14.3; EXPRESSED IN HELA, SIGNAL = 2.3; EXPRESSED IN LUNG, SIGNAL = 1.4; EXPRESSED IN BONE MARROW, SIGNAL = 0.9; SWISSPROT HIT: P48037, EVALUE 5.70e+00; EST_HUMAN HIT: BG706149.1, EVALUE 0.00e+00; NT HIT: gi16162508, EVALUE 0.00e+00
tgttcgtgtcccaagaaaatctagaaaagaacatctttttaattgacatgtcaataaatataaactactatattatttataatgttaagctacctgaagcatgcctcccctgattctgtggcattctttggaagagatcatggttgtattcataatatctgtagtcttcatgtgcacgatctccaagtggccgctttctctgaccatcaaaaaaattgtctgaataataatatcgggaaccagagtctccattttcaacagcaaaactaacttccgttacaaatgactgagaagaaccatactctctagggacatctgctagacttctggcaagataagaaggtgcagataatctgttgctttctcttctcattatttcatgaggtgttctttgaattggagttctaaggaaactctggtttcttgaaactacatctccagaagttgaaaaggcattagggcttgaatctggaagacagatatcagttcgtcttggaattgttggaccatgccggatgaatgaaggcataagatctacaataaaacaaaggataaaattaccctttcatcattaagtaacaaaag

SEQ ID NO: 11975 - DNA, 522 bp, Homo sapiens
  MAP TO CHR16.3; EXPRESSED IN FETAL LIVER, SIGNAL = 6.9; EXPRESSED IN LUNG, SIGNAL = 2.9; EXPRESSED IN HELA, SIGNAL = 3.3; EST_HUMAN HIT: BE157160.1, EVALUE 0.00e+00; NT HIT: AL161541.2, EVALUE 5.00e-01
ctgacttaggagccattccgatcatttctaattcaatagatgcgcccagcattcagattgccttttctctcaaccaggatctttaaagtcgatgacaagagttccagtcctgaatcatggcaaagtgcagtagtgaactgcggggttaatgacaccatattctggaaggatctctctatggctgatggtctcagttccggcatcagcctctgactgagaagcaggtctcacacaggaagagtcagatgaggagcaatcctctgcttccgatggagttagttgtgatgagttggtgaggtctggtttttcacactgaactaaaatgatctttcgctgtgtcaagcacaagactgaccccagagacacacatagtgcacctcatagaagcttttaatagtctttatatttactaaagaataggactaactatggaactatgaagatgagctggaaatgacaggtgacttgccagcaggccagagtgtgattttttttggtccctcaatgggaggtgtccattct

SEQ ID NO: 11976 - DNA, 545 bp, Homo sapiens
  MAP TO CHR14.3; EXPRESSED IN FETAL LIVER, SIGNAL = 1.4; EXPRESSED IN BONE MARROW, SIGNAL = 0.82; EXPRESSED IN HELA, SIGNAL = 0.87; EST_HUMAN HIT: BG701248.1, EVALUE 7.00e-66; NT HIT: AF391809.2, EVALUE 5.00e-04
cagtgcatgaccgtatttgactattttctggttgcatattagtcctgaaatgtcaagtaccaaataatttacttctcagatcttcatctcctacattcataaggctattctaaatggctaaagtctgcctaaactcagacctacagataaaatgaaggttattactggaaaattttattttatttgtgtggcacccatttcctagggtagtaacaacctttgacacagaaaaaaaatgttcccccactcatgttatatagcactattacaaaatgattaataagaaattttccttcaccatatcccacaaatttaacttaccctatcatagagctcaatgattaaatggtaagcagcttcatcacttccaaattgaaaatctacaattctatccacaccaagctgttttgcactgactaatctccgactcttcaaatgttttcggcactagcaagagaaagaaaaaggcattcatttagtaaaagtgaattcctaaccatttggtattggtttataaataagcttcttttcattatcatcaggaa

SEQ ID NO: 11977 - DNA, 548 bp, Homo sapiens
  MAP TO CHR18.3; EXPRESSED IN HELA, SIGNAL = 1.3; NT HIT: gi13645276, EVALUE 1.00e-100; EST_HUMAN HIT: BE000097.1, EVALUE 2.00e-72; SWISSPROT HIT: Q02487, EVALUE 1.00e-29
ggaaaagtctggcactgtcccaggggcatcaaagctgtgctagtttttgaaccatttaaagatattggttaccaaatagatattgtattatatggactttttaaaaaaaaaaatacctaaacaaaagattatcaaaaactaatatattctttccattgtatatgaagaacagagcatttgcatttacttatatacctattttattctacatttatcagaattcctttctttccattaaattctagcatgctattctatgatattataaactacaaataatgttctaatttattcttaccttaactacacaaagaactccttcattggttttggcatctgttacaattttaaaattgccattttcattgccctttaaaatggtataattagctctccagttagcagtattcactaagtccttatcctcaacagtaactcgtaagatttccacatcaactgtattttcttccactgatgtcacatactaaaataataaaagcaaacaaaaaatttcgttagtaactctcacaaaaattgaacacgatgtg

SEQ ID NO: 11978 - DNA, 510 bp, Homo sapiens
  MAP TO CHR18.3; EXPRESSED IN HELA, SIGNAL = 0.9; EXPRESSED IN BONE MARROW, SIGNAL = 1.1; EXPRESSED IN FETAL LIVER, SIGNAL = 0.92; SWISSPROT HIT: P13590, EVALUE 1.20e+00
tttgatccagctgcattttgaagtccatgtcctgctatccctactttagttagcactatgatgttctggagccataaatactgtaactgtgatgcttagaacagtttcaatcatcaaaattattctccttgggagggtgtgttaatccccacatgctcaggctccactttgctcttttccttccctggaatcgaatctgccctcttccccacatgtacccctccaaaaagacttgggaaccttatcacttccttcctgggttgctccactgttttcttgctgttcaggctcagctctgcagttcctgcagactccatgctcctccctttctttgggccactcagtccttcctctgacccactggtgagccaacctttcttcttttctttggcctctcttccatcaacaactggaaaaaggggtagctcgtatcctcataaccccctctgctcattcttctagcccttctttgcctctgggtgctcacatacacacattctggccaagaaa

SEQ ID NO: 11979 - DNA, 528 bp, Homo sapiens
  MAP TO CHR16.3; EXPRESSED IN HELA, SIGNAL = 2.9; EXPRESSED IN LUNG, SIGNAL = 2.1; NT HIT: gi16164702, EVALUE 0.00e+00; EST_HUMAN HIT: BG057679.1, EVALUE 0.00e+00; SWISSPROT HIT: Q00653, EVALUE 3.70e+00
tcctactgacagccatcgtgcaggtgctcagctgcttctctctctatgtctggtccttctggcttctggtatgtgggctgggggcgctcccaagaaggggcatctaaccctccccatcttttattccctgcatcttgcttcaagttaccgtttctcttgtaggctccaggccgggccctttacctcctgtgggtgaatgtgctgggcccctggttcactgcagacagtggcaccccagcaccagagcacaatgagaaacggcagcgccgacaggagcggcggcagatgaagcggttatagccattgacattgtggccacaggccactggccctgggtggctctgtcagggtgcacagcccctcatgcctggagcaatgagggtctagtccaggggccaaaagcagtctgaggtattgggtatacttatactctatagggtcgttgaataaatggcttagaatgtggctgatggctgtgtgggtgatgagggatgaggcaggaaaagctggtcctatgggatttccctc

SEQ ID NO: 11980 - DNA, 578 bp, Homo sapiens
  MAP TO CHR18.3; EXPRESSED IN HELA, SIGNAL = 1.5; SWISSPROT HIT: P54270, EVALUE 2.50e+00; NT HIT: AF271796.1, EVALUE 5.50e-01
cgctcttgcttagtgctgtgtgagctctagatgattctgccttcaatacatccagtcttaattgaagattgccggcagctggcttacacggttaaccgcgcacctttgtgaaggctcttggctaagagccatgtgcatctctgcttttgagtgcagttgagaatgcacgtggaaaagctgtggatatttaacaatggagcatattctgtaatgcatggggcttagtagaatcaggggacatttaatactggtgtacttacaattacagggtggtatttttgtcattttttaaagtgtcttgataaaatcctgtatattgtaaacattcactttgaaaagtcatcatactgagccaaaatgaaaagctctgtcttggccacccaggctgtctagggaactgcctcaggaagcaagactgatcctgtttctgtgtttcaggtgcaggatgaggggaccaaagaagaggacaaagccctggcttgtagccccatccaaataacagcggggaggaggcggagcctgtggtacgcaacccattaccccactgatgagagaaaagtaagccatgatgaaaggga

SEQ ID NO: 11981 - DNA, 500 bp, Homo sapiens
  MAP TO CHR14.3; EXPRESSED IN HELA, SIGNAL =   1; NT HIT: gi14249513, EVALUE 3.00e-45; EST_HUMAN HIT: BG774335.1, EVALUE 7.00e-75; SWISSPROT HIT: P24127, EVALUE 1.40e-01
ctgtgactggagcccttttccacagccttgctgcatcttctccttagcacctgttccacctgccaggaagtagctagtttccatgtctctgtgctccagtttatgggctcctcccaggtctgaccatcagcagcctcctcctcatcttcctttatacataagtcctcaggaaaaggtatgctggcctctggttctgaagccaccatacccttatctggcttgctatcttgtagcagcttcacggttcgtagctgcatgttcagaagctcttacggctccagccagagtagtcacacactcaaaaagggggtccagcggggccaccagattgtccaggtgctgctctgcctggatcagctgttgctccaactgcaatgggtgcttcttgcctgactcctcttggagaactgcagcttcatctttcccctgttgtggaagaaaaaaggggcaatactgcagcaaaattgttctgctccatcacctcagtctccaaagccagt

SEQ ID NO: 11982 - DNA, 553 bp, Homo sapiens
  MAP TO CHR14.3; EXPRESSED IN BONE MARROW, SIGNAL = 1.7; EXPRESSED IN FETAL LIVER, SIGNAL = 3.7; EXPRESSED IN HELA, SIGNAL = 6.1; EXPRESSED IN LUNG, SIGNAL = 2.9; NT HIT: gi7705432, EVALUE 0.00e+00; EST_HUMAN HIT: BG755311.1, EVALUE 0.00e+00; SWISSPROT HIT: P31996, EVALUE 5.20e+00
ggggaccttccttggagtagaggtttgaatcctattataacaattgcaatctcttcaactatattcttaatgttgatggtcctccttcccttgaactacccaaccaggggctctaggatatcattgatgagttcatctaccagtttcagtcattcagtcagtactgctgtaagactgctaagaagtcggaggaggagattgacttcctttgttccaatcccaaaatctggaatgttcacagtgtcctcaatgtccttcattcctgggtagacaaatccaacatcaaccgacagttggaggtatacacaagcgaggtgaccctgagagtgtggctggggagatgcttggttacttcagccttgtggggtttctctgcctgcaatccctgttaggagattagtaccaggccatcaaggtgctagagaacatcgagctgaaccagaagatcatgtattcctgtgtgttagagtgccaggtcaccacatactattatcttgggtttgcgtatttgatgatgcattgctaccaggacgccatccaggtcttcaccaat

SEQ ID NO: 11983 - DNA, 565 bp, Homo sapiens
  MAP TO CHR19.3; EXPRESSED IN HELA, SIGNAL = 1.3; EXPRESSED IN LUNG, SIGNAL = 1.4; EST_HUMAN HIT: AL138162.1, EVALUE 0.00e+00; SWISSPROT HIT: O00061, EVALUE 3.10e+00
cgtttctgctgctgtgtttcagatgggtctgtgaagaaatcccggatctcaagctcgctatggagaattacgttttaattgactatgacaccaaaaggtaagcagagtcctgtccagccgctccgctccgaggacagactcggctcttggggaggacaggaggacgcatcctataattagctcttcttagatggtgcaagctgatctgaaatttccttttagagttggccgtggccaccataaagttattttggtaggaaatgtttatcaactcttggcaaaggctgtcagaggccggacagaattggaaactccggttgtggaaagtgggattggcatgtgtggagtcagcccgcgctagtgatcgctctttttatagcgggcggctgacggccagaagtccgcgttcctgcctgaggctgctgggagggcctgggcggccttaggctgcttggcagctctgtttagatctcagctgggtttggttagtccctctgtctccagccctgtggctgcgttagcaatttcgccctggcagctcctgggtctcggaggagggtcttgt

SEQ ID NO: 11984 - DNA, 536 bp, Homo sapiens
  MAP TO CHR16.3; EXPRESSED IN HELA, SIGNAL = 0.99; EST_HUMAN HIT: BG029462.1, EVALUE 1.90e-01; SWISSPROT HIT: Q9WTI7, EVALUE 3.80e+00; NT HIT: AF217490.1, EVALUE 0.00e+00
atcactttgctcccgatgactgcataagcgcagcctcttcatgaaagtttctttgaccatggttatgcctcatactttgttgtgtccttcagtttacatgaaaagaaggaatatggatctgaactgggtgccagtgccatttaaatgaggcatttaggaatggggagaggagagaggtggattcttccttattttctgctggcccagtgccttccgctttaacaagcccagtcaaccatcatttgtaatctttgggtcttgagtcatctcacttgtatttgatcattgatgtgttttaaggagctcggttcagtggcatcagagagttcgttttctccttcttccataaggtccctaatcagaggaacgggatgggaaagctttagagatgagtctgtgactatggaatttggtgaggggtgatataaccatcctgccatttgttgtagactcgaatggatgaggagtcattgatagaaaatagtggaaactgttattctgtggcctgatcccattgcttagggactctgtgccag

SEQ ID NO: 11985 - DNA, 552 bp, Homo sapiens
  MAP TO CHR18.3; EXPRESSED IN HELA, SIGNAL = 0.87; EXPRESSED IN FETAL LIVER, SIGNAL = 0.96; NT HIT: X75613.1, EVALUE 1.30e-01; EST_HUMAN HIT: AL581979.1, EVALUE 3.10e+00; SWISSPROT HIT: Q61079, EVALUE 2.70e-01
gcagaatttctctctcacactgcatatctctattttcacttaccgtgtcactccttcctagtttatcgctgatgtcttccatagagtcaccttcctgtctgtctctgagaaagataatgcaggcttccattcttccacatgggcttttcccaaatatattcaccaacttagtcaacagactagttgtgggtaacacagagtatctctgtaggttatctccaggtgaatgcttagtgttggagtctgagaggagaagaagcaaattcacttgaaagttgacatctcataccaaatacccccataaaaatttacccactccacaagcacatttttttcacacatcacattcaattctcatatttccttagattaaaatcttatagtgcatttttatattgcttaattacttttggtggttataaagttttaatgtatatttataacattttatgtcaaatttataacactgtaagtactttaactatttcaatatcctctctataaaaccattgtcatcaaatcagataaatgccccaaaagctgaggtgagac

SEQ ID NO: 11986 - DNA, 553 bp, Homo sapiens
  MAP TO CHR16.3; EXPRESSED IN HELA, SIGNAL =  11; EXPRESSED IN FETAL LIVER, SIGNAL = 1.5; SWISSPROT HIT: P53350, EVALUE 1.00e-23; NT HIT: gi14785411, EVALUE 4.00e-91; EST_HUMAN HIT: BI554289.1, EVALUE 0.00e+00
ctccaaattccagcctcttgtagtgatgtcaagcacccctgcaggctcagcaactcacctattttcacctccagatcttcattcaggaaaaggttgcccagcttgaggtctcgatgaataactcggtttcggtgcaggtactggcagccaagcacaatttgccgtaggtagtatcgggcctcaggctcagtcagggctttcctcctcttgtgcagctccaggagagactgtgggtgggaaggagagggcaggagggatggggaggtggattgaggccggtggggaagggagagggttaccaggcaaaggaagcacaggactggactctggactcccaagggatgaaagaggggtcttggtgggtttctctccttccctatgcccccaccccattccttctccagcacagcggcatctggaccctgccttaacactgtccacaaccattcgcagcaccccttctcctactagcttccccccttacctgggggtcctctctcagccccactccggaagctccgagtccccagcaccagatccctttcctgactcg

SEQ ID NO: 11987 - DNA, 547 bp, Homo sapiens
  MAP TO CHR16.3; EXPRESSED IN HELA, SIGNAL = 1.3; EXPRESSED IN FETAL LIVER, SIGNAL = 1.2; EXPRESSED IN LUNG, SIGNAL = 1.3; EXPRESSED IN BONE MARROW, SIGNAL = 0.82; NT HIT: AL161573.2, EVALUE 2.10e+00; EST_HUMAN HIT: AI373498.1, EVALUE 0.00e+00
aagggaaacatgcaagaagccagggaaatgtaaaggaggtgattttctttttttgagtgggagcaaaaaagaaaagggagcaaaaaatcacacagagggtgtgtatttaactaactttgtattttgccacacattgttttcatttacagctatgtctgacaaatgagcacgtttgacatcactgataaatgcaacaccgtctagggcctacgagaaaaccagggggctcggctccgctggagcctctgcccgtggatttgtttagggaaggggagtcgaatatctatttttcttcttagtaaaattatctgccagagaaacaacgaagcatgaaaaagtactatttagaatgtgcatgcctatatatgattttaaaatgctaattgttgcattccgggaaactttccattatatatatgcatatatatgtatctttgtaatttcagtgaatttttaaaactagtatggcaggttgaaagcaatgcacctgtttacttgcacacaccataaatcgaaaagcaggagtgcgctttcctacgggtctcta

SEQ ID NO: 11988 - DNA, 576 bp, Homo sapiens
  MAP TO CHR16.3; EXPRESSED IN HELA, SIGNAL = 2.8; EXPRESSED IN LUNG, SIGNAL = 1.6; EST_HUMAN HIT: AL556807.1, EVALUE 1.00e-82; NT HIT: AF282903.1, EVALUE 0.00e+00; SWISSPROT HIT: O75351, EVALUE 2.00e-24
gagcacttcacctctcccaggtcccttccaccttcacttgtctttgttgggactgtgtcccagccgataagctagcgacacactgctcttgggtaccctccctgaaaaccaaaccactcctctgagaggtgactccacagggtgggccgctgggtcactagcagtgccggggctgctggcagagcatggcctggtggccgacttacttttcactctcccccagccacttggacatcagatctgaggaggacacagagaagaaggtggagttgttggcctctgttgccacggctttggccaggtaggatttccctgtgccagggggtccgaacagcagaatcccccgccagggggtgcgcttgcctgcaacagagaaccacagaagttaggcctcctgactggggaaaggaataggaaaagcagagggtctcgagtcccatacatacagtaaaacagggcattctgtgaaacaacggactctactggcaaacaagtgatgggagctacattccctgctgtgccctgtgctatgaccccatgaccttgcacagtgcccctgctatgaccccatgacct

SEQ ID NO: 11989 - DNA, 566 bp, Homo sapiens
  MAP TO CHR19.3; EXPRESSED IN LUNG, SIGNAL = 1.2; EXPRESSED IN FETAL LIVER, SIGNAL = 8.2; EXPRESSED IN HELA, SIGNAL = 1.5; EST_HUMAN HIT: BF343002.1, EVALUE 0.00e+00; NT HIT: X59288.1, EVALUE 0.00e+00; SWISSPROT HIT: P05362, EVALUE 3.00e-68
aggttgaaccccacagtcacctatggcaacgactccttctcggccaaggcctcagtcagtgtgaccgcagaggacgagggcacccagcggctgacgtgtgcagtaatactggggaaccagagccaggagacactgcagacagtgaccatctacagtaagaaggggcaggggcggagtggggcttcttgggggtgtgacctgaacccggggcggggctcactgtgtgcctattccaggctttccggcgcccaacgtgattctgacgaagccagaggtctcagaagggaccgaggtgacagtgaagtgtgaggcccaccctagagccaaggtgacgctgaatggggttccagcccagccactgggcccgagggcccagctcctgctgaaggccaccccagaggacaacgggcgcagcttctcctgctctgcaaccctggaggtggccggccagcttatacacaagaaccagacccgggagcttcgtgtcctgtgtgagtggggctgctggtcaatggcccctatcccccaaggcccaatctccctgaaggtcccataaggtcttgcct

SEQ ID NO: 11990 - DNA, 524 bp, Homo sapiens
  MAP TO CHR16.3; EXPRESSED IN HELA, SIGNAL = 0.96; SWISSPROT HIT: P05359, EVALUE 2.80e+00
ctgggatcctcagagattggaaggagtgatggggacccttcaggaaaatgtcaccgaccgttgactctcagctcagctcgaagctgctgatgagggggtaggcttggttgctgtcacagtgatgtgagctcaggcagttggggttggggaagagggaccagccaggagacaaagcatctgagttcagcacccgggtcctcctctgattcaccctctgacctcagcaaagcccttcactctcttccttcaactcatttttcaggctgcaaatggactgagctgcgtgaagcggtaaaaaacaaacctgcttgcatggaaggaatgttcctagccatttgaggctgaatatagggtgggtataaatagggaccagactcccatagacagaaggaagctggcatgcccgggctgccatggagcattgatgggtcatggtggcaacgttggaatatcagagacgctggaatatcacactggaatatttcgaggtcaaaacaacagacacatcaaggcagggtcagaat

SEQ ID NO: 11991 - DNA, 525 bp, Homo sapiens
  MAP TO CHR16.3; EXPRESSED IN HELA, SIGNAL =  11; EST_HUMAN HIT: AU121805.1, EVALUE 0.00e+00; NT HIT: gi15319042, EVALUE 1.00e-106
  unsure 225
tatggctctgttggagtccccatagtgtggaaatgagtttgccctggaaagggaaagaacagcttcttgacctcaggtttctcaccttctcctctcctcactctcaccaagggctgaggtccatttgtatgcacacaaagaaaagagtttcttcctttcgaggaaataaaattggcctgaaagacgtcattactctacggaggcatgtggaaacaaaagttaganctaaaatccgtaagaggaaggtgacaacgaaaatcaaccgtcatgacaaaatcaatggaaagaggaagaccgccagaaaacagtaagatgtgccttgacacaaatactgttgtatgaaccatgtgccaatcaaagtagacaactgtaaagtccttgagaatattttctacaatatttgtggcaaattcagtgggctcaaaattgagtttgtcctttctgcttcattagtttaagctgtataattcctttcccttcctacattcttgtttgtaattttttcgggggaagaggagttgctag

SEQ ID NO: 11992 - DNA, 505 bp, Homo sapiens
  MAP TO CHR14.3; EXPRESSED IN HELA, SIGNAL =  10; SWISSPROT HIT: P07900, EVALUE 2.00e-20; EST_HUMAN HIT: AW162491.1, EVALUE 0.00e+00; NT HIT: M30626.1, EVALUE 0.00e+00
cacgttccttctccaccttcaaaagaaaacacgaaatcacatcactgctgcactccagaactaagcgacagcgctgcaccactattttcaacctaaggcccaagtctaaattagccaacttgagaagcacccagcttttcatcaatatttgatacatccacttaatagcccgaggaacttttacagagttaggtagtagagcttaggttccccaggcttcagactagttgaacagatctagggactaaggatgtagtacagtcaccccaatcacctacagacagaaattcactctgcaattacataaaaacttacaaaaagagtaatgggatatccaataaactgagaatgtttcttcacaatctcctttattcttcgttcctccaagtactcagtttggtcttctttcaggtgtaggataacttttgttccacgacccataggttcacctgcaagagaagaaagaaaaattgacttaatacattcaatttagtgctcaacgcca

SEQ ID NO: 11993 - DNA, 598 bp, Homo sapiens
  MAP TO CHR18.3; EXPRESSED IN HELA, SIGNAL = 1.2
gatttgccagcttcaaggagtaaaagaacagaaagatctttagataaataacaaggaaaacatagcacccaacagacctcaagtttaccttctgaacagcaaggggaagggaaagagggacaccttcagggaaacgaatggatagtgtaagtccccacccatccttttcaacaaatcaattaaagttaattacattgttttgcttgttttaacataggtaaagagaccaatgacagcacactttataaatccacagaagcagacatcagaaatcatttacagataaagccgcagaagactggccaagagattgacaatcagtggatacaggtctgggtaatcctaattcatgaaatagcactcaattccaggttttgcatgtgagtataacgaatgagtttttaattctgctgaatatttattctaaatgcagtccccaaacttaacattggatatatgttctaaagtattttttgtcaactaaatgtcaactaaattttttgacaactaaattttttaacattggatatatgctctaaagtattttttgtcaactaaatgtcttaacataaatctggattttctatttttcccaggc

SEQ ID NO: 11994 - DNA, 543 bp, Homo sapiens
  MAP TO CHR19.3; EXPRESSED IN HELA, SIGNAL = 2.3; EXPRESSED IN LUNG, SIGNAL = 2.3; SWISSPROT HIT: P41233, EVALUE 4.00e-14; EST_HUMAN HIT: T99387.1, EVALUE 1.00e-130; NT HIT: gi16163368, EVALUE 3.00e-92
tcaggcaggataaaggttggtgggatgaggatgtgtgggggaggctggggcccgctgagtctgaggaggtcccatttccctggcttagggagcagaggaacagtttctatcccccatttataaagcaagagtgtgtcagggttcaaatccagctcccaccaccccaaacgacagagaaatggaggcagggtaggacgtgcagggtaggacatgcagggtggagggactcacagtgcaccctcagacagctgctccttggtgaggttcaaggggtggttgagtgtggtgatgctgtgggcgtggcgggccgggcctgggggcaggtgagcacggaggattgcgttgctggctcggttgacaaaggccaccatggagtgccagcctttgttgttgaaccagatctgggtgggggtcaaggtcatagggtcagagcaatggggttggaccttgctgtgacaggacgcccacctgcccccccagttcccaccttgagactgtcctgagcatccaggctgtgagcccaggctgtgaggtttttcagga

SEQ ID NO: 11995 - DNA, 531 bp, Homo sapiens
  MAP TO CHR16.3; EXPRESSED IN HELA, SIGNAL = 0.87; EXPRESSED IN FETAL LIVER, SIGNAL = 1.3; EXPRESSED IN BONE MARROW, SIGNAL = 1.7; SWISSPROT HIT: O60268, EVALUE 1.00e-11; EST_HUMAN HIT: BF850369.1, EVALUE 3.00e-46; NT HIT: gi15316039, EVALUE 2.00e-46
catggggttcatcacacttggcctccatgccagctcataattaatccgcctcctacacgacccctggtggccacagtgccacagtgagagttgctggtggctaattaggcagcagtgcgttttagtttctgctgacaattccaggcaggccatggtgggcgtcccagagacaagggcccagctccccggccctttcccctgggaggccagcgggtgacgctcttggggtttctcctgcagcacattcacgcacaacatgctggcctttggactgaacaagaagctgtgcaatgacttcctgaagaagcaggctgtgattggcaacctggatgaaggtgcgtctgggggaggctgctggcaggaggcgggcagggctggggtcaggagccagtgctgtgcccgctggcgcttctgcactgccagaaggcatgtcgtgttgcagtcggaaacgtggtgctgagctctcggcagacggcccctcctttctccccagtctgtatagacagacgcacaggacacctctcgttccat

SEQ ID NO: 11996 - DNA, 571 bp, Homo sapiens
  MAP TO CHR19.3; EXPRESSED IN BONE MARROW, SIGNAL = 0.94; EXPRESSED IN HELA, SIGNAL = 1.2; SWISSPROT HIT: O75820, EVALUE 5.00e-07; EST_HUMAN HIT: BF315871.1, EVALUE 9.00e-81; NT HIT: gi14766466, EVALUE 2.00e-06
gcaggcaggagatagagtggagcctgtgcccttggccctgcacatagatggcatcagtctggtcaccaacctgatgtcgctttgggctggacacagtttccagtagtaacaccagaagcatcaataacaccagcagctctgatattcctctgggataggagaaggaaggtataagggtatgtgtagggagtaaggtggggaagagtttagagctcatagggaaagataatgtcagggggagatgtgataggaccctgagatacaggtcaagggcctgaatgtgtccatctgtccatattttggttgtttttttctgcccatcattgaccccaaggctcagttggacccatcattgcagggcttggtgatgtttgaggatgtgacggtatatttctccagggaggagtgggggctccttaatgtgacccagaagggcctataccgggatgtgatgctggagaactttgcactcgttagctcactgggtaagtctcttacactgtcccccagcacactgactaccccctcattttccccatgcgaagttctgtccataacgaagccagaccat

SEQ ID NO: 11997 - DNA, 515 bp, Homo sapiens
  MAP TO CHR18.3; EXPRESSED IN HELA, SIGNAL = 2.2; NT HIT: gi14759631, EVALUE 0.00e+00; EST_HUMAN HIT: AL539763.1, EVALUE 0.00e+00; SWISSPROT HIT: P33213, EVALUE 2.10e-02
tgcctttttatctactcaaggattggagatattttttttctcttatccttctggcatgtgcctctagatatgatgggatcagggttattgagtctagaatttatgtgagatgatacaaattcaaaaccaaaaggctgctccaaaagatggtcttatataggttttatagattacatggacagaccacatgagggggcggaatggaaaaagtcaactgttggcagttacctttgtcactggaataaggcgcgtgaacattattgctggggacagacacattctggtggtgtggctggttcacagtttctaaaaatgaaaccagattctcatgatgtgaaagttcttctgcaacagggaaagaaacgatgttccaattcaactgagtatctccttctgtgagtgcccggaagagagaagggatcggttcatgcagctcctccactgtgctctttgaagttggaggtgtgtcactataatttcgaggattacacatacctgggttgggggtaatatca

SEQ ID NO: 11998 - DNA, 550 bp, Homo sapiens
  MAP TO CHR16.3; EXPRESSED IN HELA, SIGNAL = 2.1; SWISSPROT HIT: O64948, EVALUE 1.00e-12; EST_HUMAN HIT: AI240936.1, EVALUE 0.00e+00; NT HIT: gi14777711, EVALUE 0.00e+00
agaatccccctcatcagagtctttaatataacaccaattgaaacattaaaaaaaggttactacttatcctttttcctggctttcctagctcatgctataacaaaacggaagatgatttggatgttttaaaatagtagtggttaaattcagtgaaagaaagctgggtcagggtttctttcagcttgagggtgatcattaaccctaaaaacttttttctctccttacaggtgggtggaattaaagacaaagtgctggcggcacacagagcgggactgaagcaagtcattattcctcggagaaatgaaaaagaccttgagggaatcccaggcaacgtacgacaggatttaagttttgtcacagcaagctgcctggatgaggttcttaatgcagcttttgatggtggctttactgtcaagaccagacctggtctgttaaatagcaaactgtaggtccaaatctcaattttttagaattttaagttatgaagtgctcaaaggtactgacacagttgattttattcacaccattaggggtatgcaagatgtccctg

SEQ ID NO: 11999 - DNA, 511 bp, Homo sapiens
  MAP TO CHR19.3; EXPRESSED IN HELA, SIGNAL = 0.95; EST_HUMAN HIT: BI906741.1, EVALUE 1.00e-54; NT HIT: AF287892.1, EVALUE 0.00e+00; SWISSPROT HIT: P20138, EVALUE 4.00e-27
tacagggaaaatggagtcggcattctcctgaccccactcccagcccagattctgggacccagaacccagtgtccaggcttgaaccccatcccctgccctcaggaacacctcccaacccatgagggacctgggcatcttggtccagcactcacaggacacatcgaggcggacggtactggtcgtggtcacacctgtcccaggcaaggtcacctgacaggtgaggctggtgccgtggtcctggggctttggggtaagggtgagcactgaggagcgggcagtagtggggcccggggaggacacggaggccccaatccaggagatcatggggggtgtcccctgcttacaggcccagggcacagagcaggtcaggttcctggagtggccagactctagggtccctaggatgaggatgtcaggcctatgggtcagggctggtgaagatggggacacaggatcaggaggaggtatttcaggtgcagccctggaggaagctcaagctctggtccagctc

SEQ ID NO: 12000 - DNA, 582 bp, Homo sapiens
  MAP TO CHR14.3; EXPRESSED IN HELA, SIGNAL = 1.2; SWISSPROT HIT: Q13114, EVALUE 1.00e-26; EST_HUMAN HIT: BI028087.1, EVALUE 0.00e+00; NT HIT: gi14754078, EVALUE 3.00e-95
tggagcctcctgttgttttcttccatgtggcttcatgtcacctcgagtgctccctgccggcacaagcacttgatcccagggagctcccaggaggcctgatgcagagccccactcctggagtcagagccgcgggtggcaggcctcatacaggggcctctgactgttctgctcctagcctgtctgtatttgatggaaggtggtgcagcattttccgagtcctaactgtgttttgctttttaacacctttggtttggaagcgagtgatagacagccaagcagagaaactgaaggagcttgacaaggagatccggcccttccggcagaactgggaggaagcagacagcatgaagagcagcgtggagtccctccagaaccgcgtgaccgagctggagagcgtggacaagagcgcggggcaagtggctcggaacacaggtgaggcaggggccggggccgggccagcagtgtgcatctgggccccgggcgagtgctggggcggggtccgtgggatgagggctatgttaggtacatgtgccttaggacagttttttctaattatgggtaacacgcagaggtgtgatgact

SEQ ID NO: 12001 - DNA, 519 bp, Homo sapiens
  MAP TO CHR14.3; EXPRESSED IN HELA, SIGNAL = 0.93; EST_HUMAN HIT: AW843766.1, EVALUE 7.30e-01
tttgagaagcacttttctgggaaaatttcatatttttttgtctccttaggatattgttaaaatgagtgtgttaatagatcttattgagatgttaaaatggaagagttattcagtgtcagtaccttttctcactcaatttttatgtgtaactatgatgaagaccttaatactttttgtctacaccctgttaattttaggaggtaagaaaaagtttggcaggtgggtaagatgacagaaaaaaaattttttttatcgtgattctctcctcagggagtaataataacaacttgtatttgtatagccgttttccatttatagtgtgtggtttctatatatttgatctatgcgagcactctgtagtaaggagagatgctagtttcttctttttccagaggaggaaacaagttcagagatactgtgttactgtcaagacttgatccaggtcttaggaccctaaattgtatactatctctactttttatacccacttaaagtgagtatttccctatggagatcttt

SEQ ID NO: 12002 - DNA, 535 bp, Homo sapiens
  MAP TO CHR16.3; EXPRESSED IN HELA, SIGNAL = 1.4; NT HIT: gi16164646, EVALUE 1.00e-100; SWISSPROT HIT: P48322, EVALUE 3.00e-02; EST_HUMAN HIT: AW768543.1, EVALUE 1.00e-100
ttggccaatcaccctaagaggggtgcctttgagatggttaggagaacctgctttccatcccttgggacgttcttaggggctcacctgttcctagaaggtcagagctactctgccttgtaattggaaggttgtcttcctacgcacccatccttatccttcctttctttgcttttcctctgtacccatgggtattatttaaagaaacctatgaacttacttagcatggtttgtaatgaaaggcagttgtgtgtttttatgttattctggtttttttatgaagtgtaaagttgacttgaatttttcttttctctagtactgtaaaaccatgcctagatcttttggttaactggctgcacatataccttaataaccaggattcgggaacaaaggcattctgcgatgttgctctccatggaccattttactcagcctgccaagctgtgttctacacctttgtttttagacacaagcagcttttgagcggaaacctgaaagaaggtcagtgttgtgggagtgctggactggattttccttg

SEQ ID NO: 12003 - DNA, 527 bp, Homo sapiens
  MAP TO CHR16.3; EXPRESSED IN HELA, SIGNAL = 0.97; NT HIT: gi14775113, EVALUE 2.00e-83; EST_HUMAN HIT: AI188004.1, EVALUE 3.00e-77; SWISSPROT HIT: O75363, EVALUE 1.50e-01
ggccagtgagttctcaaagcaagagctgctggggttccctgggtgtaactggtccttcccaacccaggaccgggccaaagccgaggcagtgaataagaggctccggaagcagctggccgagttccgggcaccacaggtgatgacttacgtccgggagaagatcttaaatgcggacctggagaagagcatcaggatgtgggaaaggaaagtggagatagcagaggtgagccacggggagccccaagatgggcagtcttttatgtcttcaacgttttcacttaggattttgttctttggggtaagaatacagatgtttggatatgtaatttctgggagaaacctcagcagttgctttaactattaaaccaagacgaaggatgatttgttttttttgaaagttcccccttttgcattgttaggggcagagtcttttccattttcagggagaaactctgtagtaatagtgtgtttttagttgcttgttatcttaatgaattctagaagtttctgaatccctctgcactggt

SEQ ID NO: 12004 - DNA, 534 bp, Homo sapiens
  MAP TO CHR16.3; EXPRESSED IN HELA, SIGNAL =   1; SWISSPROT HIT: Q14940, EVALUE 4.00e-42; EST_HUMAN HIT: AL541352.1, EVALUE 0.00e+00; NT HIT: gi4759143, EVALUE 0.00e+00
cctgcactctttttgcattgcagtgtttcacctgtctcggaaagtaacatctctggtccctgagagctgcctgctgattttgctgggcctggtgctagggggaattgttttggctgtggccaagaaagctgagtaccagctggagccaggcaccttcttcctcttcctgctgcctcctattgtgttggactcaggctatttcatgcctagcaggctgttctttgacaacttgggtgccatcctcacctatgccgtggtaggcacactctggaatgccttcacaacaggcgctgccctctggggcttgcagcaggctggacttgtaggtgagtgaccctaagacctgggctttgccagacccatcacccctctcccttctcctcaagctctggaggcccatgctggtgtgagccatgccctgaaagctccatcctaggtccctccctctggagtgcaaggcagtgctcccgctggggttcaggcctcattgaggtctctgccagtctgggcttctgcagcataacagctgagcag

SEQ ID NO: 12005 - DNA, 528 bp, Homo sapiens
  MAP TO CHR9.3; EXPRESSED IN BRAIN, SIGNAL =   2; EXPRESSED IN LUNG, SIGNAL = 1.8; EXPRESSED IN HELA, SIGNAL = 7.8; EXPRESSED IN FETAL LIVER, SIGNAL = 2.4; EST_HUMAN HIT: BG944436.1, EVALUE 0.00e+00; NT HIT: X70287.1, EVALUE 0.00e+00; SWISSPROT HIT: P10599, EVALUE 5.00e-15
aaggcccatgtttcaatgtggggaaaaaaagaactatttaagacaaaattaacttctaaaatttgttttcaatgggctacatgtatcaaacctaaattatttgttatactactacttttagaccaaagatccagccaaagaaatccccccaccgaaaccaaaatcctttaactgtctttctttcctaccactgtgaccaccaactcaaaaaacacaaatctcttacaaagcagacattgtttaatactcacatgaaagaaaggcttgatcattttgcaaggcccacaccacgtggctgagaagtcaactactacaagtttatcacctgcagcgtccaaggcttcctgaaaagcagtctaacagcaaaagaaaagcttatattaaataaatagttaaatattaaaccttcaaaagaaagactcgacacaatgacacaaagcacattctggaggtcctcctttcaggacctactttttagccaaaaaaaaaaaaaaaaaaaaaaaaaaatccccaaacaagccaaataaa

SEQ ID NO: 12006 - DNA, 549 bp, Homo sapiens
  MAP TO CHR19.3; EXPRESSED IN ADULT LIVER, SIGNAL =  12; EXPRESSED IN HELA, SIGNAL = 5.9; EST_HUMAN HIT: BE222837.1, EVALUE 0.00e+00; SWISSPROT HIT: P18377, EVALUE 9.00e-13; NT HIT: gi14787066, EVALUE 0.00e+00
ttatgctccacccattcctctctaggaacctccaactggtctggcaactacttcacggagacggcgggcacctcgctgctggtgacgcagaatgggaggggcggcctgcggagccagctggaggccattttcctgagggactgggactccccttacagccatgaccttgacacctcagctgacagcgtgggcaacgcctgccgcctgctctgaggcccgatccagtgggcaggccaaggcctgctgggcccccgcggacccaggtgctctgggtcacggtccctgtccccgcgcccccgcttctgtctgccccattgtggctcctcaggctctctcccctgctctcccacctctacctccacccccaccggcctgacgctgtggccccgggacccagcagagctgggggagggatcagcccccaaagaaatgggggtgcatgctgggcctggccccctggcccacccccactttccagggcaaaaagggcccagggttataataagtaaataacttgtctgtacagcctgtgcctgactgagtggtgtg

SEQ ID NO: 12007 - DNA, 576 bp, Homo sapiens
  MAP TO CHR6.3; EXPRESSED IN LUNG, SIGNAL = 3.2; EXPRESSED IN HELA, SIGNAL = 5.9; EXPRESSED IN HEART, SIGNAL = 3.7; EST_HUMAN HIT: BG398526.1, EVALUE 0.00e+00; SWISSPROT HIT: Q02084, EVALUE 2.00e-14; NT HIT: gi4508004, EVALUE 0.00e+00
ctgagtgagatttcagggggccacagcaatggggaggtggctaccagtggatatggggtcccctgctccaggtgcttaggccaggcatcccgtccccccattgagagtcctggaattccaaagaagtgaagcatctgagggttggggctgggggcagatgtcagggctcagggtcttagcaggaggcgtgttcctggccacttgagccacaggaaggggaccaggcgccgggtgaaggtggcagtgaaggtgtagatgagttcctgtgactctgcgttggtgaaagtcacggtgcccccttcataatccagggcgatgcccactctccggggccgcagtgctgggaaaagctcagcctcggggctggtgttggcccagatgccggaggaggagaggcgcagcgcccacacgccatcctctggccgcagggagaggtctcccttcctcttcacagagtctctagccacccccaccatgcagctttccagaacttcctcctcttcctcctcctcttcttcctcttcatcgcccaacgattcctcatcttcgtccgtttcccagtcgtcatatccatcc

SEQ ID NO: 12008 - DNA, 556 bp, Homo sapiens
  MAP TO CHR3.3; EXPRESSED IN LUNG, SIGNAL = 2.6; EXPRESSED IN HELA, SIGNAL = 2.1; EXPRESSED IN PLACENTA, SIGNAL = 1.9; EXPRESSED IN HEART, SIGNAL =   2; EXPRESSED IN FETAL LIVER, SIGNAL = 2.3; EXPRESSED IN ADULT LIVER, SIGNAL = 1.9; EXPRESSED IN BRAIN, SIGNAL = 2.2; EST_HUMAN HIT: AI272244.1, EVALUE 4.00e-95; SWISSPROT HIT: Q12860, EVALUE 1.00e-11; NT HIT: U35371.1, EVALUE 4.00e-45
cctgagtctgagcttcccagatgactgaggtttgctggtcacagcctcagaaaaaataaagcaaaattacttagtatttcatcctgctcttggagtctacattgtatttccacacaagctcacagactttgttgttgttattgtttgttttgttttaactctccagatccaacaagggtaatggtacccccttccagtatggatgtcactgttggagagagtattgttttaccgtgccaggtaacgcatgatcactcgctagacatcgtgtttacttggtcatttaatggacacctgatagactttgacagagatggggaccactttgaaagagttggaggggtaagtattaatagcaaaaactgactcaaactaacttgtttagaccaacttaacaatatatttaaagttactattttagaattttgttcaagtaatcttatggcaagaaactcttggttaattcctgctcctttttgcacaataaatgtggcatcactcattgaacaactctatatggcaggactgctccctaactggcaccaatcctacaggt

SEQ ID NO: 12009 - DNA, 598 bp, Homo sapiens
  MAP TO CHR5.3; EXPRESSED IN LUNG, SIGNAL = 0.69; EXPRESSED IN HELA, SIGNAL = 2.1; EXPRESSED IN BRAIN, SIGNAL = 0.78; EST_HUMAN HIT: AI339444.1, EVALUE 1.00e-112; SWISSPROT HIT: O15379, EVALUE 5.00e-26; NT HIT: AF059650.1, EVALUE 0.00e+00
cccagcaagcctattgaaagtaggctgaagtccctgctcccagacctgctatagttctcctcaggacccctctcctctgcatcagcctcatcagtcctgtcataggtcaggaggtctgcaggcacgtcatgaatctggacactaggtgcatggttcagcatcttcaggttttcaaagattgtctggcggatctggtccagatactggttggaaatgaggaatacagagtgagcagtttccagagattcccaggacatggaatctcctagctgccttttacccctaccatactggttttcatctcagtggtacctctagttcaggtcccccaactgatagctctccctccccaccaaccccaactgcctctactttaaactggactgcctcctagtcaataacagtgactgtgatggcttagaacttccttctctttggtttttcctacttcccacatctttgacctctcctgggctccacctttcaggagaagtttgtgctcagcttttctgagctgctgacctggcgtgagttctgattctcgatgcgggtgctgacatctggatgaagtgtgaagtctggggcaaagtactcgaag

SEQ ID NO: 12010 - DNA, 581 bp, Homo sapiens
  MAP TO CHR17.3; EXPRESSED IN HEART, SIGNAL = 2.1; EXPRESSED IN HELA, SIGNAL =   3; EXPRESSED IN PLACENTA, SIGNAL =   2; EXPRESSED IN ADULT LIVER, SIGNAL = 2.1; EXPRESSED IN BRAIN, SIGNAL = 3.8; EST_HUMAN HIT: AI827387.1, EVALUE 1.00e-113; SWISSPROT HIT: P36199, EVALUE 3.00e-27; NT HIT: gi13652709, EVALUE 7.00e-90
gtggcttacagagagcgaggcgtgcccccccgcgctgccacccgcttccaacgaagcccgccccgacctggccgtgccccgccattcggcgcgcacccacctccgtagaaggagaagggaccattggggatgagctcgcccggctccaggcggtccaccagcggccgcatccggcgcggactgcggaagaaggcgtggcgccgggcgcccagggcgctcagctgcttcatcctccgctccttggagcgccggttctggaaccagacctgcagcacatggcggcggggtgaggccaccgagactccacccccgaccccggggtgctccgggcctagccagcaccccttcaccgcctggctagccgacaccgcgcgcgcgcgcttgtgtgtgtgtgtagggtagtggtgacggtgcgatctctgactaggaccactcagggcggaccctgagccaatggtgagcaggaatcccacaggaggacctggacaggccgccgtgtctggagggggagagttgtggtatagctggagtttttctaacagtcacactatcacagttaccgcttctctggggctgtacac

SEQ ID NO: 12011 - DNA, 547 bp, Homo sapiens
  MAP TO CHR19.3; EXPRESSED IN BRAIN, SIGNAL = 3.2; EXPRESSED IN HELA, SIGNAL = 4.8; EST_HUMAN HIT: AW206354.1, EVALUE 1.00e-116; NT HIT: gi13630766, EVALUE 1.00e-115; SWISSPROT HIT: P38117, EVALUE 9.00e-21
cctagccagcaggagttgtccacaccaggtgtggccctgtgagaagtttcgcgtgtcctggccagtgggtgggtccagagggttcagcccatgggactggtctgcaggcctggcacccatgggaaggaggtggcaggaagggtggcaggagttccacagccctgtgaacaatggcttcccatgtgcagaaagccaagaagaagaagatcgaggtgatcaagcctggggacctgggtgtggacctgacctccaagctctctgtgatcagtgtggaggacccgccccagcgcacggccggcgtcaaggtggagaccactgaggacctggtggccaagctgaaggagattgggcggatttgagcccctcccagagatggcaataaaactgactctcaacatctatctctgttaacttatttcctagagacccattatttggttcattcaacatttacttgagtcttttgtgtgccaggccctgtggatccagtccctgcccatgaggagcctctgtattgatgcgggggacaatgaggacaaaggcagct

SEQ ID NO: 12012 - DNA, 562 bp, Homo sapiens
  MAP TO CHR17.3; EXPRESSED IN HELA, SIGNAL = 5.2; EXPRESSED IN LUNG, SIGNAL = 6.9; EXPRESSED IN HEART, SIGNAL = 4.7; EXPRESSED IN PLACENTA, SIGNAL = 3.7; EXPRESSED IN ADULT LIVER, SIGNAL = 4.8; EXPRESSED IN FETAL LIVER, SIGNAL = 3.1; EXPRESSED IN BRAIN, SIGNAL =   4; NT HIT: gi13632792, EVALUE 4.00e-94; SWISSPROT HIT: Q15027, EVALUE 1.00e-28; EST_HUMAN HIT: AA282128.1, EVALUE 0.00e+00
gtcaggggttgagagctgaggccaagtgtggttggaccagatgaggtgatgatgccgtctctcccccacaccctagggactcgtacacatgcatacgcatacttacacatacccacacttgcatcactctattccctccacagtcccaagctccccatcatttagaagagacctgtcccattatagcattgggacactgctgagggttttcttcccagactcggagctgcttccccctaacagaaccaaatcccccgaacagagcccccctctgaggacctgggaagcctgcaccctggggccctactgtttcgagcgtctgggcatcctccatctcttcccaccatggctgatgcccttgcccatggagctgatgtcaactgggtcaatgggggccaagataatgccacaccgctgatccaggccacagctgctgtaagagccctgctgacctctccaccccaccctagggctctgacacctactcctgactctgggccctgcccttacctcctttccccaccacctgttccctagggcttccacccatagggagagatca

SEQ ID NO: 12013 - DNA, 585 bp, Homo sapiens
  MAP TO CHRX.3; EXPRESSED IN PLACENTA, SIGNAL =  21; EXPRESSED IN ADULT LIVER, SIGNAL =  22; EXPRESSED IN HELA, SIGNAL =  15; NT HIT: L47361.1, EVALUE 0.00e+00; SWISSPROT HIT: P49061, EVALUE 4.00e-07; EST_HUMAN HIT: BF244790.1, EVALUE 5.00e-67
tccccaatccccttaaaatccctaagcttaccaacccctcaagcccaaatccagccccctaatcccccccataggctgccccggggcaagatggggtggatgacctgcccaggtcagcagatcagctgggccggggcctgcctgacatcccccttccccacagaacccaccatggccccctttgagcccctggcttctggcatcctgttgttgctgtggctgatagcccccagcagggcctgcacctgtgtcccaccccacccacagacggccttctgcaattccgacctcggtgagtcctcaccccactcagcccacacactctgccttggtttccctttcagtccagtggggctcaccatggcacttacctctagaatgattccactcgcccctgcacttcctctgctttagccacactggcatcctcacacttccttgagtactctgtgcccaagcccaccacaggatctgcatgctggctgctccctctgcctggtacactttccccccaggtatccacatgggtggctgcctcaaacgtcaccttctcaggatggccttccctggccatcctgtttaaaa

SEQ ID NO: 12014 - DNA, 591 bp, Homo sapiens
  MAP TO CHR10.3; EXPRESSED IN LUNG, SIGNAL = 5.5; EXPRESSED IN HELA, SIGNAL = 2.5; NT HIT: AJ243211.1, EVALUE 0.00e+00; EST_HUMAN HIT: BG954398.1, EVALUE 0.00e+00; SWISSPROT HIT: P30205, EVALUE 3.00e-38
tccatgccttatccttgacctcatatttgagatggatgaagcgttcttgtgttcccctgtaggatctgaatccagtttggccctgaggctggtgaatggaggtgacaggtgtcagggccgagtggaggtcctataccgaggctcctggggcaccgtgtgtgatgactactgggacaccaatgatgccaatgtggtttgcaggcagctgggctgtggctgggccatgtcagccccaggaaatgcccggtttggccagggttcaggacccattgtcctggatgatgtgcgctgctcaggacatgagtcctatctgtggagctgcccccacaatggctggctctcccacaactgtggccatcatgaagacgctggtgtcatctgctcaggtgggcctccaagaccttcggctccctctcctaggttggagtttgctcaggaagaaaatcctaattacattatgatctcctctgaactcacagattcttctatgtttcttgtatttatgcagtcttgttagctccctgctaagaatctgtatgaattttgctacagcggttggtgttcatgtggtcacttaggacaggggaccaa

SEQ ID NO: 12015 - DNA, 529 bp, Homo sapiens
  MAP TO CHR6.3; EXPRESSED IN BRAIN, SIGNAL =   3; EXPRESSED IN HELA, SIGNAL = 2.2; EXPRESSED IN HEART, SIGNAL = 2.5; EST_HUMAN HIT: BI031060.1, EVALUE 0.00e+00; SWISSPROT HIT: Q03518, EVALUE 4.00e-25; NT HIT: X66401.1, EVALUE 0.00e+00
actcatgcattcacgcactcacacacaccaagatctgacggttgtagctggataggggagattctgggaagatgaacagaatcctgaggatgtcaggatgaagaagccataggagcatgatcttacaacttcaaattgatgtccatgagtaaggaggaactgaaggataaaggcaagactactggggtttcagcaaaggtaaagatggctgggtggtgagatgagtggagagagtacctgtgtcatagccctgagggagtccagagatgaaactatgggccccagactttactgcagcagctgtgatttcctccatagttggcttctgggtcaggccataggcaatattttcttgaagacttcttccaaatacctgtggctcttgtcccactgcagccacctgagatgaaatatgatgaagagtcatagaacaaggcacatgggagtatggttatctagagatcgaagactcaaaatctttattgagaacatgtcacaaaatcatactacctccctcctgactacacca

SEQ ID NO: 12016 - DNA, 591 bp, Homo sapiens
  MAP TO CHR6.3; EXPRESSED IN LUNG, SIGNAL = 5.6; EXPRESSED IN HELA, SIGNAL = 2.1; EXPRESSED IN BRAIN, SIGNAL = 0.95; NT HIT: X87344.1, EVALUE 0.00e+00; SWISSPROT HIT: Q03518, EVALUE 3.00e-28; EST_HUMAN HIT: BI061729.1, EVALUE 0.00e+00
agatgatgcctaccattgcctttaaagggttagggaggatatatgcttggcagtaagcaggctgaaggcaggaagaaaatttaggatggcagaattgcagttggggccagtggaatacagggagtggtaggttgtacctgtagcactaagacatctgggcggtttgggtaggcaaaggagacatcttggaactggacaaggccctccaagtgtaagggagtcaacagaccactgggtgggcagcgaggggtgcggtccaggtactcaaatattttctctgaggagcccacagccttctgtactctggggtagatggagagcagtacctagagggaggtaagaatagtgaaagtgaggtagtctgcttgccagcattatgtgaagcaagaagggtaaagaatggaaggacatcacacagatggtgctgggccagaggaaggaatcacactggggagtgaaggtggagggacctcacctccacagcctgggtgaactgcatctggtagagaacaaatgtgacaaggttcccactgcttacagccccactggtcaccagctgcccaccaatgtagaggattcccactttcagca

SEQ ID NO: 12017 - DNA, 528 bp, Homo sapiens
  MAP TO CHR8.3; EXPRESSED IN BRAIN, SIGNAL = 1.6; EXPRESSED IN LUNG, SIGNAL = 1.6; EXPRESSED IN HELA, SIGNAL =   2; NT HIT: gi14744943, EVALUE 0.00e+00; SWISSPROT HIT: P40602, EVALUE 1.10e-01; EST_HUMAN HIT: AW264601.1, EVALUE 0.00e+00
tttattgacaccctcggacccggggcagggtcagcaagactcccagctggcatcagactgtgtctggcctgctgtcgccatccctgaggggtgcaggacagagccccataggggcagagaggcctccctgggaccagaggaggatgctgtgcagccaggcccatccccagcactcgaggcctaggaggagaggtgggctctggcagcgggtgtgaggtggcagtgagaagccaggccctcaggtgcagctcaggcctctgccgctggggcctcatagttgagcacgtagtagtcgtggacgtacatgaggacggctattggctgtccgatgatgagcgacagccacacagctgcgttgccatagttgccctggaaaaagcggcccacgaaccatgccagtgggatctagggagtgaggggccaattcagtcggccatggtgaccacagggctgggggcttcagggtccctgggcatggggagggtcagccgaggggttcaggtgcggggtaactgggcgagtgaggag

SEQ ID NO: 12018 - DNA, 513 bp, Homo sapiens
  MAP TO CHR17.3; EXPRESSED IN ADULT LIVER, SIGNAL = 8.2; EXPRESSED IN BRAIN, SIGNAL = 4.6; EXPRESSED IN HELA, SIGNAL = 3.4; EXPRESSED IN LUNG, SIGNAL = 3.6; EST_HUMAN HIT: AV753617.1, EVALUE 3.00e-52; SWISSPROT HIT: P30054, EVALUE 2.00e-20; NT HIT: gi13904868, EVALUE 4.00e-51
taaaagaggcccttcacctggttgcactcctgaaagcaagatgggtcaccagcagctctactagagccacccatgaaaattcggccggggttctcactcttgctgcgtctgctcaaaccagcatggtctgatcctgaaacatggcctcaataggtgctgccagtgtttccatcagtacatgaaggatataggtttcattaagttggaccaaatgatctttgttgaatgaattatccaaggcatccacccaatgatagaaaccatgttagctctttgtacataaaataaaaaattttaaaaatataaatgaggaaatgtcaatatggcttagaattagttataaataaaatgtccgtattttctagagatgcatacttataagtataaataggtgaaatgacatgagatctaggatttgttttaaaatacttcagcaacaacaataaaaaatagttgaagcaaatgaagcaaatcttattaattactgaatctaggtggtgggtataatggggt

SEQ ID NO: 12019 - DNA, 592 bp, Homo sapiens
  MAP TO CHR19.3; EXPRESSED IN HELA, SIGNAL = 5.2; EXPRESSED IN LUNG, SIGNAL = 0.46; NT HIT: gi15303191, EVALUE 0.00e+00; EST_HUMAN HIT: BE731187.1, EVALUE 0.00e+00; SWISSPROT HIT: P32447, EVALUE 1.00e-01
gcactgaccaagaaagcctctaggtgggccagggaggtctgtgggaaagctttggatcaatggtactcaagggtgcacagtggcacagtggccttagttagaatttatgaagacgaaaagaacacaagtcagaatttagaactgaagtacctgcttcttataggcctgtagaggaaaagcgagatcatccttctggccaggactaggggagacccaaggcctgttctttcctaggggctgagtttgacagacctggattgcagctgatggcccccaaagtcctctagatgggccctgcaggactcgctgggaggcctggttgcccctcccggcgtgctgggacactctgggttcctgcagttagatgcagtccatggagttctcagggaggaggccagggatgcagccagggagccccaagcccttgataggagtgcagttgagtgggaggccgcagcccagggaggggtcctgggtctctatggcctccagcctgtccatgttgttgtcccagttgatatggaagcgggtcacccgggggttcgaggccaagatgttccgctggagctggggcaggaagaggaacgtcaac

SEQ ID NO: 12020 - DNA, 596 bp, Homo sapiens
  MAP TO CHR4.3; EXPRESSED IN LUNG, SIGNAL = 3.3; EXPRESSED IN HEART, SIGNAL = 5.7; EXPRESSED IN HELA, SIGNAL = 2.8; EXPRESSED IN PLACENTA, SIGNAL = 6.7; EXPRESSED IN ADULT LIVER, SIGNAL = 5.9; EXPRESSED IN BRAIN, SIGNAL = 4.8; NT HIT: gi16158908, EVALUE 2.00e-90; EST_HUMAN HIT: AU130951.1, EVALUE 3.00e-90; SWISSPROT HIT: Q14141, EVALUE 2.00e-27
ctctttgggaggtcagcttgctcaccaagctcctgcgtctgcaaagcaagagtcatgacatctagttggcagagttattatgaagggtaaagacaatatttgttttcaagctcctccctctgtgctctgtgctgagtaggcactcagcagtcagcgttgtcatcagtattatggtcaatgttgtcagaaatcttgtcttcgtcaggaatgtaaggtgaatccagtaaaggatcttcagatggtcttgagaccccagagatttcaggagtgatggtaataacatcttggaagcatcactgcagatatttcagtgacatcattgctaatcccacttccgccatttcccccctctcttgtagttgagaatgaaaatcattgcgattttgtgaaacttcgagagatgctgatccgcgtgaacatggaggacttgcgagagcagactcacacccgccactatgaattgtaccgacgctgtaagcttgaagagatggggttcaaggacactgaccctgacagcaaacccttcaggtatgaaggcatctagcaatcaggtgtctcccagacagtggcgagagtggcatggtggtacatcacag

SEQ ID NO: 12021 - DNA, 553 bp, Homo sapiens
  MAP TO CHR6.3; EXPRESSED IN LUNG, SIGNAL =  12; EXPRESSED IN HELA, SIGNAL =  60; EXPRESSED IN HEART, SIGNAL = 8.9; EXPRESSED IN PLACENTA, SIGNAL = 4.7; SWISSPROT HIT: P25388, EVALUE 4.00e-19; NT HIT: gi14732184, EVALUE 8.00e-68; EST_HUMAN HIT: AW938235.1, EVALUE 0.00e+00
aaagaagcctggggtaatggaggaaaggtaagaattgattctgacagaatcttgagatgggcagaattaacatctggaagaggtcacagtgtcctgatttaccttacctgtgtccaggatggccagtccatgttatggatctcaacgaaggcaaacacctttacacgctagatggtggggacatcatcaacgccctgtgcttcagccctaaccgctactggctgtgtgctgccacaggccccagcatcaagatctgggtgagtgtgggttacaattgactgggtacctggctgcactctgagccctggcaatgttttggttattatatatgccatctgactcccacctgggagctaagctttctcagcctccacgtaatgacattttggtctgagtaactctgttgtggtgtgcagtcctgtacattccaggatgtttagcagcatttccagcttctactagatgtcagtagcaaaccatccttccactagtggcaactgaaaatgcatgtaggcattgatacatggaccccagggagcaaaatcatcccttt

SEQ ID NO: 12022 - DNA, 549 bp, Homo sapiens
  MAP TO CHR20.3; EXPRESSED IN HEART, SIGNAL = 5.3; EXPRESSED IN HELA, SIGNAL = 5.6; EXPRESSED IN PLACENTA, SIGNAL = 4.4; EXPRESSED IN ADULT LIVER, SIGNAL = 5.9; EXPRESSED IN BRAIN, SIGNAL = 5.4; SWISSPROT HIT: Q12381, EVALUE 5.00e-09; EST_HUMAN HIT: BF797522.1, EVALUE 2.00e-87; NT HIT: gi6912731, EVALUE 2.00e-87
tgcaggtgtgttagaggctgagctaattggctttcgtaaattctggggcccgaggatctgctctggagatctgtgcctgctgccctgttgcggcttccagcctgcactgagccttattggtcttatctcttgcctcacagagtgaagatgtctggctggaagcagccaggttgcagcctggggacacagccaaggccgtggtagcccaagctgtccgtcatctcccacagtctgtcaggatttacatcagagccgcagagctggaaacggacattcgtgcaaagaagcgggttcttcggaaaggtgagcctccctcggaggtgctgctttctccctccttggggcccctcctctcagcagctttcctgctcctggctcaggcttttggtgagagtggataaggaaccagggacatttttcaggccttttctcaggctgggttgcctctgcccttggacccccatgggggagggatactgtggtgggcaagttcccatcctggaagggatgcttgggttgagccctcactcctgcctttttccagtgtgt

SEQ ID NO: 12023 - DNA, 597 bp, Homo sapiens
  MAP TO CHR16.3; EXPRESSED IN ADULT LIVER, SIGNAL = 1.8; EXPRESSED IN BRAIN, SIGNAL = 1.9; EXPRESSED IN LUNG, SIGNAL = 1.7; EXPRESSED IN HEART, SIGNAL = 1.8; EXPRESSED IN HELA, SIGNAL = 3.4; EXPRESSED IN PLACENTA, SIGNAL = 1.7; NT HIT: gi16196551, EVALUE 2.00e-99; EST_HUMAN HIT: AW976646.1, EVALUE 0.00e+00; SWISSPROT HIT: Q05876, EVALUE 1.00e-01
tggctttatccagatttcggcaaaacgaacttcaaaacgaagtgacagacacgagcttgggggcgggggtcagggccaactaaagctagccgcatctcccgacccccagcatcatccagatttcggtaaaacgaacttcggcaaaacgaactcggaaagggaactctgtaaaacaaacaggctaaacggaacaggcagccaaggccccgaagtggcggcggctggggcaggggcgggaggctggatgactccggcatcgtgagccgacgctggtctggactcgtgaacaagtaagggtcaccagccgccctatctgcgtccccagctcgtccgcggccgccgcgccatctccagcgtgcccgtgactcagcagcggctgcgccgccggcccagctatagggcgctcgctcaccggttgaaatgatccaccacactgagcagcaccagggggtggaccaccaccttctgcactgccagctccggcatcgcgacacaccccgctcgccaggcctggctccctgccacacgcaaacaccggcagcagtagcggtcaccggtaccctttcaggcccagttcctcttcttccggttcgtcag

SEQ ID NO: 12024 - DNA, 599 bp, Homo sapiens
  MAP TO CHR6.3; EXPRESSED IN HELA, SIGNAL = 5.3; EXPRESSED IN PLACENTA, SIGNAL = 2.8; EXPRESSED IN ADULT LIVER, SIGNAL = 4.4; SWISSPROT HIT: P43276, EVALUE 7.00e-26; EST_HUMAN HIT: AI283902.1, EVALUE 0.00e+00; NT HIT: U91328.1, EVALUE 0.00e+00
gagctttttagatgcacccgttgccttagtttttgtagccacctttgaggcgccgggcttggtttccacggaggacgccttcttgttgagcttgaaggaacccgaggctccggtaccctttgtctgcaccaacgttcccttgcttaccaggctcttaatgcccagcttaatgcggctgttgttcttctccacgtcgtagcctgcggccgccagcgcctttttaagagctgccaacgacacaccaccacgctccttagaggaggaagcagcctgcacgatcagctctgacacggaagggccagcgggttttttcttggaggctgctgcagccttagcaggtttctttgccttcttgccagctaaaggtttctcaggagcagcagaagcggcgggggcgggaggcactgtttcagacatggtgactaacacagcacaccaaataaagtggtataaacctgacgaagcaggatgcgaaaaaaaggccccaacgcagcctatttatagggtgggactgcgccgtgattggtgcccgtcagtgcccgcccctcgcgccctagcgccccctgcgcgctgccgagggtttcgcccagtctcagaag

SEQ ID NO: 12025 - DNA, 594 bp, Homo sapiens
  MAP TO CHR4.3; EXPRESSED IN HELA, SIGNAL = 3.3; EXPRESSED IN ADULT LIVER, SIGNAL = 1.3; SWISSPROT HIT: P52875, EVALUE 2.00e-25; EST_HUMAN HIT: BF591989.1, EVALUE 1.00e-125; NT HIT: gi8923860, EVALUE 1.00e-125
accatcgtcagaggttaccgtcgttactgatggctttcagagtgattagacagtaaataagtgtaatgaccatgacaagaaaattttcaaaaaaactaaatcttatttacgtgcaaaataaaataattttgaataatgattttaagaagtaactgattttttttttccagaaaatatttacaccagcagctccagttcataccaataaagaagatcctgctacccaaactaatttgggatttatccatgcatttgtcgctgccatatcagttattattgtatctgaattgggtgataagacattttttatagcagccatcatggcaatgcgctataaccgcctgaccgtgctggctggtgcaatgcttgccttgggactaatgacatgcttgtcaggtgagtgtgcttttccctctcatgagttcgctgaattaaagggaaagcgtgttgtgtgacatggagtcactgagtcattaacctagtcttatgggaatttggctacaccttatttgtggtcttccaaccttttccttgtgtatcctttccttgtgtatcctctaaaataattttgtaccccctctcgcatagttgtct

SEQ ID NO: 12026 - DNA, 518 bp, Homo sapiens
  MAP TO CHR8.3; EXPRESSED IN HELA, SIGNAL = 2.9; EXPRESSED IN PLACENTA, SIGNAL = 2.2; EXPRESSED IN LUNG, SIGNAL = 1.3; EXPRESSED IN HEART, SIGNAL = 3.2; EXPRESSED IN FETAL LIVER, SIGNAL = 2.4; EXPRESSED IN ADULT LIVER, SIGNAL = 2.4; SWISSPROT HIT: Q9Y4H2, EVALUE 5.50e-01; EST_HUMAN HIT: BG425621.1, EVALUE 6.00e-57; NT HIT: AJ249601.1, EVALUE 0.00e+00
tcacagcttgcaggtggtagagctggggtcagggccccctgtgctgcccccctgcatgaacctcttcccggcagtgctggcagtggtccggctgcagcaacagctggaagaggctgagggcagagaccctcagggtgccatggtcatctgtgagcagctaggggacctcttctccaaggcaggagactttcccagggcagctgaggcttaccagaagcaggtgtgtggccccggctgggtgggagggaagggccagtgaggttgacgaggcctggccagggtggcagcccctggcctcactggcactgcccccagctgcgttttgctgagctgctggacagaccgggtgctgagcgggccatcatccacgtgtccctggccaccacactgggagacatgaaggaccaccatggggccgtgcgccactatgaggaggaactgaggctgcgcagcggcaacgtgctggaggtgaaacccttgctccccgcccgaatgcaggttcacccatgtctctgcct

SEQ ID NO: 12027 - DNA, 585 bp, Homo sapiens
  MAP TO CHR1.3; EXPRESSED IN HELA, SIGNAL = 4.7; EXPRESSED IN PLACENTA, SIGNAL =   4; EXPRESSED IN ADULT LIVER, SIGNAL = 6.4; EXPRESSED IN BRAIN, SIGNAL = 8.4; NT HIT: AF105978.1, EVALUE 0.00e+00; SWISSPROT HIT: P42898, EVALUE 1.00e-42; EST_HUMAN HIT: BG979786.1, EVALUE 0.00e+00
atgtcgaggtcaagaggtggaagaggtggctgcctgtgtgtggtgcccaggatgactcactacccacaatgcctactgacactactggcggggatgggatcctgcggatcctcagcgtggggcccaggaagaagtaaaggaccatttcaggaaccaagttcaggctaccaagtggcctccgggaaagccagaacccagagtgtaggggagtgctggctccacacctccccgcagcgccatgatgttcttcaggcccagctgcttagctttgtgcagatggcccgtgatctcctccaggcgctgacggcagcaggtcatgtgcaggatggtctccaggccacagtagttcacggcggtgctggcgatcatcatggaggaggtctccttgtctgagccagggtcacctgctgggtgccaggtcacgtctatgtagagggggccacctgctgccatccggtcaaacctgtagggggtttgtttctgaagagaggttccaggagaaataccatccgtcactgccttcccatggggcccgggagttagagaagcatcaatgaaggttggagacagaccaatcagcgttca

SEQ ID NO: 12028 - DNA, 538 bp, Homo sapiens
  MAP TO CHR14.3; EXPRESSED IN ADULT LIVER, SIGNAL = 5.7; EXPRESSED IN BRAIN, SIGNAL = 3.1; EXPRESSED IN HELA, SIGNAL = 3.8; EXPRESSED IN PLACENTA, SIGNAL = 6.8; EXPRESSED IN HEART, SIGNAL = 3.7; NT HIT: AF079558.1, EVALUE 0.00e+00; SWISSPROT HIT: P35166, EVALUE 3.80e+00; EST_HUMAN HIT: BG617620.1, EVALUE 1.00e-126
ctaagcccaaggcacagaaggaagttttctttttcaggactaggtctctgtatgaaggacttgtatctacggaggagtccagggcctcaccttgtgtgtcttctctttctgcttcccccatttcccaggcttaccagaatgcatttctctttgagagtccagacttctggcttaaccagggcaagcagggacaggactttctcattcccagggagaaatccacacttatggactgtgagaaagaggggattcaggccctttctcatccagtagtcagtgtgccatcaccccttccctagtcacctcttatctctcttaccttctttcttctcctgcttatctgtttccatctaaggcaaaaaggggggaaagtagctttagaaaagtcacagaggttgaagggctatcttctccattgggtttatagtccaagtcctgcaccctgagtgcctcacctcatcatccttgggtggagggtctgggatggggatgtccagtggggcccggagggaagtcaagtcagccacattgagggagt

SEQ ID NO: 12029 - DNA, 553 bp, Homo sapiens
  MAP TO CHR1.3; EXPRESSED IN LUNG, SIGNAL =  31; EXPRESSED IN HELA, SIGNAL =  46; EXPRESSED IN PLACENTA, SIGNAL =  28; EXPRESSED IN ADULT LIVER, SIGNAL =  23; EXPRESSED IN BRAIN, SIGNAL =  31; SWISSPROT HIT: Q00214, EVALUE 1.00e-38; EST_HUMAN HIT: AI193510.1, EVALUE 0.00e+00; NT HIT: AF182035.1, EVALUE 0.00e+00
ttccattttcttccacagggctttgtttcgaaaaataacaaaatgaggtaataagttaatgtatgtacacgttataaacactgtgtcagtttacgatggcagcaacggaagttgttacaaagaaagtgactgcggggtggctggagctcagccgcccccccattgagaagattcgtcgtcctgagaagtcgcgtgctggaggtggagtgtgtctagaagcatttgcggtggacgatggaagggccggcctcgtcgtactcctgcttggtgatccacatctgctggaaggtggacagcgaggccaggatggagccgccgatccacaccgagtatttgcgctccggcggggcgatgatctgcaagacagcgcgtgaggtggggagacctcaccctggagcccaccccgccgacagcccgcgcaggccaccacccaccttgatcttcatggtgctgggtgccagcgcggtgatctctttctgcatgcggtcagcgatcccagggtacatcgtggtgccccccgacatgacgttgttggcatacaggtccttcctga

SEQ ID NO: 12030 - DNA, 511 bp, Homo sapiens
  MAP TO CHR19.3; EXPRESSED IN ADULT LIVER, SIGNAL = 1.8; EXPRESSED IN BRAIN, SIGNAL = 2.6; EXPRESSED IN HELA, SIGNAL = 4.9; SWISSPROT HIT: P15121, EVALUE 1.00e-49; EST_HUMAN HIT: BF030881.1, EVALUE 1.00e-116; NT HIT: gi14745049, EVALUE 1.00e-117
attgttccggtcagatcagcttttgctgggagtggggagtggaagtagccttgtgctgaagagacaggcacccctccctcaccaccctgtactaggcagggttatacatagcactggttagcatggcagagaacaggagataagtcttccaaggcacacaagacagtatgaaacaattccagggagcgcagcagccatggccagccaccttgtgctcaacaatggcaccaagatgcccatcctggggctgggcacctggaagtcccctccaggccgggtgactgaggccgtgaatgtggccatcaatgtcgggtactgccacattgactgtgcccacgtgtactagcatgagaatgaggtgggggtggccattcaggagaagctcagggagcaggtggtaaagcgtgaggagctcttcatcgttagtaagctgtggtgcacataccatgggaagggcctggtgaagggagcctgccagaagaccctcagcagcctgaagctggactacctg

SEQ ID NO: 12031 - DNA, 530 bp, Homo sapiens
  MAP TO CHR17.3; EXPRESSED IN LUNG, SIGNAL =   2; EXPRESSED IN HELA, SIGNAL = 3.2; EXPRESSED IN HEART, SIGNAL = 1.2; NT HIT: gi14770996, EVALUE 4.00e-94; SWISSPROT HIT: Q92610, EVALUE 2.20e+00; EST_HUMAN HIT: AL547109.1, EVALUE 6.00e-94
aaacaatgcaccctctttggtattccatgaaagcagttagatgcttatactgaggggaatacatcatccttaccagattgttttcaagcaagaagctgggctgacattggcctcacttacccactaaagtaaagttgctctccaaaagctccctatgagtgttaaaccaggcctgtgcaaggcgactgtttttattcttcccaatgatgtaattcatgatataagcaagcagaccagtcaccatcaaaatttctagataataactctcccagctgttctggaggtgtgcaggaacctaaaaaagcaaaatcattccattaaatgttggctgagactgaagaatgaaatctacctcatggcaggaagaatgagaaaatccataaacagaagggatacttcagatatctgtcattgaataaggttatactttgaaaaataggtccattttacttttctaggctagcttgataaaagattctttaaggaaatataaggacaatcaaatgggatgaaaagctggaaagcccttt

SEQ ID NO: 12032 - DNA, 532 bp, Homo sapiens
  MAP TO CHR13.3; EXPRESSED IN LUNG, SIGNAL = 3.5; EXPRESSED IN HEART, SIGNAL = 2.6; EXPRESSED IN HELA, SIGNAL = 2.5; EXPRESSED IN PLACENTA, SIGNAL = 1.2; EXPRESSED IN ADULT LIVER, SIGNAL = 2.1; EST_HUMAN HIT: AW806634.1, EVALUE 2.00e-87; SWISSPROT HIT: O64748, EVALUE 9.80e-01; NT HIT: gi7710130, EVALUE 2.00e-52
cctggaatcctatggcagtgaacttggaggggagctcgctgcaggttcagggaaatgcatgggaacccgtggcctccttaaaaggcaagaaattttctctctgatttgctctcttacatttgaatctgagatagcagtcgttgcagtacagttggtggtttctgatcctgacttcagctcctgaggaagagcctccgaggtcacactcacaggcaacacactggggaacaaaaaaaaaagaacatctacaatcagtcagctcaagaaagcttggggcactcctgggggtgggggggaaatgagcagaatgctacttctaagctcttagatacatttcagcaaagaaaaaaaaaggccgaaagatgattagtagattcaaatcaagaccgccagataagatgttaaagaattcataaagccaatattaagagccaagatgaccagtctaaatatactccccaaaaatagaaataatttgctgattgactttaagaaatttagtttttatccccccagaggaatggcaggtaag

SEQ ID NO: 12033 - DNA, 553 bp, Homo sapiens
  MAP TO CHR6.3; EXPRESSED IN BRAIN, SIGNAL = 3.7; EXPRESSED IN HELA, SIGNAL =  11; EXPRESSED IN LUNG, SIGNAL = 4.5; EXPRESSED IN HEART, SIGNAL = 2.7; EXPRESSED IN ADULT LIVER, SIGNAL = 2.4; NT HIT: Z83739.1, EVALUE 0.00e+00; SWISSPROT HIT: P02261, EVALUE 2.00e-55; EST_HUMAN HIT: BG722363.1, EVALUE 0.00e+00
gtaatgaactgctccagccccgctacttgcccttggccttgtggtggctctcagttttcttaggcagcagcacggcctggatattgggcaggacaccaccctgggcgatggtcactttaccaagcagcttgttgagctcctcgtcgttgcggatggccagctgcaagtggcgcgggatgatgcgggtcttcttgttgtcgcgggccgcgttgccagccagttccaggatctcggcggttaggtactccaacaccgccgccaggtacaccggcgctccggcaccgacccgctcagcgtagttgcccttgcggagcagtcggtgcactcggcccactgggaactgaagacccgcccttgaagaacgggtcttagccttggcgcgagctttgccgccctgcttgccacgtcccgacatgacgtaaaaaattcaatcagtaacgttcctgagactgacgtaacgctaaagctccgctacttatagtcaacagaggcacgaaaactaagctgtgctattggctaacattacagtttcgctttaaccaatgggattgcg

SEQ ID NO: 12034 - DNA, 544 bp, Homo sapiens
  MAP TO CHR17.3; EXPRESSED IN LUNG, SIGNAL = 2.9; EXPRESSED IN HEART, SIGNAL = 1.9; EXPRESSED IN PLACENTA, SIGNAL = 4.7; EXPRESSED IN HELA, SIGNAL =   2; EXPRESSED IN FETAL LIVER, SIGNAL = 4.9; EXPRESSED IN ADULT LIVER, SIGNAL = 2.7; EXPRESSED IN BRAIN, SIGNAL = 3.5; SWISSPROT HIT: O08967, EVALUE 4.00e-18; EST_HUMAN HIT: BE769222.1, EVALUE 6.00e-57; NT HIT: AF125357.1, EVALUE 1.00e-101
tggaagccgacctttgttagaacagaactcataccaaagtctctctggagtcctctataagccaccccctttcctacatggtgcgtgtgtgtccatgaatgtgtgtgaacatgcatgcgcgtgcacacacacgcacgcgcacacatgcacacgcacaaacacgcacacgcgcacacacgcacgcacgcacacacgcacacacaccgcctttcttcctaagtctcagctttaggagccctgactcagaggtgcgcttaccgagtttcaatagccagccttctcggtctggattgaagaaagtgtgagtgaggtcattcccgtcgtcttctgggattttaaagggttcattttttatgctctcatagagattctgggataaaagatgacaatttatgtctctgattctagaaatattttttcctcctcccctttctcttcattcattccacaagcattcatgtgcctatagtaagccaagcctgctagatgctgagactagaagattatgaccatttctgctttcaggcagctcacagtgacaaaa

SEQ ID NO: 12035 - DNA, 556 bp, Homo sapiens
  MAP TO CHR12.3; EXPRESSED IN LUNG, SIGNAL = 1.3; EXPRESSED IN HEART, SIGNAL = 1.6; EXPRESSED IN HELA, SIGNAL =   2; EXPRESSED IN FETAL LIVER, SIGNAL = 1.9; EXPRESSED IN ADULT LIVER, SIGNAL =   2; EXPRESSED IN BRAIN, SIGNAL = 0.78; SWISSPROT HIT: P31276, EVALUE 9.00e-36; EST_HUMAN HIT: BG681680.1, EVALUE 0.00e+00; NT HIT: gi14762951, EVALUE 0.00e+00
cctctatctcagtccagccgcttgcctcacttcttcccgcttgccttatctccccgcagacgtggttcccctgcagcccgaggtgagcagctaccggcgcgggcgcaagaaacgcgtgccctacactaaggtgcagctgaaggagctagagaaggaatacgcggctagcaagttcatcaccaaagagaagcgccggcgcatctccgccaccacgaacctctctgagcgccaggtaaccatctggttccagaaccggcgggtcaaagagaagaaggtggtcagcaaatcgaaagcgcctcatctccactccacctgaccacccacccgctgcttgccccatctatttatgtctccgctttgtaccataaccgaacccacggaaagacgctgcgcgggtgcagaagagtatttaatgttaaggaaagagaagaaccgcgccgcccggaggcagagaggctccatggccgtgctgctgggccatccccaactccctatcccatccccagcctccacccccatccagatgggactcacgtggcttcaacagctttggaaa

SEQ ID NO: 12036 - DNA, 571 bp, Homo sapiens
  MAP TO CHR1.3; EXPRESSED IN LUNG, SIGNAL = 1.7; EXPRESSED IN HEART, SIGNAL = 0.82; EXPRESSED IN HELA, SIGNAL = 2.2; EXPRESSED IN BRAIN, SIGNAL = 0.48; EXPRESSED IN ADULT LIVER, SIGNAL = 0.92; SWISSPROT HIT: Q49405, EVALUE 7.10e+00; EST_HUMAN HIT: BE885452.1, EVALUE 9.00e-50; NT HIT: gi15296916, EVALUE 6.00e-50
gcttccctctgatgatctggtgatggcagagcaggcatgtggctccctcacaccctatcttgtactgcctggccgaatatgctggcagctctccaggcccctgctgtcagagggcctgacagaaactcactttgtgcctctcgcatgacacgctgagtgctaaccacaggctctcgaagctaaacccctaacattgtgtttttttaaaagcccctgacaaactaagccagaatgatttattaccttcaccctttcacagagtatcataccaatgtttgctgcactttcagaaatatctaatattctttcacataacaatatttataacgcagcgtgataagaggctggagtgggaaatgatgtgcagagtaaagccagatgttgtccaagacaaagagacagagagaaatcttcagagaattgcaacaaggtaaggtagtgtttttgccctttaaaaaataagtatactaaagctatcatagtggttctatttttgacccaatttgattcttaagctcagccttctcagagccaagtgatatatatctaagcctgcctgttcaacactgaa

SEQ ID NO: 12037 - DNA, 512 bp, Homo sapiens
  MAP TO CHR18.3; EXPRESSED IN HELA, SIGNAL =   2; EXPRESSED IN HEART, SIGNAL = 1.2; EXPRESSED IN FETAL LIVER, SIGNAL = 0.98; EXPRESSED IN BRAIN, SIGNAL = 1.2; SWISSPROT HIT: P70362, EVALUE 5.00e-74; EST_HUMAN HIT: BG750143.1, EVALUE 0.00e+00; NT HIT: gi16166906, EVALUE 0.00e+00
gggtttggtttccatcacacgcagttcgagttcatagatcttttcattacagttgatggcagtcacattcccggtggtcagacaggcaaagttcctaagtgcgttgtctaatacagctttggggttagtgatgtccaggatgtcagggctctgaggctggaatttggagtaggtggccacttgaaggttgacactctccacctagaccaggctgccttcttccaagagcaagttctgcatcatccagtgtgggaggtagcagatgccctcatcagccacaaactccagcacgccacagtgcgtcatgcggtccaaattcttactggtcagtttgaacagcatgggataggtaatgttaagttggctgagttggtccagggctgagggcagcataattatcttccctcctttctccacatctgacttgtcattaggccctgctagcgtggacacagagaagcagcggtagtgtgtggagaagcggttttggaagaccctgggaattaggtggt

SEQ ID NO: 12038 - DNA, 522 bp, Homo sapiens
  MAP TO CHR19.3; EXPRESSED IN HEART, SIGNAL = 3.1; EXPRESSED IN HELA, SIGNAL = 6.9; EXPRESSED IN ADULT LIVER, SIGNAL = 2.2; EXPRESSED IN BRAIN, SIGNAL = 3.7; EST_HUMAN HIT: AW403350.1, EVALUE 3.00e-86; NT HIT: gi13631475, EVALUE 2.00e-86; SWISSPROT HIT: P54725, EVALUE 8.00e-24
tgatgggctcttgtcctctctggcggcaggtgggggatgggacatgcctgaggtgggggcaggcgggaaggatgtagaggactctggggcagctgtgggtgaggcctctgggggtgctgaggtaccctggccggctttggtctgcaacagcaagaaaaagggagctggcatcagcaaccctatcagacccaacaacccgctccgctgtggccccgccctgttcacagctaatctctcctgggcacacaggctctttgccagctccccagctcgtccacccaccctcccagccagcacacgtcacccaccttggtcaccatgacgaccacaaagttcttctcatcgatgcgatagtccctgatagggacatcgtcactcaagatcttgccggcatagatgagtttctgtccagccacggggaaggcatcacgacccttctcagcttctatcttctcctttagcaccttcacctagagggagtggtacagacagtcactggagaccccaagattctcttttccc

SEQ ID NO: 12039 - DNA, 557 bp, Homo sapiens
  MAP TO CHR6.3; EXPRESSED IN LUNG, SIGNAL =   6; EXPRESSED IN HELA, SIGNAL = 3.6; EXPRESSED IN PLACENTA, SIGNAL = 5.8; EXPRESSED IN HEART, SIGNAL = 7.9; EXPRESSED IN ADULT LIVER, SIGNAL = 8.1; EXPRESSED IN BRAIN, SIGNAL =  10; EXPRESSED IN FETAL LIVER, SIGNAL = 4.1; NT HIT: X87344.1, EVALUE 0.00e+00; SWISSPROT HIT: Q03519, EVALUE 3.00e-17; EST_HUMAN HIT: AW390813.1, EVALUE 4.00e-58
gggtaggaggtaggaggcagaaagaaatggaatttcatggacctaggaatgttgagagacaactgagagacattccatctgagacttaaattccttttgtactaccttcactcataacttgttcctataataagatcagataaactttgaagatattggatgaatatgaacgaaggaagaaatgaatggatagatgaaacagaatggtgactacattcaccatattttagtttaagtatttttgtgttttgcgcctgaaagggcctagaaatggagttagggaagtgaagacccctataaagatttggggctagcaaatggacccagctgcccaccacctacctgccaaaggagaagaggcacatgaagaagatggcactggcaaaggcatgggggtcaaaatcacctcccaggatgtcaatcacacgaccagaatagtgagggattaatgtctcacctgaaagaggcatgaaaaataacacaagaatgtgctggtgcccaggcccttttaccacctccaactcacaacgtcctctcctgactcacccaaaacagca

SEQ ID NO: 12040 - DNA, 585 bp, Homo sapiens
  MAP TO CHR18.3; EXPRESSED IN LUNG, SIGNAL = 4.7; EXPRESSED IN HELA, SIGNAL = 2.8; EXPRESSED IN PLACENTA, SIGNAL =   3; EXPRESSED IN FETAL LIVER, SIGNAL = 2.3; EXPRESSED IN ADULT LIVER, SIGNAL = 3.7; NT HIT: M63599.1, EVALUE 0.00e+00; SWISSPROT HIT: P02686, EVALUE 9.00e-30; EST_HUMAN HIT: BG423433.1, EVALUE 0.00e+00
ctcctcagagctcaccttgccagagccccgcttgggcgcacccctgtcaccgccaaagaagcgcccgatggagtcaaggatgcccgtgtctctgtgccttgggaggaagccatgcctggcatggtccatggtacttgctgtggccaggtacttggatccgtgcctctgggagggtctcttctgtgacgccatcacatccaggctctcggaggtggctgcactgtcttcttggatggtctggagctcgtcggactcagagggcctgtctttgaaggtgttgtcctccctccccggggcatctcgggaaaagaggcggatcaagtgggggcggctccctgggtcagctgggtgggcatcctgccaggcattcttcgggtccgctgtgcgcttggagtcagtcaccgctgtgtcctgagaggaggtcccattgttctggttcgcatctgcctctcctgcaaacaacaatgagatatgaatacgggcctgtgcaaagctgagcaccggacaaagcagctttctctgaggggtcttgacctagctgtctcctataaaacccacagaatatgtgcagtcctcataaagccc

SEQ ID NO: 12041 - DNA, 508 bp, Homo sapiens
  MAP TO CHR11.3; EXPRESSED IN LUNG, SIGNAL = 1.6; EXPRESSED IN HELA, SIGNAL = 1.9; EXPRESSED IN BRAIN, SIGNAL = 1.9; SWISSPROT HIT: P15407, EVALUE 4.00e-36; NT HIT: AJ297412.1, EVALUE 0.00e+00; EST_HUMAN HIT: T29768.1, EVALUE 0.00e+00
ctttcagccttgggcagtagtcacctgtagcctaccttaccccctcctaagcctgtgctctcctttctggcaggagcttctctgcaccctagcactcctgggcggggtcggaaccactgcaatgcctctgtgccttacctgttcacaaggccttcgacgtacccctggaggcggccccagggcccggatgactcctggccggggttgtggggggctgtactgagggtaggtcagaggcctggggtaactgctgggccccaggaaatgaggctgtaccatccactgcagctcctgactgccactcatggtgttgatgcttggcaccaggtggaacttctaaggaataagaaatggaaggccacagatgaggtccgtgtggattgaggggcttccactgggcagaggctacactgctgtctaccttcaatgtacaggctagctctgggaacagaaagagcacagcttggcagtcagagactgacctggtggcaaatccctgctcataagc

SEQ ID NO: 12042 - DNA, 545 bp, Homo sapiens
  MAP TO CHR6.3; EXPRESSED IN LUNG, SIGNAL = 1.7; EXPRESSED IN HELA, SIGNAL = 2.4; EXPRESSED IN HEART, SIGNAL =   3; EXPRESSED IN FETAL LIVER, SIGNAL = 2.2; EXPRESSED IN ADULT LIVER, SIGNAL = 3.4; EXPRESSED IN BRAIN, SIGNAL = 4.1; NT HIT: gi16174901, EVALUE 0.00e+00; SWISSPROT HIT: P17053, EVALUE 5.10e+00; EST_HUMAN HIT: AI347640.1, EVALUE 0.00e+00
aaccggacccactaatcctctgggattggccgactgtgagctgcagataaggctatcagccaccaaagagcaatgaacaatggaaacttcagagagctgaagaaagggggaggcctgtgttcttggcctgcccctgagtcttctggctgggggcaggttgcctgggcaagaactgcttcaattccttaacaaatgcaaccaccaacacccagatctctctctctctttattttcagtttttttgctgttatccagataattaataaaaaccaaccacgcaaaactgggtcccaccctctccttttgctcccagcctacctccccagttgtgggaacaggtctggagtgagaggcagggagtggctaatgccaccaggaagaaatgaaaactggctcagagagggggaagcctcaacagaaaaagaaataaattaaaagccctcctatcccctccagccagggttcgttcctttccccaactccccagggggcagaagtgagtgcagcacctgatgtctgcttcttccccttgtgtctggtgagat

SEQ ID NO: 12043 - DNA, 595 bp, Homo sapiens
  MAP TO CHR6.3; EXPRESSED IN ADULT LIVER, SIGNAL = 2.5; EXPRESSED IN BRAIN, SIGNAL = 3.8; EXPRESSED IN HELA, SIGNAL = 6.8; EXPRESSED IN LUNG, SIGNAL = 6.7; SWISSPROT HIT: P25440, EVALUE 9.00e-50; EST_HUMAN HIT: BG028202.1, EVALUE 0.00e+00; NT HIT: X96670.1, EVALUE 0.00e+00
gttactgcagctcctccagcccagccccttgccaaggtatgatctgtggatttcctctgggcagcagggaggcaagggtcttaagtaaagtgggcttggagtgacaggttccctatcttgtttctttctgcagaaaaaaggcgtaaagcggaaagcagatactaccacccctacacctacagccatcttggctcctggttctccagctagccctcctgggagtcttgagcctaaggcagcacggcttccccctatgcgtagagagagtggtcgccccatcaagcccccacgcaaagacttgcctgactctcagcaacaacaccagagctctaagaaaggaaagctttcagaacagttaaaacattgcaatggcattttgaaggagttactctctaagaagcatgctgcctatgcttggcctttctataaaccagtggatgcttctgcacttggcctgcatgactaccatgacatcattaagcaccccatggacctcagcactgtcaaggtacccactgcatggggcagatgggatgctcaggcagtgatgggagcctaggtgcaaaacaataagtctccttatgtgggcacacag

SEQ ID NO: 12044 - DNA, 541 bp, Homo sapiens
  MAP TO CHR6.3; EXPRESSED IN LUNG, SIGNAL = 1.6; EXPRESSED IN PLACENTA, SIGNAL = 2.3; EXPRESSED IN HEART, SIGNAL = 2.9; EXPRESSED IN FETAL LIVER, SIGNAL = 1.6; EXPRESSED IN ADULT LIVER, SIGNAL = 2.7; EXPRESSED IN BRAIN, SIGNAL = 1.8; EXPRESSED IN HELA, SIGNAL = 2.1; EST_HUMAN HIT: AW855262.1, EVALUE 0.00e+00; SWISSPROT HIT: P51684, EVALUE 1.00e-100; NT HIT: gi14755137, EVALUE 0.00e+00
gaggtcaggcagttctccaggctatttgtaccgattgcctactccttgatctgtgtctttggcctcctggggaatattctggtggtgatcacctttgctttttataagaaggccaggtctatgacagacgtctatctcttgaacatggccattgcagacatcctctttgttcttactctcccattctgggcagtgagtcatgccaccggtgcgtgggttttcagcaatgccacgtgcaagttgctaaaaggcatctatgccatcaactttaactgcgggatgctgctcctgacttgcattagcatggaccggtacatcgccattgtacaggcgactaagtcattccggctccgatccagaacactaccgcgcagcaaaatcatctgccttgttgtgtgggggctgtcagtcatcatctccagctcaacttttgtcttcaaccaaaaatacaacacccaaggcagcgatgtctgtgaacccaagtaccagactgtctcggagcccatcaggtggaagctgctgatgttggggcttgagctac

SEQ ID NO: 12045 - DNA, 545 bp, Homo sapiens
  MAP TO CHR5.3; EXPRESSED IN HELA, SIGNAL =   3; EXPRESSED IN PLACENTA, SIGNAL =   2; EXPRESSED IN BRAIN, SIGNAL = 2.7; NT HIT: gi14861873, EVALUE 0.00e+00; SWISSPROT HIT: Q9Y5E3, EVALUE 3.00e-76; EST_HUMAN HIT: BI831368.1, EVALUE 0.00e+00
gtcgtaccagctgctcaaggccacggagctcggtctgttcggcgtgtgggcgcacaatggcgaggtgcgcaccgccaggctgctgagcgagcgagacgcagccaagcacaggctggtggtgcttgtcaaggacaatggcgagcctccgcgctcggccaccgccacgctgcacgtgctcctggtggacggcttctcccagccctacctgcctctccctgaggcggccccggcccaagcccaggccgactctctcaccgtctacctggtggtggcgttggcctcggtgtcgtcgctcttcctcttttcggtgctcctgttcgtggcggtgcggctgtgcaggaggagcagggcggcctcggtgggtcgctactcggtgcccgagggtccctttccagggcatctggtggatgtgagcggcaccgggaccctatcccagagctaccagtacaaggtgtgtctgacgggaggctcagaaacaaatgagttcaagttcctgaagccgattatgcccaacttccctcctcagggcactgagagagaaatgg

SEQ ID NO: 12046 - DNA, 558 bp, Homo sapiens
  MAP TO CHR17.3; EXPRESSED IN HELA, SIGNAL = 6.2; EXPRESSED IN LUNG, SIGNAL = 3.5; EXPRESSED IN HEART, SIGNAL = 7.1; EXPRESSED IN PLACENTA, SIGNAL = 4.6; EXPRESSED IN ADULT LIVER, SIGNAL = 5.7; NT HIT: M33319.1, EVALUE 0.00e+00; SWISSPROT HIT: P08514, EVALUE 1.00e-14; EST_HUMAN HIT: BE241740.1, EVALUE 0.00e+00
ggaatctgaagggaaggaggaggagctggcccattcctgcctgggaggttgtggaagaaggaagatggccagagctttgtgtccactgcaagccctctggcttctggagtgggtgctgctgctcttgggaccttgtgctgcccctccagcctgggccttgaacctggacccagtgcagctcaccttctatgcaggccccaatggcagccagtttggattttcactggacttccacaaggacagccatgggaggtgagccgtaagggaagttggggtattgggagagagcaggacccctccccatcactgcttctgggggcttcgagtttcccatttgcgatagcagttgagcaaggtgacttgtggggcctattcaggttgatttcttgtcaagaatgttggggtccaggggactggctcaggtgaaggtataagggcagggcacatgtgggctgatgggcactgaaaactacagcaagaacaaagggaagacaagagttgatgctttattttttccccaagggtcagttgtatgaaccactccaccctcaacacctt

SEQ ID NO: 12047 - DNA, 552 bp, Homo sapiens
  MAP TO CHR1.3; EXPRESSED IN HEART, SIGNAL = 2.8; EXPRESSED IN FETAL LIVER, SIGNAL = 6.2; EXPRESSED IN ADULT LIVER, SIGNAL =  18; EXPRESSED IN BRAIN, SIGNAL = 3.6; EXPRESSED IN HELA, SIGNAL = 3.3; SWISSPROT HIT: P01131, EVALUE 8.00e-11; NT HIT: D86401.1, EVALUE 6.00e-84; EST_HUMAN HIT: BF794091.1, EVALUE 1.00e-70
ttattcctggggttgctgagttgtgacctgaatgtgaacacagcctgcctggtgaaaggagaggacacagtgacacagtcaggggacctgggacctaggaccagagacagctcacctcttggctgcttcagctcatggaagatgacaatgtcatgtgggttgttgcaggttctcagccaggatggagatttccaggccattgagccgatttgcactgaaaatggcctcgttctccaggtctgtccagaacaccttgtcctgtggggtatagatgcagaggatgggaggcctggagtgtaaatccatgacctcagtctgaggggttggccccaaaccatagtcacaagaacttccctgaaatctcccctgatctgtcctgtctatggattcacggtggggctctcagcctctaatctgtgatgcacgtctccttgttcccttctatcttagaggattattcagtgattctgtgctttgaactgacagccacaacattactcattcatgctgaactaagcctgcttgctagagcccagcagaaacccaaggtta

SEQ ID NO: 12048 - DNA, 551 bp, Homo sapiens
  MAP TO CHR11.3; EXPRESSED IN FETAL LIVER, SIGNAL = 0.91; EXPRESSED IN HELA, SIGNAL = 3.4; EST_HUMAN HIT: BF883374.1, EVALUE 6.00e-97; SWISSPROT HIT: P54703, EVALUE 8.00e-03; NT HIT: gi15312193, EVALUE 1.00e-78
agcagttgtgtcaaaccgtgggggccatttctccaggaggctgctttatcccaggagaaggcaggtgtgaggtgacaccttacctggtggtaccctgtgcaggtgacaagcttctgtgatcctgggagaaactgtatgtcctggtcccagatgggaacccgcaagtccagccagtcattccgcacctggtggggtgggcagatggaggacagggctatggggggctcgatgtgcccctgttttcagccctccttcgccccctaagtccatctagtctctaatgcatcgtcagtggcctcagcctccctcgacttcaggaacagctccttcacactcttgtcactcacgttcttggccctgaacacaggttcctcagagccctgcaggtcccatatcttcaaagcattctctttcccacctgtggcaaccacatgggggtgtgctgggtcttggcgcatcctacacaccccagggcccactctcagttccaggagctgtaaagaataggagataagagtccgttccagagtccttaatcctcccttccccag

SEQ ID NO: 12049 - DNA, 510 bp, Homo sapiens
  MAP TO CHR11.3; EXPRESSED IN HEART, SIGNAL = 9.1; EXPRESSED IN FETAL LIVER, SIGNAL = 3.8; EXPRESSED IN BRAIN, SIGNAL = 7.4; EXPRESSED IN ADULT LIVER, SIGNAL = 5.6; EXPRESSED IN HELA, SIGNAL = 9.8; EST_HUMAN HIT: AI763422.1, EVALUE 0.00e+00; SWISSPROT HIT: Q01995, EVALUE 6.00e-21; NT HIT: AF013711.1, EVALUE 0.00e+00
ggaaggattaggggaagcagatagccaagaaaggataaagtgagggtctgggatggggaataatgggtccttaatactccttgacccctccctttccaccctcctgcgctcagtctccctagcctatgaggcaagctagattagggaaaaaaagtgcaacaggaaggcaatgggattgggctaggacgtaacagagggatcagaaaacgggtggaaaacacacagttctaccaagtctttatcctggttcctcctcttctaggaaagcgcaggagcataagagggaattcacagagagccagctgcaggagggaaagcatgtcattggccttcagatgggcagcaacagaggggcctcccaggccggcatgacaggctacggacgacctcggcagatcatcagttagagcggagagggctagccctgagcccggccctcccccagctccttggctgcagccatcccgcttagcctgcctcacccacacccgtgtggtaccttcagccctg

SEQ ID NO: 12050 - DNA, 535 bp, Homo sapiens
  MAP TO CHR19.3; EXPRESSED IN PLACENTA, SIGNAL = 1.7; EXPRESSED IN LUNG, SIGNAL = 1.1; EXPRESSED IN HEART, SIGNAL = 1.3; EXPRESSED IN HELA, SIGNAL = 2.5; EXPRESSED IN ADULT LIVER, SIGNAL = 0.85; EXPRESSED IN BRAIN, SIGNAL =   1; SWISSPROT HIT: Q92793, EVALUE 9.90e-01; NT HIT: AF354258.1, EVALUE 0.00e+00; EST_HUMAN HIT: BG984338.1, EVALUE 9.00e-56
agaggcaaaacaagggagtgagtgaggcctggagtccacctctggccccgggtcacccctgccgcttcatacctgccgtaggatcttgtacccagagattccccgtaagctccgagagctggaagccgagggctacaaggtatgtgcagccgcctgtctgcatgggcacgtgcacgtggcggtccgaccgcagtcagaccaaggccctggtgagcagagcgtctggtgacaccctttgctccccagctggtgatcttcaccaaccagatgagcatcgggcgcgggaagctgccagccgaggagttcaaggccaaggtggaggctgtggtggagaagctgggggtccccttccaggtatggctggaagggaggctgggagctatgtgggggcacagagatccagagcgagggctttagactccagggtaagcggggcggaggcctcaggcagtgtgatgctgataggaacccatcatcagctacaaattctgggctggggtggcatccagtaggtgcttgagggggagctaaagct

SEQ ID NO: 12051 - DNA, 599 bp, Homo sapiens
  MAP TO CHR9.3; EXPRESSED IN HELA, SIGNAL = 4.3; EXPRESSED IN LUNG, SIGNAL = 2.2; EXPRESSED IN BRAIN, SIGNAL = 1.1; SWISSPROT HIT: O15260, EVALUE 7.00e-22; NT HIT: AF078866.1, EVALUE 1.00e-102; EST_HUMAN HIT: AL554410.1, EVALUE 1.00e-101
tctgacccttatttcacgggtgtggggactccgggtctgagtggaggacagacctgaccacggggacccagctggtcaacactgaagctgtgactaggactcggttgtgtgtgtgttcaggtagcctgtcactgtcgagttgtaaagatacctctgtctcctgagctatgtaaggttttacatgggtgtaactcgagtctgaggtcctgtgcgcatgcctgcctggtcctgcttggcagatcactgggtttggagaaagggaagtaagggccttcttatactggcagcaaggtctccctgcacctggtctcacagacaggccagatcctggtgaggcttagcttccagcccacatatctgttcctcaggaacctggccctgggaggaggcctgttgctgctcctagcagaatcccgttctgaagggaagagcatgtttgcgggcgtccccaccatgcgtgagagctcccccaaacagtacatgcagctcggaggcagggtcttgctggttctgatgttcatgaccctccttcactttgacgccagcttcttttctgtaagtattcctacttgcctgaaccggtctggtttcctgtgaat

SEQ ID NO: 12052 - DNA, 542 bp, Homo sapiens
  MAP TO CHR2.3; EXPRESSED IN HELA, SIGNAL = 3.6; EXPRESSED IN HEART, SIGNAL = 3.3; EXPRESSED IN FETAL LIVER, SIGNAL = 2.7; EXPRESSED IN ADULT LIVER, SIGNAL = 4.5; SWISSPROT HIT: P39012, EVALUE 2.00e-06; NT HIT: AB017268.1, EVALUE 0.00e+00; EST_HUMAN HIT: BF345938.1, EVALUE 1.00e-109
cagggctaccagcttcagagccatccagcccctgtctgggacctgtgtgcttaccatcctgtgctgggggaggggggacactagggtcagggacccccctgagctcctcaaggcccactccggcctcatgcagctgcatccacagttgcagagccttgaaaccaaggaccaggagcaagaagctggtggcgggcatgtagaggccgatggagacgaagcgggacagagtggggagcaggtagaggaagaacagctggtgcgggtgttccaggaggtggttgagcttgcagaacatgccctccaaagccttgcccgctgccaccaggtcatacttgtactggcggaagctactgatgcgacgcagggttagggcctccacatggtagtgcaggaagaggccacgggaagcctgccacaaaatcatgagcagcagtgtttgcaggccctgcagcagttcgtccaacaatgtccagtcctggggctgcagcttaccctgaagcgtgcacagcaggcccactttctggcagaaggtctggaagaga

SEQ ID NO: 12053 - DNA, 577 bp, Homo sapiens
  MAP TO CHR10.3; EXPRESSED IN HEART, SIGNAL = 2.4; EXPRESSED IN HELA, SIGNAL = 4.9; EXPRESSED IN ADULT LIVER, SIGNAL = 2.9; EXPRESSED IN FETAL LIVER, SIGNAL = 0.91; SWISSPROT HIT: P18584, EVALUE 3.00e-08; NT HIT: AF157623.1, EVALUE 0.00e+00; EST_HUMAN HIT: BG764798.1, EVALUE 1.00e-107
cttggtgtgtgtgtggcttcagtgttcactggctcccgcacggcttgcaatgtgtggattacgggtgggagggaaatccagtcctgcccgcagcaaagggatgttagttgtgagctcagttccccaccgggcctggtgtttccaaatagcccgtcactgtccctgcttggttttccatgatatctgtgcctttacctatttggttaaattaaaccaactcagcaacgccagccattgtggtttcagggcaagctgcctgtcctgctgcttggccgctcctcagagctgcggccgggagagttcgtggtcgccatcggaagcccgttttcccttcaaaacacagtcaccaccgggatcgtgagcaccacccagcgaggcggcaaagagctggggctccgcaactcagacatggactacatccagaccgacgccatcatcaacgtgagcctctgtccctctgcgggtggggattggggcagagttttgccagggggagaggagtcagcataggtcttagcccctgactttgttgtagtctgtgtgaagggatggaactagaccaagccatgtggattct

SEQ ID NO: 12054 - DNA, 540 bp, Homo sapiens
  MAP TO CHR17.3; EXPRESSED IN ADULT LIVER, SIGNAL = 5.3; EXPRESSED IN HELA, SIGNAL =   6; EXPRESSED IN PLACENTA, SIGNAL =  14; EXPRESSED IN LUNG, SIGNAL = 3.8; EXPRESSED IN BRAIN, SIGNAL = 6.8; SWISSPROT HIT: Q13595, EVALUE 5.00e-05; NT HIT: AF047002.1, EVALUE 5.00e-75; EST_HUMAN HIT: AA833873.1, EVALUE 5.00e-79
gctcttggaagttgctgtccctcctgccccgcccttccctcatttcccgttaaccactgtcctgcctcccagagaaccacccccaaagcaactcacgcttccagggcctgtccctgggccaccagaaggaacgcagttttgttgcttttctgacaactgctctctgcaactcccaggaactctttgctgaatttggaacgctgaagaaggcggctgtgcactatgatcgctctggtcgcagcttaggaacagcagacgtgcactttgagcggaaggcagatgccctgaaggccatgaagcagtacaacggcgtccctctggatggtgagtctgggggtggacccacgctgactgtggggcttgtggagtttggggctggcacctgtccaggtaggaatatggggtacccctgtggctgaggacactttgcatttgcccctttgtctctctcttccatctgccacctctcatgctgccccacacatctggaccaacctcttgtgaacccccatccagcaagctacatccctcccctccttc

SEQ ID NO: 12055 - DNA, 526 bp, Homo sapiens
  MAP TO CHR12.3; EXPRESSED IN LUNG, SIGNAL = 1.4; EXPRESSED IN HELA, SIGNAL =   6; EXPRESSED IN PLACENTA, SIGNAL = 2.4; EXPRESSED IN HEART, SIGNAL = 2.8; EXPRESSED IN ADULT LIVER, SIGNAL = 4.9; EST_HUMAN HIT: BF871117.1, EVALUE 0.00e+00; SWISSPROT HIT: P10387, EVALUE 1.10e-01; NT HIT: gi14783876, EVALUE 2.00e-68
tcctgtggtgagaagctgtgcccagggtggggcaggctagaggtcaggttctggcccccgttttctgtgggtaatacctcatactgcgaccaggcacaggggcggaggagaccccggggtgggagcctcacccttcgtgcgctcgcccaggctctcctgctttgctccctgctgcctgctgcccagtgtgactggtgatggtgggcgggtgagcgctgtcagtcgctgttcctgtgctggatgatggggcagggaaatgccctctctgcagtgtcttgcagcacacctgcatctccagttttcggcccctccctggctcttaccaggtcacgtgatccctccagacaacatcctgcccctcgtcatctgcagcgggatctccaaccagccgctggaattcacgttccagaaaagagagctgcctcagatggtcagtcccagccagctcgccgcaccacagcctggcctcaggcagcaaagggttttctggggcaggggcgctctggcccaccctgagtgttttcag

SEQ ID NO: 12056 - DNA, 503 bp, Homo sapiens
  MAP TO CHR17.3; EXPRESSED IN HEART, SIGNAL = 2.6; EXPRESSED IN BRAIN, SIGNAL = 3.2; EXPRESSED IN HELA, SIGNAL =  23; SWISSPROT HIT: P07737, EVALUE 9.00e-31; NT HIT: gi14774546, EVALUE 1.00e-105; EST_HUMAN HIT: AI459229.1, EVALUE 0.00e+00
agaacacggtgggaatcttggtgcactgactaacttgatgggcgcttggttcctcttccagccagctgaggtgggtgtcctggttggcaaagaccggtcaagtttttacgtgaatgggctgacacttgggggccagaaatgttcggtgatccgggactcactgctgcaggatggggaatttagcatggatcttcgtaccaagagcaccggtggggcccccaccttcaatgtcactgtcaccaagactgacaagagtgagttcctgagtcttacccttcctttagctccaagatctctaatgtaccgccttctggtaatcttgagggtgcttttttgtgtgattccccaacatgaagggagtcagaccagtattgtgttccttgtctgctggatgctggaacacgggatagtccctccattctgtctcagttcctcatcttgtaattcgaagttgctgaactgcattacctcttaaattacttactgccttgagctcggattag

SEQ ID NO: 12057 - DNA, 520 bp, Homo sapiens
  MAP TO CHR8.3; EXPRESSED IN LUNG, SIGNAL =  19; EXPRESSED IN HELA, SIGNAL = 1.3e+02; EXPRESSED IN HEART, SIGNAL =  12; EXPRESSED IN PLACENTA, SIGNAL = 7.1; EXPRESSED IN BRAIN, SIGNAL = 8.1; EXPRESSED IN FETAL LIVER, SIGNAL =  22; NT HIT: gi15299527, EVALUE 0.00e+00; EST_HUMAN HIT: BF570463.1, EVALUE 0.00e+00; SWISSPROT HIT: P38983, EVALUE 3.00e-81
attgttgccattgaaaaccctgctgatgtcagtgttatatcatccaggaatactggccagagggctgtgctgaagtttgctgctgccactggagccactccaattgctggctgcttcactcctggaactttcactaaccagatccaggcagccttccaggagccacgacttcttgtggttactgaccccagggctgaccaccagcctttcacggaggcatcttatgttaacctacctaccattgctctgtgtaacacagattctcctctgcgctatgtgcacattgccatcccatgcaacaacaagggagctcactcagtgggtttgatgtggtggatgctggcttgggaagttctgtgcatgcgtggcaccatttcccgtgaacacccgtgggaggtcatgcctgatttctgcttctacagagatcctgaagagattgaaaaagaagagcagcctgctgctgaaaaggctgtgaccaaggaggaatttcagggtgaaaggactgctccagctcctgagt

SEQ ID NO: 12058 - DNA, 516 bp, Homo sapiens
  MAP TO CHR6.3; EXPRESSED IN HELA, SIGNAL = 4.1; EXPRESSED IN LUNG, SIGNAL = 2.5; EXPRESSED IN HEART, SIGNAL = 1.5; EXPRESSED IN PLACENTA, SIGNAL = 1.5; EXPRESSED IN BRAIN, SIGNAL = 1.8; NT HIT: X96670.1, EVALUE 0.00e+00; EST_HUMAN HIT: BE246019.1, EVALUE 0.00e+00; SWISSPROT HIT: P08392, EVALUE 8.30e-02
agcttggcagtctccagttgggctgtgcatggaagcttgggaagactttgttggaaggggaggcggggagagagtgctggaggctctggggcgatggcttccgcacctcttccaaccaccctctttccctggagtcggcggaccacagctcagccaattggcttggagatgtggcgggttgccacttccctgtgggtctctgcggcactcttctgcctggtgactgacaccttggaaatgaagtttatgacgtcatcgttgcggctggccaatagaaaaagctcccgcggagaggtgttccttccccttcgactcagcttcttcacccgcgtgagcgagcgcgcgcgcgcggagggggtggggaaaatctcaagcagggtggcgcgcatgagcggcgaagctcctcctccccgcctatatataaagggctggcgcggggctcggcggcgccatttcgtgctggagtggagcagcctctagaacgagctggaggattctgcctaccgatacagagcc

SEQ ID NO: 12059 - DNA, 522 bp, Homo sapiens
  MAP TO CHRX.3; EXPRESSED IN HEART, SIGNAL = 1.1; EXPRESSED IN HELA, SIGNAL = 3.4; EXPRESSED IN PLACENTA, SIGNAL = 1.1; EST_HUMAN HIT: BG114800.1, EVALUE 2.00e-56; SWISSPROT HIT: P51858, EVALUE 1.00e-21; NT HIT: gi16161715, EVALUE 4.00e-54
tcatgatctctgatgcctggggtctcagcatcttcattggcagcctcttcctcttcctcctcctcttcttcctcttggggaggcccccggccagagccgggctcagagagggtgctattcttttccacctccacaagaagtgtcttctcaccttccaaggtggctgcctccttcttctccccttcagggttttctgcttccttgggacatttaggggagtcctccagcaggtcccctgctcgagaagcatcttatagatctctctgaaagcagacattactatgaagccaaaatcttcatatttggtaattcattgagtctcaaaaaaatttttcaggaaatgggtacctatattcatatcctcactttagatatgaagaaaatatgagggcctcagataggttaagtgatttgccatatgtgatataattagtaagtgacggagcttagtttctctggacagagaaagcagttttcttctgctttctgtttgaatactctgcccttttgaccacagcattc

SEQ ID NO: 12060 - DNA, 597 bp, Homo sapiens
  MAP TO CHR6.3; EXPRESSED IN LUNG, SIGNAL = 0.7; EXPRESSED IN HEART, SIGNAL = 1.3; EXPRESSED IN HELA, SIGNAL = 2.2; EXPRESSED IN FETAL LIVER, SIGNAL = 0.71; EXPRESSED IN ADULT LIVER, SIGNAL = 0.9; SWISSPROT HIT: Q01860, EVALUE 6.00e-42; NT HIT: Z11900.1, EVALUE 0.00e+00; EST_HUMAN HIT: AA205468.1, EVALUE 0.00e+00
cttcgaaatccagcttccagttcccacctggcccctgcctgccagggctgcctgcagttgatacacacccctccctggccagggcagctgaccctgcctgctcctctcctgggtgccaggtctgggcagctgcaggtgaccacttccccatcaggctgccctgtcatgaccacctccccacaccccaaccccgtcgaagctcacttgcctcctccgggttttgctccagcttctccttctccagcttcacggcaccaggggtgacggtgcagggctccggggaggccccatcggagttgctctccaccccgactcctgcttcaccctcaggctgagaggtctccaagccgccttggggcactagccccactccaacctggggcccacagtacgccatccccccacagaactcatacggcggggggcatgggggaatcccccacacctcagagcctggcccaacccccggcccgattcctggccctccaggagggccttggaagcttagccaggtccgaggatcaacccagcccggctccggcccccctggcccatcacctccaccacctggagggggcgagaaggcgaaatctgaag

SEQ ID NO: 12061 - DNA, 538 bp, Homo sapiens
  MAP TO CHR19.3; EXPRESSED IN HEART, SIGNAL = 1.6; EXPRESSED IN HELA, SIGNAL = 2.7; EXPRESSED IN ADULT LIVER, SIGNAL = 1.6; EXPRESSED IN FETAL LIVER, SIGNAL = 1.2; EST_HUMAN HIT: BF058102.1, EVALUE 0.00e+00; SWISSPROT HIT: P52742, EVALUE 6.00e-43; NT HIT: gi16162715, EVALUE 0.00e+00
gtacgcacacaggcgagaagcccttcgtgtgcgcgctctgcggtgctgccttcagccagggctcctcgctctttaagcaccagcgcgtgcacacaggcgagaagcccttcgcctgcccacagtgcggccgcgcctttagccacagctccaacctcacccagcaccagctcctgcacacgggcgagcggcccttccgctgcgtggactgtggcaaggccttcgccaagggcgccgtgctgctcagccaccggcgcattcacacgggcgagaagcccttcgtgtgtacgcagtgtggccgcgccttccgtgagcgcccggccctcttccaccaccagaggatccataccggcgagaagaccgtccggcgatccagggccagcctgcacccccaggccaggtctgttgccggggcatcatcagaaggtgcgccagcgaaggaaaccgagcccactcccgcctcgggcccagccgccgtctcgcagccagcggaggtctgaggtcacaggttgcagccctggccttctgtgaatcccttcca

SEQ ID NO: 12062 - DNA, 555 bp, Homo sapiens
  MAP TO CHR19.3; EXPRESSED IN HELA, SIGNAL = 3.4; EXPRESSED IN LUNG, SIGNAL = 1.3; EXPRESSED IN ADULT LIVER, SIGNAL = 1.9; NT HIT: S38322.1, EVALUE 1.00e-126; EST_HUMAN HIT: BI115924.1, EVALUE 1.00e-113; SWISSPROT HIT: P12694, EVALUE 4.00e-29
gtttcctttccccttgaagcctggtgactgctggcctgagccacgcttgagccgtgggtcatgtgagtgtgaatgagtgtgagtgcatgtgagtctccgcccctgctcaccaccctctcatcccctgcagcggtgggggcggcgtacgcagccaagcgggccaatgccaacagggtcgtcatctgttacttcggcgagggggcagccagtgagggggacgcccatgccggcttcaacttcgctgccacacttgagtgccccatcatcttcttctgccggaacaatggctacgccatctccacgcccacctctgagcagtatcgcggcgatggcattggtatgggctctgctggctgctccccaccccgctgggatcatctccttccctccccaatcctgccaccttcctgccacccctaccctccttcctggttctcgtcctgtgtcctgtggcgtctggcacttggtcagccacaggagttgaggtcctgagcactcagccttgctctctgtcctctccctgctcgtccccttggcctcgtgcatgttccttat

SEQ ID NO: 12063 - DNA, 581 bp, Homo sapiens
  MAP TO CHR18.3; EXPRESSED IN HELA, SIGNAL = 4.3; EXPRESSED IN LUNG, SIGNAL = 2.9; EXPRESSED IN ADULT LIVER, SIGNAL = 2.9; EXPRESSED IN BRAIN, SIGNAL =   4; NT HIT: gi5453556, EVALUE 0.00e+00; EST_HUMAN HIT: AL550410.1, EVALUE 0.00e+00; SWISSPROT HIT: P36113, EVALUE 4.00e-03
tcctgacattgtgaaccagcgccaacaagcccaggcgagggaagccctcaaaaagtacttattctactttgagaggtgggaaaaccacaacaaaagcttgcagctagaggcacagacataccagcagattcatgagaagattcaggagagggtcatgaacaatctggggacatggattgactggcagtacctacagaatgcagccaagctcttggccaggtgttgatacaccctgcagtacatcaacccatatacatattacatggagtctggacccaggaatgagctgtttgaataccagcaggctgagcaggaggctgaaattgaaaacctctcatggaaagtggagcatgcagacagctatgacagaggggacttggagaaccagatgcatgtagccgagcagtggaggagaaccctgctgaaggatttccatgacacctaagttgggatgtggatgtgcgggggtgaggaagataaggctgcaaggtctcctggctgccctactacatgctgcaggctctgcctttcatgacccctggcgacagccagggccccactcctgagagacactggcaaca

SEQ ID NO: 12064 - DNA, 521 bp, Homo sapiens
  MAP TO CHR10.3; EXPRESSED IN PLACENTA, SIGNAL = 1.7; EXPRESSED IN LUNG, SIGNAL = 4.4; EXPRESSED IN HELA, SIGNAL = 2.5; EXPRESSED IN FETAL LIVER, SIGNAL = 1.2; EXPRESSED IN BRAIN, SIGNAL = 2.1; EXPRESSED IN ADULT LIVER, SIGNAL = 1.8; NT HIT: AJ243211.1, EVALUE 0.00e+00; EST_HUMAN HIT: AA295332.1, EVALUE 6.00e-57; SWISSPROT HIT: P30203, EVALUE 2.00e-17
cttcagtgtggggtgttgtgtgtcccctgtctgagggaatcaggcagagcccatggtctgcttagagaagggtcatgtgtatctctaggtcccctccaggatgcagatcaggaggagccttttattctgctccagctgaagctctaaggcttgggtttgggccaagcagtcactgtcctcttccccatgaagaactctaaccttaaggcctgttaaagcccagcccaattagagattctctcaaagatatctgcctatggggaagaccctgaatgccctgcaggccctgagaccttgtgcctcagtaggaatgtgcaagagaaattctgtgccttcctctaggatctgattctggtttggccctgaggctggtgaatggagatggcaggtgtcagggccgagtggagatcctataccgaggctcctggggcaccgtgtgtgatgacagctgggacaccaatgatgccaacgtggtctgtaggcagctgggttgtggctgggccatgtcagctccaggaaat

SEQ ID NO: 12065 - DNA, 572 bp, Homo sapiens
  MAP TO CHR2.3; EXPRESSED IN FETAL LIVER, SIGNAL = 9.2; EXPRESSED IN ADULT LIVER, SIGNAL = 6.4; EXPRESSED IN LUNG, SIGNAL = 7.5; EXPRESSED IN HELA, SIGNAL = 4.8; EXPRESSED IN PLACENTA, SIGNAL = 6.9; EXPRESSED IN HEART, SIGNAL = 7.6; NT HIT: gi9257223, EVALUE 0.00e+00; EST_HUMAN HIT: AL540575.1, EVALUE 0.00e+00; SWISSPROT HIT: P05111, EVALUE 2.00e-40
tgggcattagcccattttacagatggggagacagaagcataaggaagtttagtaactggcctattgctgcaaagcaactgagtagcaggactaggattcaaacccaggtccgcctggcctgcaaacccatgctgtgccttgctttttctcaaagtcatcctgccggttcccccaccctcgttacctgtggctgggaaaaggatggcttgggagacatcctcctcttcctcgggctcagagcccctgtgtgtgaagccccccagggcatgtcttcggggcagccgcctgactccagggtccccaccttccctggtcaccgcggggggccccaaggcatccaagaacagggccctcaccttggccagaacaagttcccgggccagctccagcccctggcagctgtgcccaccctgtggggtcagcagcaagaagagcagtaggtgcagcaccatagctcacctggccctgctagtggggaactcacaccctgccccgtgccccttctgccagggtctgcccagggcctttccactctcccctccccatcccacacccaccctcttctacccttc

SEQ ID NO: 12066 - DNA, 576 bp, Homo sapiens
  MAP TO CHR12.3; EXPRESSED IN FETAL LIVER, SIGNAL = 3.1; EXPRESSED IN ADULT LIVER, SIGNAL = 4.6; EXPRESSED IN BRAIN, SIGNAL = 3.3; EXPRESSED IN HEART, SIGNAL = 3.2; EXPRESSED IN HELA, SIGNAL = 2.6; EXPRESSED IN PLACENTA, SIGNAL = 4.6; EST_HUMAN HIT: U25937.1, EVALUE 0.00e+00; SWISSPROT HIT: P46527, EVALUE 9.00e-17; NT HIT: S76988.1, EVALUE 0.00e+00
taaaagccactggggatgacggatccaggattgtgggtggaggtagtgggtttttcatcccctgactatggggccaacttctgccagccattgttttttctaataaagattgtgtgttctttttaaaaatttcccctgcgcttagattcttctactcaaaacaaaagagccaacagaacagaagaaaatgtttcagacggttccccaaatgccggttctgtggagcagacgcccaagaagcctggcctcagaagacgtcaaacgtaaacagctcggtgggttgatcactaaaggagcacgcactggaacccggggccttcagacctcacgatacctgatcttactggttgctggcaaattaaaagcttatggggttttgttttgtttatacttcgtgaggtcaaaaaagtagcaatggggaaggctggggatacggtaattcctcagagtttctatgcccagagatactttctcttcaaactgttgaccagagcagctacttgtaacccaggccccatcgggtaggaaggtcgtttccctgtgagtcccactaaaacgtgttgggagcaataggtt

SEQ ID NO: 12067 - DNA, 572 bp, Homo sapiens
  MAP TO CHR11.3; EXPRESSED IN LUNG, SIGNAL = 3.8; EXPRESSED IN HELA, SIGNAL = 3.7; EXPRESSED IN FETAL LIVER, SIGNAL = 2.8; EXPRESSED IN BRAIN, SIGNAL = 6.7; NT HIT: M81780.1, EVALUE 0.00e+00; EST_HUMAN HIT: BG756928.1, EVALUE 0.00e+00; SWISSPROT HIT: P17405, EVALUE 2.00e-86
cctcttcctcactgacctgcactgggatcatgactacctggagggcacggacccctgactgtgcagacccactgtgctgccgccggggttctggcctgccgcccgcatcccggccaggtgccggatactggggcgaatacagcaagtgtgacctgcccctgaggaccctggagagcctgttgagtgggctgggcccagccggcccttttgatatggtgtactggacaggagacatccccgcacatgatgtctggcaccagactcgtcaggaccaactgcgggccctgaccaccgtcacagcacttgtgaggaagttcctggggccagtgccagtgtaccctgctgtgggtaaccatgaaagcacacctgtcaatagcttccctccccccttcattgagggcaaccactcctcccgctggctctatgaagcgatggccaaggcttgggagccctggctgcctgccgaagccctgcgcaccctcaggtacttatcgtccgtggaaacccaggaagggaaaagaaaggtgaatgaaagtgaagggagaagggaacctggggcattgtctctgatt

SEQ ID NO: 12068 - DNA, 532 bp, Homo sapiens
  MAP TO CHR17.3; EXPRESSED IN ADULT LIVER, SIGNAL =   6; EXPRESSED IN BRAIN, SIGNAL = 5.1; EXPRESSED IN HELA, SIGNAL = 3.1; EXPRESSED IN PLACENTA, SIGNAL = 5.9; EXPRESSED IN LUNG, SIGNAL = 7.5; NT HIT: X58853.1, EVALUE 0.00e+00; EST_HUMAN HIT: R07235.1, EVALUE 1.00e-124; SWISSPROT HIT: P17209, EVALUE 3.00e-23
gctattcagcttgggtggaggctgattggccaccagccaccaccttcactggggattggaaggtatagctgggtcttctctccacagagttcaaagaggccttttcattgtttgaccggaccccgactggagagatgaagatcacctacggccagtgcggggatgtactgcgggccctgggccagaaccctaccaatgccgaggtgctgcgtgtgctgggcaagcccaagcctgaaggtcagtgcggctgcatggcagacctctcccagggtcaggcttgcagccccttggcttcctccttgtccagatcttctctgccatctgcactctctcttctcctgctttagcccctcaggaccagcctcacctacccagcttaccctagtcccattttgagaatttatctagacgtccccgtacttaagtgacccttgaggaatgtagcctgggcttgtttccctcacgaggttgggagctcctgtggggcatgagccacattctgttgcctcagtgtctgaggaaggctgagtgg

SEQ ID NO: 12069 - DNA, 506 bp, Homo sapiens
  MAP TO CHR1.3; EXPRESSED IN LUNG, SIGNAL = 7.2; EXPRESSED IN HEART, SIGNAL = 6.7; EXPRESSED IN HELA, SIGNAL = 6.8; EXPRESSED IN FETAL LIVER, SIGNAL = 5.6; EXPRESSED IN ADULT LIVER, SIGNAL = 6.6; EXPRESSED IN BRAIN, SIGNAL = 5.5; SWISSPROT HIT: Q15928, EVALUE 3.00e-15; NT HIT: gi9966870, EVALUE 4.00e-88; EST_HUMAN HIT: BF683074.1, EVALUE 3.00e-83
tcactgtctctccttgcctgtagtcaaattaagaactctgccgtgaccacttggtaaatatgttttctttttcagggactattggcattcagggatgtggctctagaattctctccagaggagtgggaatgcctggacccagctcagcggagtttgtatagggatgtgatgttagagaactacagaaacctgatctcccttggtgaggatagcttcaatatgcaattcctatttcacagtaaggatttcatctttttcctttgtggaatgttttctgggagtttctgatttgcatgaatgagtttcacatcactgctttcaagaaaaccttggggatttcttggtgtagaaaacaaaactttcaagatgttttgccttgacatcaacctttctattcagctgatgtatatccttgctctagattggtggtaattctagaaattcagtagtataaaatattgttgcctacacttcaaaatccagtttccaccaccaatttttgatcc

SEQ ID NO: 12070 - DNA, 595 bp, Homo sapiens
  MAP TO CHR9.3; EXPRESSED IN BRAIN, SIGNAL = 5.1; EXPRESSED IN HELA, SIGNAL =   2; EXPRESSED IN LUNG, SIGNAL = 2.2; EXPRESSED IN PLACENTA, SIGNAL = 3.5; EXPRESSED IN HEART, SIGNAL = 5.1; EXPRESSED IN FETAL LIVER, SIGNAL = 0.49; SWISSPROT HIT: P09172, EVALUE 4.00e-43; NT HIT: X13257.1, EVALUE 0.00e+00; EST_HUMAN HIT: BE382676.1, EVALUE 0.00e+00
caattagaggagggcagcaggctgagtgcttggcctggggcgcaagcttgtgggagggaaaattggattccccgctagacaaatgtgattacccgtgctgcctggacccaccccattcaggaccagggcataaatggccaggtgggaccagagagctcaccccagccatgcccgccctcagtcgctgggccagcctgcccggccccagcatgcgggaggcagccttcatgtacagcacagcagtggccatcttcctggtcatcctggtggccgcactgcagggctcggctccccgtgagagccccctcccctatcacatccccctggacccggaggggtccctggagctctcatggaatgtcagctacacccaggaggccatccatttccagctcctggtgcggaggctcaaggctggcgtcctgtttgggatgtccgaccgtggcgagcttgagaacgcagatctcgtggtgctctggaccgctggggacactgcctattttgcggtgagtctctcctccctgccagctctccaaacccttcctgacccggcaccccatctggccgtctttctgcactcaccctccttaaccca

SEQ ID NO: 12071 - DNA, 598 bp, Homo sapiens
  MAP TO CHR15.3; EXPRESSED IN ADULT LIVER, SIGNAL = 4.8; EXPRESSED IN LUNG, SIGNAL =   7; EXPRESSED IN PLACENTA, SIGNAL = 3.2; EXPRESSED IN HEART, SIGNAL = 6.1; EXPRESSED IN HELA, SIGNAL = 4.2; EXPRESSED IN BRAIN, SIGNAL = 6.1; NT HIT: gi6806910, EVALUE 2.00e-34; EST_HUMAN HIT: AW195524.1, EVALUE 3.00e-03; SWISSPROT HIT: Q05859, EVALUE 6.00e-21
ttcatgaaaccagggaaagcaccaacagcatgtaatgaattcctatgaatcacacacacacacacacacacacagaatatgtaataaattcctatgatacacacacatatatgtataggtatgtgtgtgtgtgtatatacgatacacacacacacacacacacacacacacacacatatataccatttccctgtataatatataattacagctttgccataatcactcagtacctttttgaccttgtttttcttctcataagtctctgacagaggttttttcttctgttgagttgtgtctttggagaataaatactcaaattcactggggtcccgaatgtcaggttcttctaaggagtcccataaggttggtgtagcattttggcttaaaagagaaaatgacaagttaaccataagaaccaaaacaggaaggaatgtaatacaatgaaatctttctctaatccattttttaatttcatttttctaaaaaaacacataaaactctaataatgcttggagaaaagctttttatgttacgcatttgttaaagtcaaaatatactatagaacattaaaacacacacagacgtatttccaaaa

SEQ ID NO: 12072 - DNA, 515 bp, Homo sapiens
  MAP TO CHRX.3; EXPRESSED IN HELA, SIGNAL = 2.9; EXPRESSED IN PLACENTA, SIGNAL = 3.4; EXPRESSED IN HEART, SIGNAL = 6.5; EXPRESSED IN ADULT LIVER, SIGNAL = 5.6; EXPRESSED IN BRAIN, SIGNAL =  11; NT HIT: M58353.1, EVALUE 1.00e-97; EST_HUMAN HIT: BF948432.1, EVALUE 3.00e-83; SWISSPROT HIT: P17600, EVALUE 1.00e-25
tcagtgagtccttcaccacgaatctgtaagtttctgaacaccctcacttccccaaatcgcagactggtttcaagctcccacatacatgcatgagctgttccctctgccagtggcacccttcctgttacttaccacccagggcttgtcacagaagttgtagacagaatgcaaggagttaacactggggattccagcatactgcagcccaatgaccaaactgcggtagtctccgttgcgtgccatgctgaaggcgtgctggcggatcagcacaaaatccggcttcagagacctagtgtggcaggggtaggagtgttgagagttcccccagaagctcccaatcactctcgaaacaaagaccaagtttttaaatctccatagctcccagaaattgcaaagtggtttctcacctctgcacacatgtgtgagctgttccctctgcctagtgcaccctttctaccctctgcccacctggtgatcccctttaagcctctcctacctgttcccttctcagcaag

SEQ ID NO: 12073 - DNA, 539 bp, Homo sapiens
  MAP TO CHR19.3; EXPRESSED IN FETAL LIVER, SIGNAL = 1.8; EXPRESSED IN HELA, SIGNAL = 2.1; EXPRESSED IN HEART, SIGNAL = 1.2; EXPRESSED IN ADULT LIVER, SIGNAL = 2.6; EXPRESSED IN BRAIN, SIGNAL = 1.5; SWISSPROT HIT: Q92947, EVALUE 2.00e-26; NT HIT: AF012340.1, EVALUE 0.00e+00; EST_HUMAN HIT: AA703236.1, EVALUE 0.00e+00
agcatagggagatgacggtggtcacagagggggacagtcaggctggccagggatcagatctccaggtgaagcccagggtctggcgggggtccaggtggccacttatgctatctttgagatagggacagaataggctcaggggacagccccacccttgagttccagacctcagagactgtcttccttccaccaggccccatgggcagccactcacccagctggggcaggtacttctgccgctgttcctcgctgccataggcatagatagggtgcatgacgagggaggactggacactcatcgccgacctgtagccactgtccacccgctccagctctcgggccaggagcccataggccacagacgaaaccccagcacagccatatcctggtggtagtaggaggggaaagcaggacaatagagaacagggccctgcccagctaagacccaagagacagggctgaataaggacacacaaggaggcaggcaccaagctggccctagctgaggtttattcatttcatctccacagccactttca

SEQ ID NO: 12074 - DNA, 557 bp, Homo sapiens
  MAP TO CHR2.3; EXPRESSED IN HEART, SIGNAL = 1.3; EXPRESSED IN ADULT LIVER, SIGNAL = 1.4; EXPRESSED IN HELA, SIGNAL = 2.8; SWISSPROT HIT: P52701, EVALUE 3.00e-22; NT HIT: U73735.1, EVALUE 0.00e+00; EST_HUMAN HIT: AU133348.1, EVALUE 0.00e+00
ccgaatattgtagcttgggcgtagcctaacctatctcagacgtgctcagaacacttaaatgttagcctaaagttgggcaagatcatctaacacaaagcctattttataataaggaattgcctatctcatgtaattcatcgaatactgtactaaaaatgaaaaacagtggctgcacgggtaccattataaagtcaaaaaatcataagttgaactgtcttacattatggttttccaaattttgatttgtttttaaatactctttccttgcctggcaggtaggcacaacttacgtaacagataagagtgaagaagataatgaaattgagagtgaagaggaagtacagcctaagacacaaggatctaggcgaagtagccgccaaataaaaaaacgaagggtcatatcagattctgagagtgacattggtggctctgatgtggaatttaagccagacactaaggaggaaggaagcagtgatgaaataagcagtggagtgggggatagtgagagtgaaggcctgaacagccctgtcaaagttgctcgaaagcggaagagaatg

SEQ ID NO: 12075 - DNA, 532 bp, Homo sapiens
  MAP TO CHR1.3; EXPRESSED IN LUNG, SIGNAL = 2.4; EXPRESSED IN HELA, SIGNAL = 2.2; EXPRESSED IN PLACENTA, SIGNAL = 1.3; EXPRESSED IN BRAIN, SIGNAL = 1.6; EXPRESSED IN FETAL LIVER, SIGNAL = 2.7; EXPRESSED IN ADULT LIVER, SIGNAL = 2.1; NT HIT: gi15299056, EVALUE 8.00e-74; EST_HUMAN HIT: BI910116.1, EVALUE 1.00e-73; SWISSPROT HIT: P07633, EVALUE 6.50e+00
aaatgcactgtttgcctgtggatgggactttatgtcaggccagatagaatcttcttggagtacagagtaggatcaataaaatctgtgtgttacagcggcagactgaaggacgggtgcctgttttcagccatgaggtagtccctgaccatctgagaaccaagcctgaccctgaagtggaagaacaggagaagcaactgacgacagatgctgcccgcattggtgcagatgcagcccaggttggactgagtcactgccttgctgccccatccccatcccatcatgagaagctaggcattaccattcctgtctagtagggatacatagttggttgcgcctaagttgcttctggcagaacccaaggaataaatttctccatatcgtttcctagttaccctaatctctgcacaaatttgtgtgttacagaagcagatccagagcttgaataaaatgtgttcaaaccttctggagaaaatcagcaaagaggagcgagaatcagagagtggaggtatgatgggactggtggctaaacaga

SEQ ID NO: 12076 - DNA, 592 bp, Homo sapiens
  MAP TO CHR17.3; EXPRESSED IN LUNG, SIGNAL = 5.4; EXPRESSED IN HELA, SIGNAL = 5.6; EXPRESSED IN PLACENTA, SIGNAL = 4.8; EXPRESSED IN FETAL LIVER, SIGNAL = 4.1; EXPRESSED IN ADULT LIVER, SIGNAL = 5.1; NT HIT: gi14773309, EVALUE 2.00e-84; EST_HUMAN HIT: BF850035.1, EVALUE 9.00e-04; SWISSPROT HIT: O54898, EVALUE 5.00e-25
catgaagaccatggacaacgtggccaccttctgcatgctgcttatgctcttcatcttcatcttcaggtgagggcggcatggcaccttgccggctgagagaccggccaggctgggggcaggagggcctgaggggtgaggagcactgggctctgatccctagcttgtggcccccttgtgcccacagcatcctgggcatgcatctcttcggctgcaagtttgcctctgagcgggatggggacaccctgccagaccggaagaattttgactccttgctctgggccatcgtcactgtctttcaggtgcgagggtaacagggcagggcgtggacaggggccgtcaggtgcccctagtataggccctgattcctgtcttctgcccgcagatcctgacccaggaggactggaacaaagtcctctacaatggtatggcctccacgtcgtcctgggcggccctttatttcattgccctcatgaccttcggcaactacgtgctcttcaatttgctggtcgccattctggtggagggcttccaggcggaggtaacccactgctctgcccacctcaccctgcccacagcagtcccacttccaatt

SEQ ID NO: 12077 - DNA, 574 bp, Homo sapiens
  MAP TO CHR12.3; EXPRESSED IN ADULT LIVER, SIGNAL = 6.1; EXPRESSED IN HELA, SIGNAL =  41; NT HIT: gi16186459, EVALUE 0.00e+00; EST_HUMAN HIT: AL568322.1, EVALUE 0.00e+00; SWISSPROT HIT: P02552, EVALUE 1.00e-111
tcgatattgagcgtccaacctatactaacctgaataggttaataggtcaaattgtgtcctccatcactgcttccctgagatttgatggagccctgaatgttgacctgacagaattccagaccaacctggtgccctatccccgcatccacttccctctggccacatatgcccctgtcatctctgctgagaaagcctaccatgaacagctttctgtagcagagatcaccaatgcttgctttgagccagccaaccagatggtgaaatgtgaccctcgccatggtaaatacatggcttgctgcctgttgtaccgtggtgacgtggttcccaaagatgtcaatgctgccattgccaccatcaagaccaagcgtaccatccagtttgtggattggtgccccactggcttcaaggttggcatcaactaccagcctcccactgtggtgcctggtggagacctggccaaggtacagagagctgtgtgcatgctgagcaacaccacagccattgctgaggcctgggctcgcctggaccacaagtttgacctgatgtatgccaaacgtgcctttgttcactggta

SEQ ID NO: 12078 - DNA, 554 bp, Homo sapiens
  MAP TO CHR19.3; EXPRESSED IN FETAL LIVER, SIGNAL = 2.3; EXPRESSED IN ADULT LIVER, SIGNAL = 2.3; EXPRESSED IN HELA, SIGNAL = 5.8; EXPRESSED IN HEART, SIGNAL = 2.7; EXPRESSED IN PLACENTA, SIGNAL = 2.1; NT HIT: AF042347.1, EVALUE 3.00e-92; EST_HUMAN HIT: AL579856.1, EVALUE 1.00e-98; SWISSPROT HIT: Q9Y285, EVALUE 3.00e-39
tcggttgtcacccctagaagcccttcactccggtcaagtacttctccatcgaccgcgtattccggaatgagaccctggacgccacgcacctggctgagttccaccagatcgagggcgtggtggcggatcatggtctcaccttgggccacctcatgggcgttctgcgggagttcttcaccaagctgggtgagcaggggggcaggggtgggccatggtggtgaggcagcgggcaggtgtgttgatcaccagcattatcctccaaacccctgctctcctgcccgccccccacttcctgcaggtatcacgcaactccgcttcaagccagcctacaacccatacacagagcccagcatggaggtgttcagctaccaccaaggtcagggtaggccctggtactggggtgggagggaggtctcaggctactatggtttggcctgggtccccccattgccatgcctgtaccccacctcccaagctcaccacctagacccagaacctgtaccagcagtgcccagaaactcaacacgcactgcccgtcttttctgtcctgcctc

SEQ ID NO: 12079 - DNA, 595 bp, Homo sapiens
  MAP TO CHR12.3; EXPRESSED IN LUNG, SIGNAL = 3.2; EXPRESSED IN HEART, SIGNAL = 3.3; EXPRESSED IN HELA, SIGNAL = 2.4; EXPRESSED IN PLACENTA, SIGNAL = 3.5; EXPRESSED IN FETAL LIVER, SIGNAL = 2.8; EXPRESSED IN BRAIN, SIGNAL = 2.4; EXPRESSED IN ADULT LIVER, SIGNAL = 2.8; NT HIT: D43702.1, EVALUE 0.00e+00; EST_HUMAN HIT: BF036315.1, EVALUE 2.00e-63; SWISSPROT HIT: P54287, EVALUE 2.00e-18
agacatggagactgatgcccaagccaggtctcagaaggatggagaccctggggatgagatcttagatatgaggggtggacaggtgtgtgttaaggagaagagctgattagcttggggaattagactgaggattcaagtcagaagcattaggatctggagcaagagcaagaaaatgaagttagaggcttctggaagtaggggggtcgatcacctctttaatgtgcagaaaatctttggcctcaaagttgactccagagccctggactgggcactcctcatccagtacgccacagtagctgacattggtcctcaccgcaaatgccacaggtttgtgctggagaatttgcccattagtgcaagtgagagaaggctcgaagcaccccttccagcttcagtgccccaacagcagaaggccgtggcctctgcccatcacacacaccctctcacactcaaggacatcctgcccaaggaccccttgggacttaggaccgagtgcaggtttccacctagcttggcctcctgtcttgccccatgcccagaaagtataccttggccctttcgagctgctgctgagcctggctctctacttcacgcc

SEQ ID NO: 12080 - DNA, 527 bp, Homo sapiens
  MAP TO CHR1.3; EXPRESSED IN ADULT LIVER, SIGNAL = 1.1; EXPRESSED IN BRAIN, SIGNAL = 1.4; EXPRESSED IN LUNG, SIGNAL =   2; EXPRESSED IN HELA, SIGNAL = 2.4; EXPRESSED IN PLACENTA, SIGNAL = 1.4; NT HIT: AF252304.1, EVALUE 0.00e+00; EST_HUMAN HIT: AA459214.1, EVALUE 1.00e-127; SWISSPROT HIT: Q13291, EVALUE 1.00e-44
aggtctgggaattgttgctgatagggttgctcacggtgcagatgtagatattgtcagcatgctgggggccgagggtgagggacaggaggtgggagctgttggctgggttcagtgggtgggtgcccgccttttcactccagctgtaagccacatggtcccccttctccactgtgcagcccagtatcaaggtgcaggtcccgttctcctgggtcttgtttaaaactttaatttctggagtggagacctgctctgtcaggagtgggaggaagggagccatcactgaagtgaacccctgggaattctcacttgacctttttgttagaacaaagtacagcctaatggcattttccctccccctcaatgtgatttatttctagtggggaatctattgcttcacactgtccatcatgccccactacatcctatctaagaccaccttgggataaaatagaaaataagaatttgctttttaggcctcttctaccaatattgttagggctccactcgcccttcctgatgtccttgac

SEQ ID NO: 12081 - DNA, 529 bp, Homo sapiens
  MAP TO CHR4.3; EXPRESSED IN FETAL LIVER, SIGNAL = 0.91; EXPRESSED IN ADULT LIVER, SIGNAL = 0.62; EXPRESSED IN LUNG, SIGNAL = 1.4; EXPRESSED IN HELA, SIGNAL = 2.2; EST_HUMAN HIT: BG742247.1, EVALUE 1.00e-64; SWISSPROT HIT: Q9Y5Q5, EVALUE 2.00e-42; NT HIT: gi15295189, EVALUE 1.00e-128
agcaagatgttgtcacagtgctagcaactacatatacagaaatgaatcttagttgccagggcacttcactaatcaacttacttattttcaatatccataaaaaatgttatatactactggcattctagtcttagctactctaaagaaagaataaaatagacttcaagtttgtaaaacttaaagaagttgtttttatatgtgaaatttaaaaatatttgtgtgtatgtttctttgttaggtcaatgtgaaccaattacattggaactctgcatgaatttgccctacaacagtacaagttatccaaattattttggccacaggactcaaaaggaagcatccatcagctgggagtcttctcttttccctgcacttgttcaaaccaactgttataaatacctcatgttcttttcttgcaccattttggtaccaaaatgtgatgtgaatacaggcgagcatatccctccttgcaggtaatatgatgggatctaccccagtcccttattttgcctcagagagaaccaaggggtga

SEQ ID NO: 12082 - DNA, 585 bp, Homo sapiens
  MAP TO CHR11.3; EXPRESSED IN LUNG, SIGNAL = 4.1; EXPRESSED IN HELA, SIGNAL =   5; EXPRESSED IN HEART, SIGNAL =  13; EXPRESSED IN PLACENTA, SIGNAL = 1.8; EXPRESSED IN FETAL LIVER, SIGNAL = 5.5; SWISSPROT HIT: O75964, EVALUE 2.00e-24; NT HIT: AF070655.1, EVALUE 9.00e-74; EST_HUMAN HIT: AW961061.1, EVALUE 0.00e+00
cacacatctgcttctttcggtctctagtgagttcatcctggttttttgttttgttttgttttgttttccagctgctgtgacttactcgaagcctcgattggccacattttggtactacgccaaggttgagctggttcctcccacccctgctgagatccctagagctattcagagcctgaaaaaaatagtcaatagtgctcagactggtagcttcaaacagctcacagttaaggtaaccacgggctaaatgaaaacggatgtgcataacagaaaatgtcttcccttgggatttttctgattgttttgattaatatatatgtttccaatgaggctgaatccagcataatgaggaaaaaaattttgactgctgaggaagatacttacttttctaattttgtcacctgggtagaaataattagcccattttatgtcttagtttcctaagagtcttaaacctagcaaaaaagtgaccatttttattgggaaattttttttcctttcctatattagatagtatactaaaatatgatggcttgctttgctgagtctgtacttttttcatctggagtcctgagattgtcccca

SEQ ID NO: 12083 - DNA, 583 bp, Homo sapiens
  MAP TO CHR21.3; EXPRESSED IN HELA, SIGNAL = 4.8; EXPRESSED IN FETAL LIVER, SIGNAL = 3.4; EXPRESSED IN ADULT LIVER, SIGNAL = 2.4; SWISSPROT HIT: P55854, EVALUE 8.00e-18; EST_HUMAN HIT: BG720620.1, EVALUE 0.00e+00; NT HIT: AL163300.2, EVALUE 0.00e+00
agtgtctctccagggtcaggccagctcatacgcgaggacagggtgacagcggcgtggggcacacgccacctgcagccccagaatggccagacctgagcagggcccccaagagccttcagcatcacagacttcacagatgttagtaccccatggagaacacagcaccccgggcagccgccctgtcaggaagaaaaacccaccacacttctccgagcctctaggtccctccaccttataaaaggccatgggggacaagcccagcctggactaattttacagcacaagcccccgcctgcccatccacgaagagggcacctcgggcagctgcatctgggtccagccccgagacgctcgtgctctggggatgcctggaacgcacaggaccagtgcgcacacggggaggctctgcgggggagcaaggtgccgcacctgcctctcgcagtaggccttcatcagcttgctcagcggcgtgtgcctcttgatcttgaactgcaccacggagccgtcctgcccggccaccttcaggttgatgtggtcattctctgtcttcacaccctcctgcagaagacaccagagactggcc

SEQ ID NO: 12084 - DNA, 588 bp, Homo sapiens
  MAP TO CHR1.3; EXPRESSED IN HEART, SIGNAL = 2.8; EXPRESSED IN HELA, SIGNAL = 7.3; EXPRESSED IN ADULT LIVER, SIGNAL = 6.2; NT HIT: gi11426044, EVALUE 0.00e+00; EST_HUMAN HIT: BI835228.1, EVALUE 0.00e+00; SWISSPROT HIT: P20670, EVALUE 4.00e-56
ttttgagttcacaggtgccccttcgagacgcgggccgggctgggcccacttgggccggacgtcagcctcacttgccctttgccttgtggtgactctccgtcttcttagggagcagtacggcctggatgttaggcaagacgccgccctgggcgatggtgactttgcccagcagcttgttcagttcctcgtcgttgcggatggccagctggaggtgacgagggatgatgcgcgtcttcttgttgtcccgagccgcgttgcccgccagctccaggatctcggcggtcagatactcgaggaccgcagccatgtagacgggcgcgccggcccccactcgctccgcgtagttgcctttgcgcagcaagcgatgcactcgccctaccgggaactgaaggccagcgcgggacgagcgcgacttggccttggcgcgggccttgcctccttgcttgccacgaccagacatgacagcgatagtagtcaccgagagaaactcctgcctggcgatcgggaaagtcgccgaaaacgccgctgcttcacctttttatagacagaacggcgattgtccacggagcactttgattggctcaagca

SEQ ID NO: 12085 - DNA, 582 bp, Homo sapiens
  MAP TO CHR19.3; EXPRESSED IN FETAL LIVER, SIGNAL = 5.5; EXPRESSED IN ADULT LIVER, SIGNAL = 6.9; EXPRESSED IN BRAIN, SIGNAL = 6.8; EXPRESSED IN HELA, SIGNAL = 5.1; EXPRESSED IN PLACENTA, SIGNAL = 5.6; EXPRESSED IN HEART, SIGNAL =   7; NT HIT: gi14756592, EVALUE 4.00e-94; EST_HUMAN HIT: AL525215.1, EVALUE 7.00e-94; SWISSPROT HIT: P38789, EVALUE 4.00e-06
cgctctgaagaagagatggggcaaaggtgcctactccgggcacctctgctagacccctccagagtcactgatcttttcttctcctgcagaagctgatgcgcctcccaggaggccccaccttgaccttccaggtcaagaaggtgagaggggtggaggtggtacaaagccatgtggggtgggagctggacttggggttgtccgcagccatgtgtggttggtggtcaccccctcctctctcctgtcctacagtactcgctggtgcgtgatgtggtctcctcactgcgccggcaccgcatgcacgagcagcagtttgcccacccacccctcctggtactcaacagctttggcccccatggtatgcatgtgaagctcatggccaccatgttccagaacctgttcccctccatcaacgtgcacaaggtgggtctggcctggcgaggtggcaggtatgggggggtgcagcggatagaggtgccacaggccctcagatggattgctcactcctcccagcgctgagactgggagctcctgggtctgctgagtcctgaggtcaaatcccactcctgtgtctgatgatgctgg

SEQ ID NO: 12086 - DNA, 564 bp, Homo sapiens
  MAP TO CHR21.3; EXPRESSED IN LUNG, SIGNAL = 1.5; EXPRESSED IN HEART, SIGNAL = 2.1; EXPRESSED IN HELA, SIGNAL = 2.1; EXPRESSED IN PLACENTA, SIGNAL = 1.8; EXPRESSED IN ADULT LIVER, SIGNAL =   2; EXPRESSED IN BRAIN, SIGNAL = 2.6; EXPRESSED IN FETAL LIVER, SIGNAL = 0.89; SWISSPROT HIT: Q9NRZ7, EVALUE 6.00e-29; EST_HUMAN HIT: BF062652.1, EVALUE 4.00e-86; NT HIT: gi14780654, EVALUE 2.00e-86
gacccactcaccctcagaagccgggtcctgcttcacagcagaccccctgagccacaaagccgtgactcctagagcgacaccacacaggagctgggtgcagcgggagcctggccaagcccctggcctctgtccgacgctgaagtgccaggtgcccctccttctcctccctccagagctccaaggtcctcgctaagaaggagctgctctacgtgcccctcatcggctggacgtggtactttctggagattgtgttctgcaagcggaagtgggaggaggaccgggacaccgtggtcgaagggctgaggcgcctgtcggactaccccgagtacatgtgggtgagtgcgcggagcagcccgataccctgcatgcctggaggaggccacgccaactcctgatgcacggctgcccacatcccaggctgggaaaccccatgagagcctctgcacatggggtgctgtttccatggggccatgactcccccatctgagctgcaggcgtggaggcttctcttgggccacctgcttgctactcgccgcaatcccagctctgaccaggccatcctaa

SEQ ID NO: 12087 - DNA, 508 bp, Homo sapiens
  MAP TO CHR2.3; EXPRESSED IN LUNG, SIGNAL = 2.3; EXPRESSED IN HELA, SIGNAL = 2.5; EXPRESSED IN FETAL LIVER, SIGNAL = 1.7; EXPRESSED IN BRAIN, SIGNAL = 1.9; EXPRESSED IN ADULT LIVER, SIGNAL = 1.5; EST_HUMAN HIT: BE219591.1, EVALUE 0.00e+00; NT HIT: gi4507702, EVALUE 0.00e+00; SWISSPROT HIT: O59894, EVALUE 7.00e-03
atccacctggaacacgagtcacctccaaagagctgcgactgtttgagaatctgccaagaggaaaaccactcaatgggacctggataacccaggcccgggagtcatagcaggatgtggtacttcagggccctgggcaccctgttgatcacgagcctcccgtcatagctcagggaggcaaacagccacgggtcagccgaggaccagtccacggcatagacgctgtcctcgtgctcctcgtaggtggcgatcacgttgtcctgcaggggctccttgctcctgcaatgcaacagaggcagacgtgagcgcagcagctccggcggggcgggcaggagaggggcagggaggacgcgagcgctgacatcgggagacacgggaggtactggggcctcagctttctccgctgtgggatgggaagaattagaggagcccacaccgaggacggtggggtggtccctgcagaagcccagaaaccctcactgtcactgtgaggagtgggcatttctcaaaa

SEQ ID NO: 12088 - DNA, 567 bp, Homo sapiens
  MAP TO CHR5.3; EXPRESSED IN LUNG, SIGNAL = 1.7; EXPRESSED IN HEART, SIGNAL = 1.2; EXPRESSED IN HELA, SIGNAL =   2; EXPRESSED IN FETAL LIVER, SIGNAL = 1.5; EXPRESSED IN BRAIN, SIGNAL = 0.87; EXPRESSED IN ADULT LIVER, SIGNAL = 1.4; EST_HUMAN HIT: AA284429.1, EVALUE 2.00e-60; NT HIT: D86077.1, EVALUE 0.00e+00; SWISSPROT HIT: P51959, EVALUE 2.00e-17
gaaggcatgtcattgcaggatcatattttctaaagcaaaggtaaatattttataaagattatgcctattgatatgatctgtttttatatttggcatttactttaaatttatctcttttagccttctgtgttggcattttctatcattgcattagagatccaagcacagaagtgtgtagagttaacagaaggaatagaatgtcttcagaaacattccaaggtatgtgaaggacatagcctaaatcctattaacagctgtaaaagaaactaaaccccttctatctcctgaagtaaaatgagatgtcatatgtttatttgaaacttaagtagctatcctcaaatgtttttaatgagcaaagacacatgttcataggattgcatttattaatgtagttaaataaggtgggacttacttggagtaataattttttaaaatttatgtatgtacagataaatggcagagatctgaccttctggcaagagcttgtatccaaatgtttaactgaatattcatcaaataagtgttccaaaccaaatgttcagaagttgaaatggattgtttctgggc

SEQ ID NO: 12089 - DNA, 523 bp, Homo sapiens
  MAP TO CHR6.3; EXPRESSED IN LUNG, SIGNAL = 7.3; EXPRESSED IN HEART, SIGNAL = 1.3; EXPRESSED IN HELA, SIGNAL = 3.4; NT HIT: M33101.1, EVALUE 0.00e+00; SWISSPROT HIT: P08727, EVALUE 5.00e-53; EST_HUMAN HIT: BE744821.1, EVALUE 0.00e+00
gagcagaactggaaggatgctgaagcctggttcaccagccggactgaagaattgaaccgggaggtcgctggccacacagatcagctccagatgagccggtccaaggtcgctgacctgcggcgcaccctccagggtcttgagctgcagtcacggctgagcatgaaagccgccttggaagccacactggcagaaacggaggcgcgctttggagtccagctggcgcagatccagccgctgatcaactgtattgaagcccagctgggcgatgtgcgagctgatagtgagcggcagaatcaggattaacagcagttcatggacatcaagtcgcggctggagcaggagatctccacctaccgcagcctgctcgagggccagaaagatcactacaacaacctgtccgcctccaaggtcctctgaggcagcaggctaaggggcttctactgtcctttggagggtgtctcctgggtagggggatgggaaggaagggacccttaccccctgctcttcccctgatctgccaata

SEQ ID NO: 12090 - DNA, 547 bp, Homo sapiens
  MAP TO CHR13.3; EXPRESSED IN LUNG, SIGNAL = 0.91; EXPRESSED IN HEART, SIGNAL =   2; EXPRESSED IN HELA, SIGNAL = 4.3; EXPRESSED IN FETAL LIVER, SIGNAL = 1.8; EXPRESSED IN BRAIN, SIGNAL = 1.7; EST_HUMAN HIT: AI952008.1, EVALUE 1.00e-124; NT HIT: U37055.1, EVALUE 0.00e+00; SWISSPROT HIT: P13798, EVALUE 5.00e-17
tccactgacatccctgactggtaggcatacaccacaggtccctgcccttccctcctctacctcaaattctcatggagccccgtagccccagaattcctggggctgcaacagctcggtgtcttgcaggtgcgtggtggaggctggctttcctttcagcagtgactgcctgccagacctcagcgtgtgggctgagatgctggacaaatcgcccatcagatacatccctcaggtatgcagccccctccttgccctgtgtgctgcccatccatccagaatccagggcccagctcaacacagctccccactcttccccaaacacccaggtgaagacaccactgttactgatgttgggccaggaggaccggcgtgtgcccttcaagcagggcatggagtattaccgtgccctcaagacccggaatgtgcctgttcggtgagtgcagcatgaaggccctggcagctggtgggcaggtgagcacaggaggaccctccaaccttaaatgttgctgactaatccctacaggctcctgctctatcccaaaagcaccca

SEQ ID NO: 12091 - DNA, 520 bp, Homo sapiens
  MAP TO CHR13.3; EXPRESSED IN ADULT LIVER, SIGNAL =  12; EXPRESSED IN HELA, SIGNAL =  11; SWISSPROT HIT: P11940, EVALUE 3.00e-54; EST_HUMAN HIT: AI025825.1, EVALUE 0.00e+00; NT HIT: gi14752580, EVALUE 0.00e+00
caacatcgtaatgcacagccacaagttacaatgcaacagcttgctgttcatgtacaaggtcaggaaactttgactgcctccaggttggcatctgcccctcctcaaaagcaaaagcaaatgttaggtgaacggctctttcctcttattcaagccatgcaccctactcttgctgggaaaatcactggcatgttgttggagattgataattcagaacttctttatatgctcgagtctccagagtcactccgttctaaggttgatgaagctgtagctgtactacaagcccaccaagctaaagaggctacccagaaagcagttaacagtgctaccggtgttccaactgtttaaaattgatcagagaccacgaaaagaaatttgtgcttcaccgaagaaaaatatctaaacatcgagaaactatgggaaaaaaaattgcaaaatctaaaataaaaaatgcaaaatctaaaataaaaaatggaaaggaaactttgaaccttatgtaccgagcaaatgcaaggtctag

SEQ ID NO: 12092 - DNA, 545 bp, Homo sapiens
  MAP TO CHR17.3; EXPRESSED IN BRAIN, SIGNAL = 1.3; EXPRESSED IN HELA, SIGNAL = 2.9; EXPRESSED IN FETAL LIVER, SIGNAL = 1.2; EXPRESSED IN ADULT LIVER, SIGNAL = 0.79; NT HIT: gi15310758, EVALUE 0.00e+00; SWISSPROT HIT: O15491, EVALUE 6.00e-29; EST_HUMAN HIT: BE296528.1, EVALUE 0.00e+00
tcacttgtgaccttgcttgctggctttctttgtccctagcggatgaccaccaggctctcatctgggacatccagcaaatgccccgagccattgaggaccctatcctggcctacacagctgaaggagagatcaacaatgtgcagtgggcatcaactcagcccgactggatcgccatctgctacaacaactgcctggagatactcagagtgtagtgttggtggcgctgtgcccacgaggcaggggcttttgtatttcctgcctctgccccacccccaaagtaagaagaaacatgtttccagtggccagtatgtctttcattgctttgcacccactgttaccagaagctgctctaggagttcctggccagtcaccccatcgccctctgtggcagactcagtgctgtgtggcgcctcctcagcccagggctgagttttaagattttctctcctttcctcttctcctttggttcctcaattaaaaaatgtgtgtatatttgtttgtcaggcgttgtgttgaggagcagttcacgcactggctgtgtctat

SEQ ID NO: 12093 - DNA, 600 bp, Homo sapiens
  MAP TO CHR11.3; EXPRESSED IN HELA, SIGNAL = 2.2; EXPRESSED IN PLACENTA, SIGNAL = 2.4; EXPRESSED IN HEART, SIGNAL = 2.1; EXPRESSED IN FETAL LIVER, SIGNAL =   3; EST_HUMAN HIT: BG114204.1, EVALUE 0.00e+00; SWISSPROT HIT: O00750, EVALUE 8.80e-01; NT HIT: gi14763540, EVALUE 0.00e+00
accgggaggaaaagagagagatctggggctggggtatggatgatggggggaagggcggtcgcctctgccactgtcagggaccagccggccaacgcccacccgcaaaggtgtctaaaaacttcagcttttcacccacctgcccctttctttcaatcccacgctgtttcctttcaaagttctgggaggacgaactcaccgaggcgagaagtgtaacattctctccacccagcttataaaaggattctttactgtgccagcacggggattggatccgaagaaactggctactggggtttggcccccgagtggccgtccctgtgggagatgcaccccattcttgggccccccctcattccctttccgaaaaaggaaaacttgcgtttgagccgttgagctaattctgcaattttctaccaaacagagcgctggtggccccggagcagggctgtgacattggctggtggagcccccttcctgtgttctccctttgttccagcgccgcgatggtgagatcactgttccaagcagggggacggctcgcgataggacaaagagagcaggacctccagactctggggagccctgcagaccttgacaatt

SEQ ID NO: 12094 - DNA, 550 bp, Homo sapiens
  MAP TO CHR8.3; EXPRESSED IN ADULT LIVER, SIGNAL = 2.6; EXPRESSED IN FETAL LIVER, SIGNAL = 2.2; EXPRESSED IN BRAIN, SIGNAL =   3; EXPRESSED IN HELA, SIGNAL = 2.8; EXPRESSED IN PLACENTA, SIGNAL = 2.7; EXPRESSED IN LUNG, SIGNAL = 2.5; EXPRESSED IN HEART, SIGNAL = 2.6; EST_HUMAN HIT: AI092857.1, EVALUE 0.00e+00; NT HIT: X99977.1, EVALUE 0.00e+00; SWISSPROT HIT: P55000, EVALUE 3.00e-21
gtgtgcttctctcccctcagaccccatgagtgagctgtgccacagcagcaggaagcagggggaggtgatcacaggtggagccaggccccgtcagagaggaggtgcctgaggagcaccttccgccctgccgccctgggttcagagttccgagttgcagaggtctcggaagcagcagaagatcaggtgggcggccccgatgctgtcggggtcggtggccacacaggagctggagcaggagcgggtcaccacggggctctggttgaaggggtactctgcagggtgggccagtgtcagaaccctcactcccctgcagcgcctgcctgctgctgcactgctcccagccgccgtcgcctgacctcaccctccctgtgatccctgttcccaatagtccacatctgtgaagccacccagggcccagccctcctctgactgtgacctgttcatgaattattaggccttgtcagacctctgaagtgcctgcgctgagatgggagcccgagcccagaggctgtggcaacaccacccagtgggtctgtgtcagagctggggt

SEQ ID NO: 12095 - DNA, 539 bp, Homo sapiens
  MAP TO CHR9.3; EXPRESSED IN LUNG, SIGNAL = 8.6; EXPRESSED IN HELA, SIGNAL = 3.2; NT HIT: X85117.1, EVALUE 0.00e+00; SWISSPROT HIT: P27105, EVALUE 7.00e-27; EST_HUMAN HIT: BG702251.1, EVALUE 1.00e-102
ttggaaatgctgctgacttgcaaaaggatttgcctgcagtcattaaagttacttgctttctcaatcctgcacagtattttgaattatccctttgtttgttaccctggaaaatgggagaaaggctatagtaaaagagaatgtcttgatccaggcactagtcaggcaagtcagtttcagaaaaagaagcatatggaaactgagtatgtagaaattgattttcttaaaactactctggcatacgccctagaaagttttgtggaccacctgaggtatacatacccccggttgaagagtgctgtgtgtccccatgaggttttctccagttcaacccctcctttcacctgtccataggttattgcagccgaaggagaaatgaatgcatccagggctctgaaagaagcctccatggtcatcactgaatctcctgcagcccttcagctccgatacctgcagacactgaccaccattgctgctgagaaaaactcaacaattgtcttccctctgcccatagatatgctgcaaggaatcataggggcaaa

SEQ ID NO: 12096 - DNA, 502 bp, Homo sapiens
  MAP TO CHR10.3; EXPRESSED IN HELA, SIGNAL = 5.8; EXPRESSED IN HEART, SIGNAL = 1.2; EST_HUMAN HIT: BI600882.1, EVALUE 0.00e+00; SWISSPROT HIT: Q9Z0F7, EVALUE 3.00e-16; NT HIT: AF037207.1, EVALUE 0.00e+00
gtgcacagacaggtagccagccctgtctgcggtctctgacacccagaggccccgaggaggccaaagacaaacacacataggtgtgcacagggcattgtgggtgctccagggtctggagaccccaccttgatagccagggcctcgccccctcccaaaatgcctccctggggctggggagtaaggtctggcgaaggtaactgggcactcaccctttggccaccacactgtcccaccctgccatgccccacttacccacatacatgaccccctccttggtcttctcagctgcttccgtcaccccctgcttggtcttttccaccgcacccaccacgccctccttggcgatggagaagcccttcttgaagacatccatggtgggtgtgcagggttgtgctgctgcaggcaggacggagctggatctccctgcgagctgcgggcttgagctggctcgagtgctgccgcagcggctgtccccgatgcctcctattgacgccgatgaaat

SEQ ID NO: 12097 - DNA, 594 bp, Homo sapiens
  MAP TO CHR10.3; EXPRESSED IN HELA, SIGNAL = 2.4; EXPRESSED IN BRAIN, SIGNAL = 1.5; EST_HUMAN HIT: BG954398.1, EVALUE 5.00e-27; SWISSPROT HIT: P30205, EVALUE 2.00e-34; NT HIT: AJ243211.1, EVALUE 0.00e+00
gaggagtgaggagggtagggatgcaagtcaagggggccgagagcaccaagataaaagcttctggctgtgtcactgcaggtctgcctctgaggctggtgaatggaggtgaccggtgtcagggccgggtggaggtcctgtaccaaggctaatggggcactatgtgtgatgacagctgggacgcccaggatgcagatgttgtctgcaggcagctcggctgtggctattccatgtcagccctgggcggggcccactttggtcagggcttgggtaacattcccttgggtgacttgcattgcttgggaagggagtcctacctgtcaagctgtccccacagcggatggtacaaccacgaatgtggccacagggaagatgctggtgtcatgtgctcaggtagtgtggatatcaccttgctctgtgtatctgcaactctgagtcaatattaccacacataagtatgtgtgcgtacatatgtgtgtgctctacagcttacctgctttgcagtaagtcatgtcttaattgatattggagggcaggtggtactggcccttttcatagacaatgaaggtcaagggatcatcggccagtccttctaaa

SEQ ID NO: 12098 - DNA, 543 bp, Homo sapiens
  MAP TO CHRX.3; EXPRESSED IN HELA, SIGNAL = 2.4; EXPRESSED IN HEART, SIGNAL =   2; EXPRESSED IN PLACENTA, SIGNAL = 3.6; EXPRESSED IN ADULT LIVER, SIGNAL = 1.8; EXPRESSED IN BRAIN, SIGNAL = 1.8; EST_HUMAN HIT: AL042637.1, EVALUE 0.00e+00; NT HIT: gi14759249, EVALUE 0.00e+00; SWISSPROT HIT: P52789, EVALUE 5.00e-93
agattggtctcattgtgggcactggcagcaacgcctgctacatggaagagatgcgccacatcgagatggtagaaggcgacgaggggcagatgtgtatcaatatggagtggggggccttcggggacgatggctcgctcaatgacattcgcactgagtttgaccaggagattgacatgggctcactgaacctggggaagcaactgtttgagaaggtgatcagtgggatgtacatgggggagctgatgaggtttatcctggtgaagatggccaaggaggagctgctctttagggggaagctcagcccagagcttctcaacaccggtcactttgagaccaaagacatctcagacactgaaggggagaaggatggcatccggaaggcccgtgaggtcctgatgcggttgggcatggacccgactcaggaggactgcgtggccactcaccggatctgtcagatcgtgtccacacactccgccagcctgtgcacagccaccctggcccccgtgctgcagcgcatcaaggagaacaaaggtgaggagcagc

SEQ ID NO: 12099 - DNA, 527 bp, Homo sapiens
  MAP TO CHR2.3; EXPRESSED IN ADULT LIVER, SIGNAL = 4.3; EXPRESSED IN HELA, SIGNAL = 2.9; EXPRESSED IN HEART, SIGNAL = 4.7; SWISSPROT HIT: P49759, EVALUE 9.00e-12; EST_HUMAN HIT: AL531740.1, EVALUE 2.00e-84; NT HIT: L29222.1, EVALUE 9.00e-86
ctagactcccccacaagcagcttaattttacaaacattacaaaccatcaaaatctctcattggaaacaaacgaatggtagtaatcaggtacttattttaagtgatactagttttgtctagtaatgtattgttatattcagacattttaagtatcctccttacctatcacacattttagagtgattgtatttgcagcgcttgttctcctgggcactgctatgtgatctcttccttcttttatgactgctgctgctcctccattttccataatcccaatccttgtcatcccaatcaggacagtaagttctctttgagtgtctcatctacataaaaggcaagtttttcctagttaaattgtaccccacactgagctgtttaaaattcgtaattacaaaggtcccctcgtgacctcgttttaagaccaaaattcaagaatcattatcacccaatctgaaatcactgataaatccaattactgtgttgtcccatattctgcagtttgaacttcattcacaggcactctgcat

SEQ ID NO: 12100 - DNA, 561 bp, Homo sapiens
  MAP TO CHR6.3; EXPRESSED IN LUNG, SIGNAL =  15; EXPRESSED IN HELA, SIGNAL = 6.9; EXPRESSED IN PLACENTA, SIGNAL = 5.2; EXPRESSED IN FETAL LIVER, SIGNAL = 9.7; EXPRESSED IN BRAIN, SIGNAL = 5.7; SWISSPROT HIT: O15533, EVALUE 2.00e-64; EST_HUMAN HIT: BG992867.1, EVALUE 0.00e+00; NT HIT: gi14782822, EVALUE 0.00e+00
gcagaaggggtgagagtgagctcctgtcttcctgggtgctggctcagattccgcagagctcccagctcttacctgctacctccagggtgacctcagcgctgcgccccgaggcaggcaggctgggatggtgaattcgacaggcatagcgtgccccatgctgctcagtggtgactgggggcggctgcaagtgcccagagaggctgacagagccatcggaatggtggcgcagggccgagagccacctctgcccctcggccttctgagagcggccccctgggccaccccggagttcccactccacctccaggcccccagaagggtagaagtgggacacaaggcagagcaattccgggggtgcctcccctggggcggcccgtgcaagggttgctggcatcagggacactttggggggttctggggaaagaggacgaaatgagcatagggaaatcagtccatactgtcctccctaagagaccctcagtttgcctgctggcttcctcagaactaaagaaggttaggtttcttctcctgaaatagggaacccactgtctctccattggt

SEQ ID NO: 12101 - DNA, 541 bp, Homo sapiens
  MAP TO CHR19.3; EXPRESSED IN HELA, SIGNAL = 2.7; EXPRESSED IN PLACENTA, SIGNAL = 2.8; EXPRESSED IN HEART, SIGNAL = 1.9; EXPRESSED IN ADULT LIVER, SIGNAL = 2.9; EXPRESSED IN BRAIN, SIGNAL = 5.5; SWISSPROT HIT: P54920, EVALUE 1.00e-16; EST_HUMAN HIT: BI763167.1, EVALUE 3.00e-59; NT HIT: gi14755986, EVALUE 2.00e-59
gctggcatagctgggattagggacatggtgttttacctgggcttaccctggctctctttccatatacctggggctcagggccttcccccgaggcagcttcctgccgccctcagagactgtcaggtgggccaccaggagcctcagcgcaggagccagcagacctgagcgcaggagccaggagacctgagttctaggcctcggtctgggctcgctcaggtcaccctcgtcctgtcttggggactctttccgcattctcgagagcccgacccacctcccagggcagtgtctctgtggcttcataaagtgtggagccccactgaggccaggactgcccttctcttctgttccagctgctggaaacgcgttctgccaggctgcacagctgcacctgcagctccagagcaagcacgacgcagccacctgctttgtggacgctggcaacgcattcaagaaagccgacccccaaggtgagggcctctgcgggccacacgggctggctgtccggagcgccatcctagcaccctgcattgattcctcaggt

SEQ ID NO: 12102 - DNA, 528 bp, Homo sapiens
  MAP TO CHR22.3; EXPRESSED IN HELA, SIGNAL = 2.2; EXPRESSED IN PLACENTA, SIGNAL = 3.1; EXPRESSED IN HEART, SIGNAL = 2.9; EXPRESSED IN ADULT LIVER, SIGNAL = 3.7; EXPRESSED IN BRAIN, SIGNAL = 3.2; EST_HUMAN HIT: AW971101.1, EVALUE 0.00e+00; NT HIT: gi14779550, EVALUE 6.00e-53; SWISSPROT HIT: Q07960, EVALUE 6.00e-03
ccaaacacacaggtttgctgagcagagccatacggccagaagataagtgggggtcccaagcccaaatgtgggatagtccatcctcagagctgtccttcctacacccctgttctcctcccgggccgggatgcagcgctgcccctggcccctctggagctcagcagggagccccatgcccttccaggtgtggagagcagcctgcgtgtcactggctgccgccagatcttacggagcctcccagagcacaactacgtcgtcctccgctacctcatgggcttcctgcatgcggtgagtggggaaggggggagcttggggtgaagcccagtggccttccctcccatgctgggcccgcatggaccagtcccctccttgccctgggtctggggtcatgccctgcttgggcctcggaataccactccctgccccccaaggacctcatccaaggcctggtcaggcacccatgctgctgcggacctcctgcctgtcagacagggcgtacctgcccctgcctgctcctgtacctgctgt

SEQ ID NO: 12103 - DNA, 528 bp, Homo sapiens
  MAP TO CHR11.3; EXPRESSED IN HELA, SIGNAL = 3.8; EXPRESSED IN ADULT LIVER, SIGNAL = 3.1; NT HIT: L27631.1, EVALUE 1.00e-115; SWISSPROT HIT: Q06481, EVALUE 3.00e-19; EST_HUMAN HIT: AU135079.1, EVALUE 1.00e-115
gcgttgagcttatttcctgcctctgtttttgtgtttcagaatagagaagggacccattgttgtgctttgcacataggagctattaaccttcctttttttctattttggccttcagtgaatttcctactgaagcagatctggaagacttcacagaagcagctgtggatgaggatgatgaggatgaggaagaaggggaggaagtggtggaggaccgagattactactatgacaccttcaaaggagatgactacaatgaggagaatcctactgaacccggcagcgacggcaccatgtcagacaaggaaattactcatgatgtcaaaggtaaccccatgtagagccatggctttgaaatccatgtggtaattattcacttagacttttgcattgcgtctgtcacaggtaagtcagtcacagaaggaaaggtgtggtacctctgcactgaaggtgagttcagctctccagtgcagtgatgggatggtgccgtcttaacaaagtgggcaggcaggcacatccagggagagatgt

SEQ ID NO: 12104 - DNA, 568 bp, Homo sapiens
  MAP TO CHR16.3; EXPRESSED IN HELA, SIGNAL = 5.1; EXPRESSED IN LUNG, SIGNAL = 3.2; EXPRESSED IN PLACENTA, SIGNAL = 4.1; EXPRESSED IN HEART, SIGNAL = 3.1; NT HIT: gi15319788, EVALUE 0.00e+00; SWISSPROT HIT: P30519, EVALUE 1.00e-93; EST_HUMAN HIT: AL527997.1, EVALUE 0.00e+00
aaagtttccctcttcagccctagcagctggcagcccccaatagtacctgcatgttatactcaaaagccttgttggcctcctccacgatcctctctttggtcttcatgttcaggtccagggcgttcatcctggcccggtagagctgcttgaactgctgggcattgtccacattctcaaacaggtagaactgggtcccttcccctgtgctggggagtttcagtgctcgctgggccaccttcttcagcacctggccccccgagagatcccccatgtagcgggtgtatgcatgggccaccagtagctccggctcgttctgccctatgtagtggatccgctccacgtacttctgggcagccttggggcactgcacctgctcctcccagttttcaccaaagaaatactccatgtccttggtcagcgcctccttccggtgcagctccatggggaagtacaaaggggcaaaggctggatggtccttgttgcgctccatttcctcctcgagggctgagtatgtgaagtaaagtgccgtggtggccagctgtggaggtgacaggaggaggccagctat

SEQ ID NO: 12105 - DNA, 589 bp, Homo sapiens
  MAP TO CHR22.3; EXPRESSED IN HELA, SIGNAL = 2.3; EXPRESSED IN PLACENTA, SIGNAL = 1.6; EXPRESSED IN HEART, SIGNAL = 1.7; EXPRESSED IN ADULT LIVER, SIGNAL = 1.2; EXPRESSED IN FETAL LIVER, SIGNAL = 1.4; NT HIT: AF081535.1, EVALUE 7.00e-87; SWISSPROT HIT: O75419, EVALUE 1.00e-24; EST_HUMAN HIT: BG122390.1, EVALUE 3.00e-77
aaggtgtgagagaggaccccacacaccccctaagccagccataaagctgttgacaagaaggcacccggccactctgggctgcagggctggtatgtctggacgttctgacctgcctcatcctctgagcagcatggctgtgctggaagcattgacttgggcctgtgagggacattagcacatctgttggcctgcctggcagtgagagcttgcccacaatttgagggtgacagctgtgtttgctcccatgacaggatgaaggacatgcgcgtgcagactttcagcattcattttgggttcaagcacaagtttctggccagcgacgtggtctttgccaccatgtctttgatggagagccccgagaaggatggctcagggacagatcacttcatccaggctctggacagcctctccaggtagcaggagggctgtgggtttgcctcatggggccaccactggttctcacactgcccagggaggtcagttacggggaccccagggctgtgggagtgactgtgtcctgcagaaactgcttgggtgaactggaatcacagtgccagtgtggtgtgcacctgacacattacctgcccct

SEQ ID NO: 12106 - DNA, 516 bp, Homo sapiens
  MAP TO CHR9.3; EXPRESSED IN HELA, SIGNAL = 5.5; EXPRESSED IN HEART, SIGNAL =   5; SWISSPROT HIT: Q92982, EVALUE 6.00e-15; EST_HUMAN HIT: T89765.1, EVALUE 0.00e+00; NT HIT: gi14741248, EVALUE 4.00e-88
taggaaggtgtccaaggctggccggccagggactcaccacactgcaagagcctccaacagcgagcaaccccaggactgcaggcctcgcgccccatctcccagctcacctgggtgtcctactgctggggtgccatgtccatcaagggcttctggaccccgaaggccgtgatgaagatgttgactaccacgatgatgaacaccaggcccgtggccaggttgttgaggaagtccagcttggcgtgcttggccgggttgttaaggtcgtacttgactgtgggcgagagaggagtggatggtgccaagggcagcccagacgcagcgccccagcctgggacagtggaaggggacccaccccagcggtcaagctgtcctgggacattacagggctctcagtcgcatttaggatgagttttgtcgcccagagaaaaatacatctgttttgctgaaacatggacaacagcgcccctggcttgggcaaccccacggtctatgaccccaccttctgtagcccccata

SEQ ID NO: 12107 - DNA, 556 bp, Homo sapiens
  MAP TO CHR6.3; EXPRESSED IN HELA, SIGNAL = 7.2; EXPRESSED IN HEART, SIGNAL = 6.2; EXPRESSED IN ADULT LIVER, SIGNAL =  11; EXPRESSED IN FETAL LIVER, SIGNAL = 5.9; EST_HUMAN HIT: AI922964.1, EVALUE 0.00e+00; NT HIT: gi14782822, EVALUE 0.00e+00; SWISSPROT HIT: O15533, EVALUE 3.00e-71
cccctctaactcccaggaacctctttctatctctacttacttgcccaggcaccctcttatccatcatccctccccctattacggtccccacaatccagtgcccaccctctacccctggagacctctgtcccccaactcactgtacacagcaagctccagggtgacctgtccttgcaggtatggcaggtgtatggtggccagataggtgccctcctgaaagggttgaactgtaggcagccagaaggtcccatttccggtccatgggccccatggctcatcatcatcccaagcagcaaatgccacggccccttcttgggctgctggcatctggccattcagcccaggagttgcagccaggagcagatgtcccttacccaggtgctggcgtcgccactctagcccaaagggagggggacccggagccagagatgaggcggcctcggaggtggggggcatgtaggcaaagctcaagtccagcagagcatcttgtcccagtctcactcgaggggcaggggtgtgggtgaggacagtcagtaccactgaggaagacagggag

SEQ ID NO: 12108 - DNA, 519 bp, Homo sapiens
  MAP TO CHR22.3; EXPRESSED IN LUNG, SIGNAL = 4.6; EXPRESSED IN HEART, SIGNAL = 4.2; EXPRESSED IN ADULT LIVER, SIGNAL = 3.2; EXPRESSED IN HELA, SIGNAL = 4.1; NT HIT: gi4759199, EVALUE 2.00e-77; SWISSPROT HIT: O43759, EVALUE 4.00e-17; EST_HUMAN HIT: BG742766.1, EVALUE 1.00e-105
cctgcatcttctcttggctcccctctctcttcccctaccccctttgcctgtccctttgggggtgggggagcatgggagatgcactcttgaatgtccctctgttcctcggcttccccattttctccccactcaccctctcccccatgtgtggcactgcctattctgcccggtcctgggaccccccagccttctgggctttcctctggttcgtgggattctgctacctggccaaccagtggcaggtctccaagcccaaggacaacccactgaacgaagggacggacgcagcccgggccgccatcgccttctcctttttctccatcttcacctgggtgagtacagccaccgcgcaccagcccacactcgtcccctttccccactgagcccctggatgggtggcctttcgctagcctgggacccgctctgcctctgggagcccacactaccctcgctccctcttctgcctgcctgtctgcggcgctcacagtggtgctgcctccctcagcaaggaggctacag

SEQ ID NO: 12109 - DNA, 600 bp, Homo sapiens
  MAP TO CHR10.3; EXPRESSED IN ADULT LIVER, SIGNAL = 1.1; EXPRESSED IN HELA, SIGNAL =   2; NT HIT: AJ243098.1, EVALUE 0.00e+00; SWISSPROT HIT: P70662, EVALUE 6.00e-29; EST_HUMAN HIT: BF736296.1, EVALUE 0.00e+00
agaggatgggaatcaaacccaggtgccatggtgttccacatccagctgggttgctgacctgggtgaacatgggcttgccatgctgggtcaccatgctgccctggtcacagtcgagggacacaaagttgctgtggaatgcctccttggggtgcttaagaacatagtacagctccgtagcacccccctcaaagatgctgcggaagtagcgtgggatcagggtccggccaatggctgtagagatgggacaaactcttcaggacaaagggactgcaaaaggggccaggcagatgcctcccctaccaatctagatatcccctggcactcccagacccacttctagaccttagaacgacataggaggtatacaccctcatagcaagaccccagaggccacttactatatctctttggtccatcctccaggcagaaagtgatggtcaacatggcatcatcctcaaagaactcagtcgtgaatgcatcccaccagagattgtcacactcctagggagcatggtaacgggtgttcatgtgtcataagatatcccatagggtgcccagatggccctcctgctcccagccccttttcccttggccatacct

SEQ ID NO: 12110 - DNA, 566 bp, Homo sapiens
  MAP TO CHR17.3; EXPRESSED IN ADULT LIVER, SIGNAL = 3.1; EXPRESSED IN BRAIN, SIGNAL = 2.9; EXPRESSED IN HELA, SIGNAL = 2.2; EXPRESSED IN PLACENTA, SIGNAL = 2.7; EXPRESSED IN HEART, SIGNAL = 3.6; SWISSPROT HIT: P18054, EVALUE 1.00e-19; EST_HUMAN HIT: BG392340.1, EVALUE 7.90e-01; NT HIT: M35418.1, EVALUE 8.00e-65
gactgggatgaggcagagagaggaggtgaggggagctgtggggggagactgggggaggtgtctggaaaaatcaggattttctgacgatgtatgacagcaaccatgcgaattcctagaactaaggacccacatcttccatgagatgctagtgtgtttagagggctgaggatgtcccaaaggcgaggtgtcttcccagatactgtggaagcattgggcagatgccacagaaagaggaatagaggtcagaggcgggggctttctgccctcaagtgccttttccccctgggcaggtatgtggaggggatcgtccacctcttctaccaaagggatgacatagtgaagggggaccctgagctgcaggcctggtgtcgggagatcacggaggtggggctgtgccaggcccaggaccgaggtaagatccattctagagacagaagaagctcctgggagactctgccagggcgccttcccagccctgcccttctggggacaggaccccagcctctcatcacgcctcccttcctccctccacacgggaaagcatgtgtatcccattcccacctcct

SEQ ID NO: 12111 - DNA, 568 bp, Homo sapiens
  MAP TO CHR15.3; EXPRESSED IN HELA, SIGNAL = 3.4; NT HIT: gi16162598, EVALUE 0.00e+00; EST_HUMAN HIT: BI857891.1, EVALUE 0.00e+00
tcgcctcaccaggaaactactaaagttcctggggaagcaaagtagaatttcataagaacaaaatggatggagaggagaaaacctatggtggctgtgaaggccctgatgccacgtatgtcaaattgatatcatctgatggccatgaatttattgtaaaaagagaacatgcattaacatcaggcacgataaaagccatgttgagtggcccaggcgttttatgggtttggcttttaaatttaggtctttggtcttaagttaatttttgtttatgctgtgaggtcagtttgctgagaacgaaaccaatgaggtcaattttagagagataccttcacatgtgctatcgaaagtatgcatgtattttacctacaaggttcgctacactaacagctccatcgagattcctgaattcccaattgcacctgaaattgtactagaactgctgatggctgcgaacttcctagattgttaaataaaataaattataataaactgttaactctttttattatgtaatacctgtagatcagttagtaactttttcatatatagcatgttgcctgtatgcagt

SEQ ID NO: 12112 - DNA, 589 bp, Homo sapiens
  MAP TO CHR1.3; EXPRESSED IN HELA, SIGNAL =  12; EXPRESSED IN LUNG, SIGNAL = 2.8; EXPRESSED IN PLACENTA, SIGNAL = 2.5; NT HIT: gi14726884, EVALUE 0.00e+00; SWISSPROT HIT: P05997, EVALUE 9.80e+00; EST_HUMAN HIT: BG575173.1, EVALUE 0.00e+00
gctagacaggcctccagaagcactgcgtgagtctacattttagtagatatatctttggacaaggaataacgtgataatggagatcagattaataaaacaaaatcagagtcttgaagcaaactgatttgttttttcttttctcccttctctactttgctaggtatgaagattattactaccaccctcctcctcgcatgccacctccaattagaggtcggggtcgtggtggggggagaggtggatatggctaccctccagattactacggctatgaagattactatgatgattactatggttatgattatcacgactatcgtggaggctatgaagatccctactacggctatgatgatggctatgcagtaagaggaagaggaggaggaaggggagggcgaggtgctccaccaccaccaagggggaggggagcaccacctccaagaggtagagctggctattcacagaggggggcacctttgggaccaccaagaggctctaggggtggcagagggggtcctgctcaacagcagagaggccgtggttcccgtggatctcggggcaatcgtgggggcaatgtaggaggcaagag

SEQ ID NO: 12113 - DNA, 600 bp, Homo sapiens
  MAP TO CHR14.3; EXPRESSED IN LUNG, SIGNAL =  19; EXPRESSED IN HELA, SIGNAL =  27; EXPRESSED IN ADULT LIVER, SIGNAL = 2.9; NT HIT: AF111167.2, EVALUE 0.00e+00; SWISSPROT HIT: P01100, EVALUE 4.00e-84; EST_HUMAN HIT: BF526890.1, EVALUE 0.00e+00
tggagattgagcataagggcccttgagtaagactgtgtcttatgctttcctttatccctctgtatacaggagacagaccaactagaagatgagaagtctgctttgcagaccgagattgccaacctgctgaaggagaaggaaaaactagagttcatcctggcagctcaccgacctgcctgcaagatccctgatgacctgggcttcccagaagagatgtctgtggcttcccttgatctgactgggggcctgccagaggttgccaccccggagtctgaggaggccttcaccctgcctctcctcaatgaccctgagcccaagccctcagtggaacctgtcaagagcatcagcagcatggagctgaagaccgagccctttgatgacttcctgttcccagcatcatccaggcccagtggctctgagacagcccgctccgtgccagacatggacctatctgggtccttctatgcagcagactgggagcctctgcacagtggctccctggggatggggcccatggccacagagctggagcccctgtgcactccggtggtcacctgtactcccagctgcactgcttacacgtcttccttcgtcttcacc

SEQ ID NO: 12114 - DNA, 598 bp, Homo sapiens
  MAP TO CHR19.3; EXPRESSED IN HELA, SIGNAL = 4.2; EXPRESSED IN HEART, SIGNAL = 1.7; EXPRESSED IN PLACENTA, SIGNAL = 1.1; EXPRESSED IN BRAIN, SIGNAL = 1.7; NT HIT: gi15309573, EVALUE 7.00e-93; SWISSPROT HIT: O42904, EVALUE 4.00e-06; EST_HUMAN HIT: BE746704.1, EVALUE 1.00e-92
tcccaaggtcacagtgtcagcagacccccgctccatgggacccagcccggggactcacccatgatcttggcggccgtggatgccccgataatgatggacaggttgggtgcgatgaaggacatccgggactccacatactcgtagatgcggtgcttggaggcgttcagctccagcgccatgtcgcaggcctcctccagccgctccagctcctcctccgacagctgctgcctgcaggggcgggtgggcccagcctcctggatctcccgcctgcctggtgtgcccagccccagccctctcggttctgtgtgtgtgtgtgcatgtgtgtatgtgtgtgtgcgtgtgtacacctgcgtgtgtagctccagcctaatccccaatcccattagggcccggcgcctccctcgaagcggacatacccctgggtggtggaggcggtgacgctgacgaccatgatggtggcattggtgaggatctgctgcaggttctcattgttcttgcacttgtccaggctgttgcccagctcctgggggcgagcagagaagataggggaggctcgggaactcaggaaggctcgagaacctctcttgctcagcacctc

SEQ ID NO: 12115 - DNA, 591 bp, Homo sapiens
  MAP TO CHR17.3; EXPRESSED IN HELA, SIGNAL =   7; EXPRESSED IN HEART, SIGNAL =   1; EXPRESSED IN FETAL LIVER, SIGNAL = 2.1; NT HIT: gi15310160, EVALUE 3.00e-64; SWISSPROT HIT: O43242, EVALUE 3.00e-27; EST_HUMAN HIT: AW996275.1, EVALUE 5.00e-64
caaaggcagagcttggattctatgcccagcacaggttttcagggcttcctcctctctctgggcctaaacagtgatccctttccctgtttcccactacatctggcagaatttaggccacatttcattttcttcttccgcccatggggctccctgcccactgtgttcccctgtcactctgtccaggtgcacaagcttctcatcgtggtggagctgttgctgggggagatccctgaccggctgcagttccgccagccctccctcaagcgctcactcatgccctatttccttctgactcaaggtaaggctggcttccccaccccagagcccactaggcccccttcagtggggcctcttacatgcctgtgcctatttgcatcatccaatctactcctgttctgcctgcagctgtcaggacaggaaacctagccaagttcaaccaggtcctggatcagtttggggagaagtttcaagcagatgggacctacaccctaattatccggctgcggcacaacgtgattaagacaggtgtggatcaggatctgaggggctgttggaggagcagaagccaggccagggcaaacctagtgggta

SEQ ID NO: 12116 - DNA, 550 bp, Homo sapiens
  MAP TO CHR11.3; EXPRESSED IN ADULT LIVER, SIGNAL = 0.86; EXPRESSED IN HELA, SIGNAL = 4.6; EXPRESSED IN LUNG, SIGNAL = 0.92; EXPRESSED IN PLACENTA, SIGNAL = 1.2; SWISSPROT HIT: P04216, EVALUE 1.00e-61; NT HIT: M11749.1, EVALUE 0.00e+00; EST_HUMAN HIT: AL559621.1, EVALUE 0.00e+00
tgttaggggcttgtctcacctctgagcactgtgacgttctgggaggagatgggtggggaatggccagagtggtggagtgcacacgtgtaggtgccctcgtccttgctagtgaaggcggataagtagaggaccttcatgttgtatttgctggtgaagttggttcgggagcggtatgtgtgctcaggcacccccacagtgccaaagagcacgtgcttctttgtctcacgggtcaggctgaactcgtactggatgggtgaactgctggtattctcatggcggcagtccagacgaaggctctggtccactaggcaggccgttaggctggtcaccttctgccctcgggagacctgcaagactggcaccagcagtgcctccttcaaactggaggggcctgcggcacaggggcctcccacccacctgaagtggagagatgggcctggctagggaggggaccggggtctgctctctgagtgcctttccccaccccagggatcccacttctcctttgcagaccccagcctccctccccactctgcttgagccttggatc

SEQ ID NO: 12117 - DNA, 585 bp, Homo sapiens
  MAP TO CHR4.3; EXPRESSED IN FETAL LIVER, SIGNAL =  47; EXPRESSED IN BRAIN, SIGNAL =  50; EXPRESSED IN HELA, SIGNAL = 1.7e+02; EXPRESSED IN LUNG, SIGNAL =  14; SWISSPROT HIT: P04797, EVALUE 2.00e-85; NT HIT: AF261085.1, EVALUE 0.00e+00; EST_HUMAN HIT: BG285311.1, EVALUE 0.00e+00
gtgagcttcccattcagctcagagagggcctttcccacagccttggcagcaccagtagaggcagggatgatgttctggagagccctgcagctgtcacgccacagtttcccagaggggccatccacagtcttctgggtggcagtgatggcatggactgtagtcatgagtccttccacgataccaaagttgtcatggatgacattggccaggggcgctaagcagttggtggtgcagaaggcattgctgatgatcttgaggctgttgtcatacttctcatggttcatgcccatcactaacatgggggcgtcaacaaagtggggagagatgatgacccttttggctccttcctgcaagtgagctccagccttctccatgggggtgaaaacaccagtggactccacaacgtactcagcgtcagcattgccccatttgattttggagggatctcgctcctggaagatggtaatgggatttccactgatgacaagcttcccattctcagcctttacggtgcatggaatttgccataggtaaaatcctactggaacatgtagaccatgtagttgaggtcaatgaagcggtcat

SEQ ID NO: 12118 - DNA, 591 bp, Homo sapiens
  MAP TO CHR17.3; EXPRESSED IN LUNG, SIGNAL = 1.9; EXPRESSED IN HELA, SIGNAL = 2.5; EXPRESSED IN ADULT LIVER, SIGNAL = 0.9; SWISSPROT HIT: O75385, EVALUE 6.00e-10; NT HIT: gi16164307, EVALUE 1.00e-85; EST_HUMAN HIT: R05561.1, EVALUE 2.00e-85
tgctctttcccatcacactgtgagagagtgtctgatgagtactcactgttgtttttatttttcagtattcttaaagggaaaagatgctgggttgttagctttttgcagttcaattgatagaagtctgaagtgcattattctcaatcttttcatattgaaagagataacatgaaaaaatcctatttctggtcctttttttgaatgatcacatagtgacaccttccctatatatcagcaggaaagatacatataactgtgtctttatttctggaggaaaattaaaattagttcccatctcaattttttttcagttgtcaagaatctgaacgaacgatataaattctgcatcaccatgtgcaagaaacttacagaaaagctgaatcgattcttctctgacaaacagaggtttattgatgaaatcaacagtgtgactgcagagaaactcatctataattgtgctgtagaaatggtaaccctttctaaggtttaatattgtatagtactacttatctttaagtgtctttttaattgaatatctatatgacagctatccttttaaaagataatgtctcaagtcccaagtattgtgga

SEQ ID NO: 12119 - DNA, 586 bp, Homo sapiens
  MAP TO CHR19.3; EXPRESSED IN HELA, SIGNAL = 5.6; EXPRESSED IN PLACENTA, SIGNAL = 3.5; EXPRESSED IN FETAL LIVER, SIGNAL = 1.8; EXPRESSED IN ADULT LIVER, SIGNAL = 2.3; EXPRESSED IN BRAIN, SIGNAL = 3.4; NT HIT: AF202566.1, EVALUE 0.00e+00; SWISSPROT HIT: P26358, EVALUE 4.00e-54; EST_HUMAN HIT: AW504739.1, EVALUE 1.00e-100
gtcttcactctggtccctgccgcatccttacctctgtcccagcgtgaccccagccagcttgatcaggtcccgcatgcagggtgtcaggaagatgggctgctcatcactgtccccggcctcgtcataactctccacctgctccaccacaaactgcgcgtgtcgcaggagggagtcctctgtgaagcggttcaagttgaggccagaaggaggaaccgtggtcttgaaagagaacaggtttctctcatgcttaagccaaactggcctaaatccaactgaagaacagtgtctgctggttctgaaggcaagtttccagtgggaatcccggatgctgaggaccctcgatctcttacctcgatcttgttgatcaggtcctcataggtcgagtcggaattgctctgcaggaactccaccacaatcttgctgatgtagatcttctcctgcatcagcccaaatatgggcgcatactcgggactgggatccatcagaatgtattcggcaaatgctggggtgaacagaggaggtgtggaaaaggggctggaatctgatggcgcctacagtggccacagggcatggaggagtctaccaa

SEQ ID NO: 12120 - DNA, 549 bp, Homo sapiens
  MAP TO CHR22.3; EXPRESSED IN HELA, SIGNAL = 3.7; NT HIT: gi14779246, EVALUE 0.00e+00; SWISSPROT HIT: P91917, EVALUE 3.00e-44; EST_HUMAN HIT: AL568510.1, EVALUE 0.00e+00
aagattcccatctccccaactttatttgtcccattggttttcagaaattttaatttttaaaaaatcagatgccttttggaagttgtatgtttatctgagcagtaactaaattttatttcttcttcagttgttaaggtgtgttaaatttgaagaagataatatctccatcttcaacaatataatttctgccttgttgtctgtactttccagcagccttgactgcattttcagaaccttcctctttaaaatcttcatatttcattacttcagccataatgaatcccttttcaaaatctgtgtgaatctttcctgcagcctgaggagccttagtccctttcctgatggtccgtgcacgcacttcatctgggcctgcagtgaaaaagtattttagttggagtgctgcaaacccagccttaatgatctttggcaaagcactttgtgtcatgttcgcttccagatactgctgtctctcctcagcactcaattcttgcaacttgagttccaaggccccactaaaaggaatgaccaaggcacctgggtcatacttgt

SEQ ID NO: 12121 - DNA, 556 bp, Homo sapiens
  MAP TO CHR3.3; EXPRESSED IN LUNG, SIGNAL = 2.6; EXPRESSED IN HELA, SIGNAL =   3; EXPRESSED IN PLACENTA, SIGNAL = 0.64; EXPRESSED IN ADULT LIVER, SIGNAL = 0.82; EST_HUMAN HIT: BG562881.1, EVALUE 0.00e+00; NT HIT: U36926.1, EVALUE 0.00e+00; SWISSPROT HIT: Q16850, EVALUE 1.00e-98
taactgggttttcaggggtgtgaatcatagttgtataattcacggtgggaaagtatccatcaatgagatcaaattcatataaacgaagcatagtggaccaaattgtcttaatttgaacataggcaaaattttccccagtacaaccatgatgcccagctccaaatggcacataggcaaacttttcccttgatgctgggttatcctataagtagcgatcaggattaaagtccaggtgttctacccatgaatctttaagtctttgattgacagtaggagaaacacacacctgatgtcccggaggaatggtataccctgccacagttttaggaattctggccattctcatcatgatcattacaggatgtctaagtcttaatgtttcttttatacagcgatcaagtaaatttagatccttgagctggtcataagttaaaggaggcagattctctccacagactgttttctgttctaaataacatttttcttgaagtgttttgtctctggccaaaaagaagcccatctaagcactagttgaggatgtatgctgctctgccaa

SEQ ID NO: 12122 - DNA, 596 bp, Homo sapiens
  MAP TO CHR6.3; EXPRESSED IN HEART, SIGNAL = 2.5; EXPRESSED IN HELA, SIGNAL = 2.3; EXPRESSED IN ADULT LIVER, SIGNAL = 3.3; EXPRESSED IN FETAL LIVER, SIGNAL = 4.1; SWISSPROT HIT: P01903, EVALUE 9.00e-43; EST_HUMAN HIT: BI027876.1, EVALUE 0.00e+00; NT HIT: J00204.1, EVALUE 0.00e+00
ctccacttctcgcctttcagaagaacatgtgatcatccaggccgagttctatctgaatcctgaccaatcaggcgagtttatgtttgactttgatggtgatgagattttccatgtggatatggcaaagaaggagacggtctggcggcttgaagaatttggacgatttgccagctttgaggctcaaggtgcattggccaacatagctgtggacaaagccaacctggaaatcatgacaaagcgctccaactatactccgatcaccaatggtacctccctctctgctgcactcctggacatgggaatccatagtttgaaagtagttgcttcagctctttgtgttagattattgtaactgattttccctccaagggcctaaccttgccattaacaagccccaaattctcatgccagaggtctgagaactttatgggtttgatcctatcttgttgtgctcaagtcttgtctctgtcatccatggtctcctacaaagtcattgccctaagttcatgctgggggagccagaagggaagtccttggatatcttatacctcaatattggctcaatttcttggggagggggtgctgtcagagattgt

SEQ ID NO: 12123 - DNA, 571 bp, Homo sapiens
  MAP TO CHR19.3; EXPRESSED IN LUNG, SIGNAL = 4.4; EXPRESSED IN HEART, SIGNAL = 0.79; EXPRESSED IN HELA, SIGNAL = 2.4; EXPRESSED IN FETAL LIVER, SIGNAL = 1.4; NT HIT: gi14754905, EVALUE 0.00e+00; SWISSPROT HIT: P79241, EVALUE 1.00e-110; EST_HUMAN HIT: BI911167.1, EVALUE 0.00e+00
caacggccacatttatcctctctttagggtcgttggtccagggcgaaaagttaaaagtgcaggctactgtccccgttttaccaggtactgtagtcacacgaatgataactggcaatgtgaggagcagagccatcacccagggcccaatgatcaccttcttggccaggctcacggtgcggtggttctgggtccagactggatgcaggacgcaaacacagcggtccagagcaatgagggcgatcaggaagacacttccgaacaagttgatgtccactatggtaaagacgaatttgcacaggaaccagccgaaaggccaatgtcctcccatggccttcctgaccatgaagaatggcaaagtggaggtgaaacagaagtcagccacggccaggttcaggtaactgatggtggtgactgtgtgtgtcatccggaatccagccacccagatcacaagcccgttgcccaggaccccgaggacaaaggtgactgcaaataccagataagtgatgatatccaggaagagatagccagcagatacagcaggtgtccctccagagatgttcgtggggagaga

SEQ ID NO: 12124 - DNA, 513 bp, Homo sapiens
  MAP TO CHR13.3; EXPRESSED IN HELA, SIGNAL = 5.6; EXPRESSED IN LUNG, SIGNAL = 4.2; EXPRESSED IN HEART, SIGNAL = 3.2; EXPRESSED IN ADULT LIVER, SIGNAL = 3.1; EXPRESSED IN FETAL LIVER, SIGNAL = 2.6; EXPRESSED IN BRAIN, SIGNAL = 4.6; SWISSPROT HIT: Q00780, EVALUE 9.40e-01; NT HIT: M26570.1, EVALUE 4.00e-85; EST_HUMAN HIT: BG819828.1, EVALUE 7.00e-69
gaggaactctgaccactgcccctctgggctccccataccgccctgcacaggccaagccttctcaccttgctggcctttcgggcctggcagtccctgaagccctttcagccctggggggccctcaggaccagggagcccgggctcccctttgatgatgtcgtaaggacctggggggccaggaggacccgggagacctgtgggaatagggaaggcattgatcaatttcactgtccacatactggggcggaaacaactttagaaggagaatcccgggtgaagctatccaaatggaacgtacttctcaaaggtaaagtcattatcaaaacccaggtaatcagatcttcacaaaacatgtccaatctgcacatctttattatttaacctgaaatcctgaactctcgggcaaaggcattggggcatcagcgtaacttcccactgcattctgggctctgggacccctgacaactgccctgcagcctcatgccagccctcccagcagggagagaagcttgt

SEQ ID NO: 12125 - DNA, 510 bp, Homo sapiens
  MAP TO CHR1.3; EXPRESSED IN FETAL LIVER, SIGNAL = 0.54; EXPRESSED IN ADULT LIVER, SIGNAL = 0.5; EXPRESSED IN HELA, SIGNAL = 2.6; EST_HUMAN HIT: BF063234.1, EVALUE 1.00e-118; SWISSPROT HIT: P12270, EVALUE 1.00e-33; NT HIT: gi4507658, EVALUE 1.00e-118
tcatatatgcttacacgatttcggtatctaaaagctagtaatattcaaaattacaaagaaataagatttcataacattcatcctagtttttttttgtaagataagtttcttcaaaataccttatcctgttgtgctttaagttcttcatattgagtcttgtacctacgtccaattttcttaacttgagtaatagttttgactttttcttggatatcaattattttggcatctaagtccttctggatggtttccttttcagttcttactttatttagatcttccttcagactctgaattaagttctggttgttagtcaaagatgcatttgatctttaaaaaatggaggaaagaagaaagattaaatatatgagacatttttcaaagtttgaagtccaatgtaactttatgttatactgctttaataacttttttttttgaaaatcctaaaaaatacccatatacttcaaaggtaagaccttacgaatttacagcccttcggcaagatcttat

SEQ ID NO: 12126 - DNA, 535 bp, Homo sapiens
  MAP TO CHR6.3; EXPRESSED IN ADULT LIVER, SIGNAL = 4.8; EXPRESSED IN BRAIN, SIGNAL = 3.7; EXPRESSED IN HELA, SIGNAL = 5.8; EXPRESSED IN LUNG, SIGNAL = 2.9; EST_HUMAN HIT: BI258240.1, EVALUE 0.00e+00; SWISSPROT HIT: P14611, EVALUE 2.00e-17; NT HIT: gi14755379, EVALUE 0.00e+00
tctaaatcttttctcccccgttaggtcaatattgaaggaggggctatagccttgggccaccctcttggagcatctggctgtcgaattcttgtgaccctgttacacacactggagagaatgggcagaagtcgtggtgttgcagccctgtgcattgggggtgggatgggaatagcaatgtgtgttcagagagaatgaattgcttaaactttgaacaacctcaatttctttttaaactaataaagtactaggttgcaatatgtgaaatcagaggaccaaagtacagatggaaaccatttcctacatcacaaaaacccaagtttacagcttgtactttactttaatgtgtaatactcaactcaaggtacaagacaattgcatttaacattgttataaataaaaggaacatcagatcaatcattaagggctccagagtgaacagcatcttcataacttccatgtttatcatctttactttctggatgtaatttaataagatcatcaattcgaagaatggtgattgcagcttctgttgcaa

SEQ ID NO: 12127 - DNA, 547 bp, Homo sapiens
  MAP TO CHR1.3; EXPRESSED IN ADULT LIVER, SIGNAL = 0.32; EXPRESSED IN HELA, SIGNAL = 2.6; EST_HUMAN HIT: AL571196.1, EVALUE 0.00e+00; SWISSPROT HIT: P14060, EVALUE 2.00e-98; NT HIT: M35493.1, EVALUE 0.00e+00
taaacgaggccctgaacaacaatgggatcctgtcaagtgttggaaagttctccactgttaacccagtctatgttggcaatgtggcctgggcccacattctggccttgagggccctgcaggaccccaagaaggccccaagcatccgaggacagttctactatatctcagatgacacgcctcaccaaagctatgataaccttaattacaccctgagcaaagagttcggcctccgccttgattccagatggagctttcctttatccctgatgtattggattggcttcctgctggaaatagtgagcttcctactcaggccaatttacacctatcgaccgcccttcaaccgccacatagtcacattgtcaaatagcgtattcaccttctcttataagaaggctcagcgagatctggcgtataagccactctacagctgggaggaagccaagcagaaaacggtggagtgggttggttcccttgtggaccggcacaaggagaccctgaagtccaagactcagtgatttaaggatgacagagatgtgcatgtggg

SEQ ID NO: 12128 - DNA, 509 bp, Homo sapiens
  MAP TO CHR1.3; EXPRESSED IN HELA, SIGNAL = 2.8; EXPRESSED IN BRAIN, SIGNAL = 2.3; SWISSPROT HIT: O43865, EVALUE 2.00e-19; NT HIT: gi15299432, EVALUE 3.00e-76; EST_HUMAN HIT: BF797186.1, EVALUE 5.00e-76
tccagatgggaccaagtacctctattatctgggattactatagctgcaggtttataatcagtggtcccttgtcataggcactaatagcacagtattgttagggtgggtgaaagagctgcaacatggaagtacccacaacagtttcattcataccacctattagaacctagaggagcagaactgagagcgttgtaaaaggtagctccaattaagggtgttcccttaacttaaatgaaagtcccttggggactgcactctgtagagttggggaccactgaggtttttctatccttgtttttttctttcctggctctagctgcatcctacacagatagctctgatgatgaggtttctccccgagagaagcagcaaaccaactccaagggcagcagcaatttctgtgtgaagaacatcaagcaggcagaatttggacgccgggagattgagattgcagagcaaggtaaagaaagggagtgggttaggggaccagaaacaaccctcttgttggc

SEQ ID NO: 12129 - DNA, 557 bp, Homo sapiens
  MAP TO CHR5.3; EXPRESSED IN HELA, SIGNAL =   3; EXPRESSED IN LUNG, SIGNAL = 3.4; EXPRESSED IN ADULT LIVER, SIGNAL =   2; EXPRESSED IN FETAL LIVER, SIGNAL = 2.7; EXPRESSED IN BRAIN, SIGNAL = 1.3; EST_HUMAN HIT: AV683354.1, EVALUE 0.00e+00; NT HIT: gi16159871, EVALUE 0.00e+00; SWISSPROT HIT: P19474, EVALUE 6.10e-01
aaatgaaatgtgcaaatgcgtatatatacacacacagacacatattcatacacataaaaaggacttgcttatttttctgttttatactaatctatcattcaatgagttagagcatctcaaagattataaataacaaattccaagggaaccagacaacttacctgtgatcttgacataggcaaaccaagtcccacagtgttagtgctcatcatagagaaattcatactctgggaagatgtcatggttgcctgggacgagcccataagatcaaacaggtctgaagaatttgaggcagcaggaggtgggcctagagctgattgtgagccactaacaagttctaccgctggctgtgaggcactgccaaagaactcgccactggaagcaacagggcctgatggggcttggttgaaggcactccagtcaccaaagtctccattcccacttgttgctgttactaagacagaaataactctaagggtaagaaacttcatggaatgcacagaacaaatgtaacaatctatgaactgaaacaaattagagctgatctgagtccccag

SEQ ID NO: 12130 - DNA, 566 bp, Homo sapiens
  MAP TO CHR12.3; EXPRESSED IN HEART, SIGNAL = 1.8; EXPRESSED IN HELA, SIGNAL = 6.4; EXPRESSED IN ADULT LIVER, SIGNAL = 1.7; EXPRESSED IN BRAIN, SIGNAL = 2.2; SWISSPROT HIT: Q15356, EVALUE 2.00e-19; NT HIT: gi4507130, EVALUE 8.00e-65; EST_HUMAN HIT: BF448268.1, EVALUE 1.00e-64
aagagagttggtggtgggaggaaaaataattaattagatccttttttgttctttgtgcagagtttacccctcaatcccaaacctttcctcaatggactaacaggaaagccagtgatggtgaaacttaagtggggaatggagtacaagggctatctggtatctgtagatggctacatgaacatgcaggtaagctaaagagctgtaaaggtcataacattgcatttattttgcttcaccttatttctcaaaggtttagtctgactaataagaatacatacaattaaattgacaaatatacggcaaaattcaaaaataaagtcaaagccaggagggatactgtgatatactaggtacaagacatggacttaaaccagaattcagctacagattttattcctagtagttaaagtaggaagagctcagacacttgattcataataataccataagggaaacacactactttgctggagaaaacaaaacatttctcatcatttagccctgaaagaaagttttcaagtgaaattattgagtcttttaatgaatgctaaaggcacaacaccaaa

SEQ ID NO: 12131 - DNA, 596 bp, Homo sapiens
  MAP TO CHR1.3; EXPRESSED IN HELA, SIGNAL = 1.9; EXPRESSED IN PLACENTA, SIGNAL = 4.9; EXPRESSED IN LUNG, SIGNAL = 6.8; EXPRESSED IN HEART, SIGNAL = 5.5; EXPRESSED IN FETAL LIVER, SIGNAL = 3.6; SWISSPROT HIT: P17038, EVALUE 1.00e-88; EST_HUMAN HIT: BI093435.1, EVALUE 1.00e-113; NT HIT: gi13628185, EVALUE 0.00e+00
gcaaagcttttaacctgtgctcagttcttactaaacataagaaaattcatactggagagaaaccatacaaatgtgaagaatgtggcaaatcctttaagttgttcccataccttactcaacacaagagaattcatagtagagagaaaccctacaagtgtgaagaatgtggcaaagtctttaaattgttgtcataccttactcaacatagaagaattcatactggagagaaaaccttccgatgtgaagaatgtggaaaagcctttaaccagagctcacatctgactgaacataggagaattcatactggtgagaaaccatacaaatgtgaggaatgtggcaaagcttttacctggttctcataccttattcagcataagagaattcatactgggcagaaaccctacaaatgtgaggaatgtggcaaagcttttacctggttttcataccttactcaacataagagaattcatactggagagaaaccctacaaatgtgatgaatgtggcaaagcttttaactggttttcatatcttactaatcataagagaattcatactggagagaaaccctacaaatgtgaagaatgtggcaaagcc

SEQ ID NO: 12132 - DNA, 524 bp, Homo sapiens
  MAP TO CHR1.3; EXPRESSED IN HELA, SIGNAL = 3.9; EXPRESSED IN LUNG, SIGNAL = 1.9; EXPRESSED IN PLACENTA, SIGNAL = 1.2; EXPRESSED IN HEART, SIGNAL = 1.6; SWISSPROT HIT: P12270, EVALUE 1.00e-21; NT HIT: gi15296870, EVALUE 1.00e-114; EST_HUMAN HIT: AU140228.1, EVALUE 1.00e-113
gtctctgctgttcagggacctataaagagaaagctcttgattgttgttcctagcccacaagagtccactaaaaatgccacaaaaaaattgtcattattgttaattctctccgcatatattgaattttagccaaaattcactgacaaaggctcctatatcaccaagcactttcaagtaaaatgtacaaagaaaaacaatttgttacttaagcagaattagctaatcaccttattagaaggttcttgaggctcatctctctgctcaaggtgtctctcttgatgctccctgagttctctttccaagcgactaattcgaccttcatattgggactttagcgcagtaatgcgaacatccaattcatctttctgctgatctaaggctccattcctttgtttaagctcctcattttctttagttagctgatcttttacacctaaagaagtaaccaggcgattatattaatattataatcaaacatttaaaacagcatttatgcacttaattggcacatggtcacatcagat

SEQ ID NO: 12133 - DNA, 537 bp, Homo sapiens
  MAP TO CHR17.3; EXPRESSED IN LUNG, SIGNAL =   1; EXPRESSED IN HELA, SIGNAL =   2; EXPRESSED IN HEART, SIGNAL = 1.4; EXPRESSED IN ADULT LIVER, SIGNAL = 1.4; EXPRESSED IN FETAL LIVER, SIGNAL = 1.8; EXPRESSED IN BRAIN, SIGNAL = 1.7; SWISSPROT HIT: Q60838, EVALUE 1.00e-30; EST_HUMAN HIT: BE393529.1, EVALUE 6.00e-97; NT HIT: gi13632774, EVALUE 4.00e-97
ggttggagaggcagaacaaggtaggcaaagccacactcccagagttggggcagggggacttacagctctcacagccaccactgaggtctccgaagacgtaatagcactgctcagagaaggtgatcttgttgacggtgtgtcggatcaggcctgctttgagcagcccgctggcatacttgcgggcctcccgccgctcaggaaagccctccacgtgatggtagagccagtcaaccacatccgagcctgggagcacccacagtggaaaaaggcctcaggttcttcttccaactcctgctctcgcctctgcctgtgccattcctggctttggtcaccacctcctccccttctccagccacctgcccaggacccagccatacccagaaaggcattagggatggtgatcttgagccacatgcggtcccggacttccagtccagactctggagctgccatggccttggtcaccgatgccatgtccgtatggacggagagaccccggccttcacagcctggcagaggagacaacgggtaaccaga

SEQ ID NO: 12134 - DNA, 510 bp, Homo sapiens
  MAP TO CHR19.3; EXPRESSED IN BRAIN, SIGNAL = 1.6; EXPRESSED IN HELA, SIGNAL =  12; SWISSPROT HIT: P08640, EVALUE 2.80e-02; NT HIT: gi14765935, EVALUE 0.00e+00; EST_HUMAN HIT: AI185780.1, EVALUE 0.00e+00
ctgggcatttaacccaactgatctctaccttccctatctgtaaaatgggggacaatcattaacagcgtcttttcaggaccaccatgaaccctggaggtcctggcatggttgggggcttggagggtccccgccctggcctgacacgtgttcctctttgaccccagacacagctgtgatcagtccccaggatcccacgcttctcatcggctcctccctgctggccacctgctcagtgcacggagacccaccaggagccaccgccgagggcctctactggaccctcaacgggcgccgcctgccccctgagctctcccgtgtactcaacgcctccaccttggctctggccctggccaacctcaatgggtccaggcagcggtcgggggacaacctcgtgtgccacgcccgtgacggcagcatcctggctggctcctgcctctatgttggccgtaagttggcacccaggacaccccaggggtagctcttgggagcggcatctccctctggagtgag

SEQ ID NO: 12135 - DNA, 548 bp, Homo sapiens
  MAP TO CHR6.3; EXPRESSED IN HELA, SIGNAL = 2.3; EXPRESSED IN LUNG, SIGNAL = 2.7; EXPRESSED IN ADULT LIVER, SIGNAL = 1.5; SWISSPROT HIT: P40151, EVALUE 2.00e-17; NT HIT: gi14750646, EVALUE 0.00e+00; EST_HUMAN HIT: AL598440.1, EVALUE 0.00e+00
aaaccactcacctggtttgcctctcgtttcacctcatgagaatttcttctgtctgtcgtaggtggttatccagactgtaggcgcaaaagggggataataaaagcatgtggggatcttctcagaattacctagagctgtgtatcagaaggggctctgcagaacagaagcttggcatcttgctagtaaaatgtgtcctctgtgtcattggtaggtgcttctggcccagtgtgtggtctactttgccagagccccaaagtccattgaggtgtacagcgcctacaacaacgtcaaagcctgcctgaggaaccaccaggggccactgccccccgtgcccctgcacctgaggaacgcgcccactaggctgatgaaggatttgggctatggcaaaggctacaagtacaaccccatgtacagcgagcctgtggatcaggagtacctgcctgaagagttgaggggggtagatttcttcaagcagaggaggtgctgactcctcagggcacgacagcagaaggatgttgcttttttaagggagggccagaaagaaagtt

SEQ ID NO: 12136 - DNA, 571 bp, Homo sapiens
  MAP TO CHR4.3; EXPRESSED IN LUNG, SIGNAL = 3.1; EXPRESSED IN HELA, SIGNAL = 4.4; EXPRESSED IN HEART, SIGNAL = 2.5; EXPRESSED IN ADULT LIVER, SIGNAL = 2.5; EXPRESSED IN FETAL LIVER, SIGNAL = 1.7; EST_HUMAN HIT: BI252595.1, EVALUE 0.00e+00; SWISSPROT HIT: P78314, EVALUE 4.00e-15; NT HIT: gi14781050, EVALUE 0.00e+00
agtgaggtgggaacatggagagcacaggcctgatgcggaggccaccttgggggcaccaccgacagccaggggccagcctggtgatgccgctgttgatgctgctgccttgttttacagacggggagactgaggcctagagccgcagagtggcctggccctgctgacgctcccccttctcttcccccacaggactctaagttctacctggagggcgaggtcctgtttgtgagtgtgggcagcatggtgggagcactaccacacccacgtgctgcccagccaccagagcctgctgctgcggcacccctacggctacactgggcctaggtgatggcagtccatgtggctgccaggccaaggcagtcacaggggccctgaccccaggccacacagacggacatgggcccacatgggagggtgagcaggagcaaggctgtgcttgcctagggcctctgtgatggacatctcgtaggacccagccagtctcatccagcaggttgggttctagggctgaaccaggcgccaggctccagaggacgaagggactctgttgccccacactaacttgccctgt

SEQ ID NO: 12137 - DNA, 501 bp, Homo sapiens
  MAP TO CHR16.3; EXPRESSED IN ADULT LIVER, SIGNAL = 7.4; EXPRESSED IN HELA, SIGNAL = 3.2; SWISSPROT HIT: P79937, EVALUE 4.70e-02; NT HIT: gi14776423, EVALUE 0.00e+00; EST_HUMAN HIT: AI150142.1, EVALUE 0.00e+00
cttgcctaggacagaggctgggggcagtgtggcagctccctctggtggaggggcagttctttggaaagaggttcccggtggttggtcagatggtgcctgctttggtggctgtgtgaccagaagggtggctggtgtcttggggaagggagctgtgtcccggtgtgagccctgactgctttatttatgcccccgtagtgtggaaggggagtatgtcccagtggaaggcgacgaggtcacctataaaatgtgctccatcccacccaagaatgagaagctgcaggccgtggaggtcgtcatcactcacctggcaccaggcaccaagcatgagacctggtctggacatgtcatcagctcctaggagatggtggaagcaccccttgtcctgtgcttgtgggagactttgcagggaggaggcagcagacactggagatgacattcttccacacgagacggggcttcagccgggcatggtccctctcaagtatctcctggaggaagggg

SEQ ID NO: 12138 - DNA, 568 bp, Homo sapiens
  MAP TO CHR1.3; EXPRESSED IN LUNG, SIGNAL = 3.6; EXPRESSED IN HELA, SIGNAL =   9; SWISSPROT HIT: P30041, EVALUE 2.00e-18; NT HIT: gi14722057, EVALUE 1.00e-125; EST_HUMAN HIT: H11696.1, EVALUE 0.00e+00
gaagaagctgcagaaggtggggtgagggacaagagatgagaggaggcaggattccatcacacagggcttgcaggccatgatactcagaattaaatgtaaagtgtggtggccagctgttactgggtttaaaacaggactgtttcttgttaagatgggggaactgctttcctgccaaaagtgccaaagatcaacttggaaaacaaaatcctcacagaggggagagtaaagaacacttgattagtctcattagcacctgtagctacttttctaaagttaattcctgaaggccttgaagcttcactatgagattgaatttcaccattctcaatgtctttcaataggatggggatagtgtgatggtccttccaaccatccctgaagaagaagccaaaaaacttttcccgaaaggagtcttcaccaaagagctcccatctggcaagaaatacctccgctacacaccccagccttaagtctcttggagaagctggtgctgtgagccagaggatgtcagctgccaattgtgttttcctgcagcaattccataaacacatcctggtgtcatcacagc

SEQ ID NO: 12139 - DNA, 598 bp, Homo sapiens
  MAP TO CHR17.3; EXPRESSED IN ADULT LIVER, SIGNAL = 0.9; EXPRESSED IN HELA, SIGNAL = 5.6; EXPRESSED IN HEART, SIGNAL =   1; NT HIT: L39793.1, EVALUE 1.00e-100; EST_HUMAN HIT: AU120858.1, EVALUE 1.00e-100; SWISSPROT HIT: Q14974, EVALUE 1.00e-28
gctaggctccacgagaaaagtggaagacttcctgttacactaagtaacatttttatagaagtcagtgaagtaaatattttgtggtttcctgaaatgcttatatcaaaaaaaaattagacattagttccccccctcgccgcccctctggtggttcagtgctctataaattatcctcagttgtggaaattcctaagatatttttatttacaaatttatcttcccttaacagcccactttccttgtggaactgtccagagtgctggcaaatccaggaaacagtcaggttgccagagttgcagctggtctacaaatcaagaactctttgacatctaaagatccagatatcaaggcacaatatcagcagaggtggcttgctattgatgctaatgctcgacgagaagtcaagaactatgtgagtaacgcttatctgtttggttatattgcccagagaacaagaaatcgctttctcagatcttttgctatttgcatgggatagagctaacagtgtgataggtttctgggacctcaactttacctaaagataaaaattgtctttgtcttaaatctttctcaacacagcttgtccattcccattgat

SEQ ID NO: 12140 - DNA, 502 bp, Homo sapiens
  MAP TO CHR11.3; EXPRESSED IN LUNG, SIGNAL = 8.2; EXPRESSED IN HEART, SIGNAL = 3.5; EXPRESSED IN HELA, SIGNAL = 2.8; EXPRESSED IN FETAL LIVER, SIGNAL = 5.5; SWISSPROT HIT: P07339, EVALUE 4.00e-20; NT HIT: M63137.1, EVALUE 0.00e+00; EST_HUMAN HIT: BG696966.1, EVALUE 0.00e+00
ctgagcagaccaggagaacctgagggttgaggaaaacctcttctgggccaggctgggcccacgcagagcagccctaccccgggaagaagggagtctgtccctcctcctgccttctgggcctttccatccctgcagtttcagaaaggcccctccttcaggaagctctccctgattgccacattcaccctcttactcctgacctggcactcttgtgcttggggggtggcgtggcagctgactcctcccttttcctcctagggacccagatgcgcagcctgggggtgagctgatgctgggtggcacagactccaagtattacaagggttctctgtcctacctgaatgtcacccgcaaggcctactggcaggtccacctggaccagtgagtagtggctgcagtcggctcccctgggttctgtgggcgggggcggtgtgcggagaccctggaggaccccggttctgcaggtgggggttgcatgtggggagtagtggagctgggcaag

SEQ ID NO: 12141 - DNA, 590 bp, Homo sapiens
  MAP TO CHR8.3; EXPRESSED IN HELA, SIGNAL =  89; EXPRESSED IN LUNG, SIGNAL =  15; EXPRESSED IN HEART, SIGNAL =  13; NT HIT: AB007168.1, EVALUE 0.00e+00; SWISSPROT HIT: P25120, EVALUE 1.00e-36; EST_HUMAN HIT: BI822037.1, EVALUE 0.00e+00
tccaagaccctggtgacttcgtcccaatctcatttaacgcctcaacagcagtaaagcaggtactgttgtgcctgttgtacagtgatgacaactgagactacaggatgagctcaaacttacagaacccaagttttagaacaacaggtaatcgaattccagggaccaagtctagccactggctgtccaccggcactcacagcatgttcacccacagccctcagcattcaactgctgcctgatactcaccaaccacagctctgttggctgaggagataaccttcttggagccggagggcagcttcacacgggtcttcttggtctcagggttgtgggagataacggtggcatagttccctgatgcccgggccagcttgccacggtctccaggcttctcctccaggcagcacacgattgtaccctcaggcatggtgcccacagggagcacattgccaatgttgagctgggctgcaaggggaagcagcatcaggccgtcagcacagtaagaaacaatgcgaaccccctcgctctaggcaacccgcgaagttgcgagcacagcattcaacatccagcctcccggtacaactctctcg

SEQ ID NO: 12142 - DNA, 555 bp, Homo sapiens
  MAP TO CHR19.3; EXPRESSED IN LUNG, SIGNAL = 2.6; EXPRESSED IN HEART, SIGNAL = 3.1; EXPRESSED IN HELA, SIGNAL = 9.1; EXPRESSED IN PLACENTA, SIGNAL = 2.5; EXPRESSED IN FETAL LIVER, SIGNAL = 4.8; EXPRESSED IN BRAIN, SIGNAL =   2; SWISSPROT HIT: P14866, EVALUE 5.00e-40; NT HIT: gi14757024, EVALUE 0.00e+00; EST_HUMAN HIT: BG959723.1, EVALUE 0.00e+00
tcctgcaaaagcaaacacaggcaagatgaaggggcactggcagatcagtctggcttgggggagggaataaggggagaaaaggaagggagacctcacaagaaatgcctgctggcacgtaccgtggtgatcgaataaatggggttcaggatggtaaagagaagcacactgttcacgctccgggagtcatccgagtccccagggcgggagatcttctggctggtagagtagttgacaaaagctgggtgaccagcaatgtatatttggttgtcggctgcgtagttcactgcgttgcaagcccccaacacatcttcaaactccaccagtgcttgtctctttttaggcattaccaccacatagctggcagagagaacacaggtttcaatcctctcaggaaaatgtagacaggaggagggtatcatttgattttttgagaactgactcctccatggcctctgaactcctctgcaaccctatcatggttccccgacctgaacaccctgtgccacaagtagtaccaaaagccaaagaggtctagctgagccatcatgtccctct

SEQ ID NO: 12143 - DNA, 586 bp, Homo sapiens
  MAP TO CHR19.3; EXPRESSED IN FETAL LIVER, SIGNAL = 2.3; EXPRESSED IN LUNG, SIGNAL = 1.6; EXPRESSED IN HELA, SIGNAL = 3.1; EXPRESSED IN HEART, SIGNAL = 1.4; EXPRESSED IN PLACENTA, SIGNAL = 1.1; EXPRESSED IN BRAIN, SIGNAL = 1.8; SWISSPROT HIT: Q92973, EVALUE 3.00e-37; NT HIT: gi14759506, EVALUE 1.00e-124; EST_HUMAN HIT: BE799084.1, EVALUE 1.00e-121
gtgcggctgactcttctctccatacggtgggtgtggctgggcccaatcaaactgccccctcttggttccctttccttgtaggctgcatgcagggcatggtgccctacctgcctgagctgatcccgcacctgatccagtgcctgtcggataagaaggccttggtccgctccatcgcctgctggacgctgagccgctatgcccactgggtggtcagccagccacccgacatgcacctcaagcccctgatgacagagctgctcaaacgcatcctggatggcaacaagagggtacaggaggcggcctgcaggtgaccctggacccctgatcccacagcccccactctcccccggccaccctctgggaagtgatgacacctgtgactgttgatgtggaactgatttatcgcgtattcgtactggctgatcctgagttgccctccccaactgcccatggcccagtgtcacctgccatggtccactgagcccccgcttcatcctccctcccaccagtgcttttgccaccctggaggaagaggcctgcacggagctggtgccctacctcagctacatcctggacacccttgtct

SEQ ID NO: 12144 - DNA, 581 bp, Homo sapiens
  MAP TO CHR6.3; EXPRESSED IN HELA, SIGNAL = 4.9; EXPRESSED IN LUNG, SIGNAL = 1.3; EXPRESSED IN ADULT LIVER, SIGNAL = 1.4; EXPRESSED IN BRAIN, SIGNAL = 1.4; NT HIT: gi14760587, EVALUE 0.00e+00; EST_HUMAN HIT: BE336654.1, EVALUE 0.00e+00; SWISSPROT HIT: P16106, EVALUE 4.00e-72
tccggttactgttgggtaggccttcagcatacttttgtccaatcagcttcagactctcactataaataagcggctagctttctctttctcctgaagtgaatctagctctgaaggcatggcgcgtacgaagcagactgctcgcaagtccaccggcggcaaggctccgcgcaagcagctggccaccaaggcggctcggaagagcgctccggccaccggcggtgtcaagaagccccatcgctatcggcctggtacagtggctctccgcgagattcgccgctaccagaagtccaccgagctgctgatcagaaagctgccttttcagcgtctggtgcgtgagatcgcgcaggacttcaagaccgacttgcgcttccagagctccgcggtgatggcgctgcaagaggcatgcgaggcctacctggtggggctctttgaggacaccaacctgtgcgccatccacgccaagcgggtgactatcatgcccaaggacatccagctcgcacgtcgtatccgcggcgagagggcttgagtctcaaggactcactgattacatacccaaaggctcttttcagagccacccacat

SEQ ID NO: 12145 - DNA, 532 bp, Homo sapiens
  MAP TO CHR11.3; EXPRESSED IN HELA, SIGNAL =   4; EXPRESSED IN HEART, SIGNAL = 2.4; EXPRESSED IN BRAIN, SIGNAL = 1.9; SWISSPROT HIT: Q13488, EVALUE 2.00e-34; NT HIT: AF033033.2, EVALUE 0.00e+00; EST_HUMAN HIT: AI457772.1, EVALUE 0.00e+00
cttctcacataccgctgctggctgggcgggttgcttctctctgggcctcagtttcccctctgtaaagtgggactgtccaaggaggtccctcgctggccccccgtgcagggagggcttcaggctgcggcaggtaggtagggggctggcaggcacccacttgccgttggcccccactgtctcctttgcttgcagagctgtccgaggttctgtgggccatggtgatgcgcataggcctgggcctgggccgggaggtgggcgtggcggctgtggtgctggtccccatctttgccgcctttgccgtgatgaccgtggctatcctgctggtgatggagggactctcagccttcctgcacgccctgcggctgcactggtgagcgaccacccactggcctgggctgctcaaggcgtgagttcccctcaccaacccctctgcttctcacccccagggtggaattccagaacaagttctactcaggcacgggctacaagctgagtcccttcaccttcgctgccacagatgactagggcccac

SEQ ID NO: 12146 - DNA, 580 bp, Homo sapiens
  MAP TO CHR15.3; EXPRESSED IN HELA, SIGNAL =   2; EXPRESSED IN LUNG, SIGNAL = 0.64; EXPRESSED IN ADULT LIVER, SIGNAL = 1.6; EXPRESSED IN BRAIN, SIGNAL = 5.4; SWISSPROT HIT: Q06418, EVALUE 5.00e-83; NT HIT: D17517.1, EVALUE 0.00e+00; EST_HUMAN HIT: BG717071.1, EVALUE 0.00e+00
ggcagtgcttgaaggagaacagtggctatgcgagaagaggccaggcattttaggctgtgaacttcacaggaaaacatgggtgctctgggtcacccctgttacatttaaaacaaatggagagggagcaggtcccccgatcttcgtagttcctctccaccagacaatggtaacaggttcagggggacccacagccttgcaagacagttggaaaggggcattgggtggcactgccagatcttttggctccactgtgaaaagtggcacacctactaccgtgagccacactggctgggagatctgggtttcgcccccatccaccttgcaccagtactggcccgtgtcagagcgctccactgacttcaggctgaggaagccgatccagtgctgctcgctgactgggatgaaccagttctggaccacagacccatccttcacccactggatgtcaggctcctccatcccctccatgctgcagctgagctttaccagctgcccctgggacactgtcagctttgccgggactcccacgagcttcagacctgcctgcagctgcggactctgggagcagcagagaagtcag

SEQ ID NO: 12147 - DNA, 557 bp, Homo sapiens
  MAP TO CHR19.3; EXPRESSED IN HELA, SIGNAL = 2.2; EXPRESSED IN PLACENTA, SIGNAL = 1.8; EXPRESSED IN LUNG, SIGNAL = 4.4; EXPRESSED IN ADULT LIVER, SIGNAL = 1.7; SWISSPROT HIT: P43626, EVALUE 1.00e-13; NT HIT: AF072100.1, EVALUE 0.00e+00; EST_HUMAN HIT: BF338407.1, EVALUE 1.00e-76
tacggtgcacacaacctctcctccgagtggtcggcccccagtgaccccctgagcatcctgatcgcaggtgaggagcccagcaggttcagtcagggacccacgctccgcacaggccctgctgggggagcccaggtggtgatggccaggatgaggggtgggggtcccaagggagggagagacagacagagacaggggatgggcgggtagagggagactcagagaaaacagagacagagactgagggtcccagagagaggcctggggaggtgtcagctcagaacgaggtggggcagcccctcacccatccttcttctctccaggacagatccgtggcagaccctccctctcggtgcagccgggccccacggtggcctcaggagagaacgtgaccctgctgtgtcagtcacgggagcagttggacactttccttctgaccaaggagggggcagcccatcacccactgcgtctgagatcagagcaccaagctcagcagcaccaggctgaattccccatgagtcctgtgacctcagcccacgcggggacctacaggtgctaca

SEQ ID NO: 12148 - DNA, 593 bp, Homo sapiens
  MAP TO CHR13.3; EXPRESSED IN HELA, SIGNAL = 3.1; EXPRESSED IN HEART, SIGNAL = 1.8; EXPRESSED IN ADULT LIVER, SIGNAL = 1.5; EXPRESSED IN BRAIN, SIGNAL = 2.1; SWISSPROT HIT: Q92664, EVALUE 6.00e-44; NT HIT: U14134.1, EVALUE 1.00e-127; EST_HUMAN HIT: AA281519.1, EVALUE 0.00e+00
cagtcaccttcctgagagccctgcctcttggcaagtgaacaatgactgtgtggcatttaagaacttcagagaattgagacaaacttcctaggtgataaaaactggggttgtttccttgggaatttctgatttgtatatagtgatcaggtttcaggcactgaatgttacttatatattaggtattaattttttctaaatggtaatatctggggaaatttgtgaaatttgtctgtctgtcccaccagaggaaatactatgtgaagtatgccggaaaacatttaaacgcaaagattaccttaagcaacacatgaaaactcatgccccagaaagggatgtatgtcgctgtccaagagaaggctgtggaagaacctatacaactgtgtttaatctccaaagccatatcctctccttccatgaggaaagccgcccttttgtgtgtgaacatgctggctgtggcaaaacatttgcaatgaaagtaagcactcaccctcatactcatggtcctatagtctatgctttcacaacatggttttcatattaatatttcattaataactttctctttcattgtagcaaagtctcactaggcatgc

SEQ ID NO: 12149 - DNA, 522 bp, Homo sapiens
  MAP TO CHR22.3; EXPRESSED IN HELA, SIGNAL = 4.8; EXPRESSED IN PLACENTA, SIGNAL = 2.1; EXPRESSED IN LUNG, SIGNAL = 2.7; EXPRESSED IN FETAL LIVER, SIGNAL = 3.4; SWISSPROT HIT: Q95108, EVALUE 2.00e-15; NT HIT: gi16168230, EVALUE 0.00e+00; EST_HUMAN HIT: BE857449.1, EVALUE 0.00e+00
ccataggccctagaaggagggatgaaaggcgtatgggagggaagacagcggtccccggatcagcagcagcaccaccatcctctgatggcccctgggcagtccgccagctcggaagcactcagggctggagcctgggctctaagcatgggccccaggagccagacaggagggaggcagcaggaagggctggcatggaagggctgagttctattggggtcccacgcgggcaagggaaccaggactcatccctgcttgtcagccaatcagcttcttcaggaaggcctccaactgatcctcatccttgatgcccacaaacttgtccaccacgtccccattcttcatggccagcacagtgggcaccgctgacacctgggtggagaggacaagggggtccaagtgaattgggagtgaatacttctcaactgccactcctgagcctttgtggggaaggctggtggcttatccagggcactgacttcccaaagccatgggcaggcctagaggaacatggctcttctctcg

SEQ ID NO: 12150 - DNA, 576 bp, Homo sapiens
  MAP TO CHR11.3; EXPRESSED IN FETAL LIVER, SIGNAL = 5.3; EXPRESSED IN HELA, SIGNAL = 5.8; SWISSPROT HIT: O09012, EVALUE 5.50e+00; NT HIT: gi14771434, EVALUE 1.00e-118; EST_HUMAN HIT: BE875228.1, EVALUE 1.00e-118
tgctcaccagctctgaaatgatggcacgagctgcaaactgtgctaaataggatttcaccaaagggatgtcaacctccagtttgggacactggtccaatacattcaggaaagccttgaaagaaatatacaacagtttatcagttttcgaatttgagtggtaagagttcttaccacacaatcagtaaagtgtcctacctgcatgaagttgtcacttgtggctatcccttcctgtttgagtaaactgatcaaagaacttgctttttctttatcttcatcgcttctatctagtgacaggatgattactttgcttaacatctcaggaagaaagtgtttaggagccctcatttctcttacaccattgacagcctcatttgcatttccactatttagatattcagtcacaacagtttcctgtgaagaacacaagtatctttaatgtattctctatctcaaatacaggctaattacactaaaatgggatatttgaaacttacagttagtttaaggagttcttcctttgacggtggtggctttttgctggtcttggcaggcttttcctggataagcggtggatta

SEQ ID NO: 12151 - DNA, 533 bp, Homo sapiens
  MAP TO CHR2.3; EXPRESSED IN BRAIN, SIGNAL = 1.5; EXPRESSED IN HELA, SIGNAL = 4.7; SWISSPROT HIT: P20839, EVALUE 7.00e-65; NT HIT: gi14752972, EVALUE 1.00e-123; EST_HUMAN HIT: BI258304.1, EVALUE 1.00e-130
agcgtcaatcaggtttttggcctgggcggctgtcatcccaatcacctggaggtgggggtacttctgtttgatgtaatgcaccgtggcaatctgatacaccgagttcccttgggacaagtccaagactacgacgtctacccccgcctgggtgagcaagtccaggcggtatttgtcatcctcaggggtgcccacagctgccccacgcagtagctgcttgtgggaatccttggaggccagagggtagtctctgttcttcttcaggtcggtgcaggtgatcatggccaccagctcatcggatcattgacgaaagacagcttccctttcttgctatgctgcaggatctcatttgcctctttcaacatcaggcctgctggagccaacactgaggagggtggtgtggtcctcctcagcaagaaagttgatgtctctggaggtgacgatgcccaccagcttgctgcctatggtgcccgtctcagtgatggggatgccagagaagccatgccgcatcttggcctccaacacatcacccacag

SEQ ID NO: 12152 - DNA, 559 bp, Homo sapiens
  MAP TO CHR19.3; EXPRESSED IN BRAIN, SIGNAL = 7.8; EXPRESSED IN HELA, SIGNAL =  27; EXPRESSED IN HEART, SIGNAL = 5.3; SWISSPROT HIT: P41115, EVALUE 2.00e-20; NT HIT: AB007152.1, EVALUE 0.00e+00; EST_HUMAN HIT: BF344240.1, EVALUE 0.00e+00
aggtccaggtacattggcagatgatgtttgttttcacgatggtcttcagatgcccacgtgggcactgctgagaaagccacttggtaaaactgatgccggaaatggggctttttgggatccctgctcagctgcttctgagtcccagcatgccctgggttacctatggccctctttcccatgggacctgacctatgatcggcccccgctcctaggcgtggtgaccaagatgaagatgcagaggaccattgtcatccgccgagactatctgcactacatccgcaagtacaaccgcttcgagaagcgccacaagaacatgtctgtacacctgtccccctgcttcaggtgagcgcagtggcccatcaggttgctcaggccacgctctctcagccttcagattccagatcggaccaatttaaggccaactgagggagggaaagactgaggtggcatctctgggaagccccagaatctcaggatttgtatatcatatgttcttcagaatcaaagcgttctacagggtgaatatctctacctgaaatgcttggaaccagattttgga

SEQ ID NO: 12153 - DNA, 547 bp, Homo sapiens
  MAP TO CHR2.3; EXPRESSED IN BRAIN, SIGNAL = 1.4; EXPRESSED IN HELA, SIGNAL = 2.2; EXPRESSED IN LUNG, SIGNAL = 1.8; EXPRESSED IN HEART, SIGNAL =   1; EXPRESSED IN PLACENTA, SIGNAL = 1.6; SWISSPROT HIT: O77788, EVALUE 2.00e-01; NT HIT: AF102062.1, EVALUE 0.00e+00; EST_HUMAN HIT: AL601525.1, EVALUE 0.00e+00
tctttgtacaggccggaatccttatgcacggtgtgatactggtagtggccactggagtttatttggttgctgacggcttgactgaactggacaaggttcccattaggcaactgcactgcacctagtcaagatcaccaaggtgacattcaatacaaaaagcatcaaatccaaaacaataagcctcctcaccactgcaggtaacaaaagtgaaaccaggaattccaactcaccattcacggtgctatctatgctggtttcctctttcaagtccacgctgggaagcctctctctctctggagcttcctccaaatctccaagtttgaatgagactgttctctcctccaccacagcctggaggggcacagtggcaggccctacctcagaaacaggatgcttgttttcaatatcaccaacagacaactttgtttcttcatggtcttctttcaagctattctttttttccattaaggggctttcagaaggactacactttatttctcctaggaaaaaaaaggggggtcttttttggtttggttgtggccatact

SEQ ID NO: 12154 - DNA, 600 bp, Homo sapiens
  MAP TO CHR11.3; EXPRESSED IN HELA, SIGNAL =  29; EXPRESSED IN LUNG, SIGNAL =  32; EXPRESSED IN HEART, SIGNAL = 8.5; EXPRESSED IN BRAIN, SIGNAL =  25; NT HIT: gi14762732, EVALUE 0.00e+00; EST_HUMAN HIT: BE796186.1, EVALUE 0.00e+00; SWISSPROT HIT: P07900, EVALUE 4.00e-88
tgccagtcaccaaagaaggcctggaacttccagaggatgaagaaaagaaaaagaaataggaagagaaaaaacaatgtttgagaacctctgcaaaaccatgaaagacatattggagaaaaaagttgaaaaggtggttgtgtcaaaccgattggtgacgtctccatgctgtattgtcacaagcacatatggctggacagaaaacatggagagaatcatgaaagctcaagccctaagagacaactcaacaatgggttatatggcagccaagaaacacctggagataaatcctgatgattccattattgagaccttaaggcaaaaggcagaggctgataagaatgacaagtctgtgaaggatctgctcatcttgctttacgaaactgcactcctgtcttctggcttcagtctggaagatccccagacacatgctaacaggacctacaggatgatcaaacttggtctgggtattgatgaagatgatcctgctgctgatgataccagtgctgctgtaactgaagaaatgccgcccctcgaaggagatgacgacacatcatgcatggaagaagtagactaacctctggctaagggatgacttaactg

SEQ ID NO: 12155 - DNA, 575 bp, Homo sapiens
  MAP TO CHR19.3; EXPRESSED IN HELA, SIGNAL = 6.6; EXPRESSED IN ADULT LIVER, SIGNAL = 2.7; NT HIT: gi16163223, EVALUE 6.00e-78; EST_HUMAN HIT: BF569031.1, EVALUE 8.00e-78; SWISSPROT HIT: P35550, EVALUE 2.00e-17
gagcaagatagaaagggggcataatcatccttttaatcagcaacccactcttgtgataatagcattactctattcaggaaggcagaggcctcatgacctgaatcatctctcgaaggtcccacctctcaactcttgcatttaagggttacgtttccaacacatgaactttgggggacacactagaaccatagcactgagttttacttgaattaataatgaaaacatctggtttaaagagcacacaagagaaaaacagcccaaagccctgttgtagacattagtcctttctcctctttaggccaactgcattgactccacagcctcagccgaggccgtgtttgcctccgaagtgaaaaagatgcaacaggagaacatgaagccgcaggagcagttgacccttgagccatatgaaagagaccatgccgtggtcgtgggagtgtacaggtgagcaggggcccagcaatacaccaagacagacatctctgtcccttgcaccccgagtgccatgatcctggggaccctccttcatcacctatcttcctctcacaggccaccccccaaggtgaagaactgaa

SEQ ID NO: 12156 - DNA, 531 bp, Homo sapiens
  MAP TO CHR2.3; EXPRESSED IN HELA, SIGNAL = 2.4; EXPRESSED IN LUNG, SIGNAL = 1.1; EXPRESSED IN HEART, SIGNAL = 0.99; EXPRESSED IN ADULT LIVER, SIGNAL = 0.84; EXPRESSED IN BRAIN, SIGNAL =   2; SWISSPROT HIT: P49792, EVALUE 3.00e-96; NT HIT: D42063.1, EVALUE 0.00e+00; EST_HUMAN HIT: BF092766.1, EVALUE 0.00e+00
tgtgctgcttgtcagaatccgagaaaacagagtctacctgctacttctattccaacacctgcctcttttaagtttggtacttcagagacaagtaaaactctaaaaagtggatttgaagacatgtttgctaagaaggaaggacagtgggattgcagttcatgcttagtgcgaaatgaagcaaatgctacaagatgtgttgcttgtcagaatccggataaaccaagtccatctacttctgttccagctcctgcctcttttaagtttggtacttcagagacaagcaaggctccaaagagcggatttgagggaatgttcactaagaaggagggacagtgggattgcagtgtgtgcttagtaagaaatgaagccagtgctaccaaatgtattgcttgtcagaatccaggtaaacaaaatcaaactacttctgcagtttcaacacctgcctcttcagagacaagcaaggctccaaagagcggatttgagggaatgttcactaagaaggagggacagtgggattgcagtgtgtgctta

SEQ ID NO: 12157 - DNA, 537 bp, Homo sapiens
  MAP TO CHR9.3; EXPRESSED IN HELA, SIGNAL =   3; EXPRESSED IN FETAL LIVER, SIGNAL = 0.86; EXPRESSED IN ADULT LIVER, SIGNAL = 0.75; NT HIT: Y17453.1, EVALUE 0.00e+00; EST_HUMAN HIT: BG828672.1, EVALUE 4.00e-58; SWISSPROT HIT: Q9ULV3, EVALUE 5.00e-17
agtttgggctgggataaacctcaacttgctacacagccttggccaaggctctgtacctctctgggcccatgtcctctgagggagctcaggttacctccttggctttgtccttatgcccctgggacttcacgtgctccacaaacttgcgaggggttttgaagtagcggttgcaaacggtgcagaagggtcgcaaggattgtttggcaatctggaaaaaggcaggccaaccaagcagtgtccccagctgcaagccccctgactagcacccaggcagggcccagcaagagctcacctcccccgggcaggcccaccatatctgtaacaagccgggctgtgctccacccctgcactggaacgtgggcaaacacatctcttcgtggtgtgggtggctgagagataggatggcagatggcaacacagagacaggacagacacagagagaagacgagagagagggcagctgcccaaataacccctgtgagccccgtggctgaatggcaggtgagatggggcctggcctacactggacagatgggg

SEQ ID NO: 12158 - DNA, 530 bp, Homo sapiens
  MAP TO CHR15.3; EXPRESSED IN ADULT LIVER, SIGNAL = 1.6; EXPRESSED IN BRAIN, SIGNAL = 2.2; EXPRESSED IN HELA, SIGNAL =  15; SWISSPROT HIT: P07355, EVALUE 5.00e-13; NT HIT: gi4757755, EVALUE 6.00e-50; EST_HUMAN HIT: BE814059.1, EVALUE 9.00e-50
aggaagagcaggaagaagggagaaagagaaagagggagagaaggaagaaagggagaagggagggaaggagaaaaggaaaaagaaagaaaggaaggagggaaggaaggaaaggaggcatgggttgagctaggtctggatctactccattaaagctcgatgacaatttcaaatcgccaacgtatggcgatttgagggagaataaagagacaaccaaaaatgtctcagtaagaccctgacaagaagaggacaaatgtatcacctacctttggtcttgatggctgtttcaatgttcaaagcatcccgctcagcatcaaagttagtataggctttgacagacccatatgcacttgggggtgtagagtgctgaggttaaaagataaacatactcaaatgacacacatttaaaatcctcttgttgaaataacaatgcctaatatgttttcctattgtttcttttaacaattcagatcattctcatactaggtaactaggtaggtattaacacaccatcacacttcacgcaagcaatt

SEQ ID NO: 12159 - DNA, 556 bp, Homo sapiens
  MAP TO CHR12.3; EXPRESSED IN HELA, SIGNAL = 2.9; EXPRESSED IN BRAIN, SIGNAL = 1.5; NT HIT: gi14761637, EVALUE 7.00e-99; EST_HUMAN HIT: BE514809.1, EVALUE 1.00e-98; SWISSPROT HIT: P58108, EVALUE 5.00e-23
ctgattcccacagagcttccagcaggcagtgagttgggcatatcccctggtgctgcatgaccccttcccccagctcagggcttcttctctccacctgtgagcaccagggcctgcaggatgtcagacagtgatacaattcccttgaccacatcattttcatccaccactacaagtcggtgaacctggcacagagcaacaagggagaaagggaatgtttagtgctggcctcaggggaagcccctctgcccctactctccttgccaaaccccactctcaaggctgctcccctcagctcctttagggttgctggcctccctacctctgcttccactagcctgttgatgatggtctccagagtctcatgcaggtagcacttgagaacaccctcaaagtaatgtgatcgatgttgcaaggctttagtcacagatacatctaggttgttgtaggtcttttctgctgccagattctggggagacagaggaaggagcttgcagggaagcaagagagccagcctccaaaccctgaacccatccaacctcaacagagggattcaggg

SEQ ID NO: 12160 - DNA, 600 bp, Homo sapiens
  MAP TO CHR14.3; EXPRESSED IN HELA, SIGNAL = 2.9; EXPRESSED IN LUNG, SIGNAL = 2.8; SWISSPROT HIT: P55010, EVALUE 3.00e-24; NT HIT: gi14754020, EVALUE 7.00e-87; EST_HUMAN HIT: BF911980.1, EVALUE 1.00e-92
cgtcgaatggatgaaatcagtgaccatgcaaaagttctgacactcagtgatgatttggaaagaacaattgaggagagggtcaatatcctctttgattttgttaaggtaaaacatttgcttggtctgtaaatcagcttcaacccagccttgtttgtgcctttagatatatgatactttagcagtgtaattaggattactctaatgcacgactttttagaactcttgttcatttaaatattttttgcgcgtgattccaggcactatgtgtcacaactgccaaattaggcaggaaaaatatgttcatcagagcagggactggctggtgtcttgagcctggcaaagtgtgcctccattgcactgaattgttttccttttctttgcagaaaaagaaagaagagggtgttattgattcatctgacaaagaaatcgttgctgaagcagaaagactggatgtaaaagccatgggccctcttgttctaactgaagttctttttaatgagaagattagagaacagattaagaaatacaggcgccatttcctacgagtaagcaaagtgctctggattcataaatgagattacagttgtgtggctttcgaga

SEQ ID NO: 12161 - DNA, 522 bp, Homo sapiens
  MAP TO CHR14.3; EXPRESSED IN HELA, SIGNAL = 6.4; EXPRESSED IN FETAL LIVER, SIGNAL = 9.8; SWISSPROT HIT: P00423, EVALUE 3.00e-67; NT HIT: M34599.1, EVALUE 0.00e+00; EST_HUMAN HIT: BF664326.1, EVALUE 0.00e+00
agagcaaggctcaaaagcaggacagcatctctcacttcttccactcgttcttgtcatagtcccacttggctggcgaagccctgcaggggttcacctcatgtccagcatcctcttggtctgcatgggcacccactctttgtcaaaggtgtgcgggatggggccgtacacacagcgcttctcccagatgataatgaacgccgtgaagccaaggaagaacatggcagcgcccacaaccgtcttccactcgttcacgcccctgttcatctcagcaaagctctccttgaactgaatgtgatacaactcgactttcccatccgtggagcggttgctccaggaggccttctccttcttcttcacggctttctgtctggcagacaggtgcttgacatgggccacatcgggtacgggatagtcacgtcgatccacataagctgggagcgcatagtcatcgctcttcacaacatttccgtgtgctcgtacagacaccaaggtggaaattgctcgcttgccaactaggctaac

SEQ ID NO: 12162 - DNA, 580 bp, Homo sapiens
  MAP TO CHR14.3; EXPRESSED IN ADULT LIVER, SIGNAL = 4.7; EXPRESSED IN HELA, SIGNAL =  13; EXPRESSED IN HEART, SIGNAL = 2.4; SWISSPROT HIT: P07910, EVALUE 2.00e-39; NT HIT: gi14751655, EVALUE 0.00e+00; EST_HUMAN HIT: BF313902.1, EVALUE 0.00e+00
tgtgaagtgtcattcccagctccccctactcacgattgtagtagagttgtcctagctctactacacaaaatggtacaatgaagaatatcctttacttagccaattataactataagcctaatgtatttttattaggctaaacagtcgcaatatccagaatatctcatgctgtcagttttacagacataaagacaaaaaaaaaacgtgaatagaaaaactcaggcctgaattacatcatcaatgaaaaaattcacttacctaaaacctggccagcaatcattctgccatcctctcctgctacagcagcccgggcatttctctcattaacatactgaacgaaggcaaagcccttatgaacagagcagcccacaattttgccatacttcgaaaagattgcctccacatcagatttcttgaccacaagagtgttgagattcccaatgaatacacgggagttcatggagcgaggatctgtcttgttggtaacgttgctggccatcgtgtttgatggtaaggtttctcacaaagccgaaaactgtaaagcaaaaaaaagtatacaggtgaacagatgctaaaaaca

SEQ ID NO: 12163 - DNA, 586 bp, Homo sapiens
  MAP TO CHR9.3; EXPRESSED IN PLACENTA, SIGNAL = 4.9; EXPRESSED IN FETAL LIVER, SIGNAL = 5.2; EXPRESSED IN ADULT LIVER, SIGNAL = 6.3; EXPRESSED IN BRAIN, SIGNAL = 6.4; EXPRESSED IN LUNG, SIGNAL =   3; EXPRESSED IN HELA, SIGNAL =   2; NT HIT: gi7657366, EVALUE 3.00e-73; EST_HUMAN HIT: BF111850.1, EVALUE 9.00e-78; SWISSPROT HIT: P36610, EVALUE 4.00e-22
agcttggatgtgcatgtcagtacatgtgtgggtgtacatatgtgtgcacacatgtgcatgcatttggatgcatctgtgtttattgtgtgtctgcatgtgtacatgtgcatgcatttatgtgcgactatgtatctgtgcatgtcagtatgcactcgtgtgtgtgttccttctctagaagggaacatcggccggagagagtgggtgtggagacgctgcgggtacccacaggagctgagccagctgcctgagggcccatcaatccccagctcaccttgttttcatcaaagacgttgaaaacaaatgtggcaaacttggtggggtctccgaacgggaagaattgcttgtagatcttctggaagcctgccgcatccagctgcccactggggcagtccttgatgaagcctttgtacctggaggcagcagaccgggccagagagggtaaaggagacgccaacatcacccacccaccaccaacatcgcctgcccggggcccaggaaagctgtggctccttgttcaaagagatggtgccccatggggccatggacttgataggcacaggcgcagtcccacctctgcctctcacta

SEQ ID NO: 12164 - DNA, 515 bp, Homo sapiens
  MAP TO CHR3.3; EXPRESSED IN HELA, SIGNAL = 2.2; EXPRESSED IN FETAL LIVER, SIGNAL = 1.1; SWISSPROT HIT: Q10691, EVALUE 5.50e-01; NT HIT: gi14730458, EVALUE 0.00e+00; EST_HUMAN HIT: BF570015.1, EVALUE 0.00e+00
agactcatggtgggaacagggccacacagggctactgcccacagaacgtcccttgacctggtcctcctcccctggggactctgggcctgctggcctcctctctggcctgtcctccacaggccctggcagctgccctcaggcattgatggccttccagcgctcgctgtctgtgctgttgatgctgccagtgtggcagggcatggaagcgatgtcatccaggtaggccaccccgccggcagagtcgaactgcgtgctcgagtagctggcagctgaggccccagcagcccctgcagcctccaggccctcccgccgggccacagcgtagggctggggtaggtgtacatctggctcctctgtctcgtccacttggcatttgtaggagaagaggatcttgggctccgagctgataaaaggaaaagaggggcatggaagcctcactgagtgattcaggaagagccttcctctccaggctgatggggccaccagataaggaaggaattgaccaacagtcgcct

SEQ ID NO: 12165 - DNA, 535 bp, Homo sapiens
  MAP TO CHR3.3; EXPRESSED IN HELA, SIGNAL = 2.4; NT HIT: gi7706688, EVALUE 0.00e+00; EST_HUMAN HIT: BG768954.1, EVALUE 0.00e+00; SWISSPROT HIT: P73821, EVALUE 1.70e+00
gctgggtaaacctatatgctcgagagacttaaaacctcaagactgtggacaatccaaattttcttacagtaaaatcacgtcacgtcttgataggaagtatttcattaccttctggggcttcaagggtcttcttattctgctcacaccacccaatggggtagagatcagccttcctgatgtcacaccagaaatctgctctccgatcctccccatagccatcatagcggagaaggagcaactgctcacaggtagtgataacggtggcaacccagtaggtctcaggatctgttctcacagccacctccagcttcatcccaggagcaaatccattttgcaaacgtgtgtccaccttaacagggaaatgttattaagcaccagacaagtatcttaaatgagtatttctttgaccaatgttcttttttaagacttacaattccgaagcactaaatgcaataacatctcaaggaaagcctgagaaattccaattctaacttacagaagcaatccagataaaacaaacgaatagcaatgctgc

SEQ ID NO: 12166 - DNA, 585 bp, Homo sapiens
  MAP TO CHR6.3; EXPRESSED IN FETAL LIVER, SIGNAL =  26; EXPRESSED IN HELA, SIGNAL =  67; NT HIT: AJ303359.2, EVALUE 0.00e+00; EST_HUMAN HIT: BG547509.1, EVALUE 0.00e+00; SWISSPROT HIT: P16189, EVALUE 1.00e-49
gcggctactacaaccagagcgaggccggtgagtgaccccggcccggggcgcaggtcacgacctctcatcccccacggacgggccgggtcgcccacagtctccgggtccgagatccaccccgaagccgcgggaccccgagacccttgccccgggagaggcccaggcgcctttacccggtttcattttcagtttaggccaaaaatccccccgggttggtcggggccggacggggctcgggggactgggctgaccgtggggtcggggccaggttctcacaccatccagatgatgtatggctgcgacgtggggtcggacgggcgcttcctccgcgggtaccggcaggacgcctacgacggcaaggattacatcgccttgaacgaggacctgcgctcttggaccgcggcggacatggcggctcagatcacccagcgcaagtgggaggcggcccgtgtggcggagcagttgagagcctacctggagggcacgtgcgtggagtggctccgcagatacctggagaacgggaaggagacgctgcagcgcacgggtaccgggggccacggggcgcctccctgatcgcctgtagat

SEQ ID NO: 12167 - DNA, 524 bp, Homo sapiens
  MAP TO CHR14.3; EXPRESSED IN LUNG, SIGNAL = 4.2; EXPRESSED IN HEART, SIGNAL = 4.1; EXPRESSED IN HELA, SIGNAL = 3.9; EXPRESSED IN BRAIN, SIGNAL = 3.4; EXPRESSED IN FETAL LIVER, SIGNAL = 1.8; NT HIT: gi14750679, EVALUE 4.00e-88; EST_HUMAN HIT: BF726084.1, EVALUE 5.00e-88; SWISSPROT HIT: Q14934, EVALUE 2.00e-27
ctcctccctcacagatccagtacgggcctgactggggtctgaggctgcacatgatcaatgctcttctctcccacccaggacctctgccctacccccactggactggcctctgcccagccaatatgagcagctggagctgaggatcgaggtacagcctagagcccaccaccgggcccactatgagacagaaggcagccgtggagctgtcaaagctgcccctggcggtcaccccgtagtcaaggtaaaggacagacagcaggcctgatatcctctctcctctcccagataggttccagctatgcagacacatggcactgccctttcccacactccctctcagctctgaccctgcaggcagcctgggggaggggctggagttgggggaggaggggtgcaaggacccggatatactttctactcctgtccttccacccccactcagctcatcccatgggacaccagcctcatgtctactctggaaaatggtggcccgccagatatgggggagggtttaggctgaggac

SEQ ID NO: 12168 - DNA, 577 bp, Homo sapiens
  MAP TO CHRX.3; EXPRESSED IN LUNG, SIGNAL = 5.1; EXPRESSED IN HELA, SIGNAL = 8.5; EXPRESSED IN PLACENTA, SIGNAL = 7.3; EXPRESSED IN ADULT LIVER, SIGNAL = 5.6; SWISSPROT HIT: Q26496, EVALUE 1.10e+00; EST_HUMAN HIT: BI770346.1, EVALUE 0.00e+00; NT HIT: U52111.2, EVALUE 0.00e+00
gaagtttcggggacaggcgcggacccggtactgcgcacgcgcgcggtcgcaccgattcacgcccccttccggcgcctagagcaccgctgccgccatgttgagggggggaccgcgaccagctgggcccctggctcagggaggggccacgtcagtgctgccagagacgtcacaatgccggcccagccgttcggtgcgcgattggctgccgctgccacttacgcgtcgctcttcctcgtttgcccctcgtgttcatgggagctcgttttcttttcctctaggcagagaagaggcgatggcggcgatggcatctctcggcgccctggcgctgctcctgctgtccagcctctcccgctgctcaggtagcggcccagccggggcttctttcttgcgagcctctgacccacggcaggtggtgttgggggcaggagggatgcgggggtccggcctttcagggtccgtcgctgcgggccgggccttcccccgagaggcaggcggccttgggacggggggaccaaagcacctcgcgcacgtttaccggcagccaggcttttccttgtctgcccatacgaagaggagt

SEQ ID NO: 12169 - DNA, 501 bp, Homo sapiens
  MAP TO CHR2.3; EXPRESSED IN HELA, SIGNAL =  13; EXPRESSED IN LUNG, SIGNAL =   5; NT HIT: gi14748655, EVALUE 0.00e+00; EST_HUMAN HIT: BF310886.1, EVALUE 0.00e+00; SWISSPROT HIT: P50502, EVALUE 3.00e-24
aggctcgagaagagcatgagagggaggaagaagccagaccgcagtcaggagctcagtatggctcttttccaggtggctttcctgggggaatgcctggcaattttcccagaggaatgcctggaatggccggaatgcctggactcaatgaaattcttagtgatccagaggttcttgcaaccatacaggatccagaagttatggtggccttccaggatgtggctcagaacccagcaaatatgtcaaaataccagagcaacccaaaggttatgaatctcatcagtaaattgtcagccaagtttggaggtcaagtgtaatgcccttctgataaataaagcccttgctgaaggaaaagcaacctaggtcaccttatcgatgttgcaataatacaaaccaatgtacctgtgacatgtacatcaagagagctggggtgctttgaagataatccccacccctctcccccaaatgcagctgaagcattttacagtggtttgccattagggt

SEQ ID NO: 12170 - DNA, 544 bp, Homo sapiens
  MAP TO CHR4.3; EXPRESSED IN LUNG, SIGNAL = 4.7; EXPRESSED IN HELA, SIGNAL =   7; EXPRESSED IN PLACENTA, SIGNAL = 2.2; EXPRESSED IN HEART, SIGNAL = 2.8; NT HIT: gi16160060, EVALUE 1.00e-97; EST_HUMAN HIT: BI754853.1, EVALUE 2.00e-97; SWISSPROT HIT: O75083, EVALUE 2.00e-30
acacatcatcctagggcagggcccttccttgtgggaaccatccatgcccagctgagggcctggggaggacgagtgctgggtgggggagccctccctctctctgcacacccctgggagcccacttctgtgtatcatggcatacgtggcatgtgctgtggtctctgccatcagcatctaaacaggctcagcctctgctagcctcatgtacaaaccacaaatttcacccaaaaagtaagttcacttacgccaattgtgaacttgaacttgaatgggggtccctcaaagaatgccgcgcagttatcatcgcttcccgtggccagccggtatggccggctctgcttgatgtccacgctgttgatgactttgttgtgtcctgtaatctcgcccacagaagagccactatcccagaggaagactgctccaaaccttgacccaatgacacaggtggaagacaaaaaaaaaaaaaaaaaatcaatcccagaaggctggtaagcaatctgatagctgagctgccagtgcacagaggatggagtgactgtcagca

SEQ ID NO: 12171 - DNA, 590 bp, Homo sapiens
  MAP TO CHR2.3; EXPRESSED IN LUNG, SIGNAL =  20; EXPRESSED IN HELA, SIGNAL =  11; NT HIT: gi15812219, EVALUE 0.00e+00; EST_HUMAN HIT: BG504832.1, EVALUE 0.00e+00; SWISSPROT HIT: P12947, EVALUE 7.00e-45
tcctttccaacttagacccggcagaatgtctcccgcaaagaagggtggcgagaagaaaaagggcccttctgccatcaacgaggtggtgacccaagaacataccatcaacattcacaagcgcatccatggagagggcttcaagaagcgtgctcctcgggcactcaaagagattcggaaatttgccatgaaggagatgggaactccagatgtacgcattgataccaggctcaacaaagctgtctgggccaaaggaataaggaatgtcctatagggaatccatgtgcggttgtccagaaaacgtaatgagggtgaagattcaccaaataagctctatactttggttacctatgtacctgttaccactttcaaaaatctacagacagtcaatgtggacaagaactaatctctgatcatcaaatacatcaaataaagttataaaatagcaaaaaaaaaaaaaagattcactgagtagtgggaattagcaatgattgatatgtttacatctttgccacagttaatgagcacattttatcttgaaacacagctttttaaacttgtgtttatgtccctcctactccaagtaccctggc

SEQ ID NO: 12172 - DNA, 600 bp, Homo sapiens
  MAP TO CHRX.3; EXPRESSED IN HELA, SIGNAL = 4.2; EXPRESSED IN HEART, SIGNAL = 2.3; EXPRESSED IN FETAL LIVER, SIGNAL = 3.3; NT HIT: AF207550.1, EVALUE 0.00e+00; SWISSPROT HIT: O60830, EVALUE 2.00e-43; EST_HUMAN HIT: BE267402.1, EVALUE 3.00e-56
tgtctgggtttttctccctgttcttggccaaagcattcaggccttggaagtcccctgagatgtgaattctcaggatttcccaggaactaattaggcctcggttccactacaggtagcttcgcagtgtgggggggcctgttctccaccattgactgtggcctggtgcggcttcggggcaaggaggatccctggaactctatcaccagtggagcattgaccggggctgtgctggctgcccgcagtgagtgacccctggccctggccccagccccttccaccctgttctgcctgctctcacctctgtttctctgcctccaactcccccaggtggcccactggccatggtgggctcagcaatgatggggggcatcctgttggccctcattgagggcgttggcatcctcctcactcgctacacagcccagcagttccgaaatggtgagtaactggtggtcgggggagtgggaaatactccacctggcctcttccactcatccttacccaagtctcccttctccagcgcccccattcctggaggaccccagccagctgccccctaaggatggcaccccggccccaggctaccccagctatcagcag

SEQ ID NO: 12173 - DNA, 586 bp, Homo sapiens
  MAP TO CHR1.3; EXPRESSED IN HELA, SIGNAL = 2.2; EXPRESSED IN BRAIN, SIGNAL = 0.88; EST_HUMAN HIT: AU128317.1, EVALUE 0.00e+00; NT HIT: X83475.1, EVALUE 0.00e+00; SWISSPROT HIT: P28288, EVALUE 3.00e-20
gacaaaattgtcttggaacaggtattgtaagttgaaatttgaattgtaaactgattatgtctgaagtaaaattaacagaaaattcatcaacagaaggtatgaacaggtgaatcaggaatactacatggttagtaagaaaaagagttcaaaatattcatgattactactttataaaactagtctctttcataatgtatattttcaacacaatatgcacattattacagtaacagtgtcactagactttttggagtcaatttaaatgacatcaatatccatagaaattaatttttagcaaggctttaatgcatttgtctttacctgtttgtgatgagccgagaattaacatatctatattctccttcatacttttgctcagttattgtcatcttaccaatgggtcttcgaagtcgagttaggaatagcccagaaacaaccaagtaggccatcatgctcgctgggccctattattattgggagagaaagatacacaaagttctgggatataataataaattcacttagatacaaacatgtacaatttttataattaacctcaatgactgaaagaaattgccctactggg

SEQ ID NO: 12174 - DNA, 544 bp, Homo sapiens
  MAP TO CHR16.3; EXPRESSED IN BRAIN, SIGNAL = 0.97; EXPRESSED IN HELA, SIGNAL = 4.7; EXPRESSED IN LUNG, SIGNAL = 2.7; EST_HUMAN HIT: AL561644.1, EVALUE 0.00e+00; NT HIT: L19709.1, EVALUE 0.00e+00; SWISSPROT HIT: P20839, EVALUE 2.00e-66
gactcctcccaagggaactcggtgtatcaaatcaccatggtgcattacatcaaacagaagtacctccacctccaggtgattgggaggaatgtggtgacagcagcccaggctaagaacctgattgacactggtgtggatggactgcatgtagttatgggctgcagctctatctgcatcacccaggaagtgatggcctgcggtcagccccagggcactgctgtgtacaaggtggccaagtacgctcagcactttggtgtgtccatcatagccgatgtggcatccagaccgtggggcacgtggtcaaggccctggcccttggagcctccacagtgatgatgggctccctgctggccaccaccacggaggcccagcggcgagtacttcttctcagacagggtgcagctcaagaagtactggggcatgggctcgctagatgccatggagaagagcagcagcagccagaaacgatacttcagcgagggggaaaaggtgaatattgtgcagggtgtctcggcctccatccaggacaaagggtccattcaga

SEQ ID NO: 12175 - DNA, 593 bp, Homo sapiens
  MAP TO CHR2.3; EXPRESSED IN LUNG, SIGNAL = 7.3; EXPRESSED IN HEART, SIGNAL = 3.1; EXPRESSED IN HELA, SIGNAL =   2; EXPRESSED IN FETAL LIVER, SIGNAL =  13; NT HIT: Z48199.1, EVALUE 0.00e+00; EST_HUMAN HIT: AL558105.1, EVALUE 0.00e+00; SWISSPROT HIT: P25573, EVALUE 3.40e+00
aggatgtccaaggtgtctgcggggtaggcctcggctccacacctccgctgtgaccacagcctcaggtcaagctgtgctggggccatccaccttcctttgccatttagaagatggggcttggagcttggcaacacagaaattgacatcagccttataaaaccttggctgaacctaccgacctccaggagaatttcagccaaaacaaaaaagcaaatacacagagggaccctggaaccagaatccctccccatgggaaagacgaaggcacagagattcgagccaagtttcccaacatgttggtgtttgcagaaaagtccggtcacgtcacacacagcacagaggcaagaagcgaaggcagtggcattcacaggactactttatattaaagtttattacatttggaaaatctactgtacagggaaaaacccattggattaagtagagttttgccaaaagcaaaagactatcactctttggaaaatattcctgattccagcccagggcccagggtggggccacaggagctaacggagaacctggccttggatggaggcgctcagagccagctctgcccaagacacccctcgtcaatt

SEQ ID NO: 12176 - DNA, 531 bp, Homo sapiens
  MAP TO CHR6.3; EXPRESSED IN HELA, SIGNAL = 4.5; EXPRESSED IN LUNG, SIGNAL = 7.3; EST_HUMAN HIT: BG675888.1, EVALUE 0.00e+00; NT HIT: AF070655.1, EVALUE 0.00e+00; SWISSPROT HIT: O75964, EVALUE 2.00e-39
ttccacttgtggcattcaaggcgacagactttccatcccacaaccattggcgccaatttttccgtaaccttgtggaaaagaccctggtgctggtgaacgctgctgtgacttactcaaagccttgattgggcacattttggtactacaccaagtttgagctggttcctcccacccctgctgtgatccctagagctattcagagtctgaaaaaaatagtcaatagtgctcagagtggtagcttcaaacaactcacagttaaagactctgtgctgaatggtttggtggccactgaggtgttatgtggttttatgtcggagagatcatatgcaagcgtggcatcattggctatgatgtttgaagaccagtatttaacatctgattatatttgatttattatttgaatgttgttggaccatgtgtgatcagactgctatctgaattaaataagatttgtcaaaattaaaaaaaaaaatttccacttgtggcatcatgtcagtaaccaaaaagttctggattttggagaatttggga

SEQ ID NO: 12177 - DNA, 543 bp, Homo sapiens
  MAP TO CHR13.3; EXPRESSED IN HEART, SIGNAL = 7.5; EXPRESSED IN HELA, SIGNAL =  10; EXPRESSED IN FETAL LIVER, SIGNAL =  34; EXPRESSED IN ADULT LIVER, SIGNAL =   9; EST_HUMAN HIT: BE792472.1, EVALUE 1.00e-127; SWISSPROT HIT: P32119, EVALUE 8.00e-76; NT HIT: gi13631439, EVALUE 1.00e-127
catctagcctttgcccacacagcttgttcagtcatggcctcaggtaatgcgtgcatgggaaagcctgcccctaacttcaaggccacatccatggtggatggcgccttcaaagaggtgaagctgtcagactacaaagggaagtacgtggtcctctttttctaccctctggacttcacttttgtgtgccccacggagatcactgcagtcagcagccatgccgaggacttccgcaagctgggctgcgaagtgctgggcatcttggtggactctcagttcacccacctggcttggattaacatcccccggaaggagggaggcttgggccccctgaacatccccctgcttgctaatgtggcaatctgaggattacggtgagctgaaaacagatgagtgcattgcctactggggcctctttatcattgatggcaagggtgtcctttgccagatcactgttaatgatttgcctgtgggacgctcattggatgaggctctgcagctggtccagaccatccagtacacggacgagcacagggaagtttgtcc

SEQ ID NO: 12178 - DNA, 575 bp, Homo sapiens
  MAP TO CHR1.3; EXPRESSED IN HELA, SIGNAL =  24; SWISSPROT HIT: P39026, EVALUE 1.00e-15; NT HIT: AF101385.3, EVALUE 0.00e+00; EST_HUMAN HIT: AL554381.1, EVALUE 0.00e+00
gggagaaggcctagttctggatgttcttttaaaccatcatccctggaagcccctgatttgtcaagatgcccaatattctaactttaaagaagatacccagcaaatagtactatattttgcatccccaaatcccaactccattcaccaacatcacattccaccacttcacttgagataaatcagctttaccttctgctggaaccagcgcatggcctcctctttgctgattctgtgtttggccccaatgcagcctgtcctgcgcttcttgtctgcgatgctgaaacctggcctacccagcacctgtcccaggaataaccaacagtcacctagccagctcagagtcaagagcagatggacaagactcacacattacagacagatcttcaaagagtcacttggcagcccaatggattctggagcaagacccatgatctgtgtctgacaaagctgccaccagcatcccacgcaacacacagccatactgtaagtttgctttggaggctggaactttcagcacccccctaacccagcctattttccagtggtgctgaggatcctccattactgctcccaaa

SEQ ID NO: 12179 - DNA, 514 bp, Homo sapiens
  MAP TO CHR5.3; EXPRESSED IN LUNG, SIGNAL = 2.3; EXPRESSED IN HELA, SIGNAL = 4.2; EST_HUMAN HIT: AI630324.1, EVALUE 0.00e+00; SWISSPROT HIT: P31040, EVALUE 7.00e-16; NT HIT: AF171028.1, EVALUE 0.00e+00
catggagtcactggttgtggctttatagctgtgggccaggacccatccagacagcaagcacggaactaagtcagcactgacgggacagacaccagcccaccctgcagaaggaagggcccaacagtgtgcacagagcccactgtctgctcaccccggtcgaacgtcttcaggtgctttaggtctccatagagcttgctgattttcccacaaccttcttgcaacacgcttcccacacggaacacggcagcatgattttgcattgactgtggcacaaaatattatttgtaaacttttaatccatagaagcagccataccaagaactgcttaacttttagacctgttgttttgcatttcacttaaaagttacataaattaaacagaaaaattaggaaattcagactatgagtttattactccaaacttaaaaatgaagttttgactaaagcttctgaataaataaatgtttctattacatacacatcttagacccacacacatcctttccagcaggat

SEQ ID NO: 12180 - DNA, 519 bp, Homo sapiens
  MAP TO CHR11.3; EXPRESSED IN HELA, SIGNAL = 3.3; EXPRESSED IN FETAL LIVER, SIGNAL = 2.4; EST_HUMAN HIT: BE816200.1, EVALUE 1.00e-94; NT HIT: gi14767270, EVALUE 1.00e-94; SWISSPROT HIT: P11117, EVALUE 2.00e-48
gaactgcaggctggtctagggcatgactagcaaggaggccggtgacagctcacctgtgtctgcaggaccgcttgccagctggcactcctgctgccaatccttgggcacgacgggctctgtgaggcgaaggaagtcctgcagtgggcagcggtgagggcagccaggcaggctgagcggccagggggccttgtcactctcgttccgaaagtacatctccactgagaaattcctgagggtcgacaggaggcaacatgggagctgctcagcctgcccatcatggggtccttgggctgccccgagccacctcccgagggcccccctccagaggacactgctagctccactcacccagaatcttcctggtacagttcaaatatgtggcaggaggcgtagggggcttgttcaccattgtagacatccagtgccatttgcagggcaaccagggtagtgtcgtgctgcgggggagaggggctgcccgtcagcattgttccccacacccgcaggaaccgaacagagaag

SEQ ID NO: 12181 - DNA, 566 bp, Homo sapiens
  MAP TO CHR11.3; EXPRESSED IN HELA, SIGNAL = 2.7; SWISSPROT HIT: Q04206, EVALUE 3.00e-27; NT HIT: Z22953.1, EVALUE 0.00e+00; EST_HUMAN HIT: AW604285.1, EVALUE 0.00e+00
gagtgaaccgaaactctggcagctgcctcggtggggatgagatcttcctactgtgtgacaaggtgcagaaaggtatacatcaggaggcaggggtgggctcttgggagcaaggggtgaagctgagcagagaagtggagtgtcaggtaactggctttggatacttcctcctgtgcctcgggggcctcaggtgggccgaagggtgatgtatcagaagacaagcatcagaagttgagggggagaccatggagggttagacacactgacccacactgccaccgcatctcctgcagaggacattgaggtgtatttcacgggaccaggctgggaggccgaggctccttttcgcaagctgatgtgcaccgacaagtggccattgtgttccggacccctccctacgcagaccccagcctgcaggctcctgtgcgtgtctccatgcagctgcggcggccttccgaccgggagctcagtgagcccatggaattccagtacctgccagatacaggtacacagctggggtggcagcatcagggcagctgggctctgtgccgtgagagagaggccaagac

SEQ ID NO: 12182 - DNA, 597 bp, Homo sapiens
  MAP TO CHR5.3; EXPRESSED IN HELA, SIGNAL =   2; NT HIT: gi16157231, EVALUE 0.00e+00; EST_HUMAN HIT: BG767699.1, EVALUE 0.00e+00; SWISSPROT HIT: P49792, EVALUE 6.70e-01
gtggcatattgggtggaatcagagcattcagcaatatgttgcctaaattggtgtctgcccgcaccaaaagctgtgtcttctgatttgctgtaggttttaaatgcagagtacctatgactttctctttaaattcattatctttcttgtaaaatagtttacactttttggagtaaaaagcatcttcttcttttacttcagtaactactactttgggtagctcatgattctcttcttcatctccacctttgcattcaccactgtcaccttccgcttggccctccaatggtttagtgcgaaatggtgaagagactggtttactctggtaatatctttgccaaataaactggagtttccaggggagaatgaaaatccagtcagggggacagagcttaatgagcccaaaacagagctatcaactttcttgccgaaattaaatgaggcacttgtcgctcctagtgatgatgggtccgttttcttttcagatgtcagctccaccttcttgtcaggtgtatcttcagttttgttgccatgaaacaaaaacgctgactcttgctgtaattttgttgagccaacaagggaaggagaccgtgtttcagc

SEQ ID NO: 12183 - DNA, 531 bp, Homo sapiens
  MAP TO CHR8.3; EXPRESSED IN HELA, SIGNAL =   8; EXPRESSED IN ADULT LIVER, SIGNAL = 3.2; EST_HUMAN HIT: AA422010.1, EVALUE 0.00e+00; NT HIT: U68094.1, EVALUE 0.00e+00; SWISSPROT HIT: P11940, EVALUE 3.00e-32
aatccatagcccttggaaccattttcatcacaaaccacctagggaaaaacatatacccatttttctttatttgctattgatttaacatttgttcagtgttgagagacaatctgttagccatctaacctggatatttgtgaaataaagatatccattactgcacagttcctatttcaagcactaaactaaatgtagctcaacaatgtaaacatgtgtatcggacatttttggcttaccttacatgaaaggatgttaccaaaagcagaaaatgtatcatacagtgctttattatcaatggatttgtccagatttttaatgaatatgttgcctactccacttttgcgaagtgatggatcacgctgagaccacatgatgcgtactggcttgccctttataacatcaaaattcatggtgtccaaagcacgctccgctgcaggaaggacattttcagagtcaatattacttcaaaatttttgctggctacttaagattatataaactatggtgactggagtgggaggacacatggtc

SEQ ID NO: 12184 - DNA, 520 bp, Homo sapiens
  MAP TO CHR8.3; EXPRESSED IN HEART, SIGNAL = 1.2; EXPRESSED IN HELA, SIGNAL = 3.3; SWISSPROT HIT: Q10570, EVALUE 3.00e-47; EST_HUMAN HIT: BF972938.1, EVALUE 1.00e-94; NT HIT: gi16162164, EVALUE 1.00e-94
tagtgggctgtccaaaggagctgtccacaaggacccgctgccccacagggaagttcttcaccaggaacaccagccgccagtcgggaagctggtagatctgcagggtgggcagcagtcagtggaggcaggtgggtggaacccgctgggccacagtgcagggcaccacctacctccatggtgccattctcccgcaccagcaggcaccagtgggtaggctctgcccggaagggtgcagggtcccggtcagcagggggctggctgcttcttcgggcctcctccttgctggggctgaagagggagcccgaatccccatacagcatctcctcctcgtcatccactgtggggctgggggccagcagaaggtcatgggcggcctgccagccccagggacccaagcccctacctgcgcccccagcccccacgcacctagtctctgagcccaggccctcggcctccgggccactgcggcccccgagctcgtcacgggccccacccaggcggctctcagtggtgaacatgc

SEQ ID NO: 12185 - DNA, 503 bp, Homo sapiens
  MAP TO CHR11.3; EXPRESSED IN HELA, SIGNAL = 3.2; EXPRESSED IN ADULT LIVER, SIGNAL = 3.3; EXPRESSED IN BRAIN, SIGNAL = 4.5; NT HIT: gi14768988, EVALUE 4.00e-94; SWISSPROT HIT: Q06481, EVALUE 2.00e-29; EST_HUMAN HIT: BG829572.1, EVALUE 6.00e-94
tctgtggctagccttcttggagtaaacctgcaatttttttccctttggtaggctcttgcagccaatgccggaacaggatttgctgttgctgagcctcaaatcgcaatgttttgtgggaagttaaatatgcatgtgaacattcagactgggaaatgggaacctgatccaacaggcaccaagagctgctttgaaacaaaagaagaagttcttcagtactgtcaggaggtaagagtgttgccagtaagttgaaagtgttatttttctggggcagggttgaatctgtttaccttagaaatagatattctgtcattctcttttgacctaagaccaagatgctaatgactggagccccaagccttttgtttctaaatgtgtggcatgactgagacctctcaaaggctttgcctgcgtgttctgtgagctctcagttctttaaggaagggatactgcagaagcctggcaagtgccatgggagtgcagcctgcttctcatcctcccacttg

SEQ ID NO: 12186 - DNA, 557 bp, Homo sapiens
  MAP TO CHR10.3; EXPRESSED IN HELA, SIGNAL =  14; EST_HUMAN HIT: BG616308.1, EVALUE 0.00e+00; SWISSPROT HIT: Q02878, EVALUE 1.00e-26; NT HIT: gi14745925, EVALUE 1.00e-128
tcgcagttttctcacgtgtcaactgagggtttttttttttttttgccatggctcaacagcttttgaggcacatcttcagtaggaaaatatctaggcattttatgaagtttaaccacctgggtactaccattcttgtcaccaccaactggttttgtaacagttgcaagaaccttctttttcttttcaacctcgtacttagcggctgagtacttcctcttatacacagcttttctggaatacatagcacatcgggaatacctgccaattcctctgacaaggacagggttgtgctgcaatggggcttccccttcttgggcttcttagccttgaggtgaccctttttcaccttgtcaccagcctcagccttcttggctttgggtttcttctctttagtatccggcttctcaactttttcacccaccatcttacaagatggggaagagcaagtccctttgttttaattttttagaaaacacgggtcagggatcagtagattgttgtcattaccgcatctgtagctggaaaacagttgtctgtgtggtgttgctcttgcagaa

SEQ ID NO: 12187 - DNA, 524 bp, Homo sapiens
  MAP TO CHR1.3; EXPRESSED IN ADULT LIVER, SIGNAL = 2.2; EXPRESSED IN BRAIN, SIGNAL = 5.9; EXPRESSED IN HELA, SIGNAL = 2.9; SWISSPROT HIT: P03186, EVALUE 4.90e-02; EST_HUMAN HIT: R83184.1, EVALUE 0.00e+00; NT HIT: gi16168371, EVALUE 0.00e+00
cctttgccttccttccctacaccagggccctcctcctgaaggtgagcccctgcagcctcctcagcctgtgcagtccacacagcctgcccagcctgcaccaccctgcccgccctcccagctcggtcagcccggccagccaccaagcagcaagatgcctcaagtgtcccaggaggcaaaggggacccagacgggagtagagcagcctcgcctcccagctggacctgcaaacaggccacctgagcctcacacccaggttcagagggcacaagcagaaacaggcccgacttccttcccctcccctgtgtctgtctccatgaagcctgaccttccagtctctcttcccactcagactgccccaaaacagccgttgtttgtcccaacaacctctggccccagcaccccaccaggactggttctgccacacactgaattccagccagcccccaaacaagattcctctccacacctgacttcccagagacccgtggatatggttcaacttctgaaggtaagcatgagcaggg

SEQ ID NO: 12188 - DNA, 589 bp, Homo sapiens
  MAP TO CHR2.3; EXPRESSED IN HELA, SIGNAL = 4.9; NT HIT: gi4503576, EVALUE 0.00e+00; EST_HUMAN HIT: BI758639.1, EVALUE 0.00e+00; SWISSPROT HIT: Q99814, EVALUE 3.00e-67
gaggttttcctgataggccctcgggagccagtggaggcgtttgagcagcactgtgaaacagtcgttgagatgaatggctctgcaggagctgagttggaatagtgtttgtgaggtcgtaccaacccccttgcctctttgccggtgctgtctcccctcagacggatttcaatgagctggacttggagacactggcaccctatatccccatggacggggaagacttccagctaagccccatctgcccccgaggagcggctcttggcggagaacccacagtccaccccccagcactgcttcagtgccatgacaaacatcttccagccactggcccctgtagccccgcacagtcccttcctcctggacaagtttcagcagcagctggagagcaagaagacagagcccgagcaccggcccatgtcctccatcttctttgatgccggaagcaaagcatccctgccaccgtgctgtggccaggccagcacccctctctcttccatggggggcagatccaatacccagtggcccccagatccaccattacattttgggcccacaaagtgggccgtcggggatcagcgcacagagttct

SEQ ID NO: 12189 - DNA, 558 bp, Homo sapiens
  MAP TO AJ009613.3; EXPRESSED IN LUNG, SIGNAL = 0.87; EXPRESSED IN PLACENTA, SIGNAL = 1.5; EST_HUMAN HIT: AW833914.1, EVALUE 0.00e+00; EST_HUMAN HIT: AW833914.1, EVALUE 0.00e+00; NT HIT: AF098109.1, EVALUE 4.00e-94; SWISSPROT HIT: Q09996, EVALUE 1.40e+00
tttccctcctttgcatctttagcctcttagcaatgcataccacgagttagcacaagtgtattcaaccaacaacccctcagaactccgaaacctggtgaataagcacagtgaaaccttcactcgcgataacaacatggggctggtgaagcaatgcttgtcatctctttataagaagaatattcagaggctaacaaaggtgaggaaagtgccaccttcacagggcagctcctgaccccctgggggccatgtttccctttctctcccttttcagagctgaggaagcaggtacagggataaagcatggcaggatttctgtgctgagagagaactctcttgtgattggcttcttagaaagaatttgatgtatacctttggtcttttcagggctagagcagggtatttggagcaggtgaagaggaagaaaggtaggagacaaggctacattgggagacagtgaaaggcagcctcagagaggtcagcagctccagcagggcagatgagggatgctaatgatgcagacctcagtgcactgtcaccagccttgcaacctgtctgttc

SEQ ID NO: 12190 - DNA, 562 bp, Homo sapiens
  MAP TO AC010304.5; EXPRESSED IN LUNG, SIGNAL = 1.6; EXPRESSED IN PLACENTA, SIGNAL = 1.1; EXPRESSED IN HEART, SIGNAL = 2.2; SWISSPROT HIT: P08547, EVALUE 3.00e-05; EST_HUMAN HIT: H15308.1, EVALUE 1.00e-64; EST_HUMAN HIT: H15308.1, EVALUE 1.00e-64; NT HIT: AL163248.2, EVALUE 1.00e-38
agtccaatgtttgagggcaggaagcattcagcatgggagaaagatgtaggctgagtggctaagccagtctctcttttcacattttattctgcctgcttatattctagttgcactggcagctgattagactgtgcctactctaagggtcggtgtgcctttcccaggccactgattcaaatgttaatctcttttggcagcaccctcacagatacacccaggattgatactttgcgtccttcagtccaatcaagttgacagtattaaccatcacaccaccactataaggatggctaaaaggagctctaaatcttgaaacaaatcctggaaacacatcaaaacagaacttctttaaagcataaatctcaccgaatctatgaaacaaaaaatagaatttaaaaaacaaaaacaaaaaaccacggtatacaggcaacaaatagcatgatcaatggaatggtacctcacatctcaatactaacattgaatgtaaatggcctaaatattctacttaaaagatatagaattgcagaattgatcagataccagccaactatctgctgccttc

SEQ ID NO: 12191 - DNA, 551 bp, Homo sapiens
  MAP TO AC007075.3; EXPRESSED IN LUNG, SIGNAL = 0.45; EXPRESSED IN PLACENTA, SIGNAL = 0.84; EXPRESSED IN HEART, SIGNAL = 0.97; SWISSPROT HIT: O14228, EVALUE 4.60e-01; NT HIT: AJ275318.1, EVALUE 8.20e+00
gctttttccttcatgccaaccctcctccctgcagctcccctcacagctgccttttccttcgatgctgtggctgaattgtctgtgtgcctggctaatgccagcgctcccctagtgccctggattccatctcttctcactgattcaaggacacgatctagcaattctcctctttctgactctctgtctctgtcatgatccagtttttccccaactgtatcctttccatcagcataaagatatgctataattttcccagaaagagacagaagaaggaatctgccttgaccccatatcccctccaggtcaccacccattcctttggtctttatggcaaagctcacaagagttgtgtgctcatgggtttcacattttgttttgaaactcactcttgcttccactgttctatgaaatgccatggtcaggttggtctgtgacttcgtagtccttatcttcctctctttcctcctcgaaatgtcttttattccacttggttttcagttcaccatactttcctgttccttttatttaacgggctgctttttctcaatcca

SEQ ID NO: 12192 - DNA, 546 bp, Homo sapiens
  MAP TO AC005263.1; EXPRESSED IN LUNG, SIGNAL = 0.45; EST_HUMAN HIT: BI762769.1, EVALUE 0.00e+00; NT HIT: gi14765795, EVALUE 3.00e-76; SWISSPROT HIT: Q15428, EVALUE 2.00e-28; EST_HUMAN HIT: BI762769.1, EVALUE 0.00e+00
agtgactccgcaggtagctcagctctggcgcacctgtgccttcacctataccagaatcccagagcctgggcggagattgtctaatggttgccagagctgcagggcctcccccggggtcccgctctcgttcagtgggtggcattagcctgccccaggttcctcagcttcggagaggacaagcagccgggacctgagagctttctgtgttgcagtgaccaagcagagagactcggagatgggccagcagagcctcctcttccaggtgagatcagggacttgggcgtggggggcggccaaaggcacccaagaggcggctctgccacccggccgtgtccctgcagattgactaccctgagatcgccgagggcatcatgccacgtcaccgcttcatgtctgcgtacgagcagaggatcgagcctccggaccggcgctggcagtacctgctcatggccgccgagccctacgagaccattgccttcaaggtagcgtggctgcggggttccctgggcccccttgagatgtgcaagccagaaggatctgcatagg

SEQ ID NO: 12193 - DNA, 589 bp, Homo sapiens
  MAP TO AC020663.1; EXPRESSED IN LUNG, SIGNAL = 1.2; EXPRESSED IN HEART, SIGNAL = 1.8; NT HIT: gi16166372, EVALUE 8.00e-65; EST_HUMAN HIT: BE902009.1, EVALUE 1.00e-64; SWISSPROT HIT: O43390, EVALUE 2.90e-01; EST_HUMAN HIT: BE902009.1, EVALUE 1.00e-64
gtccttcccctaatgaaggcgctcggcccgggcccaccttgtccttgagctgctggcagagctgcagggagacggtgaagtagaccagggcgtcgttgagccaggggatcacgcactccactttgtgcacgtggctcacctccaggcgctgagagccccactcgctgtgggcagtgagagggtccctgaggagggtcccggccctccaggtgtggagggatggggtgggcgtgcctggaccccccgcccctgcctacttacaacatggccccagggctatgcagcaccgcgcccccagctgggcggaagttctagggagaacagcaccagacccgtcaggccttgcagggcgtgtgcatggcgggcagtgggccgggcaggggtccctcctcaccttggtggagttgggctgcagggcatgcagctggtacaccgtgaggcagagcttgttgaggttgatgtagacgttgaccagcaggtcggacggcagggcaggggcgaacatccgctgcgggaggcaggtgggatgaggccctcgcaagcccccagcccaggctggatggagcggggctctgcagtcactcatgga

SEQ ID NO: 12194 - DNA, 504 bp, Homo sapiens
  MAP TO AC010504.6; EXPRESSED IN LUNG, SIGNAL = 1.3; EST_HUMAN HIT: AI907137.1, EVALUE 2.00e-75; SWISSPROT HIT: O15063, EVALUE 5.00e-04; NT HIT: gi16163170, EVALUE 1.00e-72
caaaggaggaaaacctcacgttttaagaagggagagacaagagaccactatttggttatgggatgaatgcagggtaaggactgccctttcagggtggggtggcgggtggtggggctgcaggaggccctggcccagcttctctctctggctttcagggatggcctgcacggtggctggtcgggtgctcagggagactctgccagctcgagtgatgagacatcctcagccaacggggacagcttgttctccatgttttcagggcctgacctcgttgctgctgtcaagcagagaaggtatgaagggatttctaaaccaaggtggggagagaagggcatgtgaatgcaacccatggctcactccctgggaaagccaggagcccagtcacctccagtctccctgtgtgagaggaggggctcttccagcaatgcctggctgaagcctctgaagagcacctgcaggaggcggtttccacaaggaagagccggcctcatcttgtgcagatca

SEQ ID NO: 12195 - DNA, 524 bp, Homo sapiens
  MAP TO AC004192.1; EXPRESSED IN PLACENTA, SIGNAL = 2.7; EXPRESSED IN LUNG, SIGNAL =   3; EST_HUMAN HIT: BG706500.1, EVALUE 0.00e+00; NT HIT: AF055066.1, EVALUE 0.00e+00; SWISSPROT HIT: O57592, EVALUE 1.00e-29
tctgcctgttacccagttccaaagctgtttccacattttcaagaatttttatagtaatacccaactcctggtaccgattttctgaattagttcattctcacacttttataaagaaatacctgagactgggtaatttataaagaaaataggtttctttctttctcctcccaccatccaagatgccaaaaggaaagaaggccaaggagaagaaggtggctccagcccctgctgtcgtgaagaagcaggaggccaagaaagtggtaaatcccttgtttgagaaaaggcctaagaattttggcactggacaggatatccagcccaaaagagacctcacccactttgtgaaatggccctgctatatcaggttgcagcagcagagaaccatcctctataagtggctgaaagtgcctcctgagattaaccagttcacccaggcaccagacagccaaacagctactctgctgcttaagctggcccacaatacagaccagagacaaaccaagagaagaagcagaggctgttgg

SEQ ID NO: 12196 - DNA, 575 bp, Homo sapiens
  MAP TO AC009123.6; EXPRESSED IN LUNG, SIGNAL = 1.3; SWISSPROT HIT: P36047, EVALUE 9.00e-09; EST_HUMAN HIT: BI827859.1, EVALUE 1.00e-118; NT HIT: gi14754592, EVALUE 2.00e-28
tggtgactggtgagagcttgcttttttattcgcagatggcactttcttgctgtatcctcatggggtgaagatggcaaagaagctctctggggcctcatttatgagaccactaatcccattcctgagggttcttctctcatgaccttatcacctcccaaaagtcccacctcctaataccatcacattaggggttaggatttcaatgtatgaattttgaagggacacagacattcagttcctaatagtaggcaaaaacaagggtgaccgtgacccctctgccctgggagtaggagcttaattcccacgtgcttcctttttgttaggttttgatcgcattgagaacctggaagagtacacagggctgcgctgtctctggctgcagagcaatggaatacagaaaatcgaaaacctggaggcccaaactgagttgcgttgcctcttcttgcaaatgaacttgctccgtaaaattgagaacctggaacctctgcagaaactggatgctcttaacctcagcaacaattacatcaagaccattgaaaacctctgtaagggtacccagcaagcagtgtgtctgt

SEQ ID NO: 12197 - DNA, 588 bp, Homo sapiens
  MAP TO AC006154.1; EXPRESSED IN HEART, SIGNAL = 1.4; EXPRESSED IN LUNG, SIGNAL = 0.41; SWISSPROT HIT: P21439, EVALUE 9.00e-18; EST_HUMAN HIT: BF885506.1, EVALUE 1.00e-30; NT HIT: gi16175272, EVALUE 2.00e-65
atttgtgaaaccagcccaagggtgtgaaggcattatccatcggcattgccattttgtaggctttttaccaaaactggattcacacgcaaatttgttactgaaaaaccaatttcaaagggccaatttgtatccagcttcccactctggaaagcttggttcttcccacttactgtgccctcatcagggtcatagagcctctgtatcagctggaccgttgtgctcttcccacagccactacttccaaccagggccaccgtctgcccactctgcaccttcaggttgaggcccttcaagatctgtaaggaaaatgagaaaaaagaacacacttcacaacaaagccctaaaatgggaataattcgattcagtttgaaatttgaaaaaaaagtatcaaataagggaatataacccccaaaggaaaaggcacataagtatcaaaataatagagactttattctttaaaatgattcaacaatcaacctcagttaggaattcctataaatattacttacagtaccttgacgttagctcgagaagggtaagaaaagtgaacatcattgaactccaaattccctttgatgctgtctggtt

SEQ ID NO: 12198 - DNA, 529 bp, Homo sapiens
  MAP TO AC004785.1; EXPRESSED IN PLACENTA, SIGNAL =  10; EXPRESSED IN LUNG, SIGNAL = 0.7; EST_HUMAN HIT: AA024986.1, EVALUE 0.00e+00; SWISSPROT HIT: P13688, EVALUE 8.00e-05; NT HIT: M76741.1, EVALUE 0.00e+00
gctttccctgactaggggacagaggaacatacttgagtctcttcctctagattagatggggattggaatacccatgtccaagagataatgggagacagggagcacgaagaccagggaagaggaaacctgtgggaattagtgccgagaagcaggagtttagtgggaggagtatgagatccaggcccagagacaggcaaagaattctttccctctcccaagcatggcagtcagccttggaggaaacagaacaagaggaaaggccatcatacctgccggtcttcccgaaatgcagaaaacatgccagggctactgctatcagagcaaccagggccactactccaatcacaatgccagcaatggccccaggtgagaggccattttcttgtggtagagcattatctgtcatggagagaaaagaggagaagaaatgaaagtgaaattattttacaatgggggctgggaaacaactctcagaatgaagtagtttctaattgttccttcaaggaatacagtttcgttgtgggaaggt

SEQ ID NO: 12199 - DNA, 558 bp, Homo sapiens
  MAP TO AC013559.2; EXPRESSED IN LUNG, SIGNAL = 0.41; NT HIT: AL163227.2, EVALUE 6.00e-84; SWISSPROT HIT: P34668, EVALUE 3.60e-01; EST_HUMAN HIT: BF922594.1, EVALUE 1.00e-128
tcatcgcagcaagagaacagtctaatacagtaaactggtaccaatagagtggagtgctgctataaggatacctgaaaatgtggaagcgacattggaactgggtaacaggcagaggttggaacaatttggaggacacaaaagaagacaggaaaatgtgggaaagtttggaacttcctagagacttgaagggtttagaagacaggaagatgtgggaaagtttggaactttctagaaatttgttgaatggctttgaccaaaatgctgatagtgatacggaaaatgaaatccaggctgaggtggtctcagatggagaagaggaacttgttgggaactggaataaaggtaattcttgctatgttttagcaaagagactggcagcattttgcccctgcgctaaagatctgtggaactttgaacttgaaagagacaatttagggtatctggtggaagaaatttctaaggagcaaagcaatcaagaggaagcagagcataaaattttggaaaatgtgcagcctgacgataggatagaaaagaaaaccccattttctggggagaagt

SEQ ID NO: 12200 - DNA, 569 bp, Homo sapiens
  MAP TO AC004210.1; EXPRESSED IN PLACENTA, SIGNAL = 1.2; EXPRESSED IN HEART, SIGNAL = 1.7; EXPRESSED IN LUNG, SIGNAL = 0.49; NT HIT: X80018.1, EVALUE 9.00e-03; SWISSPROT HIT: P30466, EVALUE 7.00e-11
ctcagctgatccctctcaggtggggaagcgctggggccattttgctccaggtttctccttcaatctggatcatgactgacttgttctgtgaccaatgacagagggaggaaggagctggggtgggcggggcgacctccctcccctccctggccccgcctccggctcaccctggggcaggtccagggcaccgcacctgcagatgctgctgtctggctgggtggtggctccggacaggagcttcctcgaaggacactttaagtccgcctacgacaaggagatttcatgtccctgaacgaggacctgcagacctggacagcggctcaaagagcggcttggaggatccatcacacctgggagaggttctggaccgcggaggccacaagggaagccccgatgggtcactgcactaggtggctgctcagacacctggagcatggcaaggagatgatgctgccggcaggtactggggtcctccaggccccacgtcaggacctcttggagctggaattatgttccttggaggcatccatatttgaggaaagaggagaccgaacagtctccgtctcctc

SEQ ID NO: 12201 - DNA, 573 bp, Homo sapiens
  MAP TO AC005524.1; EXPRESSED IN LUNG, SIGNAL = 0.54; NT HIT: X00856.1, EVALUE 1.00e-08; EST_HUMAN HIT: AW104586.1, EVALUE 3.00e-06
taggatccaaacaaggccagctgtggcccttaatggatgcgtctcttaaatcacttttattctatacattaccccttgctctttttacccttgtaatttatttaatagtttcacacacactgaattttgttgattacttatccatggggtcatttaacatgtttttctgtttctttcctttctagtaaactgatagtaagatctagagcttgatgggcttcaggaaagactttttggcaggaatacttcaagtgaggtatgatgtacttgcatcgggaagcacatatagcaagtcctctaatatcagcctttcattgaatgcctttcactatataagggaataaacatcaattcctggccatagtcgcagtctgtgtggagttttcatgtttttcctatgtctgcatgggttttctacaggtactctggcttcccacatcataaagatgtgcatacgaaagatgagcatgctagctgaactggtgtgtcgacatcgtcccagtctgagtgtgggtgtgagtgcaccctgggatgaagtggcattgtgtctcatgctggttcctatcttgcacc

SEQ ID NO: 12202 - DNA, 550 bp, Homo sapiens
  MAP TO AC026432.2; EXPRESSED IN PLACENTA, SIGNAL = 1.4; EXPRESSED IN HEART, SIGNAL = 1.6; EXPRESSED IN LUNG, SIGNAL = 0.93; NT HIT: AF269088.1, EVALUE 2.10e+00; EST_HUMAN HIT: BG110737.1, EVALUE 3.00e+00; SWISSPROT HIT: Q9X4D0, EVALUE 8.90e+00
ggtgtgtccagggatttgtccttagtttaatcaatctttgttttcagcaaaatgttgacgttagggcaaagttgtttttgtggctgttgtgataagaccttgaacattttcgccgctgcaattcaagaagcacttggctactctgtggcaggcagactctgaggattataactcctcttgcagggagggctggaacctccctagggagcaggcgggggctggacagtctgccagacacacgctctctaggacacactctctctttttttccccgtatagtgcttgtgactgatgaattcaatgagcgcttcaattctcctactttgttctttcagcagaccatttgtgtctttgagagcttattttggcaaatgaataatcagctatccaaattggctcaaggacgatcaaggggaatatttgacctctactttagatgatctacatttttaatgttagtatttgtgacttagcagagcggttgatcataactggccttctttcttcctcatctgtgagcatacatcaaaggctccaaaatatgcacaca

SEQ ID NO: 12203 - DNA, 530 bp, Homo sapiens
  MAP TO AC007934.7; EXPRESSED IN LUNG, SIGNAL = 0.64; EST_HUMAN HIT: T60493.1, EVALUE 0.00e+00; SWISSPROT HIT: Q08426, EVALUE 3.00e-58; NT HIT: gi4503496, EVALUE 0.00e+00
ttgtgctttgaatttgaacaggttattgttattactatatattcacattccctttgtacaagtaacatttccaaagctctgatccttcttattcctttcagatcaacctctagaatcccgtagactctgcaacaagccaattcagagcttgcccaacatggacagcatttttagtgaggccctcttgaagatgcggaggcagcaccctgggtgtcttgcacaggaggcttgtgtccgtgcagtccaggctgctgtgcagtatccctatgaagtgggcatcaagaaggaggaggagctgtttctatatcttttgcaatcagggcaggctagagccctgcaatatgctttcttcgctgaaaggaaagcaaataagtggtcaactccctccggagcatcgtggaaaacagcatcagcgcggcctgtctcctcagttggtgttgttggtaagaccatggggtaatgaatggaatcctccaaatctgctcatgtaatgtgctaccatttgcttagggctaccggatgctaggttt

SEQ ID NO: 12204 - DNA, 535 bp, Homo sapiens
  MAP TO AC009757.8; EXPRESSED IN LUNG, SIGNAL = 0.6; EST_HUMAN HIT: BI488505.1, EVALUE 1.00e-33; SWISSPROT HIT: Q04503, EVALUE 1.70e+00; NT HIT: AL163227.2, EVALUE 2.00e-59
tggagaaaatgtctttggggcatgtcagagaccttcatggcaggcctcccgtcgcaggcttggagtcctaggaggaaaacatggtttcgtgggctggacctagggccagcctgcagccttgggacatggtgccctgtgtccgagctgcttcagatcgagctgtgattaaaaggggccaaggtacagctcaggccattgcttcagggggtgcaagccgtaagccgtggtggcttccatatggtgttgggcctgcaggtgcacagaagtcaagaattgaagttggggaacctctgcctacattacagaggatgtttggaaacacctggatgtccaggcaaaagtttgctggtgggcagagagctcatggaacacttcttctagggcagtgcagaagggaaatgtggggttgaagcccctacacagtgtccccattgggacactgcctaatggagctgtgagaagagggccactgtcctctaggccccagaatggtagatccactgacagcttgcactgtgcaagtgaaaaagctgca

SEQ ID NO: 12205 - DNA, 521 bp, Homo sapiens
  MAP TO AC008982.4; EXPRESSED IN PLACENTA, SIGNAL = 2.3; EXPRESSED IN LUNG, SIGNAL = 2.1; NT HIT: AF030246.1, EVALUE 0.00e+00; EST_HUMAN HIT: BI258154.1, EVALUE 0.00e+00; SWISSPROT HIT: Q13011, EVALUE 5.00e-34
gcgctgtcgtgctgttatagcagatgtaggacggggagggctatccggggtcacgaagggcccgagtcccctaaattcaggggtgcgtgtgctcccttttgaaggactccctaattcgataggcctgtgtcttgcagtctggggtcatcaaaggctgttcctttctccccaggactgacaggctccaactacccgggactcagtattagccttcgcctcactggctcctctgcacaagaggaggcttccggagtagccctcggtgaagccccagaccacagctatgagtcccttcgtgtgacgtctgcgcagaaacatgttctgcatgtccagctcaaccggcccaacaagaggaatgccatgaacaaggtcttctggaggtctgacctgcagatcctggaggcctgcctgcggggggaggcggggctgcgggactgggtgaaagtggaacgttgtgggaagatggacatgagggcagggtattcccgccccatttgtaacccttcactcgttgcttcaca

SEQ ID NO: 12206 - DNA, 597 bp, Homo sapiens
  MAP TO AC009489.3; EXPRESSED IN LUNG, SIGNAL = 2.9; EXPRESSED IN PLACENTA, SIGNAL = 3.4; EXPRESSED IN HEART, SIGNAL = 2.8; EST_HUMAN HIT: AW879188.1, EVALUE 4.00e-83; SWISSPROT HIT: P03355, EVALUE 2.00e-13; NT HIT: AF198490.1, EVALUE 0.00e+00
ccactccacattaccttcttttcaagggtctgtttcccttgaccccataactgttgtgggtgtagacaaccaagcttcaaaaccccttaaaactccccaactcttgtgcagacttagacagcattcttctatgcactcttttttagttatccccacctgcccagttcccttattaggccaagacattttaaccaaattatctgcttccctgattattcctggactacagccacatctcattgctacccttctagccaaaccaaagcctccttcgtgtcttcctcttgtaccccccgaccttaacctacaagtgtgggacacctccactccctctctggcaaccaatcacaggcccattactatcccattaaaacctaatcacccttacccagctcaatgccaggatcccatcacacaacaggttcttaggggattgaaggctgttgtctcttgcctgctacagcatgggcttctaaaacctaaaaagtctccttgcaattcttccattttccctattcaaaaactggacaagtcttacaggttatttcaggatttgtgccttatcatctaaattgttttgcctaaccaccctgtggt

SEQ ID NO: 12207 - DNA, 539 bp, Homo sapiens
  MAP TO AC016639.5; EXPRESSED IN HEART, SIGNAL = 0.98; EXPRESSED IN LUNG, SIGNAL = 0.52; EST_HUMAN HIT: AA399611.1, EVALUE 1.00e-64; NT HIT: gi16156979, EVALUE 0.00e+00; SWISSPROT HIT: Q61496, EVALUE 5.00e-45
tgcaaacacgtttcctcttgtactaccactgaagccaggaatgtatgtactaaaggcaatttcttccaaccatgcaggaacatcctgttgagcctttaaaaaaaattgacttcatatgcaacataaagtattaaatattggaaaagtttacttgttatatacacagtgcataaaatgtctactttcaacaacaaagtaagaaaactatccattccatcataaaagtttaacttacatctgtcaatacttttactagaggctgtgctaaatggttatccgattcaagatcaaaaaaggaaattgctctgccagtattcccacaacgaccagtacgcccaattcgatgaacatattcatcaatggtagaaggaagatcaaaattgataacatgttgcacattttcaatatccagccctctggcagctactgaagtagcaacaagaactgggcactttccaaagcgaaaatctccaagagcttgctcccgctctctctgttcccgatcacttgaaagaaaagaaagcatgttattagaacca

SEQ ID NO: 12208 - DNA, 521 bp, Homo sapiens
  MAP TO AC022085.4; EXPRESSED IN PLACENTA, SIGNAL = 0.84; EXPRESSED IN LUNG, SIGNAL = 0.87; SWISSPROT HIT: Q15596, EVALUE 1.30e+00; EST_HUMAN HIT: BF363236.1, EVALUE 0.00e+00; NT HIT: gi16160730, EVALUE 0.00e+00
tactgggatgcccttaacccagagaaaagcttacatactattagcttccagtaattccttggacacattgcaggcagagcttggtggcacagcattcacattctcatcttgttcaggagacatgggctcttgtttaatctgaactgatgagtctggagcagggacactgccatgggtttggaaagtaggagacgtggttatttgaagagaggctccggtgggtgatggagacacatgggaagatggaggctccagaaaaagtgggaaaaagggagtgggcagcagtgcggcatcaatggatgtttgagatctactgttccttcgttctcgtgtgaggctacagggaacctggtctgggtgctcagaaggttcatatgtttctagaatgggaaacatacatacatagaaatgcaaaaatgttatctgaaaagtcatttgtgtctgagctaatttgtatttttaaacattagaaaagaattataaataagtatattagtatagtccctcataattctccgaaa

SEQ ID NO: 12209 - DNA, 599 bp, Homo sapiens
  MAP TO AC000031.5; EXPRESSED IN LUNG, SIGNAL = 0.6; SWISSPROT HIT: P28161, EVALUE 6.00e-10; EST_HUMAN HIT: BI768076.1, EVALUE 1.00e-114; NT HIT: X56838.1, EVALUE 0.00e+00
gcgaatctgctccttttctgattccccgcctaccctcgtaaagcagattcactctcagcctcacagcccagccaagccgaggaggaggccacggtccctccccgcatcttgcaaccaaatctactcacacaggttgtgcttgcgggcaatgtaccgcaggatggcgttgctctgggtgatcttgtgagtcccatcaatcaagtagggcagctggatagatgggaaaccggggaagctcagttgggccaccaggctccccagcatccccttcccatatgcaagggcaaagaggagaccagggcctgctcatggcaggcctgagatagaaatactgtcacactaataaatgagctgggacacagaacatcatgcaagggctgtgtagacagccaagagtgagaggaattgggcagaagactcctgatcttaacacctctaagctggggagaggagatgcagtcagagacacgtcgcactttcccccaaaaccgccccttcccctgcacctacattgggaaagtccaggcccagcttgaatttttcattcagccactggcttctgtcataatcaggagctgtggtggggaagatgaagtgaa

SEQ ID NO: 12210 - DNA, 582 bp, Homo sapiens
  MAP TO AC011088.8; EXPRESSED IN HEART, SIGNAL = 1.2; EXPRESSED IN LUNG, SIGNAL = 4.2; EXPRESSED IN PLACENTA, SIGNAL = 3.4; SWISSPROT HIT: P53634, EVALUE 1.00e-103; EST_HUMAN HIT: AW964280.1, EVALUE 0.00e+00; NT HIT: gi11437515, EVALUE 0.00e+00
ttcccctttacaactgatgcagatcattatgaaatactggaaggcataccctacaatttaggaattggtgtggctgccactgctatgctctcaattgcacactcatcagttcctctgcggatccggaagtagccattctcaccccagccggtgccccagctgtttttaacaatccagtaatccatcccagaggctgagtcagtgccatagcccacaagcagaacagcatgattagtcagctcaaaggggttgaaagggtctcttagaccagtgtggtggtagatcccctttttgtagtggaggaagtcatcatatacttcaaaagcaactgccatgggcccatgatggaccaactcaagcttcatcagggcttcattgcagcctccatagaaacctcctacatagtggtactcagaggagtaataacgaaagcagtcttccttcattttgcatggagaatcagtgcctgtgtaggggaagcaagcttcttccaccagcccaaaatcttgggcgtactttcctgcaataaggtatgggaagccgccttcacagcctgaagatgaataacacacatggttaccc

SEQ ID NO: 12211 - DNA, 503 bp, Homo sapiens
  MAP TO AC010200.7; EXPRESSED IN LUNG, SIGNAL = 0.53; EST_HUMAN HIT: AW862979.1, EVALUE 1.10e-02; SWISSPROT HIT: Q9Y493, EVALUE 3.50e+00; NT HIT: AJ003128.1, EVALUE 3.10e-02
ggaaaagatgttcagggagctaccattttgtttctagctgtgattttataaaatgatagacacttttatctttgtgttacgttcctacccccagtcctccaaattatggatctgtgccatttgtaccgtggacttttctgttttctgaggatgttgcaacaaatactgatgcaactcctggttaactgataaagtactggccagggacaaagctctcttgtcctgagacccttcctcaagatttgcagcaatttcccaccacgtacctctgccctctcctcacagctggagagggaaagtcatggaatccttgtccttcctcttgtttccacctcttcaagattgggccaattgcaatggaatatccattggttgtgaggcctttgtactctgcaaggaaaagaaaagaaatgtgtgtatgtatgagtgtgtgatggagctaacttttctacaatgtctactaacatgtcctagcctttacttcattcgcctgtttccttctc

SEQ ID NO: 12212 - DNA, 596 bp, Homo sapiens
  MAP TO AL121874.12; EXPRESSED IN PLACENTA, SIGNAL = 0.7; EXPRESSED IN LUNG, SIGNAL = 0.72; EST_HUMAN HIT: BG119003.1, EVALUE 6.00e-42; NT HIT: U97084.1, EVALUE 0.00e+00; SWISSPROT HIT: P46100, EVALUE 2.00e-05
ttggctgatttcactatgagaagaaatttattcatatatgagtcatcattcaggatagtattttgtcttcagaaaatagaacactcacatcactacaaatgtaaaataatgaattagaatggcttaaataaaattccattagaaattaaggaatagaaaaaaatgataatgtcaaatcaatacttttacatatatatattcaataaccaatccttccacaagtgtaaaatgtaaataagccagtacaatacaatgaatgaatggaacagagaggtaacagcataattaccatagtctactgtactggttataattcaagcatgtggtaaatgtcattattaccttgttttcactggatgaatcttcttgaaccttaatacgtcgccttttctttttctgtttatagctccgctgattttcttccaactctgctttctttgcagacctgacgaaaatttaaaacacaaaataaaatatttcatgataaacttccatcaataagttatgtactattttaaaactgttctacctctgtatgcattcctaaaaacaaacagaaaaaaaatcaataggttcaaaatggatattccagcagc

SEQ ID NO: 12213 - DNA, 593 bp, Homo sapiens
  MAP TO AC008620.5; EXPRESSED IN LUNG, SIGNAL = 0.59; NT HIT: gi16159937, EVALUE 0.00e+00; SWISSPROT HIT: P15391, EVALUE 2.60e+00
gggagtatgaagctgccttggtttaggtgatggagcacaggtccacagacatgtgtgggtgcatctgtggcaggggagaaaagagcatgtgtccagactacagcttgttcggagctgggacactgacaatagagcacgcactgcgtgcgtaggtgggtgtgtctccgatcctccagcagtgacagggacgaagccttgccctgtgggatgactcaggccactggccaaatgttatgtctccatgttcaagtccctctccaacttctcctcctgggacagaaacagatggcagcggagcaggagaaggtgggggcagagttccaggcactgagggctttcctggtggagcaggagggtcggctgctaggccgcctggaggaactgtcccgggaggtggcacagaagcagaatgagaacctggcccagctcggggctgagatcacccagctgtccaagctcagcagccagatccaggagacagctcaaaagcctgaccttgactttctccaggtaagtctggctcagccaggggctcgagtcatttatcctaaggcatcaggaccagcagctagagaacagtgtcagtcctgggg

SEQ ID NO: 12214 - DNA, 592 bp, Homo sapiens
  MAP TO AC008775.5; EXPRESSED IN LUNG, SIGNAL = 0.45; SWISSPROT HIT: Q9U0S4, EVALUE 2.60e+00; EST_HUMAN HIT: W78702.1, EVALUE 2.10e-01; NT HIT: AF295063.1, EVALUE 5.70e-01
tgctgcttggtgctactgagaagaaaaaaaacctgcaaatcaggaatttggtagtaacaatttagaggtaaaactatatataaagataaaggctgtgccagttatcaacttattgttccctcaactccaaatacatccttcatttcctgctgtataaaaaataagggttctttaaatattttttcctttgctagctagatgatgttaagctttgtcaagagggctctaagggcactgcatgagaaaggttttctttccaggttctggtgtgttcactggcagcctcctgcagcacttgcagcttctctagtaccaagcacctacagcacagaagattccaacacacctgactcctgctgtgtatgggattcagctacacccaggggccagtcagcagcttccctagtcacctgtcccacgagggttttgttgttaatggccttttgaagaagcacttcatagcgaacatctttctctagcaccgtcataaatagatttctaacaagttctagaggacagattctagtaaggtctgccagcatagcagtgcaatgacattcagtaaaccacagctgtgcctctccaacaaggt

SEQ ID NO: 12215 - DNA, 510 bp, Homo sapiens
  MAP TO AL121928.13; EXPRESSED IN LUNG, SIGNAL = 2.1; EXPRESSED IN PLACENTA, SIGNAL = 1.4; NT HIT: gi14746247, EVALUE 1.00e-126; SWISSPROT HIT: Q92538, EVALUE 2.00e-32; EST_HUMAN HIT: BG386075.1, EVALUE 1.00e-126
tgggtcctagccaaactgtcttcactggcctaaggagactggtgggaaagaaaactagacaggaagctgtgtgcccacacagctccccgcttccccgctccctgccctaaccccactccaggtgctgctctccctgcgcattttgctactgatgaagcccagtgtgctatcccgagtcagccaccaggttgcgtatgggctccatgaactcctgaagaccaatgcagccaacatccactcaggtgatgactgggccacactcttcacactgctggagtgcatcggctcaggtgtgaagcctccagctgctctgcaggccacagccagggcagatgcacctgatgccggtaagccctttcccagggagactcaggctggcagataaacagttacaccccaggagttgggacaggaaaacaaaacacaggttactgtgttcagcagattaaacagccctggctcctgccatcacttccagagcttccagtgcccgctggctagtacccataa

SEQ ID NO: 12216 - DNA, 579 bp, Homo sapiens
  MAP TO AL109802.6; EXPRESSED IN PLACENTA, SIGNAL = 0.98; EXPRESSED IN HEART, SIGNAL = 0.97; EXPRESSED IN LUNG, SIGNAL = 1.7; NT HIT: gi14778388, EVALUE 5.00e-69; SWISSPROT HIT: Q9Z812, EVALUE 8.40e-01; EST_HUMAN HIT: BE828632.1, EVALUE 8.00e-69
caagggtgtgaccctgagaggtcatgtttaaaaaaaaaaaagttaagtacaaaggttattcattcttttactttagctgctacaggccagagcggatggtcatttccagcagagagccctgcctgctgccttccacacatggaacagactctggcgatggcgccaccaggaaaatgtcctcagtgcaagagcaacacgtttccacaggtatgttgcgcagctcctgtctgcactggggcaggtgtttcaaatctaactctgacaaccacacagcccatttgctgtgcttttcagcttcccagaccccaggccctagtacttcctggattttcagtaatgtgggctcattgatttcatctagcaggaaaagacaagacagtgtttcccctgggaaatcttttgtccatctttatttatttattttttttgtgtgtgtgtatatatgtatttattaaaaaaaatgtgtagtgtttaatctgaacagccagtggcttagtcaagttaacatatacatgaagagacttattatgaggaattgacttacactattatggaggctgagaagttccatgacctgcc

SEQ ID NO: 12217 - DNA, 568 bp, Homo sapiens
  MAP TO AC016594.5; EXPRESSED IN LUNG, SIGNAL = 0.73; SWISSPROT HIT: Q05347, EVALUE 5.40e+00; NT HIT: AB020695.1, EVALUE 3.00e-98; EST_HUMAN HIT: BI518969.1, EVALUE 1.00e-98
tcggaagtgacacaaagacaagtttattattttttaacttagtccatttacctgtatacatgagagaagacagtggataccgcaagccaagcgcatcttctgtaaaggaatcaacaaagtcctccagcatgtgaagcccaaaatctttacctctgtatttctttcttagaaacattgtatcaagaactggcaattggtaactttgggtaagaaaagaggcacatatgcttcctgcagtaataagaacagaaacccaataatttctcacattaaaaaatatacatacatttagtgacatgagttaacagtctttctaaaaaaagttttcttctatatcaaaaaacgttaaatatataaatgttataatataaagtgtttttcagctactattagacattataatgtataatgtgataatgaaaggagctatgtattttatgtttgctagtagtatcatcaaatataggacaaatagctcagtaccatattctaaaatatatacttcactatatgtattatatatataccatcactgtctatagactcatgcaactctaaaactcatcaa

SEQ ID NO: 12218 - DNA, 591 bp, Homo sapiens
  MAP TO AC002380.1; EXPRESSED IN LUNG, SIGNAL = 0.42; NT HIT: U39664.1, EVALUE 1.00e-14; EST_HUMAN HIT: BI463696.1, EVALUE 6.00e-08; SWISSPROT HIT: P34433, EVALUE 5.70e+00
tgcaatgctgatgctttctctatgctatgaactaaattgtgtccccacacttcacttgcacacaattgatatgttgcagtcctaactcccataacctcagaatgtgactgtatttggaaacagggtctttaaagaggtaattcagttaagaatgaggttattaggatgggtcttaaatctaacatgaccggcatcctgataagaagaggagatgaggacagagacatgcacagaaagaagccacatgaagacagagagaagacggtcatctacaggccaaggagagagtccacagagaaaactgatcctgctgacaccttgatcttgggtttctagcctccaggactgtgatcaaacaaaatgctgtaatttaagccactccatctgtggtactttgttacgggtgtcctagcaagcaagcgcattatatcccaacgctcctgagtgatcatgcgatatagatttgagttcctgagaaaggccttcctaatctctcttttctgctgcttcctggccaagtgcatgggtggaaaatggggtgcatgggtggaaaatagaaaatgggtgcaaggatagtgaagggcacctcca

SEQ ID NO: 12219 - DNA, 500 bp, Homo sapiens
  MAP TO AL031660.16; EXPRESSED IN LUNG, SIGNAL = 0.65; EST_HUMAN HIT: BE540164.1, EVALUE 7.00e-01; NT HIT: AJ276505.2, EVALUE 4.70e-01; SWISSPROT HIT: P11088, EVALUE 2.10e-02
taagcaggtcagattagcaaaagcaaaacctacagacaatgttcgcttaaaattagatgataaggtatccccatgaacaccaaaacacaagcggggaagcacagccctcccatagccacctacatgtcatcaggtccccctacgttcccccagggaggcttccttggtttagattctggcccttggtgccccatccagcagccaacagagggaaacaaggagccctctgatggacttaagaacaggagaatcccaaaagagccagcaggtattcacgaggaagcaaggagggacaactggagacagcagcagaagctgggagggtctcgcccagtccgggagcaggtgagagtcagcaaggactaagggactgcagcggtagagccttgagaaccctcaacactgacccacttggcttcccttccaggacaggatcacatagcactgagcatggaatcaaaatggagcaggatctggacaatcaaaaggaaggaaggaga

SEQ ID NO: 12220 - DNA, 534 bp, Homo sapiens
  MAP TO AC026733.3; EXPRESSED IN LUNG, SIGNAL = 0.62; SWISSPROT HIT: Q9Z1S5, EVALUE 1.30e+00; NT HIT: AF224669.1, EVALUE 7.00e-28; EST_HUMAN HIT: AI950186.1, EVALUE 2.00e-20
tgccagcatggatttcataacatcgtagcataacgtattattcacatgtttgtggtgatactggtataacaaacatactgtgtgactggtcatataaaagtatgacacatacaattgagtatgggacataattgatcacaagaaatgactatgctaaaataatgataaaaagtatgtatatatatacacacacacacacatacatatatacacatatgtatatatacaaaaagtacatatacacatatatactttttatcacttttttagagtggacctctttatcacttctttacatatatatatacactttatcactattttagagtgtacttctattgtaaggcagcctcaggcagggccttcagtaggtattccagaagaaggcattgttatcataggagataacggctccatgtgtgctattgcacctgaagaccttccaatgggaaaagatggggaggtggtggaagacagcgacattgataaccctggccctgtgtaggcctaggccaaaatatgtttctgtgtctt

SEQ ID NO: 12221 - DNA, 595 bp, Homo sapiens
  MAP TO AC040171.3; EXPRESSED IN HEART, SIGNAL = 3.2; EXPRESSED IN LUNG, SIGNAL = 1.4; SWISSPROT HIT: P10267, EVALUE 2.00e-03; NT HIT: AF240786.1, EVALUE 2.00e-96; EST_HUMAN HIT: AW886566.1, EVALUE 0.00e+00
gcctggagctgaggtgttagatcaggtggcagaaaatctttatggattaaaccccacgacttgaattaagtctattggggctccactgtagtaaattttggaattacgtttctctgtttaatcggtttgtttttagtgtgccagaccagtcaaagaatcctgcatcaaaatcgagagaacgaacaaaccttcatcgccatggcacatttatataaaaaaaaagggagagatgttttgggaagtgaggaaccccaaacagagggaccggctgaagccatggcagaagaacataaattgtgaagatttcatggacatttattagttccccaaattaatacttttataatttcttacacctgtctttactggagtctctgaacataaattgtgaagatttcatggacacttatcacttccccaatcaatacccttgtgatttcctatgcctgtctttactttaatctcttaatcccatcatcttcgtaagctgaggaggacgtatgtcgcctcaggaccctgtgatgattgcgttaactgcataaattgtttgtagagcatgtgtgtttgaacaatatgaaatctgggcaccttgaaa

SEQ ID NO: 12222 - DNA, 514 bp, Homo sapiens
  MAP TO AC013559.2; EXPRESSED IN LUNG, SIGNAL = 0.74; EST_HUMAN HIT: BG109224.1, EVALUE 0.00e+00; NT HIT: gi15304430, EVALUE 0.00e+00
tggtttcaagttcatttcatgctatatatatcagaattacatgtgaagggaactgagttttaattctctttccacagtctatattcaagagctcaccactgatgggctgctttctctttggcctgccactgggtgtcatcagtatcatgtgctatggaatctacacagccgacacagatggaggttatatagaagaacgatatgaagtgtctaaaagtgaaaatgaaaaccaagaacagatagaagagagcaaagaacagcaggagcccagcagtggaggatctgtagtgcctacagtgcaggagcccaaggatgtattagaaaagaagaaagattgagacttgatgactataaaatatttgttaggacttcaaattattgaagagtctatttattgaatttagacatttaatcatgatctttacagaaaagaacatgttattcgtattttgctaatatcaactgcatggattaaagtagtccctccatacatggggaagtgtttggagcaaag

SEQ ID NO: 12223 - DNA, 522 bp, Homo sapiens
  MAP TO AC010596.5; EXPRESSED IN LUNG, SIGNAL = 0.98; NT HIT: AF055373.1, EVALUE 5.00e-01; EST_HUMAN HIT: BF217070.1, EVALUE 4.70e-02
gcaaaggtctctgggatgagaacatttaagtaagatagggaacacctgtatatatcttatatatcaggacttttataagtcattacttacagggaaaaagaagagctgaaaagctgtcaactgtctaagggccaagactgtgcgttggccactacttagtatagcactgtccacaataagtttatttgaagcaaatttatggctttttatatcttcatcataaaagcacttgttcttcattttgcaagtccttaagttgtggtaaaaatatgttatcatacatatcacatataataagtatcacacattgctgaatatgactttttggtgtgaaatgcaagtttcaggatttccactataactgtgaaactaaagtaaattttcaattgtttatgacctcaatgggccagaaaacgagagaaccaacttatcagtatgaaaggcaagtttcaggattccagtataactgtgaagttgaagtaaattttcaactgcttatgacctcaatgggccagagaaaga

SEQ ID NO: 12224 - DNA, 512 bp, Homo sapiens
  MAP TO AC016831.1; EXPRESSED IN LUNG, SIGNAL = 1.2; EXPRESSED IN PLACENTA, SIGNAL = 2.9; SWISSPROT HIT: P52739, EVALUE 3.00e-26; NT HIT: U09410.1, EVALUE 0.00e+00; EST_HUMAN HIT: BG531197.1, EVALUE 0.00e+00
ggaaagatccctctgctgtggcattaagtttggggaggggaattgacttgttccaacagaaacagaaacaacaggaaatagcttaactttggtccacttgtctgttagctgaacgacagtcatactgcctataatcggttcagaaacccaacaattatattttaaaatatattcatgtgtaatttcattctaaaactggcatagctgttctgccctcattctctgccttttcagcttcagaatgtgctgtcagcacggtctctaatcctcagcatcttcgtgatcttccctggcagcctcagcatctgcttggctaggctctgtcttctcttgggtcatgatttctggggtcatgtggacgaagcctgcttctggaagttcactttgtacttccactggcatctgattttcccgttccacatgcggctcctctccgtgtacttcagtaccttcttcaggctgaattcagcccactgctaggtaactcacttggacctgctctggaagctcac

SEQ ID NO: 12225 - DNA, 580 bp, Homo sapiens
  MAP TO AC005081.2; EXPRESSED IN LUNG, SIGNAL = 4.1; EXPRESSED IN PLACENTA, SIGNAL =   5; SWISSPROT HIT: Q15056, EVALUE 8.00e-20; NT HIT: AF045555.1, EVALUE 0.00e+00; EST_HUMAN HIT: BE256759.1, EVALUE 0.00e+00
aaggaaaaatgacgcagcaccgcagcccaaacgcccccccacggcggccacctctgctcctccgaggaaccccatgtgctgctgggaaaacaaggagcaggagaaaaaggacagaaggaaaatggggaagcagcggaagaaagaaaaaaacgcacaaacaggcactagatagatacagcaaagcccagaatgtactaaaaaccacttgttaacagctgacatgcactcacaagctgtgtttccgctgtgaggaggccaatggcaggcgcaggagtggcggctgcaggacggctgcccggggactcaccaggctgtggtcctgctctaaccccccacgccccattccctcccaaccgcaggctcattcttgctccttttgaacgacttcctctctaggcctggcacccccgaagatagcagagttgggattggctacttgattgaggggcgtcgcgactgttcgaggtttaagctggagtcgtggtctctgtgctctttcctctgggggagaaaaagcagagtttgtcagagtgtggatcccattccatatccagcaaaacgaccatgctgatgttgctgt

SEQ ID NO: 12226 - DNA, 506 bp, Homo sapiens
  MAP TO AC010629.5; EXPRESSED IN LUNG, SIGNAL = 0.67; EST_HUMAN HIT: BG426300.1, EVALUE 2.80e+00; SWISSPROT HIT: P20311, EVALUE 1.60e+00; NT HIT: X64587.1, EVALUE 1.90e+00
cactgccacgcatcataaagctaagtggctctgacaaggatctgaacaacagggctctaaaatctgctgacaacactaaaatgggagttgcaaagaagaatgaggagctgtgtgaccaggtttaaaggaatctcaatcatttaggtaattgggccagcagatggcaaatgcagtgcattctggaagactgtgaaataattagtctgaaagacagaagctaatctagtaataatgatcttccatttatgtagcattattttttacaaagcacctttcaccaagtggttcccatagtgccttctgtaatgatcatgcatggtatgttaatgtgttcacagtgatagaacaggcactcttggtggaacagtgtaatctgcacgactgtcgcccagaagagaaggtgatgcccgaaggagaggtgggaaactcccaaggtgattcgccaaatagaaataccttttggacactaaggttagagaactaaaccagcaggatgtttgcttgaa

SEQ ID NO: 12227 - DNA, 534 bp, Homo sapiens
  MAP TO AC026730.3; EXPRESSED IN LUNG, SIGNAL = 0.5; SWISSPROT HIT: P39940, EVALUE 9.90e-01; EST_HUMAN HIT: BG107680.1, EVALUE 4.80e-02
ttgcattgtgtctccaatagctattctagatggctctatacaccaaagagagtaggtagtaattattagcttagctcactgttgaactcagttatccatttatagaattttgacttcccatttttaagaacttgggatctgcaggtttatcgatactggttcatggcagggaaggacagctacataagaggacagagtaagcgatttattgatcttgaagaagtacaacacttggatactttggcttttcatgatggtggacaagcaggcaaagaaaagaaagtcattttctagttaaaataatcaatcctcattaccaagaataactaaggtttttaccacacaatgaaaacaagaagtattctgaagttgaggacatttacttaggtgtgtttagtgttccctatcaaataattaatgtcactgggcacttagaagaattaaaataccaaaaatggaaggaatattaggagttcagactatttagtcattgaagactttggtctccccactaggcaaagtaaaccagccaaa

SEQ ID NO: 12228 - DNA, 600 bp, Homo sapiens
  MAP TO AL021306.1; EXPRESSED IN LUNG, SIGNAL = 0.86; EXPRESSED IN PLACENTA, SIGNAL = 1.1; EST_HUMAN HIT: BI823165.1, EVALUE 2.00e-32; NT HIT: AF376048.1, EVALUE 1.50e-01; SWISSPROT HIT: P34050, EVALUE 4.50e+00
attccaagcattcttccacgtagacctatttatctctcttttttatttttattgagaaaaccaagacccagaaatgcgaggtcactcaccaaaggtcacacagtctcaagaggcagagctgtcatttgaccctgggtctttccacctccagatgcacctgagcatggagtgtgcagggggaggtggggtctgggtcccagaaggagctgaggatctcctcactctcccttcccaacttgtttattctccattcaaagcacagttattttctttgcaagaccaacgaggttgattcaaaatcagagtcattttaacgtcttaaaaatatcaagtagagcttagaaaattcaagcactagagggaaaaaaattctcaagttatttagaaagaaaatttaccttgattctgagggtccttgagctttctgctttttgctccttttttgggccatgctgagtgggggccggggctgtggtgggaaattgagagttgcatgagatctccagatgcttctcagcccctcagtgccgcggagaaaagaggaaaacactcatctggacgatccgtgtcttgcagactcggtctcaaatcctttggggt

SEQ ID NO: 12229 - DNA, 542 bp, Homo sapiens
  MAP TO AC017036.4; EXPRESSED IN LUNG, SIGNAL =   1; EXPRESSED IN PLACENTA, SIGNAL = 0.64; SWISSPROT HIT: O51878, EVALUE 4.00e-02; EST_HUMAN HIT: BF814577.1, EVALUE 5.00e-05; NT HIT: U66061.1, EVALUE 2.00e-12
ttgggcaagttcattgactgattatcacatgactcactgattctgttttcttttttctgtctcttttccctacttgtttcagtttgaagcatttctgttgctacatctgcaagttcagtaatctgttcttcttcaatatctaatgtatcattaatctcattcagtgtatttttcatctcatatattgtaggttttatctctaaaagtttttaaaaaatctctttcataccactgcttaacatgtatagtctttcctctaactttcttaacatatggaatacctatgtaattttcttttctacaaagtctgtcatctttgtcatttctgggtcactttgattgattcagttgatttttcttctcattatgggttgtattttctttctactttgtatgcctggtaattttttattcaatgccatatatcgtgaattttttcttgccagattctagatatttttatattcctaaaaatattcttcagcttgttctgtgacatgttcaagttacttgaaactgtttcagccttttggtcttgcttt

SEQ ID NO: 12230 - DNA, 559 bp, Homo sapiens
  MAP TO AC008600.4; EXPRESSED IN LUNG, SIGNAL = 0.64; SWISSPROT HIT: Q9ZHB3, EVALUE 1.40e+00
gagagttgaatggggtgtgggctgtattatagattttcaaaactaacttcttccttcctttgacattatactgagcattccatacaaatccaattttgtattagttctactctcagctttctttgactctactctctttctgccaaactcttttagagaaaaataaataaccatacagctctcacccattatagactcattttgcccttagtgtcgcttgggaatctccaccaaaccacccttgatcccgagaactccctcctgagcaataattctcataagtcagcgtgctgcttacataattataatagtacacttcacttcgacaaacctttatggagaaccaacaccagaccaagtgcttggccctgcggtaaagcaactactaaaaatcgcaatccttgtctgggaagtgatgcagacccacggtgtgaacaaaccaaatggtttcataagtcacgattgagctctccctctcctcttcactttaaaaattgcagctaccttcttacgtgacagttttagagaagggggtagagctgcctgtgagcaaatgaaa

SEQ ID NO: 12231 - DNA, 520 bp, Homo sapiens
  MAP TO AC009567.8; EXPRESSED IN LUNG, SIGNAL = 0.71; EST_HUMAN HIT: BG259903.1, EVALUE 3.00e-34; NT HIT: AF288742.1, EVALUE 3.00e-30; SWISSPROT HIT: P03203, EVALUE 8.20e+00
taacctgaaagcccacttgcttcaaactgtcccatttttctggaccaaaccaatgtatatcttaaatgtatttgattgatatctcgtgtctccctataatgtaaaaaaaaaaaaaaaaaaaaattgagctgcatcccaaccaccttgggcacatgttctcaggatcttctgagggctgtgtcctgggccatggtcactcatatttggctcagaataaatctcttcaaatactttacagaatttgactttttctgttgacataagtattagagctatgctttcttttcccattacatcaagctacaagtaagaacaatatgattatttataaaatcaggtaaaaaaatcaaattagctttttccaataaagtggttgagcccagagtaattatgacatctaggaaagccttccctccatttgtgttttttagaaattctattacctgaatcccttgtttgaactgggtctgtcttacaggaaattttctatgcattatcaagttctgcatgtccacacgag

SEQ ID NO: 12232 - DNA, 591 bp, Homo sapiens
  MAP TO AC006118.1; EXPRESSED IN LUNG, SIGNAL = 0.67; EST_HUMAN HIT: AU140604.1, EVALUE 0.00e+00; NT HIT: gi16191829, EVALUE 0.00e+00; SWISSPROT HIT: P10267, EVALUE 6.00e-16
gagaggccagagaccaaatgtcctgttttatctgtagttgatctttccggaagataagcagcctagacttgagtttccagatggatgcaaccaggtgcatgtctgaggcacagagacgggtatttacaacccatggtaacattaaatgcagtgccttcttctcctggttgagcagggcaacggtcatctgtggctccaggcagtcacacactatcgttagtgtagatttgtgcaggagcatctaccctggtgagaggtcgaataagtggaggaagaggcacataagcccaataagaataattatgtgtagcaggtaaatcagtgtgagaggaaactggtgagacagaaagtataaggaggagaatcattaaataaaacctagtgtaaatgagattgaaggctgaaggaggaagagaagaacagagggatgttattttcaggctaatagaaatggtgagatttttaggtttgtaaggagaaaaagaaaggtaatcaggagaagtgggattagttagatgggtctccattgccatcagggaggattgatttaaatccattgtgatttggtgtgcctttttctgagcagttggc

SEQ ID NO: 12233 - DNA, 537 bp, Homo sapiens
  MAP TO AC011248.8; EXPRESSED IN LUNG, SIGNAL = 1.2; SWISSPROT HIT: O14727, EVALUE 7.00e-33; EST_HUMAN HIT: AL603576.1, EVALUE 1.00e-109; NT HIT: AF098874.1, EVALUE 0.00e+00
tcccatccctaccttcactgcctagctaacttttattctttctccaaactcctgctaagatgtcatctcattcaggaagcttgtcctatccatcccctcccttcagagagttaacatatccttcctttgttctaactctgtaccttatacttgtttctaccattcaatttatcacgtattgatatatcataatatttttacatgtctatctaccttactagactatgaaatggactaagacacttaccttctaaaagggaatgatctctaacagcttctgcagctaatacagacttcccacagcctgccattccatgtatggtgacccatcctggttcacctttcaatttggagagcttctgctgaattgcattcaccagcttcttccttgtgacaaaaacaactggcctctgtggtactccaccttcacacaggactgtccttactaaaatccaaaacaaaacaagcatgaatgaatagaactttggaataattactgaagtaataccataaaaaacaaagagcaaagctgaggct

SEQ ID NO: 12234 - DNA, 548 bp, Homo sapiens
  MAP TO AC005199.1; EXPRESSED IN LUNG, SIGNAL = 1.5; NT HIT: U07563.1, EVALUE 3.30e-02
ggggacttaccttctctgggacttggctttgtcatttgtaaaatagtgataagggtagtgcctacctaattaggttgtgaggattcaatgagagaataaattcgttgccacatatggctcagagttataatctgtgtgttatctatgtgtttttctactctgggcacttcaaaagttgttttgttattgttgttggtgttggtaatggtggtggtggtggtagtggtgacggtgttaaatgcggttttggtggatgtggtggtagtggtggtggaggtggtggtggtgaagatggtgttgaaggtcatggtggtggaggtggtgttggtggtagtggtgatggtgttgaaggtggcagtgttggagatggcgctgaaggtggcagtggtggagatggtgctgaatgctgtggtagcggaggtggcggtggtactggtactgacaatggagatggagtgataatgaggtggtgatgtttaatcttttcctagtctacttggaaaaaaaagactaaaagaaactgcaacccaaaggcaagcaatggagac

SEQ ID NO: 12235 - DNA, 543 bp, Homo sapiens
  MAP TO AL138499.1; EXPRESSED IN LUNG, SIGNAL = 0.46; EST_HUMAN HIT: AI817198.1, EVALUE 7.00e-69
tgcctgtaaatgacattgcggttttactggtcaggaaaatgaatgatataaatttttaattctaacctaaaacctgcgttagtactaacctgaggaaataacatggttgtttgtaagctaatcaagagcccttaaactccattacataaatgatacacttaccctttgtattaagggactaacggcttcgcttttcaacaaagctggatcttctggcacacgctcagaagatagccagtacttcagagacagattgctttgagggcactggaaccgctgaggggcagagtaatcctaatgagaaagaaaaaagaggacgcctctggagttaaaataagacaatgcatctgtggagaacacggtgactgaagactggcagaattctcaatatctcaggccactatacactgcgcagttttcatttgtattttggaggtgctctagaaaacttagaaatgattagaataaaaagtatggatacttttaaccagcccatgtacaggaaattctgttggtgtagaaacggttctgctgttcattcct

SEQ ID NO: 12236 - DNA, 505 bp, Homo sapiens
  MAP TO CHR22_184_2.0; EXPRESSED IN LUNG, SIGNAL = 0.51; EXPRESSED IN PLACENTA, SIGNAL = 0.51; SWISSPROT HIT: Q9QZZ4, EVALUE 1.20e+00; NT HIT: M94081.1, EVALUE 3.10e-02; EST_HUMAN HIT: BI028582.1, EVALUE 1.00e-05
tccgattcccaagaacagtcctctgactgtggcggtgtaggtgagagccatcgcagcaaaacagtatctgggctgggtgcacagagtgggttacagggatgggaggggaggaccacactagctggaactcttatgagaatcaaattaaatcaatgcatgtcggagttttttcatcttcccatccctgggtgcaataatgctgataaccacttacatgtctcttaccataagccaggcactgttctaagtgctccacatggattcactcattttattcttacctccagatgtgaaaactggggcacaaaaaggaaagtaacttgctcaaggtcacacagccagtaggtggcaaaatgggtacttgtgcctggaaaatctaggtccacagcccctgctcttaaacaccgtgatgtgctgcattcgggtgtggccagggccatgctccctcatgtgctgtccagtatggcagttgcctggcacgtgtggctacccacgtgtcaattca

SEQ ID NO: 12237 - DNA, 558 bp, Homo sapiens
  MAP TO AL031283.26; EXPRESSED IN PLACENTA, SIGNAL = 0.45; EXPRESSED IN LUNG, SIGNAL = 0.51; NT HIT: AB067524.1, EVALUE 7.00e-22; EST_HUMAN HIT: BG332108.1, EVALUE 1.00e-82; SWISSPROT HIT: P17536, EVALUE 3.10e+00
ctctgtcctcccgtgcttagacagggacttaagttgcatctctcccctctcccattccccttccctcagggccccccacccctgtatgttacatcttttttttttttttcctttttctttttctcaccagttaatagagaaaattacccaggtcactgaggacaacatcaattttcagcagaaaaagtggaccctccagaaagagacccagctgagcaactccaagcaggaggagaccaccgagaacatcgagaagctgaggacgtcgctggacagctgccaggtggcccctccttacgctttccacaaatggtctctttgtctaatttttgtgcggcttatttgggaaattgcccagcttttttggagcaagttgggcagaaatgcttggcttttctatccactttttcctcttgttggagaaacttgttggagaagaaaaaacaaagggcctaaaaaaatgcctcccgggagaacttggcgtgtccaaaaaagatgcctgagcatcttcaattactgactttgagcggcccgcatccccagccaaaaagaaattgt

SEQ ID NO: 12238 - DNA, 586 bp, Homo sapiens
  MAP TO AC011977.3; EXPRESSED IN LUNG, SIGNAL = 0.46; NT HIT: gi9626821, EVALUE 1.00e-04; SWISSPROT HIT: P31554, EVALUE 7.40e+00; EST_HUMAN HIT: BE067351.1, EVALUE 2.00e-04
acttgctgtcgcttctttccctcttcacctctctggcaaagaatttaggatcttaagtcatactgctgactctgtctactcaggaaaccctcagaggattgtgtcagttttcaataatgaagcaatgactagtagtacaatgaaagagtgaatgagccttcctatatcttatgaaaagtgattctgatactgaagaccaggatagaatcttcacttctgaaactaccaatagtaattcacgtgttaaaatcatcaccatcatcatcactatcaccatcctcattgctgccatttattctgtctactaaagtaagggaaagcactatgttaaaagcttttacatatatgccacagttcatttgcaaagatggtctcaataatttctcccatgtctatgggcaggtctttttgcagtgtgactttgccactctttctgtcaagaagtagagtttattttccatcctcttgcatctagtctggtcttgtacttgttttatcaagtaaaatgtggtagaagtgactaggggattcctgagcttcagtcacatgaggccttgcagattttgcagcttgaactcttgccctc

SEQ ID NO: 12239 - DNA, 586 bp, Homo sapiens
  MAP TO AL137800.2; EXPRESSED IN PLACENTA, SIGNAL = 0.84; EXPRESSED IN LUNG, SIGNAL = 0.82; EST_HUMAN HIT: BI770442.1, EVALUE 0.00e+00; SWISSPROT HIT: P38483, EVALUE 3.80e-01; NT HIT: AB002363.1, EVALUE 1.40e-01
tgtcttcagtttttcctgcgctggttttatatgtaatttctcttccttgtttaggtttgcagctagaagacagtaaatctagcaatggagcccatatatgaggagtacctagcaaatcatggaacaatagtaaaaccatattactggctaagcttctctctcgattgctctaattgtccttaccatattcgaacaggtgaagaagcaagagtttccctcacagaattttgtcagatttttggattcccttatgggacaacatttcctcaaacaaaacacctcacattttatgaactaaaaacttcttctggtagcctggtgcaaaagggccatgctagcagttgcactgggaattatatccatccagaatcaatgctctttgaaatgaatggttatcttgactcagccatatacaataatgacagcatcaggcatatcattctgtattccaacaactccccttgtaatgaagctaaccactgctgcatcagcaaaatgtataatttcctgattacgtatccaggcatcactcttagtatttatttttctcagctctatcatactgagatggactttcctgcctcag

SEQ ID NO: 12240 - DNA, 597 bp, Homo sapiens
  MAP TO AC020588.4; EXPRESSED IN LUNG, SIGNAL = 0.47; SWISSPROT HIT: P40526, EVALUE 4.40e+00; NT HIT: gi13194196, EVALUE 6.00e-47; EST_HUMAN HIT: AU185749.1, EVALUE 9.00e-47
gtgggtttttgttggtgctccttatcaagtggaggaagttttttttattcctacttcattgagtgtttgcattatgaaagagtattgaatttttgtcttttctgaattttgccttttctgaaataaattactttttaaaatgactgtttttcttgtttttttatccacagagactgacttgcataccaaatgtgtggtggatgtggatgcaaacaaggttattcttaatcctgtaaatacgaatctttccaaaggagatgcccggtgagttaagaaacagtgctgtgctcaatggatgtttaagtaactggaagcaactgtggctgctgaattaagttgcattgaatagatatcgaatgcctaccctgtagagacatattgctgtcttctgtgagcctgtactcaagttgaagagatgaagtctataatatgggatgacagtgtgcctgaatgagtattagaggtagtaattgtattagaagcacacagaagagactgagtgttatgttgagaagcaattgaagaaggcttcttgaaggaggtgcagctggctggaggattagctaggatgtaagtcggttccttagcatgagtggc

SEQ ID NO: 12241 - DNA, 564 bp, Homo sapiens
  MAP TO AC011802.4; EXPRESSED IN PLACENTA, SIGNAL = 0.62; EXPRESSED IN LUNG, SIGNAL = 0.66; EST_HUMAN HIT: AA421848.1, EVALUE 2.00e-04; NT HIT: AB026898.1, EVALUE 6.00e-07; SWISSPROT HIT: P08547, EVALUE 2.00e-13
taccattccctggagtttcgtgcactggaggaaatagttcggtaagtgagaactcaaagaaaataataaaaatgggcatgtacctaggagtggaattgctggatcatgtggttgtcttgtgtttaactttctgaggaagtgccagacttctccagagtggctgcaccatgttacattcccatcggcaatggatgaaggttctgatttctccatgacctgctcaacactgttgttactgttattgttattgtcatcctagtgggtgtgaagtgatatcttttggttttgatttgcatttccttcatgactcttgataaattgagcatattttcatgtgtttattggccatttgtatatcctctttgtcaagtcatttgctcattcttaatattgggttgtttgcctttttattgttcagttgtaagagttttttctatattctagataatagacctctatcgcatacatgatctgcaagtacttccgttatactaaaattttctctttggcaaacgtttttaactttgggtgtcttcatatttaagaatgaagcttgcagcacac

SEQ ID NO: 12242 - DNA, 500 bp, Homo sapiens
  MAP TO AC004493.1; EXPRESSED IN LUNG, SIGNAL =  14; SWISSPROT HIT: Q06584, EVALUE 2.70e+00; NT HIT: gi16165307, EVALUE 0.00e+00; EST_HUMAN HIT: AU140402.1, EVALUE 0.00e+00
ccgtctccggctgactggtgaagttcgagatctggacctacgtcggcttatcaggggggttctggacctggatcgccggtgagtggctggagaggctcgagatctagagcgtttccacggggctggtgatgtgcgtgagcgagaacgcttccgactggttgggggtgtccgagagcggcctcttcggcgtcgagaggaggtccgggaactttcctgccgggcaggtgaccttgagtgataaccagagcctcccctccgccgccgagtaacccgcgaccttgaccggctccgctgtcttcgccgagaggttgactgagaagatccagacctatctcgacgtcgggttgttcttgttttctctctccttgagcgggaacgggacctctggagtccacgaggctttggcgaaggagagcggcctctccttgaggttgtcttagtgcgtggagatgaagctgagcgccgtcggcgtgaagacctcgatttttcggctggctccg

SEQ ID NO: 12243 - DNA, 523 bp, Homo sapiens
  MAP TO AF025422.1; EXPRESSED IN LUNG, SIGNAL = 0.98; SWISSPROT HIT: P13595, EVALUE 9.60e-01; NT HIT: Y10751.1, EVALUE 8.00e-03; EST_HUMAN HIT: BI041633.1, EVALUE 1.00e-76
aagctccgccctttccgctgccaggctgcgccgcccgaggctatttaaacccaccctggcgggcctctactcagatcttcacagagcggagcagcggccggagcgttttgcgggctctgcgtggacttggagcttacagcgtcttgcgacttggaagcggattcagaggacaggacagaacacttgggtaagtgaatctctgtctgtctgtctgtctcattggttggtttatttccattttctcaaggagcacatacctcacaccacacacacacacacacacacacacacacacacacacacactccttcattctgcgggttaggaaattggtaggggtccttgggagctgcaggtttcctaatcatgtctgcacctaagaacagtagggtcttgtctggctcttcttatgaaccgtcccccagcccggactccccaagatccatgctagcctcacccagcttctccctctctcctctcagaaactcagacttaagaggaagctcctcaccagggatccgga

SEQ ID NO: 12244 - DNA, 515 bp, Homo sapiens
  MAP TO AC007227.3; EXPRESSED IN LUNG, SIGNAL = 1.3; SWISSPROT HIT: Q62178, EVALUE 5.00e-14; NT HIT: AB029394.1, EVALUE 0.00e+00; EST_HUMAN HIT: AW965845.1, EVALUE 0.00e+00
agggtcctgggacaggcaggttttttagggtctcttgaaacactgtgtttctggagggtccctggaatggccagaactgaaggatcctctccaggttcttcaatatcagtgtaggagcaggtctgggggtagcccccaccctgttagagagctcatgtgcttggtagaagggagtcccataggggaggcagactgctgtgcatcaccctgctgagtgtcatcagtgatgcagagtagcagaagctcctctcaggggagaaaggtggtcttttgtgctgctgtcatcctagtcagggctgtgcttgggccgcccagccagcatggccaggtgcctgcaccgcagccccggcctgtgcctagagtttaagctacctcagtgcctaggcagttgttgtcagcgtccacatcactggcagaggtcctgcattccttgggagactggaggtgttgctctctgcttaacggggccttctccccagggcgcagggtctcacagccctgaaccttgccccgag

SEQ ID NO: 12245 - DNA, 502 bp, Homo sapiens
  MAP TO AJ239328.2; EXPRESSED IN LUNG, SIGNAL = 0.94; NT HIT: AL163303.2, EVALUE 0.00e+00; EST_HUMAN HIT: BI020456.1, EVALUE 1.80e-01; SWISSPROT HIT: O76082, EVALUE 9.10e-01
gcccaggcaaccctcactgctggctggagttccatctttccttgcttggaacaccgcaccctctgcagggccccagtggcacggctctcacatgctgttcctcccagcttgcccttctcagaacgagactttgcatctttacaggaccctcgggcgactcactggcccgtggaggtctgagaaacactagtcaggaggcctgagaaggaagaacatgcatccagttggaagcccaggggagacatggaatggagagagaaaattccaagagacacacagagaaccttccaaaattagagaaaccatcaacaattcccaaacaggataaacaaataatacaaataaactcgacctggaacagttgagtggatagaaacagcacacgtaagatcgggtgtgcacgaggagatgcgaacaccgggaacagtcgagtgggtagaaacagcacacgtaagatcgggtgtgcacgaggagatgcgaacaccgggaacagtcgagtggg

SEQ ID NO: 12246 - DNA, 537 bp, Homo sapiens
  MAP TO AL080317.11; EXPRESSED IN LUNG, SIGNAL = 0.95; NT HIT: gi16173087, EVALUE 0.00e+00; EST_HUMAN HIT: BE144590.1, EVALUE 0.00e+00; SWISSPROT HIT: P29387, EVALUE 5.80e-01
ttgcaaccacccatgctggcatgaaagaaagtgaagctgctgggttgaactccatcttctgggggacatttgcagcctgcaggggcctggcaatcttttttgctacctgtttacagcctggaaccatgattgtgttgagcaacattggcagcctgacttcatctttatttctggtgctttttgacaagaacccaatttgtctctggatagcaacttcagtgtatggggcttcaatggcaaccacatttccgagtggtgtttcttggattgagcagtacacgaccatccatgggaaatctgcagcattttttgtaattggtgcttccctgggagaaatggctattcctgcagtcattggaattcttcaaggaaaataccctgatttgcctgtagttctgtatacctctttgggagcatcaatagctactggtattttatttcctgtgctatataaattagccacttcacctcttgatcgccagcgaaaagaagacagaaagagtgaggaccagaaagctctgctctctagctccgggc

SEQ ID NO: 12247 - DNA, 576 bp, Homo sapiens
  MAP TO AC008616.2; EXPRESSED IN LUNG, SIGNAL =   1; EXPRESSED IN PLACENTA, SIGNAL = 2.2; NT HIT: gi14763316, EVALUE 3.00e-67; EST_HUMAN HIT: BG913847.1, EVALUE 5.00e-67; SWISSPROT HIT: P16818, EVALUE 1.90e+00
ggccagacagggtttgccccgtggtgcgatccccatgcactcagccccgccgccccgcgcccgccaggtgctggagaaccggaccaaggactccaagctggagatggaggtgctggagaacctccaggagctgaaagacctgaaccagcggcaggcgcacgtggacttcgaggctatgctgaggcagcaccgcctgtcggaggaggagcggcggaggcagcagcaggaggaggacgagcaggagaccgcgtgagtcagggccggcccaacccagccccacctcgcagcctctgccccggcaggcgctgcctctgccccagaccctttccccgctctctggagtgtcgcctttgcaaggacccctttcccaccgcccatctcactttctcccttgtggcgtctctcgagggggtcccaggccactgccgggcacggtgacttagcacgtggtcgcccgcatggctgcggtttgtcacagcgagaggacacagcagattcagcaaaggggaaaggcatgtgtggtgtgtcgggggccaggccttccagatcctctcctggtggagcttcgcaggacgc

SEQ ID NO: 12248 - DNA, 537 bp, Homo sapiens
  MAP TO AL034417.14; EXPRESSED IN LUNG, SIGNAL = 2.8; NT HIT: gi13652540, EVALUE 5.10e-01; EST_HUMAN HIT: BI911434.1, EVALUE 1.90e-01
agcagcagcagggacctgggcattcaaggagtgctgggggggatctgggctgctctcagactcttccctgtttattagctacagcatcttccccatgcacacaaggagtctgtcagcacagtgcagaggaaggggctgttccttttcacatctgggctggacacattcttcacggttccagcatgaggcctttccagagctggcccttttcccagaccctagcttgagtcccaaggcatccaggctggggccaagggctcttatgggactgagcactaaggaaggtctttagcactgggaagaatgtgaatgctggattcaccaccatcaccatcaccaccaccacaatcactatcaccatctccatcatcatcaacatccccactgttgtcaccaccaccaccatcactatcaccatcattaccatcaccatcaccatcatcaccatcactaccaccgtcatcaccatcaccctcaccaccctcaccatcaccctcaccactatcaccacactcaccaccaccaccatcaccacca

SEQ ID NO: 12249 - DNA, 504 bp, Homo sapiens
  MAP TO AC005530.1; EXPRESSED IN LUNG, SIGNAL = 1.8; EST_HUMAN HIT: AL602765.1, EVALUE 8.00e-10; SWISSPROT HIT: P46882, EVALUE 4.10e-01
gcatccctgtctcccacgcctttaccacgtacgccttctggaatcttctcccacttccaaccatactctttacctagttctcctttctccagtcctttctgtggcccccttttcccgcaggtcagcagcttcctctgcattgacctaccatgtctctgtgttactctttcctgatctcccttcctccctacccacccctgacttgagaccccttctattcacacccatttccttgtgtttctgctgctccttcccccaggcattttcttacatattaggcactcaccacacagaagaagagcccagcaaagagccccacggccgccacaaccgagaccagggtgatgaggaagatttcccacggcaccagggacccaccaggctttgcctcactcactgcagtagatgcactatgggaagttgtgtgcattccagtcagagctgctgttccagagcctgcagaggtcacactggacccagagttggtggctgtgttggccccac

SEQ ID NO: 12250 - DNA, 505 bp, Homo sapiens
  MAP TO AC008688.4; EXPRESSED IN LUNG, SIGNAL = 2.3; SWISSPROT HIT: Q9Y5E5, EVALUE 6.00e-93; NT HIT: gi14861873, EVALUE 0.00e+00; EST_HUMAN HIT: BG722685.1, EVALUE 0.00e+00
gctccgtggccttgagcagctggtacgacagccaggcgttctggcccgagtcgccgtccaccgccaccaccttggtcaccaggtagcccggctcggccgcccggggcaccagctcggtgcagggcgcggagccattctgcagcgggtacagcacgaagggcgagttgtcgttggtgtccagcaccagcacgcgcaccagcgcctcgctgctcaaagccggagaaccgcggtctgaggcgcccacgcggaactcgaacgcctgcagggcctcgtagtccagcgacctgagggcgaacaggtggccgttgtctgcgttgatggagaccagggaggcgaggggcaggtgcgggtcctggggcggcagcagcgagtaggtgacctgggcgttggtgcccgagtctctgtctgtggcgctgacactgccgatgtgcagggcggggctgttgttctcgcggacgaacagggtgtaggaggtttgggtgaaggcgggggcgttgtcattgac

SEQ ID NO: 12251 - DNA, 584 bp, Homo sapiens
  MAP TO AL049750.1; EXPRESSED IN PLACENTA, SIGNAL = 0.87; NT HIT: Y15054.1, EVALUE 2.20e+00; SWISSPROT HIT: P03222, EVALUE 1.90e+00
gctaattggacaacaagcggcaggtatagaaagagatcaggtctttctaagcaggatctgggaagacttacagcgtggggtgacaggtaaggtggacctgggagaggaagtagatgagaatataccagaggaggtggcactgggcatctcaggctttgagacaaaagacgaagggtcatacaagcaagaatgcaacatgcatgataaagagtggccaagccagttgcagctggaggtaggcattcaggatgcaagagcccaggaaggcagtggtggcactattggggccttaagtgcctctctctttctggagcctgttgccttcaggactgcccttagactgctgaagttgctgggcacaatagacaaaatcctaaatatggagataggaaattaactaataaaaaaatgacaagaaaatatttttacaaaagataatttaagaggaaagtaaaagctacttccctctttgtcttgtagcttccttttctatgaaacatgaagcccagggcttcttggactaagtgagagagtgaagaaaatgtaggtattaaaattaacagccagagatggcgttagcaaaa

SEQ ID NO: 12252 - DNA, 543 bp, Homo sapiens
  MAP TO AC020728.4; EXPRESSED IN PLACENTA, SIGNAL = 0.68; EST_HUMAN HIT: BG741326.1, EVALUE 1.00e-88; SWISSPROT HIT: P24785, EVALUE 3.00e-16; EST_HUMAN HIT: BG741326.1, EVALUE 1.00e-88; NT HIT: gi14721272, EVALUE 4.00e-97
gcctctgactacaagtgcccatcttctagggaaagaacctggtgggaatgcagtttctgcttatacacacattataaagaaaacttacctcaacaggataacttcttcctgaaattctgagaatggggcagtgtgtgaaatatgtagaaaatttttcgctgtccacagtggcactcattagaatcaagtgtagatcagaacgtttctgtaaaatttccttcaagataattagtaggaagtctgactggacacttctttcatgaacctagttttaaaaagggaataaaaaagttcatcatatattgtataaattctagtaagaggcttgaacaatcagacacccagatttactaaaagttattcaatatctaagtacagtcagtacatgtgcggggagggagaagctgtaagttttaaataagacagatcttcagaactgaaaataaagtcattctctaaaattggaagtcactgaaaatcatatagtgaactagattagccatgacagcatgactctaccctaggagacggtttgcaaatcag

SEQ ID NO: 12253 - DNA, 537 bp, Homo sapiens
  MAP TO AC008639.6; EXPRESSED IN PLACENTA, SIGNAL = 0.52; NT HIT: gi13899234, EVALUE 9.00e-12; EST_HUMAN HIT: BI793103.1, EVALUE 1.00e-11; SWISSPROT HIT: P28466, EVALUE 3.80e+00
agctaacattaccccctgccttttttatatttacacatgtttattaacattgaaacaaaattctatattagagtttacgagaaatgagagaatacctggttggtgatatgttcctggattttttctgtactcactgaaagagaaagcaaaaagaatttttacattaaagcatgaaaatgaataaaatgcggtactgatgctgctctgtttacagtaaacacttccaaagtggtcatggactctctgagcaaggatttctatcacaatgtggatgtttacaaccacttcaataactggggaaaaaaagccaaaacctaaataaactgtgttaggcaaagataacagaaaatggagtggaaatccaataagggtgataccagcagaatgtattaaactttcacagataaatgatgaagagatgaaaaggaccgaagaaaaatttgaacaacagccagtcaaaacaaagttttccaaacaatgacaacctattgaagtataatactaatactgagctcagggaaccctgagaactggaca

SEQ ID NO: 12254 - DNA, 520 bp, Homo sapiens
  MAP TO AC004091.1; EXPRESSED IN PLACENTA, SIGNAL = 0.75; EST_HUMAN HIT: R48996.1, EVALUE 7.30e-01; NT HIT: gi15616630, EVALUE 7.70e+00; SWISSPROT HIT: P30620, EVALUE 8.20e+00
atgaaaatcagcatggtgggtaccttgaagagacagaagttaaattgtttgaagtgggcctgaaaagaccttctggaatgctggcagtgtggtttactgagttgagtgcttggtaaataggtgggtccagtttaggaaaatttactgcactctcactatattatgtataatacataatgtaatataatattaatatagtataaataatatataatataaataacaatatacatacacatattaatatatatcatataatagtacatatattatgtataatatataatatatgatatatattatatatataaaacttaagcccttattttaaaaatattattcttccattagaggattacactccttccgccgaaagaaaaaattgacagaacaaaaagtaaaagtggtcatcatggtgggctttaacacctactgtctatcacaagacatgttgaaaaatgagaaaaaattgttaatgatataaagatatgatgaacagcacagttaaaaatttgaccca

SEQ ID NO: 12255 - DNA, 577 bp, Homo sapiens
  MAP TO AC002471.5; EXPRESSED IN PLACENTA, SIGNAL =   1; NT HIT: gi14777514, EVALUE 1.00e-100; SWISSPROT HIT: P56201, EVALUE 5.60e-02; EST_HUMAN HIT: AV684072.1, EVALUE 2.00e-57
ctcctggatgctgtcctagccaatatctgctcaccctcttcagccattccctgtaccgcacattcgctccagccatgactgccatccacggcccactcatcacatacatccagctgggctgggctttacagagggcggatggccagccctggaccatgtgtgcccactgtggtcaccatgctgcctcctcacgtccacagtggtgtgcacccggaagcacaggcttgaggacgatgagcggcagagcatccccagcatgctccagggcgaggtggccaggctggaccccaagtgcatgataaacctggactcttctcgctgcagcaacaatggcaccgtccacctggtctgcaagctgggcgagcgtccaggagggccaggccggcacaagttaggaagccttgtccacagcaccaggtctctgccatccgagccggagggcaccgtgcccagaccccaccctgtgttcacaccccagcaggctgtctgctttgtcttcacatacacggagcccaggacagactggccatgcctctgcccccacgcaccctcatctccccaacacagatacggctct

SEQ ID NO: 12256 - DNA, 594 bp, Homo sapiens
  MAP TO AC005173.1; EXPRESSED IN PLACENTA, SIGNAL = 0.58; SWISSPROT HIT: P09212, EVALUE 3.40e+00; EST_HUMAN HIT: BE008895.1, EVALUE 3.00e-03
cggtgctggtcttagagaggcctatccatccatctatttacccattcatcaattcattcaacaagtggttatttataaccctctgtgtttggcattgttctagacactggtgacacaacagagagcaaaaccagtctctgctgtgatggagcccacattctagtgggaggagaaggggagaggcaagagagaggcagacaatacacgaataaatacaccataggaggtcatggaataaagggccctatagagaataacacagcatatgagaaggcagagagtgacagagatggaggagtacagagtgatcaggaaagactctgaaaaaatgacagttgagcagagatcacaataagaatcttaggaacatctatgaaaacagcaattgcaggtcaagggaagagcaagtgcaaaggggtgaagcaaaagctgtgtggcatgttgaggagaaaagcaaagggccagtgacactggcaggacgctggtctggggtcagaagggggctgagatcagagagggagaaggtcaatggggccatgtgagtcatgtgaaaaactttgcaatgtctctaagtgaaatgagaagctacccgga

SEQ ID NO: 12257 - DNA, 528 bp, Homo sapiens
  MAP TO AC004182.1; EXPRESSED IN PLACENTA, SIGNAL =  14; EXPRESSED IN HEART, SIGNAL =  33; EST_HUMAN HIT: BG250287.1, EVALUE 0.00e+00; SWISSPROT HIT: P30482, EVALUE 7.00e-48; NT HIT: AJ133267.2, EVALUE 0.00e+00
ttcagttgaggccaaaatccccgcgggttggtcggggcggggcggggctcgggggacggggctgaccgcggggccggggccagggtctcacatcatccagaggatgtacggctgcgacgtggggccggacgggcgcctcctccgcgggtatgaccaggacgcctacgacggcaaggattacatcgccctgaacgaggacctgagctcctggaccgcggcggacaccgcggctcagatcacccagcgcaagtgggaggcggcccgtgtggcggagcagctgagagcctacctggagggcctgtgcgtggagtcgctccgcagatacctggagaacgggaaggagacgctgcagcgcgcgggtaccaggggcagtggggagccttccccatctcctataggtcgccggggatggcctcccacgagaagaggaggaaaatgggatcagcgctagaatgtcgccctcccttgaatggagaatggcatgagttttcctgagtttcctctgagggccccctcttctctctagga

SEQ ID NO: 12258 - DNA, 599 bp, Homo sapiens
  MAP TO AC002325.1; EXPRESSED IN PLACENTA, SIGNAL = 0.76; SWISSPROT HIT: P27921, EVALUE 1.30e-01; NT HIT: AF414401.1, EVALUE 2.00e-99; EST_HUMAN HIT: AI252662.1, EVALUE 2.10e-01
aacgaatcagggaatggatggatagacaaacgagcaagcagccatagcccccaagaagaagcccccactggcctcccccaggctctcctgctgacctggatgtcagcatcttcctggaggggtccccagatgcggatctcctccaggcggggcagccggtcctcggtgagggccactctgtactcgacacgaccatcctccaggagggaggggtaggtggtgttaggggagatgctcatcttcccagccacgacatagcgccctccgatcctcaccgctgtcggggaaccagccctgttagccgtgtggagctgagcacccatcctcctcacaggcacatgtcagtgactctccttcccggggtccccagccctcctctaaggagccacaggcatctgagctagaggcttccccacagcggaggctctaggcctctttccacaacctggtgagtgctatgaccaagtgcactcacgcacagaactcaacaggctcagggctcagggaccccatggcaagtgccggcaaccaaggcttcaaaggttaggtgcagacacactccagaaagacccactgtggccctcaatagcaaagaagcg

SEQ ID NO: 12259 - DNA, 556 bp, Homo sapiens
  MAP TO AL118558.2; EXPRESSED IN PLACENTA, SIGNAL = 2.6; EXPRESSED IN HEART, SIGNAL =   3; NT HIT: AY052369.1, EVALUE 0.00e+00; EST_HUMAN HIT: BI089520.1, EVALUE 2.00e-69; SWISSPROT HIT: Q28651, EVALUE 1.00e-19
agccctgatggaatgatgacacccagccactaagtgtctttttcttctcaaagcttttagagctctttgacagtgaagatcctcgggagagagattttcttaaaaccacccttcacagaatctatgggaaattcctaggcttgagagcttacatcagaaaacagataaataatatattttataggtaagtcacgtgtggatggcgttgtccttgtgtgtggtgatgctcatttcccccctcgatgctcccctaccccatcgtctcctctgacaggactcagcatgtggagggggtttctcaaagcctatttgtcatgtgcaggtggacccccttgtgcactgtgtgcagggggctgctgggctcatcctccctgccttcctcccctctccccacagctccctcctgagccaccaagctccccagcgcctcatcctgggtccctccattgttcctgtttctactgaaaggtcaagtttcctggaaatgtggatgaattggttccatccagaccaactgtattagtgaaggttctctagaaggacaggacgcatagga

SEQ ID NO: 12260 - DNA, 534 bp, Homo sapiens
  MAP TO AC008762.5; EXPRESSED IN PLACENTA, SIGNAL = 0.62; NT HIT: gi14767924, EVALUE 2.00e-59; SWISSPROT HIT: Q10760, EVALUE 1.30e+00; EST_HUMAN HIT: BI519649.1, EVALUE 2.00e-56
gtcctgactgtccccagatgaagcgccctcagttcagcaagccgccaggaggccaccacaagacccagcgctcaggtgccatgggcagagggggtgggcagacggggggcgagctccaggaacccccagaggagcacaacttgctcacgagcacacaattccttggtggggggtatcaggaaggagaaggatccccagccacagcagttgccacccatggacccaaagttgctgaagcagctgaggaaggcagagaaggccgagagggagttccggaagaagttcaaggtgaggcctctgagctaagcaggagtcctggcagggcggagaccagggtcccaccgatcccaggctcagaaagaagacaggggcccaagggcggcagcacaagcagaggccctaacatctcgcgccccagtttgaaggggagatcgtggttcacacgaagatgatgatcgaccccaacgctaagacacgtcgcgggggtggcaagcacctcgggatccggcgcggggagatcctggaggtgatcga

SEQ ID NO: 12261 - DNA, 512 bp, Homo sapiens
  MAP TO AC006138.1; EXPRESSED IN PLACENTA, SIGNAL = 1.2; NT HIT: gi14761357, EVALUE 4.00e-94; EST_HUMAN HIT: Z45987.1, EVALUE 6.00e-94; SWISSPROT HIT: P07548, EVALUE 2.80e+00
tggtttctgtccctggtagccgaatgtcacacctgaaagccacgaaaagaagcaatttatattcttttcagtccctgcaaagtccctctcatgtgctggccttggagaacaggagcaatctcagccttggtggagaatttagggtgcacatacatgcttccggtgcttcctgtggagcagcagaggcccgcggcactcaccatgcagacccagcactggagggctgagtggtggggggtctggaaaagtgaagcgcacagtgtactccttagggcgcttcaggagctcaggggcctcctgggattcctcatcttggtttttccgtcggcatttctgctgcttccgagtcagggcttccttcgtttgtttttcctggagaggaagaggaaaaaagagaaacctgagccctgcgcggcagtccttgaaatgtaggccagcgttccagagtctccttcttcctccactgccaggagagaacagtggcccccagcccagaagtccctcaggtgctc

SEQ ID NO: 12262 - DNA, 530 bp, Homo sapiens
  MAP TO AC018762.4; EXPRESSED IN PLACENTA, SIGNAL = 1.3; EST_HUMAN HIT: BE613026.1, EVALUE 1.20e-02; SWISSPROT HIT: Q62924, EVALUE 2.20e+00
aaagcaacaaaggcagttggaccatttccattattatattttgtatggaattcatgtaactcatttgtgttgttgttgggttttgataaagaggcaaatataccctgaggtacattttgtgagtgaagaaaataaaaaagaggattttgaatagatttaagaatgattaacacttttcaactgaaaagccactgtgcttgcctatagggattagtgaatctgggtttcctgaagtcaaatgctgtttctccaatgcataaagataactatcttttatttcatgtgaagaatgtgaaggtaggatttgcgagatgttaatctttataataagccaatggttgattgaaaagttagaagaaaatgggacagcaggtatggaaaagcagtttatgactgatgagaaggaagaagaggaagagaagaagaagaagaaggagaaggaggaggaggaggagggagaggaggaagaggtatggggtgggaagaaagaaccgccaccacagtaatgccctgggtttgtaggctgcttt

SEQ ID NO: 12263 - DNA, 551 bp, Homo sapiens
  MAP TO AC020629.6; EXPRESSED IN HEART, SIGNAL =   1; EXPRESSED IN PLACENTA, SIGNAL = 0.67; NT HIT: gi14754045, EVALUE 1.00e-120; EST_HUMAN HIT: BG188336.1, EVALUE 1.00e-119; SWISSPROT HIT: P19263, EVALUE 9.00e+00
tgatgaggcttctcctctgggtgaagatgacctggacattcctctctctgtgttatcagagctagagccgctttgactgtgttgatctgcagaagcagcactagatgcaggcggtgactttgttttctccttaaagtctgtaataatgactgtcagatctccaacagtaacttccaaatgctgagcactactccgatccacatttttcaatcttggcctaaacataaaaaaatgaaattttaaactagcttttccctctaccaaatttctgagcatataataaataataaaagtggtaaaagtaacaaaatgaatacatgtatttaaggcaatttatgtgtaactagccacaaaaacatcataaaatgtttcaactcattaacattaatcaaaccaatcattcatgaacattcttcaatgcaaccaaaaaactgtgacagcctagaagtagaacttgtgcttctatagctgtatcataattttgcagacagcttattaattttattaaaatagatgttttagacaacaatgaaatagttgcaccatggagg

SEQ ID NO: 12264 - DNA, 596 bp, Homo sapiens
  MAP TO AC004195.1; EXPRESSED IN PLACENTA, SIGNAL = 0.69; EST_HUMAN HIT: AA045454.1, EVALUE 7.00e-23; NT HIT: gi7662660, EVALUE 5.00e-23; SWISSPROT HIT: P29458, EVALUE 8.80e-01
gacgaaggcaagaagtcagggcccatggactgtagattccacccttgatcgtctactacaggaaagaagccacagaagtgagggggtattcccaacaggaaggcagagaaggagagattaaaactgagtcaagaagtgtagccagtcccatgggagcacctgggctgaggagggtcagtccccgcagagatgttcggaacacctgattggggatgtgccctctccttctatgttcttggtcaccagaggaaccaggtgaagagtgtggatgactcagtccacccctccccgcacaggaaaaacaactcagaggacatcccctactgggagtgggccaggagcgctggcttccacgccaaggagaggagggtgttgctgtggctgcagaggtgagtccacagggaagcgtgggtgtcatggagaaagagagaggagaggaaatggcctctcgctggagccaagcagagaggaacaaaggaggggaggagcccacaggccctggagccccagagcagctctgggtggcccctttccttctctcctcagcacaaaataagctgcttttccaggctttttctcttcctcgtgctcactcc

SEQ ID NO: 12265 - DNA, 584 bp, Homo sapiens
  MAP TO AC013602.2; EXPRESSED IN PLACENTA, SIGNAL = 0.57; SWISSPROT HIT: P49874, EVALUE 2.60e-02; EST_HUMAN HIT: BE884008.1, EVALUE 0.00e+00; NT HIT: gi14767848, EVALUE 0.00e+00
aggggtacagttgcacttggactccaaagccatgctctttcttccagttttttaaaacttgagacaaaggtagctgctggcctccttgacgtaggcaggcctgttcttggagcccccagggagagtatgggttattgctaccgatgaccctggggcctgcagctggctgtccatgagtgggcctcctgtcagcccctctacctcccccatgggggtcttacctccctgcaacaactgaggccctcccttctctttccatccctccagtctgtgagtcctgccaggagtacttcgtggatgaatgcccaaaccatggccccccggtgtttgtgtctgacacaccggtgcccgtgggcatcccagaccgggcggcgctcaccatcccacagggcatggaggtggtcaaggacactagtggagagagtgacgtgcgatgtgtaaacgaggtcatccccaagggccacatcttcggcccctatgaggggcagatctccacccaggacaaatcagctggcttcttctcctggctggtgagtgtgccctgggctattcatgggagaggttgccaagaaacatggaaggaa

SEQ ID NO: 12266 - DNA, 504 bp, Homo sapiens
  MAP TO AC002455.1; EXPRESSED IN HEART, SIGNAL =   1; EXPRESSED IN PLACENTA, SIGNAL = 1.2; EST_HUMAN HIT: AL579009.1, EVALUE 0.00e+00; NT HIT: gi14737308, EVALUE 0.00e+00; SWISSPROT HIT: P50749, EVALUE 4.70e-02
agtcttctctggggagggtctgctggcttggccatcccttctgcagcctgtacactccccttttgccccttgcagtgggacgccttcagcatgcctgaactacataacttcctacgtatcctgcagcgggaggaggaggagcacctccgccagatcctgcagaagtactcctattgccgccagaagatccaagaggccctgcacgcctgcccccttgggtgacctcttgtacccccaggtggaaggcagacagcaggcagcgccaagtgcgtgccgtgtgagtgtgacagggccagtggggcctgtggaatgagtgtgcatggaggccctcctgtgctgggggaatgagcccagagaacagcgaagtagcttgctccctgtgtccacctgtgggtgtagccaggtatggctctgcacccctctgccctcattactgggccttagtgggccagggctgccctgagaagctgctccaggcctgcagcaggagtggtgcagacagaa

SEQ ID NO: 12267 - DNA, 522 bp, Homo sapiens
  MAP TO AC026888.4; EXPRESSED IN PLACENTA, SIGNAL =   3; EXPRESSED IN HEART, SIGNAL =   2; SWISSPROT HIT: O08638, EVALUE 6.30e+00; NT HIT: U10518.1, EVALUE 3.20e-02
aggtgtggggacttaaagggtaaagcaagtgctacccagaaaacgtaagtaaggcagatctctttggcctgaagtcctcatcaaggagtttaagctttattctgagagtcatgggaaacaactgagaaattttaagaagcaaagggacctgatctgtaagatttatacaatggagaacaatatggaaaaggaaaaagacaccattaggatgctgctgcggatgctggggtgagtgatgttgatggctttaactaagggaatggccctgggaccaaagaagtgtgcatgttttcaaaagtcatttcttgctttctgcgagcgagcctactaaactgcctaagcacaccggttaagtgtggcaactttgagaaacagcataaaccatgggtgacattgcaaaactgaaagcacttggtgcagaggttagataaatatctgtttctagggggatatacatgtgtgcattcattgttttgttttcaagagacaattgtgcctgaggctggagcttgctcaccctat

SEQ ID NO: 12268 - DNA, 501 bp, Homo sapiens
  MAP TO AC003073.2; EXPRESSED IN PLACENTA, SIGNAL = 0.53; EST_HUMAN HIT: BG170124.1, EVALUE 8.00e-13; NT HIT: AL163202.2, EVALUE 2.00e-06; SWISSPROT HIT: P04278, EVALUE 2.10e+00
aagctctcctgttgcctctgtcaatgggttaatctgtgggatgcacagcagtttgaactccctgcttagcctcagaggggcaggggaaaagatgggcagggccagaccaggtaggttccctgatggtaagtgtaagctccagtgctgagggtgaatccagtgggcagccaccaagcacccagaggtgggcctaggtgtggagctggcaaacattctctgctggagtgggtgggacagtggaggcagcctaaactaataatccagaagagtggatgctccagttgcttgcagttctgtctggaaatgaaattgagaggccctcccagtaccagggtctctgcataggaaggctgggtgtactcaagctgctgatccaggtgagggtgtgctctgaatgtctggagatctgcctggtcttggagtggagagggcctcacttcaccacagtctctgcacaggaagggtagggtggctcaggctcctaatcctggcaagcagctt

SEQ ID NO: 12269 - DNA, 504 bp, Homo sapiens
  MAP TO AC016606.6; EXPRESSED IN PLACENTA, SIGNAL = 0.75; EXPRESSED IN HEART, SIGNAL = 0.99; NT HIT: gi14725634, EVALUE 5.00e-41; EST_HUMAN HIT: AA776175.1, EVALUE 0.00e+00
ggccatagtttttgccaatctctgctctagactattatcccaacacaatattggtcaatatacagtaagtaaatatatgagtactgagtgaattaattgtaacactcgtgattttacacagagcatgcatatgatctagtatactgactgctttgtaaatatgtgttcaataaatgtttattaggtcaattttcaaactcaagttaataccagagttatcagagttttctgtttctttaaataaactgcttttttctccactgtgtgttggaataggaaggccctaacagtctgattaatgaagaagagttctttgatgctgttgaagctgctcttgacagacaagataaaatagaagaacaggtatatctattattgaaaattctaagctgaaatttattttaacactataggcattccttggtgtatattatttcatgtaaatagaatttgaacattgtgaacttaataacctagaagcttaactgtgaatacattgagtca

SEQ ID NO: 12270 - DNA, 597 bp, Homo sapiens
  MAP TO AC004493.1; EXPRESSED IN PLACENTA, SIGNAL = 3.4; EXPRESSED IN HEART, SIGNAL = 4.4; EST_HUMAN HIT: AL522091.1, EVALUE 0.00e+00; SWISSPROT HIT: P28466, EVALUE 3.40e+00; NT HIT: gi16165307, EVALUE 0.00e+00
ttctgacccgcttctttctctctggggggtaagacacttgttgttgagctctggggatgatggagaacgactcctcggcctaggagtctgaggcaaagctttcggttctggggaagaatcacattcgcttctccctctagatggcgttctaggtatatctttcattccaggagaggacccagacaggctgtgcctcgagggagtcccagacccatctctaagtcctggagaagacccagacctgcttctccttgatggagttctgggtaaaccatctttcatttcaggagaagatgcagaactacttctttctctcgagggtgttctgggtacagcatcaagcacaggtgaagagatgctctgatttgaagacatccctgccttttccactgcatctggggataactcagaactgctgtgtccagaggatcttgtcgattgttctttcatgtctagagatggatctgtttccagctgattaagaaacggtccattcaaatcttctttaacctcagaagaaaatccagtattcatttctgtaccaagtgggcctgagtttctaaattctaaaggtgatccaaagctgttctccctgag

SEQ ID NO: 12271 - DNA, 503 bp, Homo sapiens
  MAP TO AL021182.1; EXPRESSED IN PLACENTA, SIGNAL = 1.1; EST_HUMAN HIT: AI110652.1, EVALUE 0.00e+00; NT HIT: gi14757636, EVALUE 0.00e+00; SWISSPROT HIT: P11331, EVALUE 1.20e+00
ctaggtacgttgctcccagcccacagaaagaggggctatgggatcaagctgaagaggccatttctgaaccaaggggcagcactgtttttgtgcttaggtaacaaactgtaataagaagtgaggatttgacatggaagtgaaaggttggggtggagaagatgttcatctttatcgaaaatacttacgtggtgacctcattgttattcggaatccagttcctggtcttttccacctctggcatgaaaagcactgtgctgatgagctgacccccgagcagtaccgcatgtgcatccagtctaaagccatggatgaggcttctcgctcccacctgggaatgctggtcttcagggaggaaatagagacgcatcttcataaacaggcatacaggacaaacagcgaagctgttggttgaaatcataatgccttactgtgtgaaccacaaaccaacactatttatttagccttgcttctactttcagatgcagtgcctcttttggagaaga

SEQ ID NO: 12272 - DNA, 520 bp, Homo sapiens
  MAP TO AC006272.1; EXPRESSED IN PLACENTA, SIGNAL = 0.72; EST_HUMAN HIT: AL530273.1, EVALUE 2.00e-10; NT HIT: gi12751484, EVALUE 9.00e-12; SWISSPROT HIT: P51523, EVALUE 5.00e-11
gttccactaactcccatcgcattggtttcactcacctggactgcaccaacttgggaattctctctctactattccttgttcttctttccccaactggaatattgcttctggcttggtagcttgacaacctgtcaagaggtaatcacagagaatctgagcagcattagagcttgtgagaaaaagttctgtttcaggaaatgcacagtatacatctcagcagaacagaaacctttcatttggaaagtgaaattacatatggtcactgtacgattataaagtaaaaaaagttctaaaagtcaaagtccaaaatcattgaggatatcagagtacccacaaattgtggcaatagaaaaaaaggcaattaatcggcttacagtgagatatttaggaaagttgtctttacccagtgacactaggttgttgtaattttccaacatcacatcctggtagaggttcttctgaacagggtctaatagattccactcctcccaggtgaagtcaacagccacatcattgaatg

SEQ ID NO: 12273 - DNA, 525 bp, Homo sapiens
  MAP TO AC008507.6; EXPRESSED IN PLACENTA, SIGNAL = 1.6; SWISSPROT HIT: P04374, EVALUE 6.00e-75; EST_HUMAN HIT: BE790793.1, EVALUE 0.00e+00; NT HIT: AF023860.1, EVALUE 0.00e+00
ttgagttttgcacacatcgccactgcctccaggggccccatactatcagctatggtcaaccccaccaagttcttcaatgagccctggggccgcatctccatccagctgtttgcagacaagtttccaaagacagcagaaaatgtttgtgctctgagcattggagagaaaggatttggttataagggttcctgctttcacagaattattccggggtttatgtgtcacggtggtgacttcacacaccataatggcagtggtggcaagtacatctatggggagaaatttgatgatgagaacttcatcctgaagcagacaggttctggcatcttgtccaaggaaaatgctggacccaacacaaacggttcccagtttttcatctgcagtgccaagagtgagtggttggatggtgagcatgtgttctttggcaaggtgaaagaaggcatgaatattgtggaggccatggagggttttgggtccaggaatggcaagaccagcaagaagatcaccattgctgactgttgacaa

SEQ ID NO: 12274 - DNA, 566 bp, Homo sapiens
  MAP TO AL008724.1; EXPRESSED IN PLACENTA, SIGNAL = 0.69; NT HIT: AB051435.1, EVALUE 0.00e+00; SWISSPROT HIT: P18488, EVALUE 1.60e-01; EST_HUMAN HIT: BG336065.1, EVALUE 7.90e-01
acagctgctgatgacaatggcagtagtggccagtgtctgccggaacgacctcccatcatcccgggaaggggcagcgccagtggggcgcagatgcctgccatcacagatggaaacagcaggtaaatggcacttgtttcctccaggtgtggagatgcttgtatctgggaccccctgccatttctcaggacaccctcctgctcctagctgggagatccagcatcctcatgaatgcggggcccaaggccaccaactgttccacctgctgtcagccaggcctgttgccccagccctacacccacagctcacccagcagggactggagtgtgctgctgcactgctggagccggtcgcccgggtcggaggttgggaagaagacagccgctggcaggccactggttggggggtccagccggaagcccacagcggtgaggagggcctgccagccagggatgccgcccactttgttctccacactctgctgggacgtgtacatggcattgcgctgcccattctggatgcgctgcagggatttctccacctgagggggaattgggggtgagtcagag

SEQ ID NO: 12275 - DNA, 540 bp, Homo sapiens
  MAP TO AL109800.25; EXPRESSED IN PLACENTA, SIGNAL = 0.85; EST_HUMAN HIT: AA180343.1, EVALUE 1.00e-17; SWISSPROT HIT: P06489, EVALUE 7.70e-01; NT HIT: AF223391.1, EVALUE 4.00e-20
tgggtgtctcctccttcatctgggatctctgacctcaaggggcattgacctgataccagtaggaacgttcctgtacaggatgtctgaaaaaccctgttggaggggtctcacacagttgggtggcacaggaagcaggacccatttaatgaggcactttagctgtcccttggtgcaaggggtttgctgcgctggggtgaaacccactcatcttggctgcctggattcctcagagctagaaggaggaaagactaagtctgctggtcaatggagattgtggccatccctccccctaggggctcaggcccagggagatcagagctctgtccctgagccctggctgaagtttgagttcctacaaggaggccctgcagctgcagtgttggctgctgcctctcccccaaggagctcagatggcttagactgcaggtagccacagcagtggttatggccacccctcccccaggaaacttggcagcttaggccaattgattctatccaagtgagcattgagaatctgtgtggctttgtagttgaagccca

SEQ ID NO: 12276 - DNA, 509 bp, Homo sapiens
  MAP TO AC009731.6; EXPRESSED IN PLACENTA, SIGNAL = 0.74; EST_HUMAN HIT: BF762886.1, EVALUE 1.80e-01; NT HIT: gi15282445, EVALUE 7.50e+00; SWISSPROT HIT: gi1351901, EVALUE 1.60e+00
cattcctccttctcttccccttttcccttccccttctctctctccatctctttctgtctctccttccctccctctctctcttcctctgttttttctctgggtgtgggtgtgactttcttattctcccctcctcctccctccttccccccctctcctctctctttataggtattcactacagctagcatttattgggtgtgtgctttgttccggacactgttctgagctcttcacacttatgggcattcattcctcaatcctcacacagccagtggggcagatattgctcctggctcctggtatctctttctgagggccttgtttgcatctggacccaggatgctcgtgtgtgacttttctggaatccaagcacattgtggctgttaatagtgatgatgatgatgatgatcatgataatcatgaagataaaaaattatcaggcattttctctgtactaaatcctttatgtatatcatctccaggaatcccctgggcacctccaagaagta

SEQ ID NO: 12277 - DNA, 566 bp, Homo sapiens
  MAP TO AC000356.1; EXPRESSED IN PLACENTA, SIGNAL = 0.39; SWISSPROT HIT: P51501, EVALUE 2.40e+00; NT HIT: L21008.1, EVALUE 5.40e-01
ttgtggcattctatggtcccttgcatggcaatttctgaaaactgtggttcccagagctatggcttgaagagactcacaactgctctccacggcaaaagtgagcctcagaaaaaacagtgtgggggtctcatggctccaggagatagaggaacagggaaacaagggaaacccagggacaaacccaggaaaactcagagacaacaaattccaagttttggacatgtaagtgttttttcccaactgagaattctgaagaatatgagaaccaggacatatggtcttgaaattcctgttttaatctgcaagatcaaaacagaatattttagttcagttatccagatatttcacaaaagatgagtatcagctctagtaggacacagctaaggctactaatcccctccccttcacaaacatccctctgtttacctccacttactcaaaaatctcattaaaatttggtagtcattcatcttacagtaactctgtacaccacctcacctctgcagtcccatacctcttgagaggatcttccatgacctaaaagatgacccctgtcacctcttcaa

SEQ ID NO: 12278 - DNA, 526 bp, Homo sapiens
  MAP TO AC005952.1; EXPRESSED IN PLACENTA, SIGNAL = 1.1; EST_HUMAN HIT: BI827691.1, EVALUE 0.00e+00; NT HIT: X73637.1, EVALUE 0.00e+00; SWISSPROT HIT: P51460, EVALUE 8.00e-19
cctggagtgaggacatttggctgtcagtgtccagcatctgtgaaagcggggatcctccaagccagggctagggtgtgatttattctgcagttgactccacaggctgcaggtggcattggtctggggtagatagtgagcacccatcccaggaggtaatcaaaggcctgtagatgcgagactttatggtgctgtgtggcctcaggagctcaccagaccagaccctctgggcctcaggccactctgaggctgcacccaaggaggaatcagtagggacagagggtcagcaggtcttgttgggtacagccactgaggcagcagtagcgtgcagggttggtggcagctgcacggtggtggcggtgatggtgagaggtctggggcaggggctgcaggccaggtcccagcgtgagattactgtcggccaccagcccatggagcagatgtcgtctctccagccactgtagcaactcacctggggacagagtgaaactcagctggaacggaaacgacagaggacatgctaccccat

SEQ ID NO: 12279 - DNA, 596 bp, Homo sapiens
  MAP TO AC008806.4; EXPRESSED IN PLACENTA, SIGNAL =   1; NT HIT: gi16176883, EVALUE 0.00e+00; SWISSPROT HIT: P10072, EVALUE 1.00e-117; EST_HUMAN HIT: AW245709.1, EVALUE 0.00e+00
gacttccacgtaaagcctcgcccacattccctgcacacataaggctttcccccagagtgtgtccttgggtttttgatgaggactgacatactgccaaagctgtctccccactcagtgtacatgtaaggtgtctccccagtttgtgtcttctggaggctaaggaggtttgactccttgataaagcctggcccaaactcttcatatttgatttctccaaatcctgagacttctaaaccatgcaatactttgtctgtttcctctagatctgccctccgttcagggctggaccctatatccaccactgtgttgtcttccttggactgtgctggctgttgttcttcaggtgggctggaaagtgcctttgaagtgccatttttgcttactctcccaaacaggagtctggagtcttctccctcttgaatccattctgctttgccactaaagcagaatggatcctgctgttgtttctgatcttctggatagtgttttcccaggtggagaggatttcctgcccataaacttgaaaacagctgagagagatgactcagccacacatgttggctgagagcttgctgactggagaaaatcagagggca

SEQ ID NO: 12280 - DNA, 542 bp, Homo sapiens
  MAP TO AL121594.3; EXPRESSED IN PLACENTA, SIGNAL = 0.61; SWISSPROT HIT: P51410, EVALUE 5.00e-38; EST_HUMAN HIT: BG505611.1, EVALUE 0.00e+00; NT HIT: gi16171180, EVALUE 0.00e+00
gttctcatccgaaccctgaggatgtatttttcacccaagaaatttcagatttcaacaagagacccattctcctggataacgacattgatggggaagtgagcatacacagacctcatcctgtaatggaagcccagtgtaacacccttgatcatgttctgtacatgactacaaatagtctgaacggcagccagttcctttcagtttccccaccatttatcaacctggagcctcttttctttctttccaagaagactgaatctacactgatgtgattgaaatccctctgcagggttcctctggggcctttcacagtaactgtgtgtcccttcagagtaatgtcaccattttctggaatgttgacagtctggttgctgagaatggtcttcgttctctcagtagacatggcaaagaaagttattctatgtatttttaaacataatcttataagctattttaaaagttgggctagtaataaaaggcaaacatctacactagtaaactttgattcatggattcaaatagctcaaaagacataggctggg

SEQ ID NO: 12281 - DNA, 589 bp, Homo sapiens
  MAP TO AC009320.7; EXPRESSED IN PLACENTA, SIGNAL = 0.82; EST_HUMAN HIT: BE514565.1, EVALUE 6.00e-05; SWISSPROT HIT: O15294, EVALUE 5.00e-03
ctcctcaaaggatcgctcagcatctggtgtaaatagtggaccctgcacaggcagctggtcagaggcctcaccaggccacaaactcaggctagaaacttagcacctgaggcaaggaggattttctatcacaagaagtggaaagtaatcttattaaatgtctttaaccctggtagatccacatactatttattcttgtactatttaagaattatttaattataaatatgtgcatccctgccctaattatatactttcagctgcaaaagtcgttgaccagtaagattggacacaaaccattcaagtacaagaataattcagtgtttcattttggctgttcatacttgggggaagaagaacaagcaagttgtgcccaacttagaagtttttgaaccatcacagcttaatatttttaacttttcaggttgtatccacgccatgcaagtgcgctcaacaaccttggaacactgacgagagacacagcagaggcaaagatgtactatcagagggctctccagctccatccacagcataaccgggctcttttcaatctggggaatctcctcaagtaagtgggacgtttaccatcgat

SEQ ID NO: 12282 - DNA, 555 bp, Homo sapiens
  MAP TO AL079302.4; EXPRESSED IN PLACENTA, SIGNAL = 1.4; EST_HUMAN HIT: AL134941.1, EVALUE 0.00e+00; NT HIT: gi14748376, EVALUE 0.00e+00
ggttggtggtggagtgaaacacaagggtgggagaggttttgcaaatagccagagaacagaaaccaatgtgcagtcactgacacacttgaccagttaatttgcacttgtacttggctgtggctgttccggctgtggctccttcggcttctttgtcttcttcttcttctgcttggagagacagctcaaagcagactcgctcttacttggggcagacacaagcaggggcggcttgccagactgagtgggatacttggttttctggctctccgtaaacagtggctgggacagcaggtggcgcagctccttcttcagaaccttcatctgcttttgtctccgacgttcttcttgctggtcagcttttcctccttgaaacacaatacaaaaacgatcctatttactatggtttgtagaaacattttgtttcccttgatgggtaacacagtgaaaaatgttttagaactactttagggaggcagggttcaaaagttctctgaagaagctagtggtggcttggcaggggctgtaaatggataacgtctaaccatttgcagggga

SEQ ID NO: 12283 - DNA, 570 bp, Homo sapiens
  MAP TO AC003048.1; EXPRESSED IN PLACENTA, SIGNAL = 0.43; SWISSPROT HIT: P42335, EVALUE 8.20e-01; NT HIT: AF092907.1, EVALUE 4.00e-08; EST_HUMAN HIT: BF918856.1, EVALUE 5.00e-05
tgatgtgtggtgatgctgtgttgtatactgtctgcatgctatagtcatttggtaacctaattaagattttaggttgtaaatttttcatttataacttcctgagattcatttcttttaatactcgttaaggcaacataaatttagagtttggatcattttcctcttaacttgttgttttacttcacgattgctgcatttagaaaacttttaaaattttatttaaaaaaatagataatcccaaggtgttgatattacaggtgtgagccactgtgtctggccagattcatttcacttaaatccctgaagatccacatgggattctgacagatcgctctgagacatcctcctgttgtttccttttcaccactgcaggtctccacctgccctggtgtccttgggaggaaacccaccgtggtagggcacacagcggctgacttgtcctggtaaatcataagcatggtgggctccgcaggtgcctccctcctttctgtccttgagtctgaagccagcaccttctttgatggcacaaacgtctgtggtttagggttttcaaaggaattccccctcttc

SEQ ID NO: 12284 - DNA, 557 bp, Homo sapiens
  MAP TO AC010749.3; EXPRESSED IN PLACENTA, SIGNAL = 0.88; NT HIT: AB033233.1, EVALUE 1.00e-81; SWISSPROT HIT: P03626, EVALUE 1.60e-01; EST_HUMAN HIT: BE144547.1, EVALUE 2.00e-81
tcttttcttcccccagatccccgtcttcagagaccaagtttactacttaatgactgaacattttatccgcaaaacccctgatccactgacttactgtgctaataaaacttacttccataatagcatgttgttacgggtgagttttcgttcttagcactcccaagatggtggcggaccactcccaagatagtggcggccacttccaagatggcagcaagccttttgttccctgatctggggttcttggcctcacggattccaaggaatggaaccttgggccatgcggtgagtgttatagctctattagaagccatggatcacagaagagaaccgtggaacccagcaactagtgttcagctcaattgggacgaacccaaggacttagctgcgcaggaacaatggtgagcctctagtcctaacgggagccacagcggctgcctggctggatcagaaacgcaacggacaccctgcccgatctggaggggtggatggcagcgaacagcagtggtggacggtgagcgaaagctcagcttgaggcagaacaaacacggaccaga

SEQ ID NO: 12285 - DNA, 579 bp, Homo sapiens
  MAP TO AC010345.4; EXPRESSED IN PLACENTA, SIGNAL = 0.72; SWISSPROT HIT: P15304, EVALUE 1.90e+00; EST_HUMAN HIT: AW976648.1, EVALUE 7.00e-20; NT HIT: gi13937343, EVALUE 4.00e-17
cacagccttctgctgttgagagattccctcctatgagggctttgttatcaggaagccagtaaaagtctccgcccaaatcagtagtaacagctggaagggtcatcagggaataacactcagctggggcttgccttgagtataggaaaacagcaattgctttacttcctattcacatccctttttggaaattctcctggaattttgcaaaagtactcatcattcattcattcaacaaaagaaataagacttccgtgagagtttcttgtcttagtcattgcatttaccagataaggtggttttgaagcccacattagaatataatttgagcttgcataagctgtatgatgctttaatacaagcttgtccaacccgcggcccaggacggctttgaatgcagcccaacacaaattcataaacctatgagataacacaaattcaaaacattatgagatttttttgcaattttttttagctcattggctatcgttagcgttagctattttatgtgtggcccaagactattcttcttccaatgtggtccagggtagccaaaagagtggacacccctgctttaatcca

SEQ ID NO: 12286 - DNA, 574 bp, Homo sapiens
  MAP TO AC002128.1; EXPRESSED IN PLACENTA, SIGNAL = 0.63; EST_HUMAN HIT: BG393333.1, EVALUE 3.00e-03; SWISSPROT HIT: P40003, EVALUE 1.30e-01; NT HIT: AF223391.1, EVALUE 6.00e-04
tttgttccctttggaaggtggacatttagggattaggatattcaaaagcaactgtgcatacaagggaatttagaaagtcactgcacaagctcagggaaagatgcaaattcagaaaagacctaagatgatcataagctttcattttaggttgattctagcacagatacatcttataacaataaacaaacaaaaaaaccagcaaaccctggggaatggggaaaagctgatttccagagttagcacattgtaagattcaaatgtccattttcaacaaaaaagtcacaagacatacatacaaagaaacaagagagtatggcccattcaaagaaaaaataaataaacaatacctgaggaagcccaggtggtagacttactagacaaagacataaataactgtctcaaagatgctcaaacagctaaaggagacatagacgaagacagaaaaatgatgtatgaacaaaagaagaatatcagcaaaaagacagaaaatgcaaaaaggaaccaaaaggaaaattctggagctaaaaatacaattaactgaaataaaaaattcactgaaggggctcaaaaacag

SEQ ID NO: 12287 - DNA, 578 bp, Homo sapiens
  MAP TO AC016602.5; EXPRESSED IN PLACENTA, SIGNAL = 0.42; NT HIT: AP003136.2, EVALUE 8.60e+00; SWISSPROT HIT: Q9G2X0, EVALUE 3.20e+00
agacagggcaaaatgaatggctagaatttagagataagcacccagagtcatctaaccgagctctttctttccagggacccatcagcctaaataattttaaagatgctaccagtggcatcaaatgtcagcacagtactgcctataatttttataaccgtagagatttgtgtgatagaaacaggtataaaggatcctctgaagaagctaaggagttcccagagtatgaggatatcttcccatattcttctgaaaacgtctttgttttgcccctagtcttggatgactgtttagtagggtatacaattccagagtgacttattttttcagcactttgaattgtttccttggattctggattttcttgctcctgttgaaaggattggtgtgtaaattgttgttccttattaggaaatatcatccttttctctgcttctttttatgatcgctttgtctttagttttctaaagtttccttatagtgtttgtagtaatgcatttgtttttatttgtcttgcctatgacttggtatacttctccaatctgagaaatcacatatctccccaattctgaggattcacg

SEQ ID NO: 12288 - DNA, 505 bp, Homo sapiens
  MAP TO AC002111.1; EXPRESSED IN PLACENTA, SIGNAL = 0.45; NT HIT: AF032531.1, EVALUE 1.20e-01; EST_HUMAN HIT: AI827351.1, EVALUE 1.80e-01; SWISSPROT HIT: P38274, EVALUE 2.10e+00
atggcacttttcattcgtccaaagcgctctcccaaccatctggattctggtcaatgaacactgggagagatgggttcctctgtgtcatttgaaattctaaaacagtggaactgaaatttcatgacacacatattctaaatgatgagagagggagaaataaagggaacggtaaagaagtggtttttcaaaaaataaaattaaattaggaaaataaaatcaaacgtatttgataaaacaatgttaataatataaacttagtaattaagataaaaacctaccagatgtaatgggtttaaccagtatttctcctatgaccgattctgcatcagaaatatgttgggtccttgggacacaggggacaatggccatctgtcccaatgacctcacagtccaagtggggagactgactaggcagcagctgcatctgaatcctggcaccaggaaatctcccaggtacggaacagatcctagaggcagacactactgtggtgtcacttggggaaac

SEQ ID NO: 12289 - DNA, 514 bp, Homo sapiens
  MAP TO AC000074.2; EXPRESSED IN PLACENTA, SIGNAL = 0.66; NT HIT: gi14777116, EVALUE 0.00e+00; SWISSPROT HIT: P02810, EVALUE 4.20e-01; EST_HUMAN HIT: AI767294.1, EVALUE 0.00e+00
agtgagcccaagtggacaagtttggggccacccagggaccagaaacagagcctctgcaggacacagcagatgggcacctgggaccacctccacccagggccctgccccagacgcgcagaggcccgacacaagggagaagccagccacttgtgccagacctgagtggcagaaagcaaaaagttcctttgctgctttaatttttaaattttcttacaaaaatttaggtgtttaccaatagtcttattttggcttatttttaatgctttttctcagtgtttttcttctgtttctgagtcacgaacagcaggcactgaaagcagtcccccagccactgccgaaggtcagtcccggaggtgctgcccaggctccaggcagatgcggcagccccggccacagccagcatgggctggagaaaggctctctactgcacaggggcctcacgtgactgcagggctctggggaggtggggcacctgtagcctgacccccaccttgctgcttccaaagcttccttg

SEQ ID NO: 12290 - DNA, 595 bp, Homo sapiens
  MAP TO AC000079.1; EXPRESSED IN PLACENTA, SIGNAL = 0.5; NT HIT: X99713.1, EVALUE 7.00e-90; SWISSPROT HIT: P54198, EVALUE 5.00e-16; EST_HUMAN HIT: BI458831.1, EVALUE 2.00e-51
tgcagactgtccaaagatggttctgtgggcgggccgagtcttctgctgaataactcacccaggtgtgcagccaacatctgtgccttcagacagcaggccgaggggagttaccgccgcacggggccttatctttctaattacaaacacatgtgctaaccttgggcactctgccaacacgcaaagcctgcaaagggccactctgtaatacctaagtgattgtccatctggcaaagcatcttgggaatattttcatccttctcgtcatcctcctggaggactggagacatattccagatcacaaccttcccagaatcctgccctggaacaaaggagcagaaatggctgaatgtgcaaggagtagaaatttgatattaatatttaatgtcaaattaaattaggagaagtcctcacttagcttccataaacaataattaactagatctaaggagactgaatttaaattactaatttaagttacagaaaagatgataagtactcatggggacgaaacggagcggacttagcagtcagcagaagtcaacctgactttacaaaaagaactttagactagcaatcaggagggaactgagctctg

SEQ ID NO: 12291 - DNA, 561 bp, Homo sapiens
  MAP TO AC011525.4; EXPRESSED IN PLACENTA, SIGNAL = 0.91; EXPRESSED IN HEART, SIGNAL = 1.1; NT HIT: AE000987.1, EVALUE 5.30e-01; SWISSPROT HIT: P08154, EVALUE 9.20e+00; EST_HUMAN HIT: BE926183.1, EVALUE 7.90e-01
tgaaaggaaaccatccaaggtaagctatgtgcctagatgctgacacatggacacattttttttgcacatggtgatctgttttctgctttttaagcactgggacaagttgtgggggtgtctgtgctccaggaggcaggagtattttgtggccaagacaggtaactacctgtgctataggcatcacgggtcatccactcacaggagcaagaggtgctcaggagcacctttgtgtctcccggcagaaagcaccaactgcaaagagacgtgagtgtgccgctcccactaattcacagagtgccttgctgtgccgaaccaggaaacacacgctaaccttcatggctacattcatattaaaagacaactttgcgtctttcaatcatgtatttccctctaattaaggcatattcactttttccccctaattaggtattctttgttgcataatgtttgctctaatctttcggaatctttctcaatatccagtcattacaggctcccctcgaattcaaccaaagcatgttattttttctgctaattacatcctcatttacagattggcgc

SEQ ID NO: 12292 - DNA, 526 bp, Homo sapiens
  MAP TO AC009086.5; EXPRESSED IN HEART, SIGNAL = 2.8; EXPRESSED IN PLACENTA, SIGNAL = 2.5; NT HIT: gi16164628, EVALUE 1.00e-110; EST_HUMAN HIT: BE219724.1, EVALUE 0.00e+00; SWISSPROT HIT: Q92617, EVALUE 9.00e-33
tttgccataggaaaaacatcgtagttattggaaatttgttttataactggaaacagaaagccttactttatatagttgaagtcagctttcaggttgaaggaagtgctactggtactctttttcaagtcatggatagcgttctgccattcctgcacagcagcccaatcggcaattgagatgtagcactcacatgctttatttcctaaataatttataacctcaggggaagagtcagtcggtttggacagcacagtttttctggattcacctgaaagtattttataaagtaagaagagagagattcagatcaattagaaatatttcaaagagcacagaaacctaaaaacatgataagatcatcagtacgaaatatattactataacttttgctttatttaaaaatactgaacgctcaccattcagacaatgtttcgggctggcactgttacacccagcattggctaaggtgagcaccgatttgtcaaagctggagatgcagcaatgaacacctatcatggcacacagg

SEQ ID NO: 12293 - DNA, 574 bp, Homo sapiens
  MAP TO AC000074.2; EXPRESSED IN PLACENTA, SIGNAL = 2.5; EXPRESSED IN HEART, SIGNAL = 1.8; NT HIT: Z26491.1, EVALUE 1.00e-126; EST_HUMAN HIT: BI755346.1, EVALUE 1.00e-110; SWISSPROT HIT: P21964, EVALUE 2.00e-39
acacctgctctgtctacccgagggcaccagagggcacgagaaggctggctccctggcgctgacacgtcaggcaactgaggcacaaggctggcatttctgaaccttgcccctctgcaaacacaagggggcgatggtggcactccaagcaaaggggcgtgtgggtgctgcaggaggagcacagagcactggcgcccctcccctcccgccctgcagatgccggaggccccgcctctgctgttggcagctgtgttgctgggcctggtgctgctggtggtgctgctgctgcttctgaggcactggggctggggcctgtgccttatcggctggaacgagttcatcctgcagcccatccacaacctgctcatgggtgacaccaaggagcagcgcatcctgaaccatgtgctgcagcatgcggagcccgggaacgcacagagcgtgctggaggccattgacacctactgcgagcagaaggagtgggccatgaacgtgggcgacaagaaaggtggggtccgggccagcaggtgctcagctctgggacagggacccaggaccaggcatcaaagcccttacagga

SEQ ID NO: 12294 - DNA, 505 bp, Homo sapiens
  MAP TO AC016602.5; EXPRESSED IN PLACENTA, SIGNAL = 0.66; SWISSPROT HIT: P07854, EVALUE 2.10e+00; NT HIT: AF085184.1, EVALUE 1.20e-01
acagatgaaacgcggaaaagttcagtaaaaccaccaagtaagtggtggagctgggactcagtccaggcacccagacaacctggttccagagttgggctctacattttactgccaatgcagttcatggaaataacaaagatgtgacctggagaaatacccatgactgtagctttgtgctttcacacccaaccaggctacctccacaaatcagtctggccagtgctcactactccaggccccagagtcagattttgtcatagttgcttattgtcaatttcctccttctcttaaggagactgcaaaccccttctcaggccagtgtctattcagggtggtttttgctcaccccagttcagactcctaaccggagtacaaggcgttagaaaggggtggaccgaggacagaggaagaatggtaggctccacaaacctagtgcagaaaggtaagacatgcgatcatttcttgctttttttttttttttgtgacagagttttgctggagtgca

SEQ ID NO: 12295 - DNA, 586 bp, Homo sapiens
  MAP TO AC004178.1; EXPRESSED IN PLACENTA, SIGNAL = 0.64; SWISSPROT HIT: Q9GZK4, EVALUE 1.00e-51; NT HIT: L35475.1, EVALUE 0.00e+00; EST_HUMAN HIT: BI562613.1, EVALUE 0.00e+00
tgtcaggaggatgcactcagtggtccccagggacaggaagatgaagagctggacagagcatcccaggaagctgatggtcttctttgggccccagaggttgaccagcatctgggggacacaacttgtggtaaagcagaggtccaagaaggagaggtcagagaggaaaaagtacattggagagtggagcctggggtacagtacagacagcaggatgatgagtgtgttgcccaccagggtcaagaggtaggaagtgaagacaaccacaaagagagtcctttccagtgctgggtgttcagagaagcccagaaggaggaagcccatgggggagctttggttaaccatggcctgttcttgtttgtacctggagggatgaggctgtcaccccagtgtgattcaacctgtcttatcaaaactcagcctgggtgtttgtgaggtcacagcaggtaggtgtttcttttctgtctctgctcacccagcctccctttcccaggcttattgtcatccagcagctccttctcgttccctgttccttctgatcaaacgttgtctagcagaagtgaggaaaccaagaatgtgctggaaagca

SEQ ID NO: 12296 - DNA, 525 bp, Homo sapiens
  MAP TO AC002380.1; EXPRESSED IN PLACENTA, SIGNAL = 1.6; EXPRESSED IN HEART, SIGNAL = 2.1; SWISSPROT HIT: Q42877, EVALUE 1.90e-01
atttttggtaggggcaaaggttcacaaaactatgtctcagacataactaaagtaatggttcatgcagggatcaaaaagtggcaactatgacatgtcctcactactattgggggaattagagtggagggcactcaatgaattggagagcatactctttgtaaaggagacagccaatcctctggcccaggccttgggtgagtggagggcactcgataagttggagagcatactctttgtaaaggagacagccaatcctctcagtgagttggagtgcatgctctcataaagaagacaggcaatcctttggcccaggcctttggtagttggaaggcatgctctttgtaaaggagacagccaatcctctggccaaggccttgggtgttctgtggaaatgtggacctggttggcaagatgttatgatgtctatttaacatctcccaattttgaaacatcagttcaaaatatttcaaaagactccgtggaccaaaactcacctactggcaatgccaggtcctctgctgtaag

SEQ ID NO: 12297 - DNA, 597 bp, Homo sapiens
  MAP TO AC016597.4; EXPRESSED IN PLACENTA, SIGNAL = 0.47; NT HIT: AB011128.2, EVALUE 0.00e+00; EST_HUMAN HIT: BE247362.1, EVALUE 0.00e+00; SWISSPROT HIT: Q9XHM1, EVALUE 1.30e-01
ctctgcgtcttgcaatcaacagagacctgactgatatacctccctggcctgtgagacactctacccaaagaggaactcaaaggaccactggaagtttaagtcctgctattagatgcagagacaccaatggcaaagaaatgatatacaagacagagctcacttttggaagctgggttaaattccagcaccacgagggtgtctgggcctggagaagagcgtccttctgtctcctgttccccgtgaacatctttctgagtccagtcgccactggaaggagggcggtcatgtctgggatggcccaccagtgccgggtcctctggctcaggctcagagagtatgtcttcctcaatagagtcatactcatcgctggaacaatccttttgtttcctttgtagatttacactaagttccaggcttcttctcagctcctgcaaaaagcccagaagagagatgagagataaatatggtaccttgagaaaaacttatttgaaaatagatcatttgaaccaaagaattattctccccaaactaacatttaacaatattatctcaacccttgtgatgtcactgctttgaagacgagaaaacaaagggcag

SEQ ID NO: 12298 - DNA, 590 bp, Homo sapiens
  MAP TO AC010522.3; EXPRESSED IN PLACENTA, SIGNAL = 0.69; SWISSPROT HIT: Q11130, EVALUE 1.10e+00; NT HIT: AB038967.1, EVALUE 2.00e-06; EST_HUMAN HIT: AA773732.1, EVALUE 0.00e+00
aaaactccgcatggaatgacagagtggaagagccatgggggctcagaataaaggcatttcctgtgtgcacgtgacaatgggtccggacttccggcgccctctggtggcggccattttgattggtgttgggtttatttgtcggagaggctcctgagcgctaggtcggcactgcggtgactgaacccagaaggcggagaacagttgtcctctgctgcacagaggcgactctggagctctgtgacggcgccaagcgtgacccacccctgggccaggatagggaccgtcatgcccatatctcctggctggtcaccctctcctcccaaccctgctttaaaccacgtggttcgatggcggtggtggccacgctgaggctctctgctcaggtaattgtggtgccttccatgccctcaggtcacctcatcatcacccaaaagcctgtagtcttgcaaggaagagtctttaaggtggcagagccataggcagcagatgctgagtttttattaggagtgactgtcaggacagcccttttgagctgctgaaggcctaatcttttatagtcactgtacctgagcgagttagagaaaacgcca

SEQ ID NO: 12299 - DNA, 597 bp, Homo sapiens
  MAP TO AC004181.1; EXPRESSED IN PLACENTA, SIGNAL = 0.72; NT HIT: Z15027.1, EVALUE 0.00e+00; SWISSPROT HIT: O95670, EVALUE 9.00e-26; EST_HUMAN HIT: BI604221.1, EVALUE 0.00e+00
tctttcccctcatatgcctggacccttgtctgtttttgcttttccctttctctcttccacccctctccctaccccccaggccatgggctcccaggggaacctgtctgctgaggtggagcaggctacaaggcgccaggtgcagggcatgcagagctcccagcagagaaaccgagagcgtgtcctggcccagcttcttggcatggtctgcgacgtcaggccccaggtccaccccaactaccggatttctgcctagggccaccgtagggcctgactccttctgccagttccctccctcaaagaaatcctccaatcaaaatcacctcccaccataatccctgtcttctttccatcccctagaaatcctgggaggcaggatccaataattttcctgtgacacttataaatatcctgctcacatctgaatctccttgttgttctttaaccctcactgggactttgtaaacttccaagtcattctcacctaaaccctctgtgaaatttgtaatatggggaagtaggaatgtggaaaacatcctgacttcagtgtctggccgatgtgggtccctctcttgaccctgtcacttgctggctgtgaaa

SEQ ID NO: 12300 - DNA, 591 bp, Homo sapiens
  MAP TO AC004511.1; EXPRESSED IN PLACENTA, SIGNAL = 0.47; NT HIT: AF365976.2, EVALUE 0.00e+00; SWISSPROT HIT: Q28809, EVALUE 1.00e-16
cccatctctcatcctccttgacaagatgaagtgataacgtttaagtaatcttttttcttgtttcactgatcttgagtactagaaagtcatggatgaataattacgtctgtggttttctatggaggttccatgtcagataaagatccttccgacgcctgccccacaccaccacctccccccgccttgcccggggttgtgggcaccttgctgctgcacatataaggcgggaggttgttgccaactcttcagagccccacgaaggaccagaacaagacagagtgcctcctgccgatccaaacatgagccgcctgcccgtcctgctcctgctccaactcctggtccgccccggactccaagctcccatgacccagacaacgtccttgaagacaagctgggttaactgctctaacatgatcgatgaaattataacacacttaaagcagccacctttgcctttgctggtgagtagcttggataagactggcctgcagcagtgaggggtggtggctgcctaaggccaaaaggcctcatgggcctttctctcccttcacccccacaggacttcaacaacctcaatggggaagaccaaga

SEQ ID NO: 12301 - DNA, 569 bp, Homo sapiens
  MAP TO AC004779.1; EXPRESSED IN PLACENTA, SIGNAL = 0.42; NT HIT: gi11466563, EVALUE 1.40e-01; EST_HUMAN HIT: BF873566.1, EVALUE 4.00e-95
tcagctcgatgtctgactggaaggaagtggatgcctcaggctgggtggtcagggaggcttgttggaggaaggacaccagagctcattgagggtgagtagagcatcagcttgggcatctgaaggcgagataacatcaccaagggccttgaatgtcagacctaggagtccaggttattatttttttttagggcttataaaacaaaattaagctttaaaaaacccgtgtccagagtgattgggggagctcctgtgatttattttccagaagtctagattagctttttcaaggtgtgttttttcatccaagttcaggtctgtagggagagtagacaatgctttcccctcctgagccccgtttttggcaggaaaagggccccatgaaaagcagcttaagaactggaactagtgttcttatttaagatgttagtaaatttttgtacaaacaattttcttttaaaagtttttttaagttcttgtgagtagataatatattcatatggttcagaattccaaaaaagcagagtaattggtgaaaactcttcctcctgtctgtttctggggtcactggt

SEQ ID NO: 12302 - DNA, 585 bp, Homo sapiens
  MAP TO AC004790.1; EXPRESSED IN PLACENTA, SIGNAL = 0.44; SWISSPROT HIT: P21414, EVALUE 4.00e-43; NT HIT: K02270.1, EVALUE 1.00e-35; EST_HUMAN HIT: AI742120.1, EVALUE 1.00e-42
atatggcaaaatcctgctgcctctaaaaattatcgtatttgacaccgggtggttggggttgggagtgcacaaatggcctgcttctgtttatagccaagctggtgttctctgtggcttactatgaaacttagatatttaactttttcatggcaaatttgggctttctttttagatactttgtaacttgttttccataaaagatggaggaggtcctgggttccttggtaataatcctctcgggttggggctgccaaaagaaggtcgtccacgtactgaaacaaggcacagttatcatttggcagggtataggccttgaggtttgaggccagtgcttcctcaaagattgtaagagagtttttgaacccttgtgggagcttagtccaggtgagctgtgtagcttccttgtcctattgaaatgcaaaaatgggctgactaactggtgccagtcagatacagaagaaggcatcttttaagtctaagaccgtaaaccaagtggcaacttgctggaataagtcccattaaagtatataggtttggtactactaggtggatagccactgtggccctgtttctagcccgcaagtc

SEQ ID NO: 12303 - DNA, 548 bp, Homo sapiens
  MAP TO AC000357.1; EXPRESSED IN PLACENTA, SIGNAL = 0.39; NT HIT: gi9966790, EVALUE 7.00e-93; SWISSPROT HIT: Q60287, EVALUE 5.20e+00; EST_HUMAN HIT: BF980048.1, EVALUE 1.00e-92
gagcaaagcacctccttgagcctcagttttgtcgtctataaaaatgaacatttcattgtctacaactctgcagcctcacagagttgtcatgaggattaaacacatcaacacatctcaaaggaaggaagaatattaaagcttcttgggtttcgcatgtgctaggtactctcacaaacatttcacaagcacctagcataagacctgacacatagtaggtgttcattcactgttaaaatattgaccacacccttctgcaattagcgtcccccctcctgcttccacttgggaaaacacctaaaggcagcccatccagataactccttcctatttccttcaggcccaaatgaggaatttgggattttatttgccaatcgctccttccttgtattgcgaggtcgttatggctatgtgggctcctcatcgggccatgacctcatacagtgcaaccaggatcagcccgaccgcattcatctactaccctgccgaccgggtatctaccacttccagggtgagtggctcctcttccctgcccaagggttcacagtcta

SEQ ID NO: 12304 - DNA, 540 bp, Homo sapiens
  MAP TO AC004461.3; EXPRESSED IN PLACENTA, SIGNAL = 0.55; NT HIT: L77570.1, EVALUE 0.00e+00; SWISSPROT HIT: P41105, EVALUE 6.00e-18; EST_HUMAN HIT: AI025052.1, EVALUE 2.00e-41
gcaagaagagttgactgggcaacatagtgaaaccacatctctaataaatgtaaataaataaataaatgtcaaagatttgaaagaagaaacaaacccatctaaatagaaaatcaacaaaatccacaaactaagagaaccaataaaggagtttagaaaacatatcctaaaattcacatagaaaagggtcaaaaataggcaacataacaggcaagaacaaggcagaggaagtcgtaacaccagcagtcaagatttatcatgaagctctctctgttgccagccacctgggaggagctgccgccccggccgcacatctgcaatggatggtcgcgaggaatcatccggcctgatcaaggggaataagcagacccacagcactgagcctgagaacttaaaggctgcagctccttccactacaacgagctgattcactgcaggactgtgggtgtggacccggcagctgatggcaaaggtgtggtggtggtcatggagtggagatccggccagcagaagccagccacctcctatgaggggaccaccgtc

SEQ ID NO: 12305 - DNA, 552 bp, Homo sapiens
  MAP TO AC004779.1; EXPRESSED IN PLACENTA, SIGNAL = 0.45; EST_HUMAN HIT: BE065220.1, EVALUE 1.00e-129; NT HIT: AF209068.2, EVALUE 3.40e-02
ttcattaaacggcttccctggaaactttcttaagttatcatagctgcttaagagaagtatttagttttctattaattcagtaattctgggtcccactgcgctggttcatggtaacatgaactagttgtatttcctcttttagagctctctcctttgccgcaaaaacttgtgtgccgctgcgaacaattccatctccagcgcagcttgcatttctccagtagtcttgcagtggtagcatctgaaaatcagtttctaatgaatgagtccaaattgaattacatcgctgccttcagatttgcactagacacagctgttcaacttgtggaaatagttctgtgaccgaccactagcatattaaaaaaaactgctattgctgttgaaacaaaacctgaattttgtggcttaagtttgaatacaattcctggaatcaagttatgataagcgacgtttaatattaatgtagaagtgaaaagcgatttttaaagatcaatcataaggagattcttatctagttaaaatttgttaaacagtggggaggagtaaatgatgctc

SEQ ID NO: 12306 - DNA, 533 bp, Homo sapiens
  MAP TO AF205588.1; EXPRESSED IN PLACENTA, SIGNAL = 0.62; SWISSPROT HIT: Q9UVX3, EVALUE 2.20e+00; EST_HUMAN HIT: AW996337.1, EVALUE 0.00e+00; NT HIT: gi14741170, EVALUE 1.00e-106
gtcagtctgccttcaggctcaccctgtgaactcaccaaagggagtgaagtgtggatgtgtctcttttacctattttcaccttggttcagttctggtttatgcattgtccagactacccaggatgtgacgattgcagggaggaggtcatgtttgtcataaaaatgctttggctccttaggattcagcaaaggtatccactgcctggtgtctgtggtgcctgcaggacagtgcattctgtaggaaaacaggaagaaaagagggctttcaggccatcttcacatcaaccctacgacagacattttcaaatattgttctcaccatccttactccctcccaggcccctgagatgctcatgcccttggattaaacccctgcagtgctggaagaagaggactctgcactgcctgccacaccaggactggaagatccatggccttcccttcttccaaactaccttcccacaagatggggatggtggtcacatctccaacactagcatgctgtggaagagacatcagcattcttgcaacaaa

SEQ ID NO: 12307 - DNA, 582 bp, Homo sapiens
  MAP TO AC000366.1; EXPRESSED IN PLACENTA, SIGNAL = 0.61; NT HIT: AF181897.1, EVALUE 2.00e-19; EST_HUMAN HIT: BF820241.1, EVALUE 1.00e-39
catctgagcccttggaagactaggtgtgttctcaatgagcagtactatcttgaaaggaatcttttttttttctgagcagcaggtcttaagagtgagcacaaaatattcattaaaccatgctataaagacatgtactgtaatccaagttttattctaattatagggcataagcagagtagatttaacatacttcttaagggccctagggttttcaagatggtaaatgagcattggcttccacttaaagtcatcagctgcactagcacctaacaggagggtcagcctgtcctgtgaagccagcattgacttctcctccctagctatcaaagtcctagacaacatcttccaatagaaggctgctttgtctacattgaaaacctcttgtttaacatagccaccttcatcaatgctcttcactaaatctcctagataagttgcttcagcttctacattagcaccttctgctttacctggcatttctggttatggaaacagcttctttcctgaaacctcagattctttttctgcagcttcttcacctctctcccttcctttataaaattgaggagagtcagggccttg

SEQ ID NO: 12308 - DNA, 502 bp, Homo sapiens
  MAP TO AC000358.1; EXPRESSED IN PLACENTA, SIGNAL = 0.64; NT HIT: gi15316764, EVALUE 6.00e-16; SWISSPROT HIT: P48415, EVALUE 7.90e+00; EST_HUMAN HIT: AV706704.1, EVALUE 1.00e-11
aggcatagggaggcttcttcctagcactggtagctcccagctatccttgatgttccttgactcatagctgcataactctaacctctgcatcactccaacgtctacctctgtcttcacatggctttcttccctgtcaatgtccatgtcctctcctcttataaggacagcagtcattggattaaggtccattctgatccagtatgacctcatcttaactaattatatctgcaagaccctaattccaaaaaaggtcacattctgaggtcttggtagacacgaatgttgggggacacgattcaacctactagactgaatgtgtaagcacctcctgggaaaaccagtcacagcttgaagagtaggactggctgccaagtcatctccttccacctcttcaatccctcttttttctcatcaatgccccctgttaggccagggaatagttccagaagcatcttgttcggcctggctgcctgtctttaacagtgtgtcatgggaagtgtgc

SEQ ID NO: 12309 - DNA, 573 bp, Homo sapiens
  MAP TO AC010485.4; EXPRESSED IN PLACENTA, SIGNAL = 0.45; SWISSPROT HIT: P14147, EVALUE 1.60e-01; EST_HUMAN HIT: N50865.1, EVALUE 1.00e-05; NT HIT: D79206.1, EVALUE 3.50e-02
aatcgcacatttatcctgcctctgtttaatatgtgaactgtaccactgggtaagcaaatggtggacgactggaagcatctctttttaaaagtactcaagttaatatgtgaggaagtgacagaattagaatatcaccattttgaaacccctagtgaattaacagagctaagcattgtgctgcaacagctgttagcatcacacaaagagaggcaaaccggatattatgtgcctcctaacgaaggaatgcagcacctctggtcctgccaaaaggacagaaggtgagtgtgatccaacttctggatccatctgccaatttgcaggaaatagggaagaacatcttgaactgcaccaagagtatcaatcagcagaatcccgacagtaggaactctgtggatcaaaaggctttggttcctcgatagagaaattgtaaagaaaagaagtgggaggaaacctgtggattgaaagagactcaaacgatagatcgcatttttttaaaatggcaaaactacatcatatgtcttggaaggcacacttaggtgatgaaagatgttaccagaaagggggtcctgatct

SEQ ID NO: 12310 - DNA, 509 bp, Homo sapiens
  MAP TO AC003048.1; EXPRESSED IN PLACENTA, SIGNAL = 0.49; SWISSPROT HIT: P11837, EVALUE 1.40e-01; EST_HUMAN HIT: AA687121.1, EVALUE 1.20e-02; NT HIT: gi9629553, EVALUE 4.80e-01
tgtatctgccagggttaggggaagctctcaatagtaacgtgtgctgagaaccagctggtgccctgcgtgagtgcagcgctccgtgaagaacattgtgttatgaactcctgggatgcctggattcccttccattcatccactttgttcacctaaagggccagagcaaacaaccgtccactcaggtaaacattcccaccccagagcgaccgtttgcatcctccaggagttaacagtacagctggactcacccgtgggtctcctggaaggcactgtgtcggaaaccgagcttctctcctgcttcccttgctgtggcctatctgggaatctatagtctggagcatcccagggcggcctcctttggcagatggtgtaggagtgctgcaagccctcctggatgcacccaaggacccaggaagatgggagcgtggatctctgtgcctcagcacagaggctgggaggagagacagcaggcgccggctggcaggagcagtccatgtgggagcttctgt

SEQ ID NO: 12311 - DNA, 566 bp, Homo sapiens
  MAP TO AC020949.3; EXPRESSED IN PLACENTA, SIGNAL = 0.45; NT HIT: AL163202.2, EVALUE 4.00e-79; SWISSPROT HIT: P35918, EVALUE 5.50e-02; EST_HUMAN HIT: AW303526.1, EVALUE 1.00e-61
ccagagggaagcattctcagaatctagtttctgatgtgtgcattcaactcacagatttcaacctttcttttgatggaacagttttgagacactttttgtggtatctgcaagtggatattttgactgctttgaggaattcgttggaaacgggaatatcttcacataaataccacacagaggcattctcaaaaacttccttgtgatacgtgcattcaactgacagagttgaatcttcctttggatctagcagttttgaaacactcttttggtagtatctgcttgtgtatatttggagtgctttgaagccttctttggaaacggaaatatattcacaaagaaagtagacggaagcattctcagaaacttccttttgatgtgagcattcaactcacagagttgaaccttccttttgatatagcagttttaaaaaacgttttttgtagaatctgcaagtggattgttggactactttgaagtcttcattggaaacggctatattttcacctaaaaacaagacagatgcattctcagaaacttttttgtgatgtgcccattcaactcacaga

SEQ ID NO: 12312 - DNA, 523 bp, Homo sapiens
  MAP TO AC008625.4; EXPRESSED IN PLACENTA, SIGNAL = 0.66; NT HIT: AF241241.1, EVALUE 2.00e-53; SWISSPROT HIT: Q29121, EVALUE 1.00e-12; EST_HUMAN HIT: BF359671.1, EVALUE 1.00e-101
cactggctcattgcagtttgcctccctccaagtgggaggggctcccttaccaagcaaggggggaagccagttgacattggcttcacagtgtgaatccaagaatgtgatgacatccccagttgccactgaggcccccagcattcgggtccttatcagcccttcccgtttcttggttcgaagaatcctcacactggggaaaagggccatgtagtcttcaagaggcttcttcaggtgctctatgagacagaagaggacagaagagtgagaacagttgcttagtagtcatccttatgactcctcccttacatgtgaactgcacttcacagtctagacacagctttcctgtacactgcctcactagacctttcagacagggagaagaagggcagtgttctcatcacctgtgtactacagatggagaaattaaggcttaaagaggtccagtgaaggtgccacgacctggaacagagagagatcttctgtccaagggtgtgaacatttgtggtttatgcctgactgggaa

SEQ ID NO: 12313 - DNA, 596 bp, Homo sapiens
  MAP TO AC015896.4; EXPRESSED IN PLACENTA, SIGNAL = 0.38; EST_HUMAN HIT: AW445016.1, EVALUE 4.00e-12; SWISSPROT HIT: O46382, EVALUE 1.10e+00; NT HIT: AF283321.1, EVALUE 2.00e-03
tcatccaagggcagaatctctgagattcttctcatggtccagtggtctgtgattcattttttttccccagggtcagcactatattggagtaagtttgtgatttgtagggagcttaatattttaatttatgaaaggaccattaaattccttgctaatagacactgtcatgctgctcagcagcttcgttagccaatccatcctgagtcttaaattaaagccaggaaaccccagggtgtcactcagtgttaatgtcttgaaagcattaagaggtttataggagcttatattaagcttcccagccaccttccttcttgagtcagcttccattctgctccagctttctagatgccactcagagcagcccatgttggcaatgactttgatggtggtgtttcaaagacattttaagtacagtcatgtgttgctaaatgatggggatatgttctgagaaatgcattgaaggctattttgttgtgcaaacatcacagagtgcacttactcaaacgtagatggtctagcttactacacacctatgtatatggtataggctattgttcctagactacgaacttggaccgcatgtcaccgtactgaat

SEQ ID NO: 12314 - DNA, 551 bp, Homo sapiens
  MAP TO AC022247.2; EXPRESSED IN PLACENTA, SIGNAL = 0.45; SWISSPROT HIT: O00341, EVALUE 5.20e+00; EST_HUMAN HIT: BG723884.1, EVALUE 4.00e-61
ttccagccttgactattgggagttcttttagcttctgtgacatttacaatttctaaaactacaatgaaactttcagaatgactgttctacccagtgactaaattactccttaagattaagctaggaactcaggaagagagattgctcttaggtaatgcattaaataatatcctggttgtctgaaataattcatccgacagcaagtaagttaaagactaggaagaaaagtgcccaagaggtagtaaatattttaagaaattaatgaaacagaaagataaactgaaaaaaatccaaaccttttaaagcaaatttataaatggcttcacatgctttagccaaaatttcctcttctggagaattaagcattaacaccacagttgctgcttttttgctttcaatcattaatgggtcaaactgaaaggcagaaagaaaactatcagtttcacatatgagctttaaaaatcacattaaaaatgaatgggtcttaaaacttaaagaaaatgtaatcttgcaaaaaggatgtggtcactgcccaataagtgcactgcaaa

SEQ ID NO: 12315 - DNA, 586 bp, Homo sapiens
  MAP TO CHR22_192.0; EXPRESSED IN PLACENTA, SIGNAL = 0.32; SWISSPROT HIT: P15656, EVALUE 3.30e+00; EST_HUMAN HIT: AW194556.1, EVALUE 2.00e-88; NT HIT: AY039854.1, EVALUE 2.00e-03
atcaccagttcacccacctcacccggcaagctgggccctagtttggcgacaggcatcttccacccacctgggaggcagggttcaacactctgcctctgaccttgtttccttcttctgccacctgcttaggcagccagaaggggttgtccagccagcacctgggttttggtgctcctcaagcaggtggaggaagtttcaggcacctggctcctcaggtgtctgccatccagctgctcttcaggcctgcccagcagagagctctcttgatccagctagaactggccagaactgattcactcaggaatgtgtagactttggcatcaggggctgctttaatttgcacaatttccaaatacctcttttttcttctttttctgatgagtcatctccctagacttgcattttaaagagatagatagttatcaggttccagagaagacatggtagaacatttgtatctcaaaaacacagagccgagacttcaggtttagatactataatttgcctaaaccaaaaaggaaggtgtaggtaaagttctagtcaagacaggatggccaggaaaaacaccttaaaccaagggatggct

SEQ ID NO: 12316 - DNA, 574 bp, Homo sapiens
  MAP TO AL137798.1; EXPRESSED IN PLACENTA, SIGNAL = 0.87; EST_HUMAN HIT: BF763555.1, EVALUE 0.00e+00; NT HIT: gi16161787, EVALUE 1.00e-117; SWISSPROT HIT: P05095, EVALUE 6.30e-01
cctggtttcaaggtgactgcatagctaagataagttgacttaaaggagatcaagactggagatgacaagagtgaaaccagggaaacatcatcttcaaataagtagacaaggctgccgctgacatccctcagtgtgattaaacctatttgatttcaccagtttttaacccatcatgtgtttgcctttcttctccccagtccctggccccacctcttctgccacaaacgtcagcatggtggtatcagccggccctttgtccagcgagaaggcagagatgaacattctagaaatcaacgagaaattgcatccccagctggcagagaagaaacagcagttcagaaacctcaaagagaaatgttttgtaactcaactggcctgcttcctggccaaccagcagaacaaatacagtaagatctataggctcaccatcacgaaagtgatgaacgaagtcctgtcttctctctgagaaactaagtgctctctccatctaaaataatgtcatcctccccatacttctaggaaaacagaaatgggtattttaacattttgttaaagttggaagacagaggtccca

SEQ ID NO: 12317 - DNA, 598 bp, Homo sapiens
  MAP TO AC022525.3; EXPRESSED IN PLACENTA, SIGNAL = 0.32; SWISSPROT HIT: P08548, EVALUE 4.00e-08; NT HIT: AB007953.1, EVALUE 5.00e-20; EST_HUMAN HIT: AW884269.1, EVALUE 4.00e-24
tgaggtgcattatttggtcgtttgaattttttctaagattttcttttgatgtagttgtttattactataaatttcccttttaccactgttttgatttctagttttgttccattgtggtatgagaagatacttggtataattttgaactttataaatttgttgatacttgttttgtgttctaacatattgtccatcttggagaatgttctgtatgctgatgagaaagatgtatattctgacaatgttgcacaaaatattctgtaaatgtctgttaggtctatttggtctaacatgcagtgtaaattcaattttttttggctttcttgccacagagagagaatatgtgggattgggacagggagagcacagtgattgtgagactttgtgttggaacacagttctgtgctgtctcagtggaaagcaacactggaaaaaactcagctgacaccatgtagggagcatttataacagccctagtcagaggagaatcatccatgccagtggtcagaacttaggttctggcaagccttgccattgaagggtgagtgctctagggtcctaagtaaatgcaagaagcaggctaagcataaggactgcg

SEQ ID NO: 12318 - DNA, 530 bp, Homo sapiens
  MAP TO AL137118.3; EXPRESSED IN PLACENTA, SIGNAL = 0.31; NT HIT: L78810.1, EVALUE 1.00e-04; EST_HUMAN HIT: AI935047.1, EVALUE 2.00e-04; SWISSPROT HIT: P11369, EVALUE 1.00e-04
tgaccttagggtggagaaggatttcttacaaagattacaaattattaagggaaaattagatatatttgaatatcaaattaaacacctctgctgtgtagccaaacattacagctaaaattgcctttaactggcaattgtttagtatccagaatatatctagagcttttatatacctataaaaattgtaaacaatataataataaagcaggcaaaagatattaaagagaaaatttttaagaaggaaattttaattgccaatatgcatatgaaaaacatctcaacttcactagtaatcaaaggaaaacaaattaaagccacgatgagatgttatttcaccctgatcaatttggcaaagattaaaatgtctgacattatcaagagatggcaaggataacaaatgtcaatgttatgaaacattcttttaaaagactggggaattttctagattaaagaagattaaaggagactaaagatacatgacaattaaatgcaacacagtatttgatccctgattgaattctggactgggg

SEQ ID NO: 12319 - DNA, 577 bp, Homo sapiens
  MAP TO CHR22_120.0; EXPRESSED IN PLACENTA, SIGNAL = 0.35; NT HIT: gi14750539, EVALUE 5.50e-01; SWISSPROT HIT: P06674, EVALUE 1.40e+00
tcatcagcacagttgggaacagcaggggaaaatgtcttgagtgaatggactcaataacttagacactgttggaatccaaaagacgcacccaggacaaagcatcggtagaggaaagcacattcccgacgctgacccatgaacttctcacactccagagttcccctcacaggcggcagcagggcctgtgtttcccagttggaacaggggtcgttttggcccatgaccatcaagacaggcgctgttgaatgcccctgtctggcacaggggttgtaaattctgaggaaaatgggcagccagcattcctgctgggcatccattccccatttctctctgattctgctgtttctcaaggaagcagaatctcgcccattccaccttctcctggcctccccggcacagccactactcttgtacaattactgccttcagagcctgttgttccttctctcgaactgacctggaggaaataattaccaacagcatttagcactgctctcttcttcttatagtacgtggggatcctttgatgtattgtgatattaaacatctaagtaacccagatgggtgttgtctgtcg

SEQ ID NO: 12320 - DNA, 543 bp, Homo sapiens
  MAP TO AC017082.3; EXPRESSED IN PLACENTA, SIGNAL = 0.44; EST_HUMAN HIT: AV731139.1, EVALUE 1.90e-01
caaagcagagggaaaaatgcaaaatgtattttacagcaattagatgccctaattccaaatttacaaaattaacgtataaaaaggaaattataaatcattgtcaattatagaaatatgatgcagaagcactaaaaaacctgtgctactttgaaaaatactatacagtaggagtgattgagttgtttttcttggaaaaataaagatgtctaatataaaagactttcaaaataccataataattcatccacttatacacaaacacacacatacacaaatactcattgcgacacatgcagggtattcaatcaagaaagtctaaaatccaagcctgatacaatcttgtacatgtttagaaataaacatattattattatagtcagctatactagccaagtcagccatgatgcctgtcctgcacaaatttccattccagatgatgtcaccctgcccatggttctagctcataaaatgaccatcaatcagaccatcagccttgttcttcatgaggtgatcaggcctaagtgtgtcccacattgctgtgtc

SEQ ID NO: 12321 - DNA, 526 bp, Homo sapiens
  MAP TO AC025179.2; EXPRESSED IN PLACENTA, SIGNAL = 0.41; SWISSPROT HIT: P12263, EVALUE 1.30e+00; EST_HUMAN HIT: BG178665.1, EVALUE 0.00e+00; NT HIT: X57945.1, EVALUE 5.00e-01
ttagcggccatttctgtaggaatttcgcttcttttactcttagtggtttgtggaattgggtgtgtttggcactggaaacaccgtgttgccacacgatttaccttaccgaggtttttacaaaggagaagcagcaggagaaaagtctgtactaaaacattcttgggcccccgcatcattggcttaaggcatgaaatctcagttgaaacccaagaccacaaatctgctgtcaggggaaataacacacacgacaactatgaaaatgtggaagcaggtcctcccaaagctaaaggaaaaaccgataaggaactatatgaaaacacagggcagtctaatttcgaggagcatatctatggaaatgagacatcttctgactattataacttccagaagcctcgtccttctgaagttcctcaagatgaagatatatacattcttccagattcatattagcttttcaaaatattgacttttgttattggatgataaatattcactgtaatttttcaacagcaaagacaaggaatca

SEQ ID NO: 12322 - DNA, 500 bp, Homo sapiens
  MAP TO AC015833.3; EXPRESSED IN PLACENTA, SIGNAL = 0.31; SWISSPROT HIT: P27835, EVALUE 1.20e+00; NT HIT: AJ012166.1, EVALUE 5.00e-07; EST_HUMAN HIT: T59505.1, EVALUE 3.00e-09
ttgtcagagtgggtaaaaatgggtgagatccaactatatgctatccaccaaaacacactttaaatatacagaaacaggttaaaaataaaaggatataaagagataaatcttgcaaatgccaattataagaaaaaatggactggctatattaatatcagtcaaagtagacttcaggacaaagaatattaccagagaaaaagagaaatatttcattaagaaaaatatcaagaaataataaatcctacatgtctttgctcctaaagacagagtttcagaagacatgaagcaaaaactgatataacggaaagaagaaaatttaaaaatccagttacaattggagacttcagcattcttttttccatagttgatacgcaaaaaagacagaaaatcattgagaatacagaaattatcaatcaacttaaccaaaatgactttcacgtcataatctatgtaacaacagcagaacaggcatgctctgatgcacatgaacatgcatcatg

SEQ ID NO: 12323 - DNA, 540 bp, Homo sapiens
  MAP TO AC015833.3; EXPRESSED IN PLACENTA, SIGNAL = 0.35; EST_HUMAN HIT: AW994466.1, EVALUE 0.00e+00; NT HIT: gi14722113, EVALUE 9.00e-06
atgtgttattcaggtggggcaagcttccctaacgggacatttgctccaatttgggtggcaggtgaagacgtaaagagagagtctaatatagaagttttccataggtaaaagcaaatagggagtgttccagatgatgacggctttcagcgtgggtcatcaatggagaaaggacagtacgatgtgtggcaaggagaggtggaagcaggaaaaaataatatactggaggaagaacctataatccgtaagtcatcaatgagcaatattcattcagaggaatatagctttcatactgtaacatacctattgctgctgcaacaaatcaccacagttagtggctaaaaacaagacaaacttattattttgtcattctggaggtcagaacttctaaatgggtttgcagtcactaaaatcaaggtgttggcagagttgtggttctttctgaagtgtctagaaaagaattttttttacctctttttcagcttctagaggttgtcaccattccttggtttctggcctccttccattttcgaagccagtgat

SEQ ID NO: 12324 - DNA, 508 bp, Homo sapiens
  MAP TO AC012432.4; EXPRESSED IN PLACENTA, SIGNAL = 0.4; SWISSPROT HIT: P08044, EVALUE 4.10e-01
cctacgttggtcctcacctcacatattctgctttgtgtccccaaagctgggccctctaaagtgctctctccagacttcctaactagctggcttttggtaagctttgccattggacgagagggaatagatattaaaaggcaggatgaaggaaaaaagcatgttctgcatctagctctaaaagaagtagttgccgaccttggctctggtgacattgatggggagacagtcatgatctttagcagctgtggcagtagtaggccaaacagaggcccctctttggaggtccagtccagcagcatcagtgctggtttggagactgaattgctgcaggggcatatacaacagcacagcagcaggtgtccgcttatggttccaactcagggtcatttgcagctttctgatctcagtgtaaaaatctgtcatccttcctatactcctatatcactctcctctcctttttcttccttcagagttttcaaaacattaatgccctatcccatgtatggaa

SEQ ID NO: 12325 - DNA, 590 bp, Homo sapiens
  MAP TO AC006349.3; EXPRESSED IN PLACENTA, SIGNAL = 0.48; EST_HUMAN HIT: BI548462.1, EVALUE 1.30e-02; NT HIT: AF209976.1, EVALUE 2.00e-03; SWISSPROT HIT: P39689, EVALUE 2.00e-02
agccagccaaggtttatgtgtctttctccggctttcagcaccatcaatctttgaatgctatagttacaagtgggtttatacagctactttcctacatataaggctccaaaatgaaagtaaaacatttctcaattacaagggctactccagaggtctcccattttagatctcagaaagcatacgtagtgtaacagccccttcctcatcctcatcctcatcctgcaaggccatgttttcagatttcttaaatggatttaacagtgcagaaagtttctgatcgctgatggctggctctggaagccaggccttctggaaccatgcagtaggcacggggtaggctgtgtggtctcccaagaacacatctccgtcctggccaaagaagtgaggtggctagggaggcactctcaggaatgagaaggaccttcaccctggcctccttgttgcctttcccaagtccagagcaaatggagctagatgaatggcctccagctcccctctgccccaatttaagtttaacagtttcttgttttcttgtacaatgaagaaataaaaactacacaacctctgggaccacagggaggcttttgtaa

SEQ ID NO: 12326 - DNA, 586 bp, Homo sapiens
  MAP TO AC018735.5; EXPRESSED IN PLACENTA, SIGNAL = 0.47; EST_HUMAN HIT: BI562507.1, EVALUE 1.00e-107; NT HIT: gi15668172, EVALUE 8.70e+00
tttttccctatcatgtctcctaaggtaataaatcagaaatatgttttagaatttttaattagttttaagaatctaaagaaaaagtacatcacctgcaaaaggtgacaggaagctttttctctaaaagtagctcttgacaaatagagcagatatcctctgaatcaatttccttctgtttaatgtacccatcttcttcaacatgttcattttcgtcatttgttcctggttggggagtttgaactcgatgtatcccccgaagcaagtcacttatctctctttctccaagacccagttgtaaagcagctagtgagaaatcccaaagtattaaaatccagtcataaaattggagctacagagaggtaacaacttatgctgaaagttagaattttctttcaaatatcagagagacagttttgattgaattatcacactgacattgaccccttctttacatttttttcagagccaaaatgtcagaaaagagtcatttaaaaaaatataaaaattattattttttcttgtaactgaaaaagagtcaatgcaaacagtgcacttgaatatgatagtgttcatccttggattggtg

SEQ ID NO: 12327 - DNA, 543 bp, Homo sapiens
  MAP TO AL137178.3; EXPRESSED IN PLACENTA, SIGNAL = 0.51; SWISSPROT HIT: P00164, EVALUE 8.80e+00
aaatcattcccttgctatcccttaatgtacatacatatgtgcctaaaatattgagttttgctttattttgagtttataaaaagtatatcatactatatgtaatcttctatgatatactttatttctaaaacattatgttgtgggattcatctatagaattgtgactaatttattttcactgatatataatgtgatatatttgtccattttctacagatcaatatctgtgtgacatccgtatttttagttataacatacatgcctgtatttattattctccaagataaagagttttgtcataaaccttctcacataatttctaggttcagatctccagaagtgttccaaggtaaaaatttaggagaggaatccctaggtggtaggtatgtgaatgttcttcttaacattattatattaatggctttcaaaattattttaccaatttatactcccaccagcaacataataatgcataataatattttcttcaaccatgttaaaacattctttaaaaattatttgccaatccagtgtgtattgtga

SEQ ID NO: 12328 - DNA, 568 bp, Homo sapiens
  MAP TO AC011636.3; EXPRESSED IN PLACENTA, SIGNAL = 0.33; SWISSPROT HIT: P22670, EVALUE 9.30e+00; EST_HUMAN HIT: AW198093.1, EVALUE 1.30e-02
ctgttttcaaggaagccagggtagggggagcacagaggttatgctctggtcctcacctccaggttccagggctgatgacagtaaaagaaagcagcactgatctgggtgcggagtctggcaccaggttgtcttcattggatttggagttgaacttgcttggatttcctccctggaggggtgggggtggggttgggagtattccctgctgatactgtggttttgtcgggacatttcagtgaaaacattctcctactactgatgcttttcagtcaaagaggctttcataaattccctctgataccaaaatgggatttatgagaaatcccagaactgatgtatgcaactgcgtgtgtagcacagttaccctgatttatggaaaaatacaagagacagagggtgagctgctctcccaggcttaccaatgagcaaacacatgtttactttgtacctgtaactgcatggcttttgtttctacactacgttatattttaaaataactttatcttactttacacctacagggaaggggctggcatgaacaaatgccagtttgcccttaatgaagcca

SEQ ID NO: 12329 - DNA, 584 bp, Homo sapiens
  MAP TO AC012661.4; EXPRESSED IN PLACENTA, SIGNAL = 0.39; EST_HUMAN HIT: AL120258.1, EVALUE 1.00e-18; NT HIT: AY028079.1, EVALUE 0.00e+00; SWISSPROT HIT: P08547, EVALUE 2.00e-36
ataccatcacctgtgccctccccagagactctgtctattggtcttggtgggagcatctatgtggttgtaattagaaagtcaaattgtccctctttgataattatataatatcatatatacaaaaattctaaagaccaccaaaaaaactcttagatttgataaataaatttaataatgtttcaggatgcaaaaatcaatgtacaaaaattggtagcatttttatacactaatgatgatcaagctgagaactgaattaaaaagtcacttccttttacaatagctacaaaaaaggtaaaatgcttagaaatacaattagtcaaagagatgaacgatccctacaaggaaaactacaaaacactgatgaaagaaattgtacatgacacaaatgagaaaaacatcccatgctcatggattggaagaattatgatcattaaaatgactctactgcccaaagcaatctacatattaaatgcaattcctaccaaaatgccaatgttattttttataaaattagaaaaaaaaaacactaaaattcacatggaaccacaaaaagagcctgaatagccaaagcaaatctaagcaaa

SEQ ID NO: 12330 - DNA, 526 bp, Homo sapiens
  MAP TO CHR22_89.0; EXPRESSED IN PLACENTA, SIGNAL = 0.31; EST_HUMAN HIT: H55134.1, EVALUE 2.00e-93; NT HIT: gi14743565, EVALUE 3.00e-08; SWISSPROT HIT: P46677, EVALUE 5.60e-01
tttggaagacaccgaagtgacaaattaatatgaaaactagaaagaaaaaatattcaagaacatgggcactttattaggataataaaccagcatatgagtgttttgtttttaaaggattttaagataagtatatttaactacagatttatcttacaacaacaagaagaagaaagaataaaggctgaagagttgtatgaaaaagatacagaagagttaaaaataatggaagagcaatataggacacaaactgaagtgaaaaaacaatctaaactgactctcaaatcattggaagtggaattgaagactgtaagaagtaactcaaatcaggtaaattaatgtttggtaaaattttacatttctaattttattttattaatattacttagaatatccctttgacttagttctaaaacaaaccacaaattttatttcatcttaaaaataaatgatacttatagctacaattatttattataaatcttggcttcaaagttatattttatttcagctcaaagacctttggaaa

SEQ ID NO: 12331 - DNA, 574 bp, Homo sapiens
  MAP TO AC013816.3; EXPRESSED IN PLACENTA, SIGNAL = 0.36; EST_HUMAN HIT: AA769059.1, EVALUE 2.00e-01
acaggtgccactaatgaggcagtgaccttaatgatagatgtggtaccaagaagacactaaccactctctagactgttgagtgttccataaatgtcacccaatccagctgggtctgatcagaacgagattttcaattcatggaatccagtcatgagaaatgcttatgcagtcttaaatgtaattacaccaagttttagttcatctaggtgtctcactatatcttcatgagaatccaactggggagaaaacaagacctaagaagcaagtaagtaaataaaaacaggaaaaaaggttattaaggtaaccaagtaatttattttcacaagaacaagattttggaggcctagttagtaaatgtaaaccacttctaagattccaaaggaaacaggcaacttattctttttcacacatgcaaaacttttctgatccttgagaaaatataagcttcttttcaaaacctattttaaaatttgaaaatgaagggagaaatgtgatcttataatgcaaaaaagagagtttacatttgccagattttttgaaaccactaaaatgctcatcaacttttcaaaggccg

SEQ ID NO: 12332 - DNA, 525 bp, Homo sapiens
  MAP TO AC005324.1; EXPRESSED IN PLACENTA, SIGNAL = 1.6; NT HIT: gi14771489, EVALUE 0.00e+00; SWISSPROT HIT: Q16763, EVALUE 7.00e-52; EST_HUMAN HIT: AL556163.1, EVALUE 0.00e+00
tcttccacccgaacgtgggcgccaatggcgagatctgcgtcaacgtgctcaagagggactggacggctgagctgggcatccgacacgtactgctgaccatcaggtgcctgctgatccaccctaaccccgagtctgcactcaacgaggaggcgggccgcctgctcttggagaactccgaggagtatgcggctcgggcccgtctgctcacagagatccacgggggcgccggcgggcccagcggcagggccgaagccgggcgggccctggccagtggcactgcagcttcctccaccgaccctggggccccagggggcctgggaggggctgagggtcccatggccaagaagcatgctggcgagcgcgataagaagctggcggccaagaaaaagacggacaagaagcgggcgctgcggcggctgtagtgggctctcttcctccttccaccgtgaccccaacctctcctgtcccctccctccaactctgtctctaagttatttaaattatggctggggtcggggagggtac

SEQ ID NO: 12333 - DNA, 541 bp, Homo sapiens
  MAP TO AC005630.1; EXPRESSED IN PLACENTA, SIGNAL = 2.4; NT HIT: gi13651705, EVALUE 2.00e-06; EST_HUMAN HIT: BF000754.1, EVALUE 0.00e+00
cgtgaacatgaggagaggctgtgtgaacaggaggagaggctatgtgaacaggaggagaggctacgtgaacaggaggagaggctacatgaacaggaggagaggctacgtgaacaggaggagaggctgtgtgaacaggaggagaggctacgtgaacatgaggagaggctgtgtgaacaggaggagaggctacgtgaacaggaggagaggctgtgtgaacaggaggagaggctacgtgaacaggaggagaggctgtgtgaacaggaggagaggctacgtgaacaggaggagaggctgtgtgaacaggagaagctgccagggcaggagaggctgctggaagaggtggagaagctgttagaacaggagaggcggcaggaggagcaggagaggctgctggagagggagaggctgctggaagaggtggagaagctgttagaacaggagaggcagcaggaggagcaggagaggctgctggagagggagaggctgctggaagaggtggagaagctgttagaacaggagaggcggcaggaggagcaggaga

SEQ ID NO: 12334 - DNA, 513 bp, Homo sapiens
  MAP TO AC011446.2; EXPRESSED IN PLACENTA, SIGNAL = 1.4; NT HIT: gi14763542, EVALUE 0.00e+00; EST_HUMAN HIT: AL554053.1, EVALUE 0.00e+00; SWISSPROT HIT: P17950, EVALUE 6.00e-24
tcagcgtggagtcgggggacgctcctcctcgccagggttcccgtcccctttccctgctgggtaaatcgcattctgtctctttaaggagtgtttggccgcgacgagttggaaagcccggatgcgtccttcggttgggcggggtgtctcagtgacgtcactgggggtataaaagggcctgggtggcgggcgcctgggcagagcgtcctagcagtgtcactgcgtgggttggtttgtgtagagaggcgtgagcgagcccgttgtccggagtgcacctgctgcctgttctgtccctcccgggagcccccgccgctgtcgccgtcgagtcgccatggaagtgcagaaagaggcacagcgcatcatgaccctgtcggtgtggaagatgtatcactcccgcatgcagcgcggtggcctgcggctgcaccggagtctgcagctgtcgctggtcatgcgcagcgcccgggagctctacctctcggccaaggtggaggccctcgagcccgaggtgtcgttgcc

SEQ ID NO: 12335 - DNA, 530 bp, Homo sapiens
  MAP TO Z81365.1; EXPRESSED IN PLACENTA, SIGNAL =  11; EST_HUMAN HIT: BG574925.1, EVALUE 1.90e-01; SWISSPROT HIT: P48751, EVALUE 2.30e-02; NT HIT: gi14763922, EVALUE 6.00e-47
agctggcattctgtgccggggcacacgtattggaggacgatcacggcaaataggaagagcatcaccaaagctagcagcagcttgttggatttctcatccatgttcccgacgctgggggaaacccaagctcgttacgtcaatcccgcagctcagcccgcgctcgtcgtgcccccgcaccgcccccttcccctggagccgctgctgcgcccctctccccctcccctccgcaccgagtactccacggcggcggcggctgcggcggcggctcccttccccgcttccttccttcccggcaggctcagcgctgtggcttctgcggcacacacacacccccaccccgactccttcccgcgggccgttcgccccctccccccgccagagctctccggagctccccggagcccctccacggggtttagccccagtgggacccctccgggcccagtcgccccactcctcaactcacgcccccagtccgggcccccgcgtgtctcgctccactctcggtggctcccgctcccatccccatc

SEQ ID NO: 12336 - DNA, 568 bp, Homo sapiens
  MAP TO AL031709.10; EXPRESSED IN PLACENTA, SIGNAL = 1.7; EST_HUMAN HIT: BF359997.1, EVALUE 1.00e-106; SWISSPROT HIT: P02457, EVALUE 2.00e-04; NT HIT: AB018277.1, EVALUE 1.00e-38
tgtccacagcgcctcctcccgttaatgccgaggtgtggcctctggtgatggcctttccccacgcttcctgggagcttccgatgcccgccagggtgtgagaaagggctctgcccttggctgctgagcccccagtgctgcctgggcccctttgtgctgggggtctctacctgtccccagcacaagccaggctccctgacacctctgccttctttccctgccccaggccctggtcagttttttccacgcagagggtcagggtttgcccctggagagcctgagggatggaagctacaaggtgaggtgggaccctctgtggggcgggggtgtggatgaggggactgagttcaaactgcagccccacacgggctgtgtccttgagcatgaggtggccccacgggcagtcaggtctccaagtgccagcgctgaccaccagcacccaggggcccctcctgatgcgcttccccctgcagaggctgaaggaggagctgcggctgcacaaatgttccacccgcgagtgcatcgagcagttctacctggacaagctcaaacaggtagggaggcgccaggg

SEQ ID NO: 12337 - DNA, 554 bp, Homo sapiens
  MAP TO CHR14.3; EXPRESSED IN LUNG, SIGNAL = 1.2; EXPRESSED IN PLACENTA, SIGNAL = 1.1; NT HIT: AF111168.2, EVALUE 0.00e+00; EST_HUMAN HIT: BF856355.1, EVALUE 2.00e-01; SWISSPROT HIT: Q9UH03, EVALUE 6.90e+00
gagaaatgagaatggccagctgtccaatgcccttacctttcctgagacaaattcttgccataggctttgctgacaaaatctgttaattgcaactttgggcaagatgctgtgtctttcccacagtcttcaaagtgcacggagagaaagagttcactcagaagctgcagcacttgggagtgggccatgtttcttgctgtgcatatgtttagggccgcatagaacactccctccaaccacttgatattgaggattattccccctacacatcaatgagaaggtaaataccagttagcaccaccaaaaatgagttgcagaaaacctagaataaacccctgacagtgaatagccgccttttttccaagacagattggtaatatgaaccacaagataagcaaacattccttcctgagccacaagtgctacttgtgccctttataacacatcatgtgttgaccatcccaaaagtggacagatacaactaatgtagacattgctaatggcaaaaagtgtctctggaatagtcgttgctaatatggagaaggaactggggaaaa

SEQ ID NO: 12338 - DNA, 539 bp, Homo sapiens
  MAP TO CHR14.3; EXPRESSED IN LUNG, SIGNAL =   1; EXPRESSED IN PLACENTA, SIGNAL = 1.1; SWISSPROT HIT: Q92020, EVALUE 3.40e-01; NT HIT: Y18740.1, EVALUE 1.30e-01; EST_HUMAN HIT: BI000883.1, EVALUE 7.60e-01
ttctgacgtgagggtgtctgggtcttcagagggtgcggttgcagccacagtgataagggtgtgaggtgtctgacctactctggcattggtgtgtgacactaggccaggcccctgtccttctggtctgtgctcttgcctggagcagtgtacagatgtggggagccccttctcagaatgtagatgactggggttcttgtctgcctcaaaccctcccagagctccttgctgcccccacatcagggattgacccctctgctgggcattctcagctttgcacaatctctgctaccttctttttccagtctcacctcccgctatgcccacatcatcagatctcctgagctgcagccacagtgcccaggtcaggcctccacctaccctgctgtgatgcccccttgcccatcttcctcctggagaacttgtgcaaagagctctatccatcccacatccaggagaacccaattcgcattttcacaaagacacttctctgcctgacctggttctccgttttggaccattggatcgtgaatttggattgg

SEQ ID NO: 12339 - DNA, 541 bp, Homo sapiens
  MAP TO CHR14.3; EXPRESSED IN PLACENTA, SIGNAL = 0.9; EXPRESSED IN BONE MARROW, SIGNAL =   1; SWISSPROT HIT: P98167, EVALUE 2.30e+00; NT HIT: U58673.2, EVALUE 8.00e-03
ccgtgaatctcaattctagcaacaaagaatgtacaagatcatagcagatacctggttcgtagggggtactcaacaggcagtgcctttgttattattatcaaggtcgtcaatgcaatgtaggtgagactgtctctttcttgaccacagcccatatcctccttcaaaactgtgtcgttcaaggtttcccttgaagccactggaacacaaatgttggaggggcccaaagtgagggccatcacagatggcccagtggccaaatcgtctattggacatctctagaagcagacattgctcccgctgacccagggtccaatgggcccagttgtttgggctctcatctgggaagctgggatggcagtggtgttgcccagccacttcaccactccatacatcacagctgcctgaaggtacaacagaggtcactagagtccctatccctcatcccaaatggagccacttgctcttctgttttctcatgggagggaaccctaggggatcaggagcaagctcctccagcagcagcagaagcagcatggctcat

SEQ ID NO: 12340 - DNA, 522 bp, Homo sapiens
  MAP TO CHR18.3; EXPRESSED IN PLACENTA, SIGNAL = 1.5; EXPRESSED IN HEART, SIGNAL = 2.4; EXPRESSED IN BONE MARROW, SIGNAL = 1.7; EXPRESSED IN FETAL LIVER, SIGNAL = 2.8; SWISSPROT HIT: P46934, EVALUE 1.00e-10; EST_HUMAN HIT: BG769727.1, EVALUE 1.00e-109; NT HIT: gi14760418, EVALUE 1.00e-109
tggaatcgcacatgctaaagagttctaatcctcattgttattctttagggtgccaaggactcacccgtacgtcgggctgtgaaagacaccctttccaacccacagtccccacagccatcaccttacaactcccccaaaccacaacacaaagtcacacagagcttcttgccacccggctgggaaatgaggatagcgccaaacggccggcccttcttcattgatcataacacaaagactacaacctgggtaaggctgctgcttttatttggctccattttcatcatgaagtctggcattaattccttgatttccttagtgtttgtagttcttgcagaggaattggattgactgtaaagggtgtctccagagggtctcctcagcctgcatctggcccctgcataaatgggcgggtgggagtgggtgggcacaggctggtagctgtctttggtattggtgctgggactgccttttctcctgggaagctctagtttagacagttcaccgtgctggatggaaaggtat

SEQ ID NO: 12341 - DNA, 516 bp, Homo sapiens
  MAP TO CHR18.3; EXPRESSED IN PLACENTA, SIGNAL = 1.2; EXPRESSED IN BONE MARROW, SIGNAL = 1.2; NT HIT: gi14861872, EVALUE 1.20e-01; SWISSPROT HIT: P48868, EVALUE 3.60e+00
tggaaacctgaaatcttggctgagtccacttttccctcgaacctagtgtacaatgggattttcatccagtaccagttttgatggcaagctgggaaagcacgggtgtttggaggctaaggctcccattctttcatatgcagaaaatgagcaatgtctcctgtttcctggcacccatcaccattcccctcctagcactgaaggaactgatcggcatgatcactttgcattttggctcgtatctctcatccttgctgaggccagtcaccctccaagtctctcaccatttggctttgctctttgaaactggtggaaacttaaatataagatattcaagctttgtttcctcatcactataaagggcaatgctgttgtcctggtatcacttggagctctagctacgacctgtgtgctccagaaatctgtacttcaaatgaggcttcttggtgtggtggtacagatattttagaagtgctaagaatccattgtaattcctaaaggaatctgaaaaggcccttc

SEQ ID NO: 12342 - DNA, 555 bp, Homo sapiens
  MAP TO CHR19.3; EXPRESSED IN PLACENTA, SIGNAL =   1; EXPRESSED IN BONE MARROW, SIGNAL = 1.4; EST_HUMAN HIT: D44766.1, EVALUE 1.00e-36; NT HIT: AE005181.1, EVALUE 2.10e+00; SWISSPROT HIT: P20333, EVALUE 2.10e-01
tctgtggtcaaaaggaacccctgggacccatcacacaaagagcgattctgaatccacggccggctaatctcatacaaatcgtctgtctccacgctctctccctggagactagggcagccgcaaaaacgcaaacaggcccaccgccactgccggcggctcggaaggtgccagcacttgggtccagctatgaatgctgacgggaggtctatgcagggggaaatcctgccaccgtgccctcagctgacgttttcacagcaagtcacccaggcttgtctgaaaaacacaacggtggtcgcgcctaccagcaaacggggccaggtctgcgtgagtgactgtcactgtgcacctgagagccctcggggtcttgaggtgcagcagccactgggcagtcggcctcgggattctcagcctttgtccattgaacaaacacgatcccagtccagagccacagagcaacttcgcgctcggccaccgccaaagaggcacagcctgccagcagggcggagatggctggacgcaaacttgtcatccatcccctcgtgtttgctgagatca

SEQ ID NO: 12343 - DNA, 539 bp, Homo sapiens
  MAP TO CHR16.3; EXPRESSED IN PLACENTA, SIGNAL = 1.2; SWISSPROT HIT: P50077, EVALUE 5.10e+00; NT HIT: AF134850.1, EVALUE 3.30e-02; EST_HUMAN HIT: BI827479.1, EVALUE 4.80e-02
tttatctgccaacctcccagtgccacagtaagcacagagtcaggcctcgaaaaataccagtcctttcgcctgtcccctctcacatggtttgaatccaagaggctgtcataccaggctcccccattcagtatattttctttatgtttaaatagtttggattgacttctcttttcttttatttttctgttgctacttaggaaaccatctccaggctagaacaagtgcctgaaatagagaagggtgaggtcactgcctaagacacttcctcctccacccactcctctctcagactcagctccttccacttctgcccacatggctgccattttaatttttgcttaaatgttgcagccaatatttcatgtattgttgttttcttccttgcctgggagactcttttgtctgaggttccctggtattttccaggggcccttctagcacttctgtgaactcattagcttccccttgttccagaaaatgtctgtcatacattacgtgcctttctctgtctttccctgcccctctcaccttcatcgatc

SEQ ID NO: 12344 - DNA, 561 bp, Homo sapiens
  MAP TO CHR14.3; EXPRESSED IN PLACENTA, SIGNAL =   1; EXPRESSED IN LUNG, SIGNAL = 1.1; EXPRESSED IN BONE MARROW, SIGNAL = 0.85; EST_HUMAN HIT: AU119105.1, EVALUE 8.00e-41; NT HIT: gi14748633, EVALUE 6.00e-41; SWISSPROT HIT: Q10917, EVALUE 2.10e-01
aagctcatcaaaacatgcccggtgtggctgcagctgagtctgggccaggcagaggtggccaggatcctgcaccgggtggtggctggggtgagtgggggcgtctcccacttggtaggcacacacacctgtgaggaactcaggcgtgctccacacctgccctggctcccacagggaagcagctaccatgcagatgactgcatgtttatttccctttcctacatttgtcagcttttgaccacaattttctcccagaacacaggcatggggggctggtgagaggcctggtttcttctttggggagcaggtgtttgtgactggagagcaggtagtgggtggcttgcaggctctcagggcatttgggcacctgagaggcaggactgatgcagtcaggaggaccatgctggcctgctctgactttgggggctcagccaggcatccagggtccagagagtgtcaatcagagccagggtaaaaaaaaaatggctttatgctccctgttttacatatgcaaataaggggctgtgtgatggagtcaaaagatgttttggaggtcaggctctg

SEQ ID NO: 12345 - DNA, 583 bp, Homo sapiens
  MAP TO CHR14.3; EXPRESSED IN FETAL LIVER, SIGNAL = 1.9; EXPRESSED IN PLACENTA, SIGNAL =   1; EXPRESSED IN HEART, SIGNAL = 2.1; SWISSPROT HIT: O62829, EVALUE 3.00e-14; NT HIT: gi13655316, EVALUE 7.00e-56; EST_HUMAN HIT: L44381.1, EVALUE 0.00e+00
tctttgtttcggttttcttttcaattaaatttggataacacttacaaaaaaagtacttctgattcccagaaatcataaagaagcagggggaaggcgtccccgacttagtccatgtgatgcgcacattagcgagtgagaacatccccagcctcccaccagggggtgaattggcaagcaagtaagttacattctgtacactcttatgctttatgtcagtgtatgaaaatgttaggtattcattgataaaatgtttgtttgcctaatttctgaactgatgcagttatctgtgttttaacctgtgatttcaatttttttttagtattagaatatctagagtttgtttagacataggtatcagtatcattgtaactaattgcagtgagggttgtctttattggaagcttggttggcattgatttcctcatagagcataaacgagataatatactgaaagaactttttaaactaaattacatagcactacataaaaatttacaaaattctaagtgtcgttgttagtagtagtataatttgatttggtcaatccctgagtaacttaacaccctgaaaattccccttcctc

SEQ ID NO: 12346 - DNA, 573 bp, Homo sapiens
  MAP TO CHR18.3; EXPRESSED IN BONE MARROW, SIGNAL = 1.8; EXPRESSED IN PLACENTA, SIGNAL = 1.6; SWISSPROT HIT: P38605, EVALUE 4.20e+00; NT HIT: X56232.1, EVALUE 9.00e-03; EST_HUMAN HIT: BG273097.1, EVALUE 5.20e-02
tctgatcccacagggaactctggaaaaggagcaggagcaggagcaggacttgtactacaaaatcagtcccctttgtactccggttccaggcagcttatggctgcaggccacaggcttcatgggcagtgagctcaatgtccctaacagccaactttgtagcaacttaggagatgactgccacagcctgttaaaggagatgtgggccgtgcccatcagcaaccattttctgcggatgtttgctgcttactttcgccgtgttagagaaacaaagtactgggccaaatcagagtagaaaaaagttcttatctagatgattggatcaggaaaggtttttgtctcactgtcacagactaaacttctcactccagccatcacttggccacaggggcatcataagaaacatgcaaattttcactactactggaaaagtgattcctaccacaacaagaaaaaatgttttctgcaaataggcatccaagctacttgttattatttaacctgttaatgcagtaccactcttcagaagcaacctaggtaattaacacattgcatggaccccaaacaagaacatgg

SEQ ID NO: 12347 - DNA, 556 bp, Homo sapiens
  MAP TO CHR18.3; EXPRESSED IN PLACENTA, SIGNAL = 0.95; EXPRESSED IN BONE MARROW, SIGNAL = 1.6; EXPRESSED IN LUNG, SIGNAL = 1.3; EXPRESSED IN FETAL LIVER, SIGNAL = 1.3; SWISSPROT HIT: P46804, EVALUE 1.80e+00
gaattgggttctggcaaatgacagggctgagggcggctgatttgtgtgtcactatgggaacagcttgatcccagcggggcctgggcccttctgatgcagtgttgggcctggcaggggccctgggggctggctctgagaatagagtaggtgtgggggtccttccttggctgcttctgctgggctctactggttcccagagagctgtgaggcagggcctagatgggggcctggactggcagctgggatgaatgctcaggctccagtgactcctctgctggacccccagatggttgtaggtaggtcttcttcactcagaaaagaaagcgacggacatggagatgttcattgcaacttcccttctcccaccaggtcatcctctcctttaaaattgaactgcaaggccagctgatgaaacctttcatgtggttggctgtgtctggcagctcagcaagcacctactgtgtggaggccctgtcctgggctcctgatgagcaacactgcttcatggaagaggcagtgagctctgcatttgtggggcaaggactcaggaaagtgc

SEQ ID NO: 12348 - DNA, 560 bp, Homo sapiens
  MAP TO CHR14.3; EXPRESSED IN PLACENTA, SIGNAL = 0.89; SWISSPROT HIT: O54990, EVALUE 6.20e-01; EST_HUMAN HIT: BE206269.1, EVALUE 7.00e-69
gtggctccaaggtctctacggagttgctaagagtatcattttaacttcattgtattactcctttagtcatgttacccagtttgacaagacaagcataaaacactaaatgccaactcagattctttttaaaccttgtcctcaaaggtgatggaattcttttccattagatgctgagcgcttaccagggtggggttacgtctctcgaacacacctggaatctgtgctttaattttgtatggtcttggtgttcatttttgttttgtgattaattatgttgttatctggaaccaatctggtaaagggcttccactaattttatgtccttgattctctagaaatgggaagaatttgatgaaaactatgcatctcttgaaaaggacctggaaattcttatatctacattgccctctgtgagtttggtggaagaaacagaggaaagattagtggaaaggatttcattttaccaggtatttgtcttccatttaagttatcaaaggcgtgtccatagcactttgtgttttacatttgttttgactaagtggcttgatttggaaggtttg

SEQ ID NO: 12349 - DNA, 562 bp, Homo sapiens
  MAP TO CHR18.3; EXPRESSED IN PLACENTA, SIGNAL = 1.1; EXPRESSED IN BONE MARROW, SIGNAL = 1.1; NT HIT: gi7110698, EVALUE 2.10e+00; EST_HUMAN HIT: AW748174.1, EVALUE 7.90e-01
aaaatgcctctttccttgtcactagctggagaagaatgattcagaagagtgcatccaattctggaacagactcaaggatgttattgtgtatcaactggtgatttcaatgctcttttccttgctgcaagaaaaaaaatgcgttggaacttgggaagtatgtgtgtaaaggaggaaggagtgctttatgtatttctccagtagaattttgctaatatatcattagttacattgttacatgatcacctctaatagcaatgaaggccaggaaatggtctttgaaactgaatgcattgcctccctgaattaaattggatttctatttgtaggaaggaaaagtgatagcattttgtaggcaactacagtgtttatcatctccagtgacaccagtcaacttaccttaccttccatttctctgagctccttctcttggaacatttcatcccatagctaccttttctctgtgctttttctcgatgttgccagaacccaggtcaggatttcgatagcacgcaggccaccttaaaggaggtcaaatgtgcctcctggtggtctcaggattggt

SEQ ID NO: 12350 - DNA, 552 bp, Homo sapiens
  MAP TO CHR18.3; EXPRESSED IN PLACENTA, SIGNAL = 1.5; EXPRESSED IN HEART, SIGNAL =  15; EXPRESSED IN FETAL LIVER, SIGNAL =  16; SWISSPROT HIT: O35501, EVALUE 2.00e-21; NT HIT: gi16158329, EVALUE 0.00e+00; EST_HUMAN HIT: BG674842.1, EVALUE 0.00e+00
tcaccccttgaaaatatggccacttcagcatacaatagttaaatctttataatgaccagttaattcatcctaccccttttacatgcagctgaaaaatgacagtccagggacatagaacattgtgaactttatacctttagaatcactttccataaaatgatcactagctaatggtcactaaatttacaaattaaggaaattatatatagaacactgcaaaaacacagtaaaaagactgaagtttgcccatttctgctcaggaagtctctttgctcctaagcttcatatgttgtccaatttggcttcaaaatttctgctattattactgtttctcctccttttgatcttccttttgttccccagtgccagaatttccagagccttcttgctcagatgccatctttttgtatgccatttcgaagagcttcagtgatgcctgctgaagagaggatgctgtttgtccaatgttttctcccgtttcgctgtcttttctatccagaagccccttcattttggaaatctcttcttttagcttttgcacttatcagcagg

SEQ ID NO: 12351 - DNA, 543 bp, Homo sapiens
  MAP TO CHR16.3; EXPRESSED IN PLACENTA, SIGNAL = 0.96; EXPRESSED IN LUNG, SIGNAL = 2.1; EST_HUMAN HIT: BG706739.1, EVALUE 4.00e-98; SWISSPROT HIT: Q14894, EVALUE 2.00e-29; NT HIT: AF039395.1, EVALUE 0.00e+00
aatgtagtcgactggtcccgtctagagaggagcctggccaccacccatcatgccttatggagccactctacttaccattgatgtgagcccctggcttcacccattcaccaaacaaaatgggctctgttgccagggtgactgtgatgatcacatctgcacctgccacagcctcctggaccgaagaacagacccgtacctctccttgcactgtgtctgcaaacttctctgcattttctttggtgcggttccatatcctcaccttcattgggagtaacaagaaggatattggcgccattttttggctgcttatgttacactgagcccagggatgcggagggaaagttgaactactctggcataggggtcagtggttatctaaatcactcctaaatcattccccatggagaatggacatttgatcaggggtacagcattaacttagacacctagccaggtatttgaaaatcagcgttctctaccactttccccttttaaaatgagtggaagtatttcacttctaggccaagaggcacagcctcagta

SEQ ID NO: 12352 - DNA, 537 bp, Homo sapiens
  MAP TO CHR18.3; EXPRESSED IN PLACENTA, SIGNAL = 0.93; EXPRESSED IN BONE MARROW, SIGNAL = 0.98; NT HIT: AF312033.1, EVALUE 8.00e+00; SWISSPROT HIT: P50852, EVALUE 1.10e-01
caaagtgtggttttatcatatgtgcagatatgtttgtttgaaaaaaactgctttgtattgttcctccttttttcaaaaatgtatcaataggaaggggagcaagaaggcgggcattaaaagccaggctgagaaacaaaatgagccccaaagggatgaaaatgacactatggggcagaggaatgacgtggagcagtcgaagcaatggaacctgagtacttcaggggaataaaatgaacggctttcttttgtaatgtggtttctagggttgaggtacaaggctgggcagtcagcagaaagtaaatctctggaggttcttggaccaaaaggatttttctgccagctcctggatgacatgtgttttgctagagcgagggtagcatttctgagacaggggtttgtaatagaccctgattaataagcgtcctttttgggtttgtagacggaagaagacacaactgcagctgatgaaatttcccactagttggaaatctataaatgccctacttataagaagtagcacatccttgtgtttaacat

SEQ ID NO: 12353 - DNA, 593 bp, Homo sapiens
  MAP TO CHR18.3; EXPRESSED IN PLACENTA, SIGNAL = 1.4; EXPRESSED IN BONE MARROW, SIGNAL = 1.8; NT HIT: AF218826.1, EVALUE 8.80e+00; SWISSPROT HIT: Q09225, EVALUE 1.20e-02; EST_HUMAN HIT: AI223289.1, EVALUE 2.00e-75
cagaagagtttgaggcctggcaatgttaaatgccttatcccaacgcccccctgtggctgcatcttgatccagaacccaggtgaatatgaggaatttttaccttgttttatacatgcaatgttttatgctcaggggctgaaaccatgtatctctcttgtgttatcataattcttgcaacagaaaggtggtttttggtttggtacattgtcttaaaatgataacgcataaagactttcttaggaaaagttcacagacttaggcacagaatgcaatgggagcatcgatgggatgatgggcatcttcactggcccagagacaggctgtggcttcatgcatcagtgcttgttccctccaggtctggtgaaccgtgtgctttcttgggacatctggagtttcctgtccagcatcagttatgctcgctacttggtgcatccgattctgatcatcctttacaatggccttcaggaaacacttattcaccacactgacaccaacatggtgagttagcacgcagctcctagttctgttacggtaggttatggtatcatagcttgttctcttcttgagcaacaaggcaacctatttgctttcgt

SEQ ID NO: 12354 - DNA, 508 bp, Homo sapiens
  MAP TO CHR19.3; EXPRESSED IN PLACENTA, SIGNAL =   1; EXPRESSED IN HEART, SIGNAL = 2.1; EXPRESSED IN LUNG, SIGNAL =   1; EXPRESSED IN BONE MARROW, SIGNAL =   1; EST_HUMAN HIT: AI190034.1, EVALUE 0.00e+00; SWISSPROT HIT: P40256, EVALUE 1.20e-02; NT HIT: gi15304432, EVALUE 0.00e+00
caaccccagacagacagaaagaaagctattgactaaaagttcaaagttttaatccaaatttagacagtgttgagaaaaccaaactttggccatagaaaccattcccctcccgggcccgcaatggggaccagaccacgccccctgatgccctgagtggtcccagatctccggcggtacctccagaccacgtcctcgcgctccgattggctgccgcttttgggcggattagaagctggattgtagcagagtgactcgcagaggccatgccccctcgtcttgtggcaggaccggaggggcgatcccggcatcccacgcgggcccccagggggtgggacctcctccacgcccactccctcggcgagagaaccccgtggaacccgaattagccaccgggggagatctggggggaggggtctcctggcgcgtggggtccgaaggaggcagcggcacaccgggaagagggtctccctgggagtccaaatttccacctggagaggatgagtgggac

SEQ ID NO: 12355 - DNA, 567 bp, Homo sapiens
  MAP TO CHR18.3; EXPRESSED IN PLACENTA, SIGNAL = 0.82; EXPRESSED IN FETAL LIVER, SIGNAL =   1; NT HIT: gi14764270, EVALUE 2.00e-96; SWISSPROT HIT: P50795, EVALUE 7.10e+00; EST_HUMAN HIT: AI827773.1, EVALUE 4.00e-98
gcccattttgatttcaataacccagaatttttctgatttacttacgtcatctaataaagtcctggtctgaagggtgatatctatgaagaaggaacccaaacctttcccctggatcttgcccagaacgacggtcagagtcttcatactctcatggatgacttccaaattcacagggtcatacagtccatacaccagcaggtcgaggacaattttcttatactttctcacctgtcaccaaggtttgaaaagcagtaatagcacaggaactgctccccataggttgaaaagcaaccccacatctaagctactaataacctaggacttgaactaacacaccagggcttttttcaagatctgcacaactctcattaaaatacaaatgcttccattaacccaacccaagagcccaactcagcctaggaaggaaaacagaaagagcaatctggagtgtggcatgtgggtgggtgaggctcagtggggctcttcaaatagggcagcagacctgggtgatctcagggcctggggagaactaggtacctttatagtggggaggagacaaaatggaca

SEQ ID NO: 12356 - DNA, 540 bp, Homo sapiens
  MAP TO CHR14.3; EXPRESSED IN PLACENTA, SIGNAL = 1.1; EXPRESSED IN LUNG, SIGNAL = 1.5; EST_HUMAN HIT: AI003271.1, EVALUE 1.00e-110; SWISSPROT HIT: Q9YGZ9, EVALUE 3.90e+00; NT HIT: gi13470324, EVALUE 1.30e-01
tggaagttctttgaggtgagtcacttatgttttggtgctttttgatatgaaacaatatataccaacaaccaatggccatttgtcaggcacttatttttagtgaatatcctttctaaaagacggtgctaacaagctatatgctataccttaaattgttggtctgattttcctcatgcaaaagtgagtatgtgtataatttttcattgtttcaggaatattgggaaattgggtcatctgggtttgtgtctgcttagctgtgttatacagacaggtaagagttttccatttcacagctaaggatcgtgattcttgtctattttttgttgtagtccttttatactttctgtacatatgtggcttggattgtcttccgacgtcaacacttgacagagattgaagaagaagtagggagactctttcgtaccaatatgttcaacattcctcgcaggaggcgtgaagatgaggaatcaggaggggaaaagaaacgcatgacttttgttcagttcaggtatgaccttttgactttcctatgctcagggg

SEQ ID NO: 12357 - DNA, 599 bp, Homo sapiens
  MAP TO CHR16.3; EXPRESSED IN PLACENTA, SIGNAL = 1.5; EXPRESSED IN HEART, SIGNAL = 2.4; EXPRESSED IN LUNG, SIGNAL = 3.3; EXPRESSED IN FETAL LIVER, SIGNAL = 2.1; SWISSPROT HIT: Q13084, EVALUE 1.00e-03; NT HIT: gi14777205, EVALUE 2.00e-81; EST_HUMAN HIT: BI918736.1, EVALUE 0.00e+00
caggacaggacagagaaggcccgggtggggccgcctcagcaccccagcctggggggtgggatcagcacagaagcaagtccaagtgcagggaaaggggcggctgtgctcgctcaggccccacgggcaagtcagccacccacagagcgacagcctctcctgaaggcaggaaaccccactggtgctggccagaaaggggcatggccccactcacgctttcccagtgaccctcctgtgcagatgtcagcgtgccccggtgtgatgctgacctggggctcccgtgagtctgactggcccatcccagaccctgtgtgcactgactcgccccaccccgcttgccttgaggatgtaaaagtcgagcccataagcctcatcgatgaggtccagggtccgcatggtcacagtcactgtgaacttcttgtccaggatctcactgtagaactctcgctcaaacagctgtggcttccacactttcttcagcctcttggagagctgagggtgcaacagagcctccatgagtactgctgctttctcttacataccaaggggggcccaggcaactgccctcacctcccccccggaggctccatcacagaaccact

SEQ ID NO: 12358 - DNA, 502 bp, Homo sapiens
  MAP TO CHR14.3; EXPRESSED IN PLACENTA, SIGNAL = 1.4; EXPRESSED IN BONE MARROW, SIGNAL = 1.3; SWISSPROT HIT: Q49411, EVALUE 2.10e+00; NT HIT: AF204970.1, EVALUE 1.90e+00; EST_HUMAN HIT: BF346635.1, EVALUE 7.00e-01
aaattggtcccacttggttggaaaatcatgtcagtctggaatcttgttaaaatgaaatctgagagaaacagaaacttcctctcttttcttactccagtctcatgaggccaacacagtacttcaaaaccaaacacttaggaatttcttctcaaccatcattgctgcagccccagggaaaatcaagacagctgtgagtggtcatggaagctcacagatcataaatttggtaagctaagatggtaaccaactgatggggcagatatgtaaggttccttcaaatttggagtataaaatattgtgtaatgctcatgcttatcatgaagagtgagctgatccaattaaatgatccaatgatagactctatcttagacaagttggaagagtataggacagagtaagtttactattcatgaaaaagtaattgatttcatagtggaagccaaggaattaaaaaattgctgtttgggagagttttgtctgtgggtctgcctgcttctcaaaa

SEQ ID NO: 12359 - DNA, 550 bp, Homo sapiens
  MAP TO CHR14.3; EXPRESSED IN PLACENTA, SIGNAL = 0.85; SWISSPROT HIT: O95180, EVALUE 1.80e+00; NT HIT: AF227258.1, EVALUE 1.00e-14
gacaggtatcacaatggccctgccctcaaagagttacagtgtactggggacagaaggctaatctttttaaagtgtggttaatagatcacggtagatgaatacatattatagatcaattcgtgattatatgtcccaaataacccgtagaaataataactgtcatgaaaggagaagccacgtgctctatttgtccacaggctgaggaccaccttgctgcggttgaccgctgctggccgggacctgcgggtcgcggaggaggcggcgccgctctcggagaccgcaaggcgcgggcagaaggcgggatggcggcagcgcctctccatgcaccagcgcccccagatgcaccgactgcaagggcatttccactgcgtcggccctgccagcccccgccgcgcccagcctcgcgtccaagtgggacacagacagctccacacagccggtgcaccggtgccggagaaacccaagaggggtgagatttaaggctacatcccctacagggctaagacactgggaaggactgatgtgccagccacgttttcctcactgcctt

SEQ ID NO: 12360 - DNA, 524 bp, Homo sapiens
  MAP TO CHR16.3; EXPRESSED IN LUNG, SIGNAL = 1.3; EXPRESSED IN PLACENTA, SIGNAL = 1.9; EST_HUMAN HIT: BG324364.1, EVALUE 0.00e+00; NT HIT: gi11967982, EVALUE 1.00e-118; SWISSPROT HIT: O15165, EVALUE 4.30e-01
gcggtctagtggaaacttggagttggctaacagttcagggggtggctggaacccactcatcctcttattagaccttgcccactcagaccctggtccctggagtgactacaggcctgggggcagcatgctgccccggaggagggcctttgaagtcccctgcctgggaggggcgatctggccgccccttgctgagtccctgccatgccagggggaccgccgactggtttggagtgagcaaggacagtgacagcacccagaaatggcagcgcaagagcatccgtcactgcagccagcgctacgggaagctgaagccccaggtcctccgggagctggacctgcccagccaggacaacgtgtcgctgaccagcaccgagacgccacccccactctacgtggggccatgccagctgggcatgcagaaggtatgcctgcctgttgctgcctcctgcaggcccctccttccgctctcaggggctggggctgcggacacagccagcctgagcagaagggactctctgggagct

SEQ ID NO: 12361 - DNA, 542 bp, Homo sapiens
  MAP TO CHR14.3; EXPRESSED IN PLACENTA, SIGNAL = 1.1; EXPRESSED IN BONE MARROW, SIGNAL = 1.7; SWISSPROT HIT: P05544, EVALUE 2.00e-17; EST_HUMAN HIT: AA458648.1, EVALUE 2.00e-53; NT HIT: gi13386037, EVALUE 2.00e-06
cttggccatgaggtaagagctcagacagcagaaataagagggaagacaagagaaggaaaaagctgcgagggctaggcacccactttacctgcgtgacagtaatgttttccatctggagaaagtgtccacctgcaatcccttctccaagtgcttcagcttgccctcatcaggaaggatgaagatggctgtgatatttttctggtagggtatttccaggatggtgcaagagagcttatcgtcatagccaacttggtatatgccactacggaacatcatgggcaccttgactgaactgtttttctccagaaagaaatcttcctctttagttacatttggatcaaactcatgtttccacctggcttagattgaagaaagacaaacagacatgttatcccaagggaaaaaaggtgactaaatccaactaaccagtagtctctctccacacagattcagggtgaaaggggatattccgggatatcagggaagtccttgccctcatgccatgtcctggagatttctgatgatatgggctcaggtgcaat

SEQ ID NO: 12362 - DNA, 543 bp, Homo sapiens
  MAP TO CHR14.3; EXPRESSED IN PLACENTA, SIGNAL = 1.3; SWISSPROT HIT: O35681, EVALUE 8.50e-01; NT HIT: AF335470.1, EVALUE 5.20e-01
ctaaatggtcaaagggcctgttagattgatgttagagtgatcaacctcctggggatggctaccctgcttcaccaggagtcccacatctgatgcccaagtatccacaggccactcatccacattcttctgctccacctgctgtaacagccaactaacctgctgcagcgccttcatctttcctacactggtggaagggcgaggattaaagtgtatcaccgttgttttgatctggctactatggtcctgcctgccttcctttggataaggacagacagcttggaatataaatgccctagccaacataagggctctaggcatgattgcagggtgaacccattaatcactagcaaggctgaagtcatagccctcagtggaagcaacctgaacatatggcccatgatgagatgagtgggtaccgtggtaaggaagtgagggtgctcctcagggcacagggtatctcggttggctagggaatctggccctgcttcccccagcaagttctccatggagaccagcacaagagcactgaaccaactgtgtggg

SEQ ID NO: 12363 - DNA, 576 bp, Homo sapiens
  MAP TO CHR18.3; EXPRESSED IN LUNG, SIGNAL = 1.6; EXPRESSED IN PLACENTA, SIGNAL =   1; NT HIT: M26923.1, EVALUE 1.40e-01; SWISSPROT HIT: P28208, EVALUE 4.20e+00; EST_HUMAN HIT: AI800767.1, EVALUE 8.10e-01
gtctaatgcttctgggtggcgaacctttgttcaaaccaatcttgttttcatcatttctctgggctatgtaatgccctcatgccatcatctatccaagtcggaacacaatttgccattgcctgccttctccccttttcaccttgtaggtactttagagtattagttccataagcatattaggcaacttgctgagggcaaaactatatgcctaccttcagtggctatactcttgaaattacctaagaagattttgactctttttcactgatatttctggacttctccctcatacctgcacagataatttttggccatcacttggtaaagctgtcacaatctttgaggggcggttcctcatttggttttcttatggaatccctgttgtaaagccccttttcaatgatgtcctgaatgatttggcaaagagccactcccacgtgtcttctttgaggacaaataagccttaggtttatgtgggtcataggtgaagtttttgtcttctaataaatacaacacatattttactaaatttctctaaaagagcaattggttatgggggcttttcccccatattta

SEQ ID NO: 12364 - DNA, 563 bp, Homo sapiens
  MAP TO CHR14.3; EXPRESSED IN PLACENTA, SIGNAL = 1.4; EXPRESSED IN FETAL LIVER, SIGNAL = 1.6; EXPRESSED IN LUNG, SIGNAL = 1.4; EST_HUMAN HIT: AW003278.1, EVALUE 1.00e-76; NT HIT: X05684.1, EVALUE 9.00e-03; SWISSPROT HIT: Q12866, EVALUE 4.10e+00
atgccatttgagagtggagctgaactggcagcaggtgacaagccaccagcactcaacaaaaacatcccatcaaaattacccaggaaacttacaagtcaatttacaagctctaaaatacccgaactatcccagtccaggagcagcactgagaacaaactggaagagacaaaacttcctgactttggcttgggtggaaggggtagggtgcactggttgggcaggcacgatggcagtgccctcatcatcatgggtcccctctctccctgtcacagaacgtgctggtgtccgagcagttcatgaaaacgttggacggagtgtatgccgttcacccgcagctggacgtggtattcaaggcagtacaaggcctctctcccaagaaaaccatcttcttgttgacaaaccccatgaaactgatccaggtgagctcctgccttcctctcagggcctccagggagccctggggaaagctggccaatggctccaaatcagtttccagacttctccctccccacagtgtctgtacaaccctctctgataaggaatgtctcagtcccttggacagc

SEQ ID NO: 12365 - DNA, 600 bp, Homo sapiens
  MAP TO CHR14.3; EXPRESSED IN FETAL LIVER, SIGNAL = 1.2; EXPRESSED IN PLACENTA, SIGNAL = 0.9; EST_HUMAN HIT: BF530579.1, EVALUE 0.00e+00; NT HIT: AF185589.1, EVALUE 2.30e+00; SWISSPROT HIT: P45170, EVALUE 5.90e+00
cttttgtgctgcctctttccaattacaggttagcctggcaaggaagataaagacatttgcaaccaagatggtaatcactagtgaaaatgatgaagacagaggaggtcaagaaaaagaaagtaaagaggagagtgtcttggcaatgctggggattatcgggaccattctgaacctgattgtgatcatatttgtctacatatacaccaccctgtgaatggcccagagcgtcctcagaggcctcagaatggccaaagacggaagtcctgcgtgtcggcgcatcactgaccagaccctgcgagaacaagcaggcttgacccgcacataccacccaatcaaatgcaccttcaaactttacaaaaggtcacacaaatagaccgatcctgctgcagggagcagacactaaagcacaatgattccaacaaaactcattcacagcactaggaactcaacgtctttggcagggggcccagaagaatgcttggaagaccagcctctgacaccatcagtgagcggatgggtgcagaaattcattattccagatcgctgacagatatcacatatttgaaaagatgaatagggcggacatggctcagatgtgtg

SEQ ID NO: 12366 - DNA, 549 bp, Homo sapiens
  MAP TO CHR16.3; EXPRESSED IN FETAL LIVER, SIGNAL = 1.1; EXPRESSED IN PLACENTA, SIGNAL = 0.86; SWISSPROT HIT: P23975, EVALUE 2.00e-14; EST_HUMAN HIT: BE260823.1, EVALUE 3.00e-43; NT HIT: X91126.1, EVALUE 0.00e+00
cagggaactgctctccagactggctgttgggggtcaacctctccgatgcacaggtgagctgtaagttcatgctgatttcatctgttatctctaaacctgtgttctgtccgcccacacatgaccgaacaattgggcccccagatactcccctatcatgtgcagctcagaccaatggtttcagccattgatgaggtccttgatgtttcttacaggagctggcctagtgttcatcctgtatccagaggccatttctaccctgtctggatctacattctgggctgttgtgtttttcgtcatgctcctggcgctgggccttgacagctcagtgagtgaccctgcttaggatacctatcccccatcccactgggcctgacccccttccccaacacacagtgctgggcctgaagttcccactattcaaacaccaggttaacagttgtttccagaaggccctatttaaatgcagacaaaaaaagtgagtcctcactcaaaaagataagacttaggccaaagccaagaaccataggaacccctttgacatcttggaaa

SEQ ID NO: 12367 - DNA, 516 bp, Homo sapiens
  MAP TO CHR14.3; EXPRESSED IN BONE MARROW, SIGNAL = 1.5; EXPRESSED IN PLACENTA, SIGNAL = 1.1; EST_HUMAN HIT: BG675677.1, EVALUE 1.80e-01; SWISSPROT HIT: Q92610, EVALUE 5.50e-01; NT HIT: M30174.1, EVALUE 1.90e+00
acccacaacctcatctttggctcctaccatttggcttaaggtcaacttctctctaacccctgccctcctccctgggaagattctgttgcctgatctttcttttcccacactccattagacagcatgatatctgcctctgcatttatttattaggactcagatctgtaatatacaatggtacccttcctgtatgatgctgtatctgtataacagagagaataagaggctctgcttgccatggaactgtcatggccagaggcttgcaaaagagctaaccctcaggaggcccctcagagccaaatggctttctcaaaacttcaccctcatgatccagcagtccagacaggcagccataaacagcaccttgtgagggacttcatttgcaactggcaaccttacacccacatgtctggccctcatttagtatgctagctatattttttaaaaattaacattttgcctaataagtctcctctttgtcattgttgctctcattcaacatgtccaagcaggcta

SEQ ID NO: 12368 - DNA, 509 bp, Homo sapiens
  MAP TO CHR18.3; EXPRESSED IN PLACENTA, SIGNAL = 1.4; EXPRESSED IN LUNG, SIGNAL = 1.6; SWISSPROT HIT: P70315, EVALUE 8.10e-02; NT HIT: gi14760602, EVALUE 1.00e-69; EST_HUMAN HIT: BI831954.1, EVALUE 2.00e-69
ctgcgactttattccgaagcgccggccaccaacctgtaaaggagcggcgcctggcgttgagctcgttggccacacggacctcggtgcacagcttcagcatcagcagcatggtcaggatcatgatggcgctctgccacagcagcggggactcaaagcgccttccaaacctgcgggagagacactgtgtcaggagggaggtccacccatgccacttctcccagtcccgaacctgcagcgggagagacccgggtcaggagggaggcccacccacgccgcccctcccagtcctgaacctgcagccggagagaccctgtgtcaggcccacccacatcgcctctcccagtcccgaacctgcagcgggagacacctgggtcaggagggaggcccacccatgccgcctctcctggtcccaaacctgcagcaggaaagatcctgtgtcaggagggaggcccacccatgccgcctctcctggtcccgaacttgcagcaggaaagatcctgtgtcgggag

SEQ ID NO: 12369 - DNA, 541 bp, Homo sapiens
  MAP TO CHR16.3; EXPRESSED IN HEART, SIGNAL = 1.9; EXPRESSED IN FETAL LIVER, SIGNAL = 0.93; EXPRESSED IN PLACENTA, SIGNAL = 0.93; EST_HUMAN HIT: AL530843.1, EVALUE 1.00e-103; SWISSPROT HIT: Q9ULJ7, EVALUE 4.00e-09; NT HIT: AL114102.1, EVALUE 2.00e+00
tgtcagcatttttctgcctgcctgcctccaatccccacaacgtccagggtggcagataacttctgcttcctgtcaactcatcccgcctggcctagcctcgccaccagctttggtgaaccccacatgcgaggcggctggccatgtctagcatatcttgcgtttgtttaggagagagttagatttgaataagaagaatggtggtggctggaccccgctgatgtatgcctcctacattggccacgacacaatcgtgcacctgctgcttgaggcgggggtgagtgtgaatgtgccgaccccagaagggcagactccactgatgctggcctccagctgtggcaacgagagcatcgcctactttcttctccaggtgagctacgagggaactcaggcccagaaacctgaggggctccgtggccaccctgacagagatgcgaaccactgcaggccacggtgttcgtgtgtgctcgtgtaatcacttctgattcttgcagcatggccgcctggagggcgcccgccccacgcagaggagatgaggccgtaa

SEQ ID NO: 12370 - DNA, 508 bp, Homo sapiens
  MAP TO CHR19.3; EXPRESSED IN FETAL LIVER, SIGNAL = 1.1; EXPRESSED IN PLACENTA, SIGNAL = 1e+02; SWISSPROT HIT: P11465, EVALUE 6.00e-68; NT HIT: AF106544.1, EVALUE 0.00e+00; EST_HUMAN HIT: BI054022.1, EVALUE 0.00e+00
ctgatgctctctccacctcctagcatcacttttaaacttctggaacctgcccaccactgcccaagtcacgattgaagcccagccaccaaaagtttccgaggggaaggatgttcttctacttgtccacaatttgccccagaatcttactggctacatctggtacaaagggcaaatcagggacctctaccattacattacatcatatgtagtagacggtcaaataattatatatgggcctgcatatagtggacgagaaacagcatattccaatgcatccctgctgatccagaatgtcacccgggaggacgcaggatcctacaccttacacatcataaagcgaggtgatgggactagaggagtaactggatatttcaccttcaccttataccgtaagtgattccacatgatccctgggtgttgggggacaggggtcatttctacttcacacacacaggattgtcaggcctagactgtgcctgtgtccctctctgcattatgtcccatgctg

SEQ ID NO: 12371 - DNA, 570 bp, Homo sapiens
  MAP TO CHR18.3; EXPRESSED IN FETAL LIVER, SIGNAL = 0.91; EXPRESSED IN BONE MARROW, SIGNAL = 1.3; EXPRESSED IN PLACENTA, SIGNAL = 0.82; SWISSPROT HIT: P34808, EVALUE 4.00e-03; EST_HUMAN HIT: BF957609.1, EVALUE 8.00e-72; NT HIT: gi14760346, EVALUE 4.00e-45
gtgaagtacagacgtggccctgcacagtggctgagtgggcaagactcattccccaggggcagcccctctggctccagaggaggccatcacagcggctattttcagccagcagaaccgatatggcagcctgggatcctggggctagaggatcttcaggcctgaaaaccactctgtggggaacgggggaagggagaatggcatttcctccggttataaaaactacttaaatcagctattcagttaacaggatctaatttaaagacctttccatgtgtctgcagaaaatttgtgggcttattaatgggctcattctgctagtaaatgtctataggcttccgaccatcaaacacacaagaggggagaagccatgacaaaaaacaacaacaacaaaaaccccaaccctgtctgttacccagaagctgtgcctctctgactcatcaccgactccagctcgtccaggaagatcgtggatggggcgtggtagcgggcaagctcaaataacacctgggtgggggaaaagcaagcaagtgttcaagcttatagacttaaagtcctcagatgctcccagag

SEQ ID NO: 12372 - DNA, 599 bp, Homo sapiens
  MAP TO CHR19.3; EXPRESSED IN PLACENTA, SIGNAL = 2.3; EXPRESSED IN LUNG, SIGNAL = 3.9; EXPRESSED IN BONE MARROW, SIGNAL = 3.2; SWISSPROT HIT: Q9Y6R0, EVALUE 1.00e-34; EST_HUMAN HIT: BF336895.1, EVALUE 0.00e+00; NT HIT: AF015041.1, EVALUE 0.00e+00
cccttgcccacatcagatagtgccaattgattccaacgccgtttcccactgggcccagggctcacctgtgcccttcacctggaagtcagtgcggcgctgcagcgtggatggcagctcattcagccgtaggctcagctgccgtttgaaaggcgagttcttctggctgagtgctgggaacccacggaaggagccctggcgaaccagctgctccaggggtgcatggcgccgggggatggcggccgcagtggtgcctgcagccacaggggtgcctgcctcacccttctcaccaggggatgtggtggctggtgtcggggacacgtgcccaggctgggcagggccaggagccacagtgggggcagctgctgcctctgctggagacatgggggagatggatggttagatatctcaccatggcatgcaaggcctctcccacctggttctcttgatcattctccaaggctgccttccttgcccagtgagtcctgcccttaagacaagctagtcaaagccctgagatatccctcacccccacccaagtcatgatccccttccccaggaggctcttggaaaaccgtcccccaggctcaccctctgtgtct

SEQ ID NO: 12373 - DNA, 584 bp, Homo sapiens
  MAP TO CHR14.3; EXPRESSED IN PLACENTA, SIGNAL = 0.9; EXPRESSED IN LUNG, SIGNAL = 1.3; SWISSPROT HIT: P46804, EVALUE 3.30e-02; EST_HUMAN HIT: AI939547.1, EVALUE 1.00e-108
ggggtcctcctcactttctcatttcctttcatttctaggggcatctccctgtgcaacaggccccaggcccaggctgcagggacagcagagccaggctgctcccacccaccccaaagccctgctcatgcagctgccgccagcccggatcccgctagggggcaccatgagctgcggctgcggacgaggggctgcttttccccaggcgctgtgggcttggagagaaaccctgggcaggaagggtcctctctttccagtcctggagccaggccacctggtgggcagtgcagccttcacactaggaccgcggggcagggatgcccgggacctccggcccagcccgcccaggccacacatgtgagcgtctagcacagcggccacctgcagggaaggcataggtctctcccaggaggctgtcagcagctgggaggccggcagcaaccccactccaggcctgaagtatctgccacctttggcaggctctgggccccatggaaaggctgaggggcgctcatcccgggttgccatccccagaaccggtgtgacaggccccacaagcacgcatgtgagtcagctcatgcacagga

SEQ ID NO: 12374 - DNA, 587 bp, Homo sapiens
  MAP TO CHR19.3; EXPRESSED IN LUNG, SIGNAL = 1.2; EXPRESSED IN PLACENTA, SIGNAL = 1.2; SWISSPROT HIT: Q04499, EVALUE 2.00e-05; NT HIT: gi14767206, EVALUE 1.00e-107; EST_HUMAN HIT: BI772725.1, EVALUE 0.00e+00
ttctgaaatggggtggtaggcggggtggtgaggggagcccgatgggcagccgcgccctccccgcacccccgtctttgcactccttacacagagccgagtactggtcagcgccgtcaccttcagctgcatgaggctggcctcagccaggctggggggctccaggaggccccgtgacaggtccacacaccgcagcatagcaccgaggttcccctcataccacgcctcactgcccagccagcaggtgtcagggcccgaacagcaaagccccttcctgcgtcctcccagcctccctgggccctggctccctactcacccactcttggcagcagagtccggctcctcctcagtgggcactgccagcagtggtcggaggctgagggtccgcagctgctgcacgcagcccttcacctcctctgctgtctcaccagccacaaactgcccatagacggatgctcggagaaatgcgcctgagagccgggagcccaggagtcgccgagaccaggcctggagctgggtgacagggagcgagggctcagcgccaggctatgaggagcctccaggctggtcctcaggatcactgctcacca

SEQ ID NO: 12375 - DNA, 569 bp, Homo sapiens
  MAP TO CHR19.3; EXPRESSED IN PLACENTA, SIGNAL = 3.8; EXPRESSED IN HEART, SIGNAL = 2.6; NT HIT: gi13654959, EVALUE 0.00e+00; EST_HUMAN HIT: AI339540.1, EVALUE 0.00e+00; SWISSPROT HIT: P53680, EVALUE 9.00e-11
agcctctgctgaggtctgtgtcccagctcgaggggcatcagagccccagcttccagggtccgggccagcatcctggggggcctcgtctcaccccagggtctcccctcacacaggtttacacggtcgtggacgagatgttcctggctggcgaaatccgagagaccagccagacgaaggtgctgaaacagctgctgatgctacagtccctggagtgagggcaggcgagccccaccccggccccggcccctcctggactcgcctgctcgcttccccttcccaggcccgtggccaacccagcagtccttccctcagctgcctaggaggaagggacccagctgggtctgggccacaagggaggagactgcaccccactgcctctgggccctggctgtgggcagaggccaccgtgtgtgtcccgagtaaccgtgccgttgtcgtgtgatgccataagcgtctgtgcgtggagtccccaataaacctgtggtcctgcctggccttgccgtctttgagcccttgcctgtctcccctgggaaccagatacctaggatgccttgccttcagtccatcag

SEQ ID NO: 12376 - DNA, 549 bp, Homo sapiens
  MAP TO CHR16.3; EXPRESSED IN PLACENTA, SIGNAL = 2.3; EXPRESSED IN LUNG, SIGNAL = 3.5; EST_HUMAN HIT: AI192814.1, EVALUE 1.00e-118; SWISSPROT HIT: Q61655, EVALUE 5.00e-32; NT HIT: gi16179474, EVALUE 1.00e-104
agcaatcattcattcagccccaaaggctccgggtgcctaagcagggggcagcagggcccctagtcactgacagcaacagtcagagccccacgccccgaagcccagtcacaggggagctgttcttggagtccctgggtcctgaagtctccaggtgtgctccctgagaactgccatatggtcagaaaggaggggagtgtgctagggacagagcctctcttggggctacagaagatcctacccctttcaccaccccgccctacttagcaaagggcgccaggcacaggaccctccccgggactcactaaaatgctcctggattctgttcaggatgttcatgctgtgcttgctgtccaccatgttcactgccaggcccctcttgccaaagcggcccgtgcgcccgatccggtgcaggtaggtctcattgtcaggattcccgtccttgtccacgggaagatcaaagttgatgacgacagacacttgttcaacatcaatgcctgcaggaaggagagttggaggctgagaggactaaggacaggaggcaaatcagtc

SEQ ID NO: 12377 - DNA, 524 bp, Homo sapiens
  MAP TO CHR19.3; EXPRESSED IN BONE MARROW, SIGNAL = 1.2; EXPRESSED IN PLACENTA, SIGNAL = 0.99; EXPRESSED IN LUNG, SIGNAL = 1.9; SWISSPROT HIT: P29400, EVALUE 4.30e-01; EST_HUMAN HIT: BI831722.1, EVALUE 1.90e-01; NT HIT: AF285761.1, EVALUE 8.00e-03
ttagttgccatcaagggctctctcctccctgtctccttacatggttttgcttatctggagagtagcttttggccaagacctggcagtggagagccatggaccagtacagccttggagacgagggtgccctcccatcagaaatgcacctcccttcattttcagagagccaagggctcaactgcagcgacaccctcaaccgggatttgggtcccaacacgcgaggctttctttatgctggcctgagtggtctggacccggaccccagcctcccaacgcctgacatgtccagcgaggtgctggaggacaacttagacaccttgtccctgtactccgggaaggacagtgattctgtgaagctgctggaggagtacgcagattcggagtctcaggcatccttacaaggtgaggctgtcacctgggtagaagggccctgcaggatgttcgacagtttctgtggccagctagggactgattctgcatggattggttaagaaaatttttccctcctacaggtgacttaggga

SEQ ID NO: 12378 - DNA, 516 bp, Homo sapiens
  MAP TO CHR19.3; EXPRESSED IN BONE MARROW, SIGNAL = 1.2; EXPRESSED IN PLACENTA, SIGNAL = 0.82; SWISSPROT HIT: P18535, EVALUE 8.20e+00; NT HIT: gi15306163, EVALUE 1.00e-100; EST_HUMAN HIT: BI548314.1, EVALUE 1.00e-100
agcaggtgaaatgagatggggcatttgggctgggtaggagggaggttgattatctccatgccaatgcttgttcccttcgtccaggccaattgtgacggccaccatccatttcccctccttcctgtctcataacagggactgagacagccattttggccacgaagggctgcatcccggaaggggaggaggccataacaattgtccagcactcttcacctcccggcctgatcgtgacctcctacagtaactactgtgaggattccttctgtaatgacaaagacagcctgtctcagttttgggagttcagtgagaccacaggtaccctggaagtgggggagataggtactaagagaaactccataaagagcttgtgtatggcctccctttgcattctgacttggcttagcctaagtggtccataccccaaagtacctcacagttcaagtaattttatgtttctgaattgttcattgggatctaaacactgctcagagcagcgagataccagtgaagcct

SEQ ID NO: 12379 - DNA, 597 bp, Homo sapiens
  MAP TO CHR16.3; EXPRESSED IN PLACENTA, SIGNAL = 1.1; EXPRESSED IN FETAL LIVER, SIGNAL = 1.3; EXPRESSED IN BONE MARROW, SIGNAL = 1.3; SWISSPROT HIT: P20825, EVALUE 5.80e+00
tcaataaatcgcacagcagcaacaaaaacagcaacaaatatactaaagttatttttatgtggtgggtatttatgtttccaagtaaaaacttgccttaaaacttttggaacaatatgtaactagcaaatatagtttttaaagttttcatacggtattccacaaatgtcttagtatatggtagagaaattgaagagaaaattaattccacacttgaaatttgtgtaggtttacttcgctctaaagcatagttcttcacatataaacttttataggaaaacggaagttttagagtaccttaaaaagaaggcagtgcttattttgaagaacagaaactaaattcgagagtcccctatgaatgataatcaaagagaaaaataccacaatcctgacgccacgatagaaaaagaaaagaagggcagatgctcaaaattattgatcatggttttcatccagcaattttttcacaggaacaactctacatacatgaatccaacccagaagcagcagaactttatttaattatgcttaatgtgtgcatatagtaatggtaataagagctaacactcgagtattacgatattgcccatagttgcatga

SEQ ID NO: 12380 - DNA, 514 bp, Homo sapiens
  MAP TO CHR14.3; EXPRESSED IN PLACENTA, SIGNAL = 7.5; SWISSPROT HIT: P11120, EVALUE 3.00e-22; EST_HUMAN HIT: BF967041.1, EVALUE 2.00e-78; NT HIT: U12022.1, EVALUE 0.00e+00
aagcatgttccagcttagccgccttgaaacctttgggaatattgtggtgtgtggcactgtttattgggagcagtgtttgctttatgggctgctgtatgaaggccagtccaacaggactattgtggtcattatttcagtagataaagaccagacttctgatacgttgcacaacttgaatggctggctttggcaagcccccggcaagtgtgtattgtgactgggttggataaagacattgattctaacgggtcaacttttgttttcagaattcaaggaagccttctccctatttgataaagatggcgatggcaccatcacaacaaaggaacttggaactgtcatgaggtcactgggtcagaacccaacagaagctgaattgcaggatatgatcaatgaagtggatgctgatggtaagagctttaaaaccatgaatgagggccattgttgtgtaattcaagttcagacatgttacaggattgtctttcaggtccccagagcaaagcaaatgtgcaaa

SEQ ID NO: 12381 - DNA, 555 bp, Homo sapiens
  MAP TO CHR19.3; EXPRESSED IN PLACENTA, SIGNAL = 7.2; EXPRESSED IN FETAL LIVER, SIGNAL = 0.97; SWISSPROT HIT: Q92212, EVALUE 1.80e+00; NT HIT: gi15305407, EVALUE 2.00e-40; EST_HUMAN HIT: R23016.1, EVALUE 1.00e-101
caggctcaaaaggctcaaagggagtgaacaagttcaacgaggtagggagaaatccgatatacggagggatagcacctctctagagtgaaactgagggcctggacagggaacagagaaaagaagcagagttctggagaaggggtcagctcgtctgggaggtacagacaagactcgactagggtgtgcttgactccatgcaaaactcttgttctgttccaggctggtgttgtagactgaggcacaaggaggggaaaccggcttcccagagaccctgccaacttcttccctctcacctgagcgccgccgccctgcgctccccgcggcccgagcggtaattgtgcagagccccctggatgtcctctcggatcagctccgcctgccaatcacaccgtcaggccacgcctccccacgccgcacccacttcctacccgggcctcgcccctggccgatttttcagctcagtcccagcccacgtgcggctaccgttcacacctgtgaacccacgcacgtccacgccccgaactcacccctcgccctacacctgtccctgcccta

SEQ ID NO: 12382 - DNA, 506 bp, Homo sapiens
  MAP TO CHR19.3; EXPRESSED IN LUNG, SIGNAL = 2.7; EXPRESSED IN PLACENTA, SIGNAL = 5.3; NT HIT: gi16163856, EVALUE 2.00e-43; SWISSPROT HIT: Q9UKP5, EVALUE 1.80e-01; EST_HUMAN HIT: AW245507.1, EVALUE 3.00e-43
tactcagggactctggagggagctctgaacctgcagtaaacgttgacacacactgacattttctgggcagccctcactcagagaccctgggatgcctgaggaacaagtttggccgtggggctccaggccactgaaaggcatcaagtccaaccttctggctgaaggaatcatgatttggaaaaaggaacatccgactcacctttagccagcttttcaggagctcattaaccagctctccgccctctgtgtgtccttctcgctgagaggctgggaacagggaagacagagctggaggaggagaaatgagtaccaggaatccacacctgccctgtgtccactcacacatctggaggcttccccacctgcctgcgatcgaccaggtccccatgcatacacagtcacccacaaagcatccacctctactccaagcaaacaccaacccacagcaatccaaggaaaccagagcatggccctgccgcatccacgccaggaaacagggcttaagg

SEQ ID NO: 12383 - DNA, 538 bp, Homo sapiens
  MAP TO CHR14.3; EXPRESSED IN PLACENTA, SIGNAL = 1.1; SWISSPROT HIT: P17657, EVALUE 8.60e+00; EST_HUMAN HIT: AW854891.1, EVALUE 1.00e-113
tgagctcccttcatcactcccctctcttaaaaaaagagagtgaaacattcataacatcataggtatttgttgccaatcatacattttgtagtttttgtgcaatattataaagtcaagtaaatagcctaatttggatttatttttatataatggtttctataatggtgatgccactaattttaaaaaccatttaacagtgtcttcttaatgatccatctgctagtaacttaccagtagagtgtgtgcattgtactttcgctacaagagaaaggagagaatgagggttatgttatttgcgttgcactgacaggtggactcaggtgaaccaagccattgcagaccagttgcagaaggcccagagtctgctccagctctggaaggcctatagcaatgctcatggtgaagctgccgcaaggctgaagcagcaggaagcaaagtttcaacagctcgcaaacatcagcatgtctggaaacaacctggcagagatcctgcccccagccctgcaggacataaaggtgggtacaaagcccatttggaa

SEQ ID NO: 12384 - DNA, 554 bp, Homo sapiens
  MAP TO CHR18.3; EXPRESSED IN PLACENTA, SIGNAL = 1.1; NT HIT: L01626.1, EVALUE 2.10e+00; SWISSPROT HIT: Q03018, EVALUE 5.30e+00; EST_HUMAN HIT: BF742261.1, EVALUE 2.00e-01
attacccatggggagaggtcatgagcagggaaaggaaaacatcctgaactttttacccagagtagagtgagaaatacttagtaacatcgtttatactcaattggcagtaacaagttttctgccatcagcagaaatgggggctcaagaactaagtgcagttataaagtttcatttttacacacttgattttgtgactataaaattcacatcctctggcaggtgctgtgctgtgggggatgaaaaggcggggcctgcccatggctaacagatagaaactgagaggagggggcctccctccctccttcccccctccccttaggccagccaggggttgaagcagggattctgtgggagaagggatgctcggctcaccgcaacatggggaccacgagttgcggaagcaacagcaccaggtggagcctacggcaagtccccagggatccctcatccctgcagaacactttgagagaccaattcctagcaatcaagctgatagagctggggccacagtcattcggtttacatggtaatgctcgcagtaattcatccagggt

SEQ ID NO: 12385 - DNA, 552 bp, Homo sapiens
  MAP TO CHR18.3; EXPRESSED IN BONE MARROW, SIGNAL = 0.99; EXPRESSED IN FETAL LIVER, SIGNAL = 1.2; EXPRESSED IN PLACENTA, SIGNAL =   1; NT HIT: gi6755705, EVALUE 1.30e-01
tcctggaccagacagagatgaagtccttccatcgcagcctcacacatttgccaaaactaaacaatagctgagagtatcatcgccactatcaccgtcgtcatcatcgtcattggtccatagggagctgattgggagaacgtggagggatgggctttgccctaattcatctttagaatattggtaccacacagtgccttgcttcagcctgccggtgtctctcactctcactccgtgatttattttgttttcttgggtcataccaccagttttgtaaacctctctgatgcccacttcctgaacctttgtcagtgctttgtggccctggactgaggagagagatgtcagcctgatttctgtgtccctacagctcatggtgctattgacactcattagtcctcagtaaatctcctgtcttgggagcttgataagcagaaatcatcagcttgtttagttgtgcctgatgcctgggcctgtcctgttctattctagcctccacctcctacttctatatggtgacctctgtgattctcaagcgtgaccatttcctgagtt

SEQ ID NO: 12386 - DNA, 509 bp, Homo sapiens
  MAP TO CHR14.3; EXPRESSED IN PLACENTA, SIGNAL = 0.86; SWISSPROT HIT: O27036, EVALUE 6.30e-02; NT HIT: gi14748497, EVALUE 6.00e-53; EST_HUMAN HIT: BI049136.1, EVALUE 2.00e-84
tgtaagcctttggaacaccagttcatgtagaacaaatatttagtatcttattttactgtgtgccaggttatttccatgttcccgaattcaatgtaatccttaacaaactgcttttctctgttagattccagatgagatgatccagtgcgtagtctgtgaagactggttccatggaagggtaaggaaaatgttccaccttttgaaaccattgttgtcacaaaaagataaaggttatattttacattataattagtcttctaaaaataaattctaatgatatgatcagtgtattattacagtatttataaaataatgggcattttggacaatttggcaatcacaagaaaatttttggtgttctatattcacagcatcttggtgccattccccctgagagtggggattttcaggagatggtatgccaggcctgcatgaaacgttgttcttttttgtgggcttatgctgcacaattggcaggtaggtatctttgtgaagttggtgtgccacaa

SEQ ID NO: 12387 - DNA, 593 bp, Homo sapiens
  MAP TO CHR14.3; EXPRESSED IN LUNG, SIGNAL =   1; EXPRESSED IN PLACENTA, SIGNAL = 1.1; EST_HUMAN HIT: BG435072.1, EVALUE 0.00e+00; SWISSPROT HIT: P55947, EVALUE 8.70e-01; NT HIT: Z46964.1, EVALUE 5.70e-01
agcccagaaaccacagattggaaaccactttctaacatgtaaggattacttaaccttttgtggttctgtagcatctctctttacaaggcaaatattctaacctttcactttaaagttgtttcatccttcccttatcttgcagactatatgtcggaaaccaaagacctccactgatcgacacagcttgagcctcgatgacatcagactttaccagaaagacttcctgcgcattgcaggtctgtgtcaggacactgctcagagttacacctttggatgtggccatgaactggatgaggaaggcctctattgcaacagttgcttggcccagcagtgcatcaacatccaagatgcttttccagtcaaaagaaccagcaaatacttttctctggatctcactcatgatgaagttccagagtttgttgtgtaaagtccgtctgtgtgcagctgtacaggcagcttactgtttgctagaggatgcgaaagtcataagttctttacatattacttgtgccatatcttcttcaccctaaacatagctctttctttataatatttgtgatgatggaaacaaaagccttggaacaattgcactt

SEQ ID NO: 12388 - DNA, 535 bp, Homo sapiens
  MAP TO CHR16.3; EXPRESSED IN PLACENTA, SIGNAL = 0.92; SWISSPROT HIT: Q14146, EVALUE 2.90e+00; NT HIT: AF156495.1, EVALUE 5.10e-01; EST_HUMAN HIT: BE181417.1, EVALUE 7.50e-01
attgttgaaggcctttgtgggagtcagttgtcaggaatttgtaggaatgactgtgttaggaatcattggaggagagggagtcagagggatggatcagtattttctctgcaaacctgatgaaacactccagagcccgcacctacatgcgtgggaactgataagatgggggttgtgtccacttcacttgtatgggatgtcggtgctttgaaaaaattctatcatcaaagagtaggtttcttagttctgcaaatctggcacctggagatggcattttgaatcggacgacctttttagtaagggtcacttgctgttggatcatcgaagggggtgctgagtcttcatttttgttcatccaaatggatatcatttcaatttagctccatgagtaaatcaatggaaaaaaaaatctccttttaacatttctcgggtgaacacacgacagcccccacatttcattttaggccatgttagggcatcacctcatggccagacatggcctggctgagaaggcggcagagcaggcagagaggcatag

SEQ ID NO: 12389 - DNA, 509 bp, Homo sapiens
  MAP TO CHR14.3; EXPRESSED IN PLACENTA, SIGNAL = 1.5; SWISSPROT HIT: Q9WTS8, EVALUE 1.90e-01; NT HIT: AF195139.1, EVALUE 0.00e+00; EST_HUMAN HIT: BG718759.1, EVALUE 0.00e+00
gactgcctggctgacttttcattggctcagagtcacaaaggctgcaggttcttcccccttccggtcgctgagtggttgaggccggaagacaacgctcatcgtcattggctgagcccggctgtcagtcctttcgcgcctcggcggcgcggcatagcccggctcggcctgtaaagcagtctcaagcctgccgcagggagaagatggcggtcgccgtgagaactttgcaggaacagctggaaaaggccaaagagagtcttaagaacgtggatgagaacattcgcaagctcaccgggcgggatccgaatgacgtgaggtaagggcctaacgggaactcggaactcggagctcggagaggcagccctcaggtcggggtgaattgggggcggggagggcggccagccttaagaagactggaacctcgaggcctgttcgcggggcggcgggtaaaaccctgttgtcgccgaggtggagaggccccaggtcccctccgtagagcgctggtctcaggt

SEQ ID NO: 12390 - DNA, 591 bp, Homo sapiens
  MAP TO CHR19.3; EXPRESSED IN BONE MARROW, SIGNAL = 0.81; EXPRESSED IN PLACENTA, SIGNAL = 0.85; SWISSPROT HIT: P14061, EVALUE 1.00e-09; NT HIT: gi7657477, EVALUE 8.00e-99; EST_HUMAN HIT: BE391293.1, EVALUE 1.00e-98
ggatgagtcacttggggaagacagcatgatacagaaataagtcataaggtccctaaccttcgcaggaaggtgggtgtcgctgtcttgatgtaatttggggtcagaattgaattgctcatggattaaggggggcactattcccagcagcccttcctcccactcagggctgaggatcccctatgacaaatgctaaactgtgtttaaaggttaccaaggtttcatatttgtccacccaagataccctggactggccttggacttggagtacggggtgaggtgcttcagggagtgtctagaagtaatgctagaagagtgagggactttaaggtaacccttagtacctcttctcttagtgaataatgctggaatgggcctggtggggcccctggaggggctcagccttgctgccatgcagaatgtctttgacaccaactttttcggagctgtccgtctcgtcaaagctgtgcttccaggcatgaagaggaggcggcagggccacatcgtggtgatcagcagtgtcatgggcctgcagggtgagctgtggggacccaaccctggaaatcccaccagtgtctgatcctccccagactg

SEQ ID NO: 12391 - DNA, 539 bp, Homo sapiens
  MAP TO CHR16.3; EXPRESSED IN PLACENTA, SIGNAL = 1.1; SWISSPROT HIT: P34576, EVALUE 7.70e-01
gctgtccctgctcttgattctacaggcgaaggcggctgtcccttgctcttgattctacaggccagggcggctgtccctgctcttgaatctacaggccagggcggctgtccctgctcttgattctacaggccagggcggctgtccctgctcttgattctacaggccagggcggctgtctctgctcttgattctacaggccagggcggctgtccctgctcttgattctacaggccagggcggctgtcccgtgcacactcacaagtgaaacaacactcttcagggaggcaccgcgctcaggccgtcaacacccttcccgcacctccctcctccggtggttctgtcaagcagggacacagggacggaggggccttggtcattttggtcctggctgttgaagcccccatgaggctgacctgagaggccaaagttggacaccacgattgccacaaaggccatagctgcttctccttgacggtcacctcgacgtgccaatgtggccaagcaggcaggcgccagcaacacccacaagacagatgctg

SEQ ID NO: 12392 - DNA, 555 bp, Homo sapiens
  MAP TO CHR14.3; EXPRESSED IN PLACENTA, SIGNAL = 0.86; SWISSPROT HIT: O14829, EVALUE 9.00e+00
ttgctgcattgctctgaatcaaaacagcagctggttcattctgggagaaaaatctagcataagaagaggtgttatttgggtcccagtataactaagaagctcaaagacaaatacgcattaaaggaacaattaaaaatttaggaataatcctcaaccagaagactacttcaaatgcattaaaaataaagtttaggaacaaaactaatcaataatagcaaaggtgaaatttcgataataatgcaaaccttgcaaggttctcataggatacaatttgctccattttccaaattctgcaaatttcttatatcaacacgaaatgcgttccagtgatgcagccttatcctcaccactgagccattcctgccaggcaaaaacaatgcaactgagcggcatcagagattacagagatatggccctggcaaaggcccaccagcagggctcttgggttccctctgaagcaaagaaaggcagccctctgcttgctggggaagacggctttcaaaggatgtttccagaataactcatgagtggatgggggcaccaggtttacaaatg

SEQ ID NO: 12393 - DNA, 568 bp, Homo sapiens
  MAP TO CHR19.3; EXPRESSED IN PLACENTA, SIGNAL = 2.4; SWISSPROT HIT: P19429, EVALUE 3.00e-26; EST_HUMAN HIT: AW027005.1, EVALUE 0.00e+00; NT HIT: X90780.1, EVALUE 0.00e+00
ataagccactgcacctggaccttcatgtacctctttgctcttacatggacttcctgtagccctaatgcacttcctgtcttccccttctacttcctgtcttcctcttgcatttctgaggaccccttactagctgcttctacctccaactccaagcaccatctgccctcaggcctagggttgttggcacccacagcccttcccctcagcatcctctttcctggccttagcccacactcaccttctcggtgtcctccttcttcacctgcttgaggtgggcccgcaggtccagggactccttagcccgggcccccagcagcgcctgcatcatggcatctgcagagatcctcactctccgcagggtgggccgcttaaacttgcctcgaaggtcaaagatcttctgagtcagatctgcaatctgggggcaaacgagggggtgggtacttctccttccatttcccgcacacccaactcctccatcctacactccttttttattctccttatctcgtcttccagtaccgaggccttaccagtctcttcccggcttaggctcccagtctaggcttct

SEQ ID NO: 12394 - DNA, 598 bp, Homo sapiens
  MAP TO CHR14.3; EXPRESSED IN PLACENTA, SIGNAL = 0.94; NT HIT: gi14251206, EVALUE 1.40e-01; EST_HUMAN HIT: BF129525.1, EVALUE 8.40e-01; SWISSPROT HIT: O25936, EVALUE 2.00e+00
accttgtggtttcatgctccagatcacataatgactgaggctcttgcttgtgggtccctgacatcaacagccagacctcttttgtactgacctcctgctcactggtattgacaggtctcttcctgcttgaccagcactctgcttatgctggcacaggagctgccctgaatacgttcagagtgactgtgggcattctttcctctggggtgcatgtctaaggtcatactcgcattcttggaggtgggcttcccttcaccttcaaccactactgtgtctccttgatgataagctacaggaaaagaagagtagggtaactttaactgcactaatatttagtggtgatcccggcacccctcccctgacagagcaaagtctcggggctgaactgaagaggtagtgtgaccctgttttatagcagaaagaacatgcaggcattacatgaatactgagacccagacaccacatgcagcagctcaggtgcctagtgaggctcccactgcaaaaggcgactgtttcatcttcaataaagcaaacattagataaagcacattagaaggccaagtgactcatttctatttctggccttcagacatcagtg

SEQ ID NO: 12395 - DNA, 532 bp, Homo sapiens
  MAP TO CHR18.3; EXPRESSED IN PLACENTA, SIGNAL = 0.95; EXPRESSED IN BONE MARROW, SIGNAL = 0.64; EST_HUMAN HIT: AW805746.1, EVALUE 2.90e+00; SWISSPROT HIT: P20128, EVALUE 4.90e+00; NT HIT: AE000613.1, EVALUE 5.10e-01
ttcactttcccttccattgcttcttaaactttgcaatcatttggaggaaaccataaaaaataagattttgtaaatgtttttttcgaaatgccctgtgtaaacgcattgttcttagaatgatgaggcttcctacatgtgtacttgctgggcctgcattccaaaaatgttgcaagaatgcgtgcactgccattttgccacatgacacagcagtcgcgtgatgtgctgtcatgacaaataggcaggaaatgtggtttgcgtgtggaatgagcttccggtctttccccaaggttagaaggatacagtattaaagaggagtcctgggtcagcagctctgttttgatgtggcaattattgacgctctgctgctctttcccggaaggtagagggcaagccaaagggaaggagttggggggccagcagttgatgccttgagcacagatcctatggttaaaggaggaggagtggggacatttgttactgaaccttctattccacctagagatccgaaaatacatttgggtggttttgaggt

SEQ ID NO: 12396 - DNA, 509 bp, Homo sapiens
  MAP TO CHR14.3; EXPRESSED IN LUNG, SIGNAL =   1; EXPRESSED IN BONE MARROW, SIGNAL = 0.83; EXPRESSED IN PLACENTA, SIGNAL =   1; EST_HUMAN HIT: BG540113.1, EVALUE 1.00e-100; NT HIT: gi16190779, EVALUE 1.00e-104
taatgcatgtggcagtttggtaataggaagagtttctaggttatggtaaccatttatttttgtgatcatttgaagatagtttatttctcctatattattaaagatccttagggttcagtaaagtatctgttgacctgagatttctgtcattatcctaatttttttcaggcctttttttcctaaatgagtgaaaacttttctccgttttagcaggatcgtgctatctaaacaagcatcattcaggaatagccaaaacacaaaaagagggagaagatgcttctttatatagcaaacggtacaaccaaagtatggttacagctgaacttcagcggctagctgagaagcaggcagcgagacagtattctccatccagccacatcaacctcctcacccaacaggtacggatggtctggggtgtccaagagctctttggacctgaggatagaattaatgacagggtactttgtctttccctgtctttactattcccatatactgatgcctcttga

SEQ ID NO: 12397 - DNA, 555 bp, Homo sapiens
  MAP TO CHR18.3; EXPRESSED IN HEART, SIGNAL = 1.9; EXPRESSED IN FETAL LIVER, SIGNAL = 1.6; EXPRESSED IN BONE MARROW, SIGNAL = 1.7; EXPRESSED IN PLACENTA, SIGNAL = 1.4; SWISSPROT HIT: P04258, EVALUE 3.50e-01; EST_HUMAN HIT: AI143757.1, EVALUE 0.00e+00
tgcgtatttcgctgtttctgacttcacacaaagaactgttgttatgtttccatcacttacacgcagcaaccagcattcaatgttgtgctctcaaagtctgtttaaagttggctgcttgcaaactgggccatagtttctgacaaaaatgatgctggtaagctaactcccaggccgagaatgcccatgctgtgggcaaaagaacagtgcccgcccctgggttgtctgagcagaagctggattgtgtgcctggagccctgtcgccctcagccagacccggggtcgaggctgggccggctctccgggagcatcagggatccggttggagagaggctcatacggcggtcccaggggccacctcgagggggttgaccggagctgggtctgggagctgcagcagagggaaggcggcatgaggagagagccgcaggtggggcgtgtgcacaaagtgcaggtgtgtggaggccctgtgggtttacattgccctgaggcaccacttcacgatcaccccattatttttaataaaggttgtggagaggctgcccttgtttgctaatt

SEQ ID NO: 12398 - DNA, 548 bp, Homo sapiens
  MAP TO CHR16.3; EXPRESSED IN PLACENTA, SIGNAL = 0.96; EST_HUMAN HIT: BE220685.1, EVALUE 1.20e-02; NT HIT: AF181897.1, EVALUE 2.10e+00
gattagcagaggctggcttggggtcaggctgatgaaaggcctactattcccaattccttaaacccaagaggtaaaggaggagggggaaatgccgtgcaggctggagttaatgatcgttttggtgcaagccagcgctcttttccacctcccaggtcctcacaattaaaggcctttgcctgccctgttggaaaggggagtaattgagcagtgacctgtcacagccccattttctggtgtgtttcacccctggcatccataaccaccaaattactcagtggagaaaacctaaaggaccagaatggggaggtggggtgtaaatggctcaaggaacttgttttccactctgggaggagcagacagggttggaggcaggggttctttttgaaatatccacagtctttaagaccaaggacccttttccccttctcactccactcagcccctttcatttaattaattattaattcctctttgccaggctctgttcagtgagaaaatgaatgaatgaatgaatcagtaattctacaggctccatctttcagtctggc

SEQ ID NO: 12399 - DNA, 546 bp, Homo sapiens
  MAP TO CHR14.3; EXPRESSED IN PLACENTA, SIGNAL = 1.2; SWISSPROT HIT: P17656, EVALUE 7.80e-01; NT HIT: AF002677.1, EVALUE 2.10e+00
tgtgcaaacccagaatcaacaaataataatcagcaaatcaagaaaaattacatcaacaatcaacaaataataatacaccaggaatccactggttatgagcgcagctcagcacagcgacatttctcagctcgttgatgtcccttcctcggtgcgtgctgagtcgttcctgtgtgccgaggccggtgcggggtgctggggcccagtcccctgggttcacagcccaggctgtgacagaggtgggttctaaagactcccgagctggtgtgcagtctcttcttacacccttgtccagatggccgcggggcccatcctgcgccctaaagagcagagtcagggccaggagctgggcacaggcggtttttctgggagatgttcccagggggtctcctggggagaggctggctggggccactgcaggttgggggatggagctggtcacctctgtgggaacccagggctcagtccccccagggaccatatgaaatcatatgtcatgcgcctgaggacagccggcagatggtggggggctgggtgtttatccaggaa

SEQ ID NO: 12400 - DNA, 577 bp, Homo sapiens
  MAP TO CHR14.3; EXPRESSED IN BONE MARROW, SIGNAL =   1; EXPRESSED IN PLACENTA, SIGNAL = 0.85; NT HIT: AF185637.1, EVALUE 5.00e-63; EST_HUMAN HIT: U69185.1, EVALUE 1.00e-108; SWISSPROT HIT: Q02280, EVALUE 3.00e-23
tgccactttacattgatgggaatttagtgctgcaaaacaaaatatcttctctactcttcagctaatagagctgaattaattaatactctggacactaataagaaaaagcagacccagagaacatacccgtttcctcagattgcaagtaagagtgagattccttgagaaggagtttgcaaaagctgtataaaagtccaggactttgagcaaggcttcccgcttgatgatgtgtaggtcacagtacgtcagtgcccggacgttcgcacatgcatgggcaagggtggtttccttccagaagatgtctccaaatacatcacccttccctagaaaacagtataagatacatattcaagtatctaacactgttcttatttaatcactcttgttattcagtttcatatacagtattgaccttctagcataatttagagctgagggtataaccacatctataaacacataacaatacacaatgctttcatataatatgtaaagtaacatcaccctgaattcagttattgatgaaaatctggagtggcatgaataaatggatccaacagagaagccaaacacctca

SEQ ID NO: 12401 - DNA, 518 bp, Homo sapiens
  MAP TO CHR16.3; EXPRESSED IN BONE MARROW, SIGNAL = 1.2; EXPRESSED IN PLACENTA, SIGNAL = 0.85; SWISSPROT HIT: Q17239, EVALUE 4.80e+00; NT HIT: gi16164460, EVALUE 2.00e-93
tgtctggactcacatttggccacccaaatattaatgagattcagttactccctcaacttgctcaccagcagatgcaggagtgagagtctgggcaaacaggccctctcacctagcgtgagatacatgggcagcaggaggggcaccttcccatgaatcgcccatgcaggacccctggaaagaagatgacagaggtcttggcagccccaaaatagccctgtgaccaagggaccccttcaacctatgctgatcacccacctgctgtgaaggagcgtgtcccatgttagcctctgtagatgggagctactcacctgggccgagggtgtgagttccttactccggcaggtcacctctctcagcacctcggccagctcctgcaccctctgcacgtcctccaagccggtggtgactgcagacagtgatcccagcacatgctctctgaccttggcacgggggagaaaggcagggagaggaaatgtaattctgtggctccatgaagtagtgtcaggaagatgcagggt

SEQ ID NO: 12402 - DNA, 534 bp, Homo sapiens
  MAP TO CHR14.3; EXPRESSED IN PLACENTA, SIGNAL =   1; EST_HUMAN HIT: AI656104.1, EVALUE 3.00e+00; NT HIT: gi13470324, EVALUE 5.10e-01; SWISSPROT HIT: O26368, EVALUE 1.30e+00
cacaatggcctaatgaaccctgacaggtgtcattgattttaacatatctaaatacccaggtggcatttattttctttaaccttcagtgaccacttggcttgcaagatccctcttcagctgtctcttcccactgtgacaacctagattggtagcgagtcagggactcaacaagaaaagccagtaaacctgaagcactggccatgcctcacctgggcaccactcagaagacatggacgtaagattcctcagggaaacagcccacctagccaaaacagtacccgcaaagttagaaaccattcaaacggattctcatgtgtgtcctaggagaggccaaagagacctgtaaaaaagtctcttttgtatcatttgggactcagaagtcacaatggccatggtccttcctgatgacctcatgcttgcaacagtcacagaaaggagacaacttgattatttcctggattttcatctcctgaagatcaaaaaagcagcccttgtaagagacagcaattaatagcgaacaagggtgacgttttt

SEQ ID NO: 12403 - DNA, 593 bp, Homo sapiens
  MAP TO CHR18.3; EXPRESSED IN BONE MARROW, SIGNAL = 0.88; EXPRESSED IN PLACENTA, SIGNAL = 0.89; EST_HUMAN HIT: BI828363.1, EVALUE 8.30e-01; SWISSPROT HIT: P14637, EVALUE 9.90e+00
ttacccacgcttctttttggtaatggtgacttgtcaacatatggttataactatggttaaaacaggaaaagctaaaactgaaacttcagaaattgtagctgttactcttatcatttaagactatatttggactttctgttttcattaagatcttaattttttataccaaaaagcattcaggtaaacaaattgttactatcacatgtatttttaactttcaaaatgaataattcagaaaatgatcccttagaagaattgctttggttaattttttaaaatcctacatgaaatattgtaactagagttacttgaatgaaatgctgtgagccattaaaacaaaattgcttcagttatatttacataggttaaagaaatacgcatatcttttcagtaagatggatcaaagcattaaacacagttggctgttaaatctcctgtttttcatctacacagaagatgttgtgtttagccaccagatggcgaaagaggatatttacttttgtaggaaaaaagaaaatactttttcctcctacaaaaaccaaatttaataatattaaaagtcaaatttattcaggtaagccagtagaggatgg

SEQ ID NO: 12404 - DNA, 576 bp, Homo sapiens
  MAP TO CHR19.3; EXPRESSED IN PLACENTA, SIGNAL = 0.87; EXPRESSED IN HEART, SIGNAL = 2.2; EXPRESSED IN LUNG, SIGNAL = 2.2; NT HIT: gi13375965, EVALUE 1.00e-94; SWISSPROT HIT: P31363, EVALUE 4.20e+00; EST_HUMAN HIT: AW991582.1, EVALUE 1.00e-30
caactccccaaaagtcactgtaaatccaagttcagcctgacactcaccattgatgaagaggctatccctgtccaggacatagaagcccagttgggtgacaccatgggtcagctgactcagctcccagtaaagctgctgtatgtccagcccggggcccacagggtcagggtggtaggtgcaggtggtgtccacaccagtggctgccccatccttctcaggcctggggagagaggcatttgaggactctagagaggtcccgagacctctgcaggtaaagagcagtggagggaggagcaggggaaagctgaggaaggggtggtcacaaaaggggtggttgttactggcaaatggccaggaagtggtctcacctgagggagatcagttggcaacccaagtagaaggggcccatgctgctcttctggaacaagggtctgagcttgagaggaaggaggaagagggtaagccgaggaacagaggttgggggtaggatttatcccaccaggagctgctgggaccagggtctcaccaggtgctgaaggaccccctcggtggagttgaatgtagctgagcccttgc

SEQ ID NO: 12405 - DNA, 566 bp, Homo sapiens
  MAP TO CHR16.3; EXPRESSED IN PLACENTA, SIGNAL = 3.5; EXPRESSED IN LUNG, SIGNAL = 5.1; EXPRESSED IN BONE MARROW, SIGNAL =  16; SWISSPROT HIT: O95125, EVALUE 5.00e-36; EST_HUMAN HIT: BG479965.1, EVALUE 0.00e+00; NT HIT: gi14779656, EVALUE 0.00e+00
ttatcgtctctccacagggccctgaaaaaaactctcttcctgtgtctggccagaggtatagagagagacaggttcaactctaaggcctgaaaaggaacaaggcccaccggaagcaatggccactgtccctggcctccagcccctgccaaccttggagcaggacctggaacaggaagagatcctgattgtgaaggtggaggaggacttctgcttggaagaggagccctccgtggagacggaggaccccagccctgagactttccgccagctcttccggctcttctgctaccaggaggtggctgggccccgggaggccctgagccgcctctgggagctgtgctgccgctggctgcggccggagctgcgcaccaaggagcagatcctggagctgctggtgctggagcagttcctgactgtgctgccgggggagatccaggctcgggtacgcgagcagcagccggagagcggtgaggaggccgtggtccttgtggaagggctgcagcggaagcccaggaaacacaggcagcgggtgagtgggggcattttgaccctcaggtgaggaaatg

SEQ ID NO: 12406 - DNA, 532 bp, Homo sapiens
  MAP TO CHR18.3; EXPRESSED IN PLACENTA, SIGNAL = 1.1; EXPRESSED IN FETAL LIVER, SIGNAL = 1.1; EXPRESSED IN BONE MARROW, SIGNAL = 1.1; NT HIT: S68043.1, EVALUE 1.30e-01; SWISSPROT HIT: P98161, EVALUE 4.40e-01; EST_HUMAN HIT: BF245033.1, EVALUE 1.90e-01
tccctagcaatccttcatgcagctttgggatgtgataagccatacatacttagaaaatgaaacaattattaatgtcgtgcgtcctctgtgccaggtttattcacatcgcttccacatctacaacacatagcatcatcccctttaaagatgatggagaagccaagccctcactccagttcagccaggtagtgccaggcccagtgggaccctgtcacaggtgtctcatgctgcctctcacgtccacttccatccaccagggcaacatggggcccctgcctgctggtcagaggttccctctgcagggcgtcacctcatgtggagctctggagagggcgaggcccctgaggttctgtggggccactatgttgtctgcccacagctctgggctctccacaggccctgcacctcggggccacatgtcctcatcctgccttgcagtcagggactggaaactctctcggattaacatcaagttcaatgccaaattcctggggaaaagcccaggaaaccatgagtgtctcccaagatccca

SEQ ID NO: 12407 - DNA, 540 bp, Homo sapiens
  MAP TO CHR19.3; EXPRESSED IN FETAL LIVER, SIGNAL = 0.95; EXPRESSED IN PLACENTA, SIGNAL = 0.99; EST_HUMAN HIT: BI906741.1, EVALUE 1.00e-112; NT HIT: AF287892.1, EVALUE 0.00e+00; SWISSPROT HIT: P20916, EVALUE 2.00e-06
ctcccctcttcctgccttacacacctttcctggcaggaagaggacagcagtgccctgggttgcagggaagttccaggcctcacagctgagcacagaccagagctgagctcccccttgaagctcaggggcagtgggtggcccatgagggtggggcaggtgtgttctcctcctccagcccctcccttacccacctgtgtactcctgttgcagggagaggttcagggaaacgtgctgggaacccagagagttctgagctcgacaggtgaattccccttcatcccccaggtgcacttgcagctccagtaccagagggtttgagggctgtgaggggtacagggtcagactcctccaggtccagctcagcctggcagggggattgctgtcaacagcacagaccaagcgcagagactggccctctaggactgaaagagatgagctgttccccagagctgtggatgctgtagagaaaaagttggaggttcaaagagacaaagtgattgaaacagggaggaaggatacagaatgagactggggaatgga

SEQ ID NO: 12408 - DNA, 557 bp, Homo sapiens
  MAP TO CHR18.3; EXPRESSED IN FETAL LIVER, SIGNAL = 1.1; EXPRESSED IN BONE MARROW, SIGNAL =   1; EXPRESSED IN PLACENTA, SIGNAL = 0.9; SWISSPROT HIT: P23268, EVALUE 9.10e+00; NT HIT: AL163204.2, EVALUE 0.00e+00; EST_HUMAN HIT: AA767895.1, EVALUE 2.00e-84
tctgcagaggtagataacaggatgaactctttattttttaacaaaatgaattttaagataaatgtctttatctgcagatgcaccttaaaacaagaaaatgaagaaaaaacaaatgttaatatgctgcacaaaaaaaatcgagaagaattagaaaggaaagagaaacaatataagaaagaagttgaagcaaaacaacttgaaccaactgttcaatcactagagatgaaaccaaagactgcaagaaatactccaaatcaggtaaatcaatctttggtaaaaattctatattttaaactttattttatcaatgttacttataatatccacttgatttaatatatattatttaggtaaaaaacaaaccagaaatgttatctcatttttaaaaatgagtgatgacacttacaggtacaattattaatatttactataaatcttggcatccacataggatattattttattacaaagagcttttgaaaacaataatatgccataatatatacttagtgataacctattgataaagattttgttcccagtaaaattgttccatg

SEQ ID NO: 12409 - DNA, 500 bp, Homo sapiens
  MAP TO CHR18.3; EXPRESSED IN PLACENTA, SIGNAL = 0.95; EXPRESSED IN FETAL LIVER, SIGNAL = 1.9; EST_HUMAN HIT: BF951842.1, EVALUE 7.00e-01; SWISSPROT HIT: P53925, EVALUE 2.70e+00
atcgtttgtggctggctatcgcggctgaatctttgttttattcacaggcggtgctcccccgaaaatctcacccattccttggaatacatttccaaagcaaattggaatccaagtcttgaaggacagttcctaggtgaccagttaaagaggggttgataggagaaggccaagggatgcaaagcttctagaagagtctgttcaagcaataccacgtaagcctcttcaataatagtaaaaagcagatcagattgcggtagtagagtagaagttgctcgcgggggcaaagatttgacatagttcacaatgtgggcaggcatgagacctaacagtggatatccacggaggacagaaataaggaaagctgagaaatcaggttttgaactcagtttccaagtgagctatgatctaacaccatgccaccagcagcgagtgggaaagtgagtatgcagagacgtggggaggttccagctctccaaaccagctgaaaccaaacagcaaca

SEQ ID NO: 12410 - DNA, 537 bp, Homo sapiens
  MAP TO CHR18.3; EXPRESSED IN PLACENTA, SIGNAL = 2.6; EXPRESSED IN HEART, SIGNAL = 2.4; EXPRESSED IN FETAL LIVER, SIGNAL = 2.9; NT HIT: AF183421.1, EVALUE 0.00e+00; EST_HUMAN HIT: AA630331.1, EVALUE 0.00e+00; SWISSPROT HIT: Q13636, EVALUE 2.00e-09
aggagtgttgaagcagggtgaaaatctgtgtgtgcagtgttggctgtaggaaagggaactcacccttggcctcctttttgttgcaggccgccagatcccacccttggacccccatgaaaatggaaacaatggaacaatcaaagttgagaagccaaccatgcaagccagccgccggtgctgttgacccaagggccgtggtccacggtacttgaagaagccagagcccacatcctgtgcactgctgaaggaccctacgctcggtggcctggcacctcactttgagaagagtgagcacactggctttgcatcctggaagacctgcagggggcggggcaggaaatgtacctgaaaaggattttagaaaaccctgggaaaacccaccacaccaccacaaaatggcctttagtgtatgaaatgcacatggaggggatgtagttgcatttttgctaaaaaaaaaaaaaaacctttaaaaattgttggatgtgtacaaaagtcttactgccttattatgtgtatgggattctaaagtggcattcc

SEQ ID NO: 12411 - DNA, 565 bp, Homo sapiens
  MAP TO CHR18.3; EXPRESSED IN PLACENTA, SIGNAL = 0.82; NT HIT: gi14765944, EVALUE 1.00e-109; SWISSPROT HIT: P09114, EVALUE 1.40e+00; EST_HUMAN HIT: AU140596.1, EVALUE 1.00e-106
gcaatagtccaaggcagagcattacagccaaatgtaacaagcgggactcttcctgggctgtcctttccaacttccctagggtctacgctagtggactacgattatcgggataaggtaccattaaggcaaagcttaaagaaggtaatggccacagagtagaactgaaaactgtacttgggggaatctttttagaaagctactttatctagccaatcactgaaagataaattctctaacaggttaattaccttatgttgttggtagagtaatttctgtatgcagtcttcctgcatcagctgaaaagctgctttacacaagtggtccatgaggaagaggataggttgttctcggtaccagagatgctggcttatgagagcctgaacccagaactccaacacagcaacggggcccacttcattgggctgagtgcttacagatatgtgtgcctgtggagaaaaggctcatgtgatgggaaagataacaaccagcctctcattttttaaatagcaacaaaatgctatctacctccactacaaatcccaaatctattgcctttcttggccaa

SEQ ID NO: 12412 - DNA, 536 bp, Homo sapiens
  MAP TO CHR16.3; EXPRESSED IN PLACENTA, SIGNAL = 1.2; EXPRESSED IN FETAL LIVER, SIGNAL = 1.7; EST_HUMAN HIT: AW163538.1, EVALUE 1.00e-113; NT HIT: U60553.1, EVALUE 1.00e-113; SWISSPROT HIT: P14943, EVALUE 7.00e-29
actgtcacatgacctggcacacagttgaaggacactctagtcccatcaagggcatgtgaccctttgtttgaaggtcctagggctgaatgatgatgcctggccccaaggagcctcagcctggtgggatggagacaggcccaggaagccagagcgggaagggagtgttacaggcaggaagtttgtaaagcccatgtttacagatcagagtcccttgagctaagatgaggatggcaaggaagcagcaataccaacagttgggagggcagtcgattggtcaaacccaaccgtgatgtctgtctctctgcccacaggccaggactcagccagtcccatccggaccacacacacggggcaggtgctggggagtcttgtccatgtgaagggcgccaatgccggggtccaaaccttcctgggaattccatttgccaagccacctctaggtccgctgcgatttgcaccccctgagccccctgaatcttggagtggtgtgagggatggaaccacccatccggccatgtaagctctccaaggggtcc

SEQ ID NO: 12413 - DNA, 543 bp, Homo sapiens
  MAP TO CHR18.3; EXPRESSED IN FETAL LIVER, SIGNAL = 1.2; EXPRESSED IN PLACENTA, SIGNAL = 0.83; EST_HUMAN HIT: BF686028.1, EVALUE 7.60e-01; NT HIT: gi14747067, EVALUE 5.20e-01
gcaccaagttcttgaaagggtggtaaataatcaattccatctgctccttaggatgaactgggttactactgtcacaatttagcatcattttctgctctgcatattcacacctggatcagattgtttcccatttccactgatagcttgacaccattgaagcaatagtgtggcacttgctacgaatagcaccagactcagagaatggcagaaggattaggagttagtatattctcctaagtcagtctgtatatataggcttcccattcatttctaggaaatggagagagaaaaattacagcacgccaaagagaacttattcaagaagacctgtccatgaaacacaattcaagatgggtaacacagaacaaagagcctcaaatagcattaacgacatttgttgagctgcaaaaggaagtaaaaggtcaagaaaggtgtgagtttaaagtattatgttcctttttttccagtcattttagcccatggaaacttttcacactttacttttgtgaagaatagcatttgtgattcacatgacctcatgcg

SEQ ID NO: 12414 - DNA, 577 bp, Homo sapiens
  MAP TO CHR16.3; EXPRESSED IN PLACENTA, SIGNAL = 0.94; EXPRESSED IN BONE MARROW, SIGNAL = 0.74; EST_HUMAN HIT: BG819943.1, EVALUE 8.10e-01; NT HIT: AJ238748.1, EVALUE 5.50e-01; SWISSPROT HIT: P22372, EVALUE 9.50e+00
agctgatgctttattcatgggttaactcttcatagagagaaataagcaccttactgcgtcctttaccctgaaaacccaccttggagagtctcttggcacggccaacccaagttggtccagccctgagcaactggagaaagaagcagatttagcttcagaaggtaggtggagactgttggagcagcccaggcttggggcagtgggatagtctgaggcgttgttcctacttgaggtttccccagttgccttacgggtagtcacttatcacactcctggggataggtaacattctatggtgtgtgtgagcttgctgtgcttgtgtgggatgccattgcaaagtccatctaagcccaggtcaaggaaggtgcaggggtcctcgatggaaacaattgtcagctcattatggaaactactctggggacaagggccaaatggaaatgatgaggattctctgtgccaggccagctttctctctagcagtccctccctgagctgtctgagatacaggcttaccagtgctcagatctctattggtgagaatcaggggcttgcctcccctccaaatttgtcaccagca

SEQ ID NO: 12415 - DNA, 521 bp, Homo sapiens
  MAP TO CHR18.3; EXPRESSED IN PLACENTA, SIGNAL = 1.4; SWISSPROT HIT: P36980, EVALUE 2.10e+00; EST_HUMAN HIT: BE327077.1, EVALUE 1.00e-94; NT HIT: gi15304054, EVALUE 1.00e-94
tgggaaacaaatgaacaggcaaacaaactcacctttcatcatagagtgtttttgtgatacctcctcccggaatgcggatacaaaactcggaatcatctatttcaggaatgcaccggcttttttccatttcttcccagttaaggctctttattttattttgaacacttttttgcatggaaggtgtaagtaggtaccggaagggagtactagaaataatcatatagttaactttttaaaaactctaaagcaaacatcggttctttagctaaaattctcttggtctccatatattctgctgcacaggcaaaacacaagtttcagcagacttaagtaaaaaatattgctctgatttgctacttacttacttacttaggagacaatataaaaagacagaaacacttaggcaagcccattgcaaaaatttcccacagctttcctcccttctgccatgaagcctgtaatgtcttttgtgaaagtcctggaaattagctcattttgaaaggtaactcttggcttgttgg

SEQ ID NO: 12416 - DNA, 504 bp, Homo sapiens
  MAP TO CHR14.3; EXPRESSED IN PLACENTA, SIGNAL = 1.4; EXPRESSED IN FETAL LIVER, SIGNAL = 4.2; EXPRESSED IN LUNG, SIGNAL = 2.8; EXPRESSED IN BONE MARROW, SIGNAL = 1.8; SWISSPROT HIT: P54554, EVALUE 2.00e-11; NT HIT: gi14752951, EVALUE 0.00e+00; EST_HUMAN HIT: BF767657.1, EVALUE 0.00e+00
tccagttccaaggacctcacacagtgatggccatatcccccatatacacatttaagtcagttctatcagagttgagtttgagcagccttacccggagagcatgcttgctagcacagtatccaatggaaagaggtacagatatgatacccaggatgctattcacagtaacaatctttccttgcttcctctcgatcatgtgaggcagaacacattttgtcaaggacaccgtccctaagtagttaagctctattagctttctgtagacatccaagctggtatccatgcacagagaacgctgggacattccaccattgttgaccagaatgtcgatctagttaaataaaatcagaaaaggggtgtttgggggatgtcttgtggatagattgatggaattcctatggatggttggttattttgttaacttaaagaatcaatggaacaatggtatatttccagaagtcagcaattaaaaagataaaataaagccctgaatttacctgtgga

SEQ ID NO: 12417 - DNA, 551 bp, Homo sapiens
  MAP TO CHR16.3; EXPRESSED IN PLACENTA, SIGNAL = 1.2; EXPRESSED IN LUNG, SIGNAL = 1.2; EXPRESSED IN BONE MARROW, SIGNAL = 1.1; EST_HUMAN HIT: AW173030.1, EVALUE 4.00e-52; NT HIT: AF200465.1, EVALUE 8.20e+00; SWISSPROT HIT: P46814, EVALUE 7.90e-01
tatggatttcattccctgccccagtgttcctctacagagtgaggggcaactaagtaacaagggcttttctactgcaaggtgacaatttgaaggttttgatatattttgtgaggctggtttgtccttgtccctcagtcacgggacaggggggaagcttgtcaaaggaggaagattaaaatttataaaaaggccacagaaaaggggacccgttgttcctaggggaagagtcctctgatcaccagtatgtccggaagctcttgcttcctgtccaaagcatagcactaagacaaacagccactcccagggcgcagggaccggagacaatgcagatctcagggcccgagggatgcatcactgagggagccacgactggtctctgggcctgacggtaaaccagggctgttaagtgttgcccaggtggccagcaagacaaataaggtgaggcgactggggtctacatcttgcattcctgtggccaaacggtcccttggaaggctggaaggcctgaggccaggaggccatggggatagggagctggggataaaaatgca

SEQ ID NO: 12418 - DNA, 502 bp, Homo sapiens
  MAP TO CHR14.3; EXPRESSED IN PLACENTA, SIGNAL =   1; EST_HUMAN HIT: BE281157.1, EVALUE 1.80e-01; NT HIT: AF302777.1, EVALUE 1.90e+00; SWISSPROT HIT: P04734, EVALUE 2.70e+00
aggggaatggaaaagtgaccccctagacatgcacgcatcccaaaagagaggtacggaaggacaaatcaatggatgaaaggctcttgggacctgtttaagccacgagtttgcacactactggcaactggccgtttctcgtgcacacatctatgcatgactatacttctgcgcatttgccacatgtaagttctttctcctggttaaatatgacccctgccaccctaaaccttaccatcacaatcgccggtggaaatatcgggagtgttgcagaatctgtgtgccaagtgcactgactctcacaagaggctgcacgcggggctgtaagggtggctctggatgtgcctttggccaccagccttttcctctcaggggacagcgaggtgagggcagcctctagagaacaaagggcaaactgccctgcttccatccgcacagaggggaccgctgatggcgacaaggtgactgcgctgcagcgaaggacgcctagcgtctggcgttctaa

SEQ ID NO: 12419 - DNA, 522 bp, Homo sapiens
  MAP TO CHR19.3; EXPRESSED IN BONE MARROW, SIGNAL = 0.77; EXPRESSED IN HEART, SIGNAL = 1.6; EXPRESSED IN FETAL LIVER, SIGNAL = 1.6; EXPRESSED IN PLACENTA, SIGNAL = 1.8; SWISSPROT HIT: O54898, EVALUE 4.80e+00; NT HIT: gi16178937, EVALUE 4.00e-20; EST_HUMAN HIT: AW276240.1, EVALUE 6.00e-23
tctggttgacctcggatttctgcgcactaagctgagccgcgaccccggctttgagccgaggcatccccgggctgggcgaccgtgggcgtgggcgctccggctgctgcggcggttcctgctgtgctcagctgggtcacgactggaactggcgccctccggaagtgaaggaggtgccccgcagaggaggcggtagccgtggtccctgtaaaccaggccttgctgacaaatgtcagacgccaagaacagaagaacggagagcttcagccaaatggaggaactgctggagcggctgagggtgaagctgcccaaactcctcaaagtggagcagcaaagcaaacaccagagaaggacaagaaaaatgaaagtcaaagaaaattagcagaaaccaaaggcagacgctaacgcagtgcaaaacagttcacatcatgatagaaagagttgatgagtctcggaaactaatcttagtgacagaacgaaaggacagcagtgaacatggtaaggtgctgacgattctggtccact

SEQ ID NO: 12420 - DNA, 580 bp, Homo sapiens
  MAP TO CHR16.3; EXPRESSED IN PLACENTA, SIGNAL = 1.1; EXPRESSED IN FETAL LIVER, SIGNAL = 3.3; EXPRESSED IN BONE MARROW, SIGNAL =   2; SWISSPROT HIT: O75698, EVALUE 1.40e+00; NT HIT: gi15318916, EVALUE 0.00e+00; EST_HUMAN HIT: BE396070.1, EVALUE 0.00e+00
ggccttctctcttgatgctgttacaagccgcccgttttcactgttagatgctgacttcttcatgtttgacccgtagtgactactgtgaagactggccagaggcacagaggatctcagcctcgctcctggacagccggtcctacgagacgctcgtggatttcgataaccacctggatgacattcggaatgactggacaaacccagagatcaataaagctgtcctacacttgtgctaggcaggcaccgctgtgactgggctccgggcctttccactacgttgaagaagaaaacctatttttaaatgtaaataaaatatcttgtagcctgtgtggaaagctgaccgttttaagaagtggcatgtgccttgaaagggggcagaatgttcagtcggtcgtgtttttaacacagagtctctagaagaggtgcagacatcccgtctgactgtccctgtggactctctcagttgtatgttgctataatcctccaaatcaaagctctttctgcttgtgcaagattgttcctattaaacagttttaactaaccttttataatctggagagaatactttttaaggcttttg

SEQ ID NO: 12421 - DNA, 578 bp, Homo sapiens
  MAP TO CHR18.3; EXPRESSED IN FETAL LIVER, SIGNAL = 1.7; EXPRESSED IN BONE MARROW, SIGNAL = 0.9; EXPRESSED IN PLACENTA, SIGNAL = 1.1; SWISSPROT HIT: P81127, EVALUE 2.00e-22; NT HIT: gi14763395, EVALUE 4.00e-57; EST_HUMAN HIT: AA737428.1, EVALUE 7.00e-57
gtctgctgtatcctttgcccaaaggagatgcagaaactaccagaggccgttcagctaattgagaaggccagcatgatgtatctagaaaacggcaccccagacacagcagccatggctttggagcgagctggaaagtgagtgtgagatggacaagtctctgcatagaagtcttgtctttttgttttaaagaggtccctgaaaaacaagttttccatttctcatataagacatgttttcttgtctgattcaggcttatagaaaatgttgatccagagaaggctgtacagttatatcaacagacagctaatgtgtttgaagtaagtttgaatcttatttttttctttaattacttagaatgtttagattaataatatataggaaaatagagaagtgcagtggctacttttaaaacttttccctgctcacagttgcacgctatttcttttctgttagagagtagtgaaatgaactagcagctttcgtgttccccccttgatccagtgccattacttctttacaaaataaatattaggggataaaaacatttcaacattaaagcagccaacacttgtttttct

SEQ ID NO: 12422 - DNA, 590 bp, Homo sapiens
  MAP TO CHR16.3; EXPRESSED IN PLACENTA, SIGNAL = 0.87; EXPRESSED IN BONE MARROW, SIGNAL = 0.8; SWISSPROT HIT: P33811, EVALUE 4.40e+00; NT HIT: M28876.1, EVALUE 1.00e-85
tggccacccacaacctatacctcttacagcccgtttaatgtcctttagccccttccataggtatttgcctggaatgtttgtaagatttttgaaaatctcagaaacaacaccagccctccacccatgggaagatgtgtctcaggctaacacctgtgctcttgttgatgccattgccccaaagaagaccaacctctccttcttgcccatataagttggctctaatttcaatgctgctgaaaacctctcctcttccataaattattttttcagattgctccagcccattgtgatctttcatccttcaaactcctttaacatctagggcctacaccattaatctgacaatcaccatatactgcttaatattgttgtagtctgctatttaccttcagtctgcaatttaacttccttaagtttatttcttgttccccattgtagagaatatctcccttaaatagctgccaagtcttgccaatcatggcctttcctgtagtgttttgcacgtgtgtgcacacatgtgtttttaattgacttgaagacaaagagactccccttaggaagctttattttctgtttgccacttccctagg

SEQ ID NO: 12423 - DNA, 543 bp, Homo sapiens
  MAP TO CHR14.3; EXPRESSED IN PLACENTA, SIGNAL = 0.86; NT HIT: M77195.1, EVALUE 8.10e+00; EST_HUMAN HIT: BI713710.1, EVALUE 5.00e-39
tctaaggatggggagtgtcgtgaaccaatgtttgagatgaacctaaccctgatcatttcatatttattcagacacagcctgaatcttgttgtttcttacctgtaacatctactttgtacttcgcagggttgatgttcatgggtgattgatcatcctgtagcgacggtggtattgactgttccccagaggacaaggagtgtgttcttatgtaagtcatagttgacattcttgtttttgattgggtagtttgcctgttcattgatgttcatagtactatagaaggtagataaatggccacatacctaaagaaaatcaaaggggacaaaaagtgagagtctgttataaactaaggattataattaatgtaattcagtacaactgtggacaattttgaaaagataaagattgatgtcattttagtcattttatagataaactaaaaatgggacatttttaatatcccattttagcatttttcatagtttacacaaacgttcctatattgctagatagcctagtctgtgaactccctgaggaaggagc

SEQ ID NO: 12424 - DNA, 500 bp, Homo sapiens
  MAP TO CHR16.3; EXPRESSED IN PLACENTA, SIGNAL = 1.1; SWISSPROT HIT: P49589, EVALUE 2.70e+00; EST_HUMAN HIT: AW340571.1, EVALUE 0.00e+00
aagggaggtgagggaatctgcttaccattccactcaatgagcatacgccctggggagcgtgggagatgggagatctgtccctcagtcagacgacttccatgaacttctttgagtggaagcatcttgatgcaccagggtggtcctaatgttctcagatacattagaatcacacaatatggtccctaaatgagagccaattctgtcttgtcatcaaccagagaaacagcaacttgttccaatgctagagaaaaacttagctgtgttaggttttgaaagcaatggaatataatctccaacatggctcttttttgaggatcttttgcaaaggtaactttggctctgtaaggttttatcttttgcactgactttagaatctaatccttggctctgatgagattctattgcgatcctttaaaaggggtaagaattaggatcatcaggactaatatgacctaagtttgtattgagttagtattgagagcattggctgaagtttaggg

SEQ ID NO: 12425 - DNA, 587 bp, Homo sapiens
  MAP TO CHR18.3; EXPRESSED IN BONE MARROW, SIGNAL = 0.94; EXPRESSED IN PLACENTA, SIGNAL =   1; EST_HUMAN HIT: BG427269.1, EVALUE 3.30e+00; SWISSPROT HIT: Q48457, EVALUE 1.50e+00
ctgggtgtcatttctttgggaatagaaaaatgaccttgttttgtgtatctagccaacaattctttttaatatttgtgagtataccaaatgtacaatattccttcaactgaagtaactttttaaaagaaactagaatttattcctccgtatgctttattttcatgaggtttgggtacagtatagtaaatttaaaaatcttttgaactctttaaaatggtctttgtacctatataatagaaaaggatctgttcaaaaaaattcttgccacaaattccttttgatcattttcatttacttaattgctctaatttatgcttatttttgtccactgacaacctaattggcctcacagacttctcattttattcaaagtccaccagcagttacttcttttgaataccacctcccctttggactccacgggaatttggacaataattgtgatgggtttggcaggggcttgggggttgggctgctcatatattatgaaaagccttagtagagaaaaattacatttcaagttaatttgtttttatataacagagtctgggtctaagctttccttcaccacatacccattgagggtt

SEQ ID NO: 12426 - DNA, 598 bp, Homo sapiens
  MAP TO CHR16.3; EXPRESSED IN PLACENTA, SIGNAL = 0.94; EST_HUMAN HIT: N26453.1, EVALUE 5.40e-02; SWISSPROT HIT: Q99677, EVALUE 3.90e-01
atgccagcttaccttgatgccctgaaagtttcccttccagccctgttttaagatagcataaacacacaatgacaatttgattttaaaattccatgtctcatataaactgtggcaaacctgtgctatagatgacaacaatataatccagccaccacagcaaacagatgcactagtcctgagtatattttggaaattggaaatgagcattttgtaagggtctgagtgggactaagtttggcatccagtctctaggtcaagtcaaaccctgctggacctgttttaagtcagagcaggtgagcccatttgacacctaggttggcattggacgtgtaaataggtaaatttctcaaaaactttaagccactttttaaaaatctcttaaaaatttgtttataacattttaaaaaaacatgcatcgacttttttttttcttgaggtagtagatccccctgtgaactgtgaaacatggcttctttctaatttagttgttttttgcaggtgtggtgttctttgatgcaccatcccaccctaaaacaaatggaaactgacactgcttctgtaagaagagtgttaggagacaaaaccctggaaagagctg

SEQ ID NO: 12427 - DNA, 578 bp, Homo sapiens
  MAP TO CHR18.3; EXPRESSED IN PLACENTA, SIGNAL = 1.2; NT HIT: AF305057.1, EVALUE 0.00e+00; EST_HUMAN HIT: BF591232.1, EVALUE 0.00e+00
tgtttttgttccaggtggttgttaacaggactcatttttttggtctttgataggatcccggctactcaacagaaatgaaggaggaatctgtaaagaaacaccagtatccagatggtgaagtttggaagaaactccttcctgctcaagaaaattaagtgctcagccccaacaacttttttctttctgaagtgaaagggcttaaaatttcttggaaatagttttacaaaaatggatttaaaaaatcctaccgatcaagatgagttcagctagaagtcataccaccctcaggaatcagctaagtaattattacttgattcttttagcaaatcaatgcacgttatcctacttaatccttaaataagtttagatttaactaacccaaagtccaggaggatgttcttacaaaaatagctatatcaagggctggcacctagacattaaactgtaatttgaaaataagcaacatgttgcataacttgttggaataattccttgttctgtttaacacttgtcataaattagcagaataaaaatagtcgtgcaacaccgggggtatctggtatgcaacgaagggaaaa

SEQ ID NO: 12428 - DNA, 511 bp, Homo sapiens
  MAP TO CHR16.3; EXPRESSED IN PLACENTA, SIGNAL = 1.8; SWISSPROT HIT: P23762, EVALUE 4.00e-03; EST_HUMAN HIT: BF870891.1, EVALUE 0.00e+00; NT HIT: gi14778125, EVALUE 0.00e+00
attagaatgctggggctgtgaccagggacagacatccttcttctgagccttgtgatctctccttccctgccctccaggggaagctgctcgctgatctggccaggcgcctgggcctccactatgtggtctacagcggcctggagaacatcaagaagctgacggcagggagattggccgccgcgcactttgacggcaaaggggaggtggaggaatatttccgggacattggcgttcccatgaccagtgtgcggctgccctgctattttgagaacctcctctcccacttcttgccccagaaagccccagacggaaagagctacttgctgagtaagtgccctttctcgcacacggtgaggcagagctctcaccctgtaaagccgttggtgtaacagaccgcgggccgctgtcacgtggtgccaggttcaagccgtggctccctcacgttaggcccaggactgagcacatcctgtcagcttgcggggcctcagcttcctgttctgtgagatgggct

SEQ ID NO: 12429 - DNA, 534 bp, Homo sapiens
  MAP TO CHR14.3; EXPRESSED IN LUNG, SIGNAL = 1.6; EXPRESSED IN BONE MARROW, SIGNAL =   1; EXPRESSED IN PLACENTA, SIGNAL = 1.1; SWISSPROT HIT: Q06440, EVALUE 9.90e-01; EST_HUMAN HIT: BI816787.1, EVALUE 1.90e-01; NT HIT: AJ251973.1, EVALUE 1.00e-102
gttgatcacggggaactcacctgagcactcccggggcttgggctctggtccctgctaatcctcagagccgatgaaaactggtcataggataaagaagcagccaaatctgcagcaggcagagaggggaggcaggaactggagaggacgcgagtggtgggcggcaggggtggtgtgcagggtgatgtccaccaagcagagagggttccttgtttcccagagccgaacacaggaaaatcagctggaagccatggaaatgaataaggagctgttgaagttgccagcttccttgagtaactgtgtaaacctctcgtcttctattctcatggccaatagtgcttccaatggtcaaaactcaagcctcaagataaagcatgtaaatagcctgagaagagcagtgttggtgcctagtggagaggagccagtcagggccttcagttacccaaggggacttggattgcgtagaatttagcgatctcactttgtagcgtgtccttcagcaagtcactttctctgtgctccaacttcctcctctga

SEQ ID NO: 12430 - DNA, 506 bp, Homo sapiens
  MAP TO CHR16.3; EXPRESSED IN FETAL LIVER, SIGNAL = 0.84; EXPRESSED IN PLACENTA, SIGNAL = 1.3; SWISSPROT HIT: Q14694, EVALUE 2.00e-17; EST_HUMAN HIT: AU119242.1, EVALUE 1.00e-125; NT HIT: gi14775392, EVALUE 4.00e-97
gtggatccagtgacgttgtgcctgttgggattggttgccatggatccagtgacgttgcacctgttgcgattggttgccgtggatccagtgacattgtgcctgttgcgattggccgtggatccagtgacgttgctcctgttgcgattggttgccgtggctcctaatgtagaccacaccctgatttcatttttaaaactgcaatcgacagatctgtgccttttttttttttgctgttcttgtcgtaaatagtagtgtaagcagatgctctccttttcagaacttacgatttccaacggccccaaaaaccactcggtcaatgaagaagagcaggaagaacaaggtgaaggaagcgaggatgaatgggaacaagtgggcccccggaacaagacttccgtcacccgccaggcggattttgttcagactccaatcaccggcatttttggtggacacatcaggtttgtgcttttctggaataacttaatatttgccttttctagggttttgcc

SEQ ID NO: 12431 - DNA, 533 bp, Homo sapiens
  MAP TO CHR19.3; EXPRESSED IN PLACENTA, SIGNAL = 0.92; EST_HUMAN HIT: BG425877.1, EVALUE 1.90e-01; NT HIT: AF055066.1, EVALUE 1.30e-01; SWISSPROT HIT: Q9RWG7, EVALUE 2.90e+00
cacactcggatttcatggtgttttgtttttatttgcctctgctggtttatttttgttggttttccctaggaaggcagtgaagtacctgagggcaagcctgggtctgggtcttgcaatcctatcctcagtgcctagatgcccagtgaacactgaattcatcattgtcccccttttacagagagggctgtatgtcacacagcgggtacacggggagccggggtttaaaggagtgttttcatgaccctaatcccctggccgctgacctccaggctcagagcctgactcatgtagaatatgccaggcccttagtggctgtgggctggctttgtgcccagaaccagggacgtgagtatccagagctcacttccccgctgctctcctcctccccagccccttcttggcttgctcccgcaggaagccctccctcaggtatcatttcctacagaggaaatctcctttgtccctggaagtgcaaatctggctgtgagagtggcaggcctcttgggggctattgtttggcacttccttcttgg

SEQ ID NO: 12432 - DNA, 573 bp, Homo sapiens
  MAP TO CHR16.3; EXPRESSED IN HEART, SIGNAL = 4.2; EXPRESSED IN FETAL LIVER, SIGNAL =  16; EXPRESSED IN PLACENTA, SIGNAL = 3.3; EST_HUMAN HIT: BI041731.1, EVALUE 0.00e+00; SWISSPROT HIT: P08640, EVALUE 2.50e-02
actctcccaaaacatcgtggggcctgattcttcctctttgttccaatggccctgggtgactcaagtgcccattcaatgaccaggacacagaggtcttagagagatgctccttgaggccccaggtgcgagcctgtaccctgccggagcatgaggcaagggacagggcatcgtctgtggggatagtgggggtagtgggggtagtggtcagccagatttggtgactctacttgctcaccagacgatcctacacctgccacctccgatggatccactgcctctgtgcctgcctgtactgctgatgctccagtggataactcagcatcccagcctaggcccaatgccactgaagatggaccttccccctggggacccaggagtcctaccactcagctgtccccaggagtgcccagaccctcattcttatccaggacctaggagccctacccctggccttccctcatcagccgtaaatgatgatttactgctgttaccatcatcactgccttcagtgaccaagggccttccaaggcgccagctctggaacgaaggatgcccttgggaggtgatgacact

SEQ ID NO: 12433 - DNA, 536 bp, Homo sapiens
  MAP TO CHR18.3; EXPRESSED IN PLACENTA, SIGNAL = 1.1; EXPRESSED IN FETAL LIVER, SIGNAL = 1.3; EXPRESSED IN LUNG, SIGNAL = 1.2; EXPRESSED IN BONE MARROW, SIGNAL = 1.3; EST_HUMAN HIT: BG027700.1, EVALUE 7.50e-01; SWISSPROT HIT: Q62947, EVALUE 5.00e+00; NT HIT: AE007664.1, EVALUE 8.00e+00
tccatacctcaccttccaccctgtgtcccgtgtttctgctgatgctctatactgccactgtccttactcagtgaacttacaccaggagcaagacatgttggatgaattcttctgctctctcatcttgctcacaagccatggttcagagatgcagtaattttttttcaggctctctgaagacatccatttaggttggaaattttaatgtttcatgaaacttggtcatacattttcatgtattctctttcttccttgattgcctcagatgacttcccctaggatcccactccctaataaagtgttggctcataaattttcacatccagtcttcttttctaaggtagtcaaattaagaagttgagtagctagagctactctggaaagcatatgatcagatgggcttttggagtttgccaagaaatctgaagtcagtatgaacttcgtttctagcatcatcattattaaaacttcacctacgattaactgtgataaggtacaagtgagtggtaatctgcagaggagcaaggatattgctt

SEQ ID NO: 12434 - DNA, 574 bp, Homo sapiens
  MAP TO CHR16.3; EXPRESSED IN PLACENTA, SIGNAL =   1; EXPRESSED IN FETAL LIVER, SIGNAL = 1.3; EST_HUMAN HIT: BI752847.1, EVALUE 6.00e-91; SWISSPROT HIT: P70560, EVALUE 8.30e-01; NT HIT: gi7661671, EVALUE 5.50e-01
cagctgggtcctcttttcactcaatgccatgacagagcccaagaaggaaaccttggttcggcttctttatctctttatcatggttccaagaagcataggacctaatggtaaatgctcaaacttggttcccttctgggtttctagtgctttgatcacataagcccaaggcaacctcatgacctataaaacattaaaatatcccagaaattctgacatagtggcgtccaaactctgccttcttctgcctcccccctccataacccctctgtcataccattcattccagtttttgactggggcccggtggccactgaggccaggccgtgggctttagagtccccgtggtggccagaggtaaccccctgtgcactgacctctcccggaagtacttgatggcctcagggtctatgaaggtcggctcttcccggtagccctgctcaaagaccttgcgcttgtgccggaactcaatgaccgtcttggtgtaggagttgagcgtggtgacagaggctgccatgcagcaggtaaaggagccccacgccaggctgccaagagatcaggagagagatgccatcgt

SEQ ID NO: 12435 - DNA, 504 bp, Homo sapiens
  MAP TO CHR14.3; EXPRESSED IN PLACENTA, SIGNAL = 1.1; SWISSPROT HIT: O97716, EVALUE 9.20e-01; EST_HUMAN HIT: AL524149.1, EVALUE 2.80e+00
tgacccaacaaccctacctcttaaaacgctgtctgagagcctgagcaaactggacctcgccagtggctggtgagagctctgtgttaatggtgctggattcctgcgggggcctgtgattccccgctccgtagagagtaggacagcaccccgcctcctccggacattgctgcacagtgggtgagccacctgctgccctgaacaggaagggaaggaggagccgtcggagcttggggctaaggactctcaagaagacccaccggcccaggatgctgcagccacccacggccataaggcaggggcggggccccctcgctgctggacctcctcctcggaggatctcggtgggcctggcccccaccccagcctccctgggaagctcccaaggtcgcctgggcatcctcagcagcctcagtgccccactcacagtggttcctccgcatctcccaggctttggccccagcgtggaactcaaaccctttccttcctttccttgagaagcccctc

SEQ ID NO: 12436 - DNA, 521 bp, Homo sapiens
  MAP TO CHR18.3; EXPRESSED IN FETAL LIVER, SIGNAL = 1.4; EXPRESSED IN BONE MARROW, SIGNAL = 1.4; EXPRESSED IN PLACENTA, SIGNAL = 0.97; EXPRESSED IN LUNG, SIGNAL = 0.99; SWISSPROT HIT: P16278, EVALUE 6.30e+00; NT HIT: AF084955.2, EVALUE 2.00e+00; EST_HUMAN HIT: BE868283.1, EVALUE 4.70e-02
gacggagaagaagggaggacacagggtcgttgatctggatggaggagtgagcattggacttgttttgacctttaaaaagtgcagggcttaagtggtgggggctgtctggaaccctttccctcccgtacactcagcacgttgtttgcttctgacacctcccattgtacacacttgggaggctggctacactcacaaggagcggcacatccatcagcaaatcgggctctgacattatttcagcttcctgcctttctcccccaatccacttcatcctgttaaaagcaccttcttgagacacagttgacataattttggctttaatattctctcttgtgaatttactctgtaatcttggaagcaaaacatagaaggaaagaagaaagaaaaagaaatctccaaacccatactccttatcaaaaaatttcggggttattaccacacaagcttgcggcagtttctgttatctagcggaggatggggagttccagggagacaggggaaggggagggagagctaagaga

SEQ ID NO: 12437 - DNA, 600 bp, Homo sapiens
  MAP TO CHR14.3; EXPRESSED IN PLACENTA, SIGNAL = 1.4; EXPRESSED IN HEART, SIGNAL = 2.6; EXPRESSED IN FETAL LIVER, SIGNAL = 1.7; SWISSPROT HIT: P37276, EVALUE 2.00e-38; NT HIT: gi15300984, EVALUE 1.00e-116; EST_HUMAN HIT: AW263683.1, EVALUE 0.00e+00
ctgggtctcatctcctctgggactgtgaacaacttgggcacgtttctaacccacccaaaaccctgcacataatgtggatgaaccgatttgcaggattcggtataaatcctgaaaggcctcatccctgagcatcttgttcggttttccttttaggtaaaccggagcactgctcttctgaagagcttgtctgctgaacgtgaacgatgggaaaaaacaagtgaaactttcaaaaaccagatgtccaccattgctggggactgtctcttgtcagctgcgttcattgcctacgcgggttactttgaccagcagatgcgtcagaacttgttcactacctggtcccatcacctacagcaagccaacatccaggtgagaatcacggggagttcaaaaaggatgtgcgagcagtgtgaggcaagctggtgtttagtgcacagttagagtcttgagaacagtcccatctgtggctgtgaagaggaggaaaggtaacggccttgcctttcagttccgtacagatattgccaggacggaatacctttccaatgctgatgagcgtcttcgctggcaggccagctccttgcctgctgatgacctttgcacaga

SEQ ID NO: 12438 - DNA, 501 bp, Homo sapiens
  MAP TO CHR18.3; EXPRESSED IN LUNG, SIGNAL = 1.3; EXPRESSED IN FETAL LIVER, SIGNAL = 1.4; EXPRESSED IN PLACENTA, SIGNAL = 0.94; SWISSPROT HIT: P78621, EVALUE 3.10e-01; EST_HUMAN HIT: BG685891.1, EVALUE 1.10e-02
cttaaactgaggcgcagtccagaaagttttgccaaccctgcccaagggtggcgcctgctcaagggttgcatttgtgtgagtttgtcaggaggagctaagtgggcctctgatgcagtggttgctcatccctaccagactttccttgctcaaagatctaggtggaataaggtattgtacctgccgctcacctgtgtacacctccagagaaactgagggttttaagtgccaaggttccccaggtggcctctcatgcctatttctctggtgcttgtccatgccttgagtttccagggcagatagagctgccacatcctctcctgtgggcttcttcagtagtgcaggtctctgctccacctctggcagggtctctcctccagcaggcagcaggtcccccacctctccctttggtttctggtgtcctgctgtgggccagacaagccattttctctttccttctctctcctgtctgccgtaggggagcacttactgacatattaaggc

SEQ ID NO: 12439 - DNA, 548 bp, Homo sapiens
  MAP TO CHR18.3; EXPRESSED IN PLACENTA, SIGNAL = 0.86; EXPRESSED IN BONE MARROW, SIGNAL = 0.81; SWISSPROT HIT: Q02487, EVALUE 1.00e-29; NT HIT: gi13645276, EVALUE 1.00e-100; EST_HUMAN HIT: BE000097.1, EVALUE 2.00e-72
ggaaaagtctggcactgtcccaggggcatcaaagctgtgctagtttttgaaccatttaaagatattggttacaaaatagatattgtattatatggactttttaaaaaaaaaaatacctaaacaaaagattatcaaaaactaatatattctttccatggtatatgaagaacagagcatttgcatttacttatatacctattttattctacatttatcagaattcctttctttccattaaattctagcatgctattctatgatattataaactacaaataatgttctaatttattcttaccttaactacacaaagaactccttcattggttttggcatctgttacaattttaaaattgccattttcattgccctttaaaatggtataattagctctccagttagcagtattcactaagtccttatcctcaacagtaactcgtaagatttccacatcaactgtattttcttccactgatgtcacatactaaaataataaaagcaaacaaaaaatttcgttagtaactctcacaaaaattgaacacgatgtg

SEQ ID NO: 12440 - DNA, 543 bp, Homo sapiens
  MAP TO CHR14.3; EXPRESSED IN PLACENTA, SIGNAL = 0.89; EST_HUMAN HIT: BG105577.1, EVALUE 4.90e-02; SWISSPROT HIT: P28854, EVALUE 5.10e+00
aagtacctggtataggaagggtctcatgaaagtttcttaactaaattaattaaatggatttggctagaaacatcacaaattagattaaaaattgtcccaagtatcacaaactagataatgatgatattgcatgttaaagcaggtagcttagattgcagttagtagaaaagctcagctttgaattttatataattttgttatgaatgtcatggaactgaaagaaattgataaaaatttcagtttccatgtagcagaaaatatcactaaaatcttgaaatttcatgaagttattgtggacagttgtaaatatgatcatagaacaacaaagcaagagctaatttgaaaaaaaatggaatcaaaatcgagaggataaaatttcatttatgaccacaaatgataatttaaagaaaagtgagtagttttaatgttccaggtttcttcttttatgcttgatattctgccttgagattctaactgagaagtgaagtcttggtcctgtgtccctctctcttctctcctctcagagaagccatctacttggcg

SEQ ID NO: 12441 - DNA, 502 bp, Homo sapiens
  MAP TO CHR19.3; EXPRESSED IN BONE MARROW, SIGNAL = 0.87; EXPRESSED IN PLACENTA, SIGNAL = 0.89; SWISSPROT HIT: O00445, EVALUE 9.00e-29; NT HIT: gi13651095, EVALUE 6.00e-96; EST_HUMAN HIT: BI751997.1, EVALUE 9.00e-96
tgagccagtaaggtgggttcctataggacagaagggagcagggactgggaccagctgggccattgagaggagcagggtgcgggaaggggccaggtggaggggctgggctgggccacaccttgtctatgtaactctggcccagccccttcacttcctgaaggtggacctgggcttgggcctggctcttcttgcctgtccgcctccgacagctcttccggtagagacagaaacagcagctgaagatgaggaggcctgagaccagcacgatggtggccagggcccaggggggcactgcagaggggtggagacaacacacattgaggcctgggcagcacgcaggctgattcagtcctgattacacgtggaagctggaatgctggcctccttttccctccagccattttcattgcatttcttcctgtgtttttcttccacctaatgtggcctatagagagattcgatgccccaacccaggctgacaccatctggatttgcttgcttg

SEQ ID NO: 12442 - DNA, 581 bp, Homo sapiens
  MAP TO CHR14.3; EXPRESSED IN BONE MARROW, SIGNAL = 1.1; EXPRESSED IN PLACENTA, SIGNAL = 0.9; NT HIT: X94328.1, EVALUE 5.50e-01; EST_HUMAN HIT: H84258.1, EVALUE 2.10e-01; SWISSPROT HIT: Q03829, EVALUE 4.30e+00
gctgttggaccaaaggaaacaaactaaaattgaataggaaagagaagagtcaggagagcaaaagaggtccatcagaaaaagataatgatccctttatggcccaacattctgtgacctcagggaagagtgacacaggtgatgtggcactactggtgaggcagcaaggagccccctgctcatcaaagtccttctccccccagctccctattgcctgtaattccactattgggtcaattctatttggattaataagcatcgctcattcattattgtcatctgctaaaacacagattcctgaaaggactaacaatttgattagcaacaatttagtggaattggtttatgatgtattcagccagtgtgagtgcctactcactaggaagtcagatacaatagaaacaagaacttgtcaaggtgactaagaagactcgattcaattcagaagtatctactagacatttcctggtcacctgacaaggtaggaaaacagaaaaatgcatgatactgtcacctccctcaaggagcttttagcgtggttgggaggaattcaagcacaccaaagccacagacagaacaagcaa

SEQ ID NO: 12443 - DNA, 501 bp, Homo sapiens
  MAP TO CHR14.3; EXPRESSED IN BONE MARROW, SIGNAL = 0.66; EXPRESSED IN PLACENTA, SIGNAL = 0.91; SWISSPROT HIT: P08547, EVALUE 1.60e+00; NT HIT: AJ310932.1, EVALUE 2.00e-06; EST_HUMAN HIT: AL603278.1, EVALUE 1.00e-08
ggattttattctctttttatgcctgaatagtattccattgcttatacatgccacattttcttagcctgaagaacatcttttagaatttccattagtgtggatcttctggtgatattatctcagtttttgtttgtcataaaattacttcacctacctttctgaaggatatatttgttcagtttggagttctattggtgagtattttctttctgcaatttgaattattgttttaattatctgttttctgcattccattgtttgtgttgagaagccacatgacagtctcctttgaaggtaattcaaaccttttccctgaagggagatgaaggcagggagtagatgaaatactccagtccagaagatttcattaactaattttatcaattcatacaaattccagagaatagaggaaaaggaatcaattcttagctcatttaatgaggcgtatatgaccctgaaagcaggtcacaaatatatcacaagaaagggaaatttacatgg

SEQ ID NO: 12444 - DNA, 562 bp, Homo sapiens
  MAP TO CHR14.3; EXPRESSED IN PLACENTA, SIGNAL = 1.2; SWISSPROT HIT: P39806, EVALUE 2.00e-22; NT HIT: gi11420514, EVALUE 3.00e-52; EST_HUMAN HIT: BI005907.1, EVALUE 4.00e-52
caggctaaaatgggcagaacccacatctagggaagccatcatgtagttagagtaagtcatgccaagtggattctagggggaggtgcaaggaccttcaaggagctactgggagcatcttggcagctgaccttgtctacatcagtgctttctacaacatcatcatgacagatggcacttacattgccattctcactggccatcattggctcaagaccagtaaaatcaccaagattctccagcatgttaatatgttggtacaacatggccacactggtaaatttcttttgactgatgagacacaactttattgatgtgttggactggtgaaccccaaggtgtgtcttcaagttgcctttggtagaaaaagcttggccatagatcttacattggaacagtctctcccgagtgtgggcacggtaatgcattttgagggatttatagcagctcaagattcagtggcaaatgcgacattcattggggttggtggtggacttgtcaatgttctccaccagttgctgcaatttctgggtctctgaccctggctcatggattccactccgtt

SEQ ID NO: 12445 - DNA, 584 bp, Homo sapiens
  MAP TO CHR14.3; EXPRESSED IN PLACENTA, SIGNAL = 1.1; EXPRESSED IN BONE MARROW, SIGNAL = 0.7; SWISSPROT HIT: P08922, EVALUE 5.00e-01; NT HIT: gi14750575, EVALUE 1.00e-63; EST_HUMAN HIT: BE176500.1, EVALUE 2.00e-63
ggcaaaaacccaaaatgaagctgatgctattgtagcatttattagcaagatcattagggaaatgtaaaaatgcaacaccctttctttcacattaacatctgaaaagaaaaaacaaaaaccactctaagtgtccaaatattggaaaaaaagaagcaagcggaggtcccgaattcttgtaaaaactgctgaacaaactcttcagtttctcttaagaagagtcaccaggataggcagtttctcaacatttgtgcttcatggcaagctaaggagagagaggaatgagaaaagtaagactttattagcaggtattagcagagagatttcactgtgctgctccctctccacctccacaatgagaagcagcaccaagattctactctctgtggcagatcaccgttactaattacagtagcacctttaaatgtgcaacattttctcaaatagctcatgggacatttcatttgttacttttccttatgatagctttgctggtgtatgcatccaggcgggagggagtgcctgtgtggtgttcctacatcacactgaaggaacaaatgaaaaaaccaatggacaggcagaatgaa

SEQ ID NO: 12446 - DNA, 544 bp, Homo sapiens
  MAP TO CHR14.3; EXPRESSED IN FETAL LIVER, SIGNAL = 1.2; EXPRESSED IN PLACENTA, SIGNAL = 0.97; EXPRESSED IN LUNG, SIGNAL = 1.2; EST_HUMAN HIT: BE798936.1, EVALUE 1.90e-01; SWISSPROT HIT: P54447, EVALUE 3.90e+00
acttgtaactgggggaggtgctgaattaaagcagcttagacagcctttacattggaaagtgattaacagttagttcccttgtagttattaatagctgctcatgtagctcacactcctggaaatgtaaggcctctggtaaactgagtcagagaatatggcttacctgtgagatcatggaagtcctctttttctcacatttaatttaaatcctagaacacacatactgggactattgcccagaatttcagattgttaaaactaggttgaagaagagatgccaatactcttggccaaacagcagcaggccactaatagcaggcctgtctcaccacctctcacactcctgtgtaggaagatgggacttggataaaaagtttttactcccaatggcccaatgcacaaaccagaggaaagagagagaaaattgttctgtgttctggtcattgggtaatgcatctgaaatccagttcaaagtgtcatacttacggtaattgggtttctccttttctgtgaataagtaaagaaggcaatatagacttggaaa

SEQ ID NO: 12447 - DNA, 586 bp, Homo sapiens
  MAP TO CHR14.3; EXPRESSED IN LUNG, SIGNAL = 1.6; EXPRESSED IN PLACENTA, SIGNAL = 0.95; SWISSPROT HIT: Q9JIK5, EVALUE 8.50e-01
tggagaggagtgggactcagggaatttgtggcaaatttcaggctgcagaaaaggctgggctcccagacttcagagtccttgggtgtgtgcaggcacagcccgcagtggcaggccacagatgccttcgtggaggatgccagagcctgcctggtgagcacatgggtgagtgtgagctcctacctcagaggctgggatgccacctcctctgcctctctggggctgaaggcacagggctcccagtgcaacaccttcctatagagaacctggcagctccttggagcctcacctatgagatcctgagccaagcctcaggacccctgcacggagtggactgaacacatttagttgggggtgtacgtggctgccaggcctttcttggtagctgtcctctccacggccctccaggctgctgagcctcggtcctcttggttgaatgccttgttcatgaaggagattcagaattgaaatgtgttccccgctccccacccctcattcctctggccacatcctcctggccttcctgccccagcctacattgggctgcagcaccttccagctctgtgaagctgaatcttgcctggctagg

SEQ ID NO: 12448 - DNA, 525 bp, Homo sapiens
  MAP TO CHR18.3; EXPRESSED IN PLACENTA, SIGNAL = 0.9; SWISSPROT HIT: O14834, EVALUE 4.00e-14; NT HIT: gi14760611, EVALUE 6.00e-53; EST_HUMAN HIT: AA399002.1, EVALUE 2.00e-59
tttgatgaacagattatagttccaggtatctaaaatgtcagtaacaacatctttcattgaattacacttcacctaggtttccccgcaaagttatttcaaaagggtaatttgttactgagtaaatgctaaaactagaattgttactttgaaaattatttcaaagattcacactgattgcctggtgatacaaacgattttgggacatgactgtacaaccaacttccttcaaaataaaataatctaaagagatcttgattacattaagcttccaaactgacaatattcaatttcagtaacaactttaagataacgtacctgaagaaaaacatgacagtacatggatcgtataactcatacattttgttgaagtcaggcacttctgtaatatccacaagataaataactgcaaaatttttaacctaaaaggagattaaaaaaaaaaactgaaataacagaacactttggctttcattttatagaagcacatttataaaaacaaaaccaagaatttgtgtggatcagggc

SEQ ID NO: 12449 - DNA, 500 bp, Homo sapiens
  MAP TO CHR14.3; EXPRESSED IN PLACENTA, SIGNAL = 0.93; NT HIT: U69254.1, EVALUE 8.00e-03; EST_HUMAN HIT: AW875131.1, EVALUE 1.00e-17
ataaattgggcctagggagcggctgaaatgtttgatgccccaatagtaagatagtcaaaattgtgttatgcttgtcttcatggaaaacctaaaattgaggtttacattcaatttaaaatggaaagaacatctgaatcaaatcccagctgggttgttttgttgtagattcaacaaaattaagttactttgtgtcaaaggacaaagggaccttaccctaggcagttcattcttagtagaggtctagcttgttttttcagacttttttgctgtaactgtacccaaggtctcaccgatgcaattacccagttggcgataaaaagcactgtgctctggctggtctccagtaagtccaactgtaacactgatgagggactggtcacctctgagaaggacaaggagtccactcctatcaattcctctatttccttcattcctgccaaagtttataacctttcagaaattctatttagtttcttagtccttgggcaatattgaagtgc

SEQ ID NO: 12450 - DNA, 570 bp, Homo sapiens
  MAP TO CHR14.3; EXPRESSED IN PLACENTA, SIGNAL = 0.85; SWISSPROT HIT: P23643, EVALUE 7.10e+00
aaatccaaggaaaaatgcccttacatctaaaagaaagtgctaactgaattgtaaatgcatacaatttagtgttaggacatagtctggcttgtacaatgtgtccaagtgggacaaagcctccatttggggaaataaatccctttgcttaaaaaagttgcaacaaaaaaatttcaatcttttcaaagactatttaaaagaatatttgacttttgttttgtctattcattctcaaactgaagtaggaaaatatgcctttgaaactgtttattttttatatgcagtttatttatatagccctttttggtgttttgacactcaaaaggtttatgaaagcatggatagctgctactctgctacatttagaactctatgaaaactaacagtgaaggtaatgatttcttacatgaacaaacaaaactggatttatacactgccctgttaccagaggtaggacctaaattaagggggaatcttgaagttgtgtggttccagttctgccttgttcttactatcgactactggttggtgtcttcacatactgataaggtaactggcatgttgctcaaaaag

SEQ ID NO: 12451 - DNA, 516 bp, Homo sapiens
  MAP TO CHR18.3; EXPRESSED IN HEART, SIGNAL = 1.5; EXPRESSED IN FETAL LIVER, SIGNAL = 0.97; EXPRESSED IN PLACENTA, SIGNAL = 0.92; SWISSPROT HIT: P14923, EVALUE 2.10e+00
aattcctaatgcggcaaatgtctatatggctgaactggacagtgagcactggggttcatcaagtgcgagtcaacaggaattttccggaaagcatcagattattttgaatcttgcagatgccagccccacataagccaacgttaatccatcctgctttatccatctgcccttcatcctctgggatgagatctgcatgtacagaaagggaaaggtgctagagagaaaaggtgtggaagaaaacacttgcattcagaaatggagttccttcttcccctcagtctctcgttcccttagaatacctgctgggcattgctggtctggaggcagtggaatagaatgaatagaaagggagcagcttggttggcttgggaagcttctcagatcaactcacagaaagtgcagtgaacaacaagaccagtgataaatgtgatagtgtctctgaaacaccttggagcctgatttcagaattgagattttctttatcacatatgcttttccatgagtcggaaacctcat

SEQ ID NO: 12452 - DNA, 534 bp, Homo sapiens
  MAP TO CHR16.3; EXPRESSED IN BONE MARROW, SIGNAL = 0.61; EXPRESSED IN PLACENTA, SIGNAL = 1.2; SWISSPROT HIT: O43248, EVALUE 2.90e+00; NT HIT: gi15891923, EVALUE 7.90e+00
cgagaattggaactgtctcccacatactctagctgcatttatgctctgatttgttctcaaactactttccatgacatgtcagtgtgtttgtcttagctcatagggtccatgaaagccaagatggcacattttgatggcttggtctcggtgtgtacattaccagctcgtgtcaagaatgtggcagttgttcagtgcctgctgggtgggtggtgatgtgcttttcaggatgatttgatttgttttaaaacctcactgatctgaattgatagtgggggagtacagtctgaactagtgaaaatctgcattttagtattgtttaaaataaacgcacttggaactgagtcacttaaggtatacctgaaaccacacaaacagagaatatccagatagtggctgttgaatactgttaccattaaaaggtaaaaatataaaataacttctaatttcacaatccttcaagttttgaagtgtttgaaagagtattttcttgaaataatttgttttctttctagagagggatttgctaagcctagc

SEQ ID NO: 12453 - DNA, 511 bp, Homo sapiens
  MAP TO CHR16.3; EXPRESSED IN PLACENTA, SIGNAL = 1.1; EXPRESSED IN LUNG, SIGNAL = 1.9; EST_HUMAN HIT: BF676404.1, EVALUE 1.80e-01; SWISSPROT HIT: O19132, EVALUE 1.20e+00
atttctgtgttcccactggccagtcctcagggcatgaggaggggcatgtagtcctagcacatgcctgaagtggaggctgggaagtttgctgatgtctcctctctctactttcctctttgccccactgggatgctctccagaaggctgaaatcttgggtgctttttctggaagactctgtaccctggctaaggtcccagccggctggcagctgccccttgtcgtttgctgccacacttcctaagggcaagggagagagtggagctgggcctccatcctggaacaactgggtgagtccagactgcggtccggagcccacattctttctgaaaatggttggccaactgaggcgtttctgggtattccatcaggccagttacaaggaacccaatttgcccaagggatggaggatcatgggagattccttgggagatgaagagatgaagacccctggagtatccgatgagctttgcatccattactgcagagggctccggatggccagatagtgtg

SEQ ID NO: 12454 - DNA, 575 bp, Homo sapiens
  MAP TO CHR19.3; EXPRESSED IN PLACENTA, SIGNAL = 1.1; EXPRESSED IN LUNG, SIGNAL =   1; EST_HUMAN HIT: BI011966.1, EVALUE 0.00e+00; SWISSPROT HIT: P41245, EVALUE 1.40e+00; NT HIT: U49747.1, EVALUE 5.50e-01
ggggaacggcttaaacatccctattcaccttacacttcatcctcatcctcagttcccttgaccaatcttactgagaatggcctgatgtgccccgcctgcactgcgagcttcagggacaaatgcatggggcccatgacccactgtactggaaaggaaaaccactgcgtctccttatctggacacgtgcaggctggtgagtggtgcctgaatctctggaaaaggaaacagaactagaggtccaaacttctaggttcgatgggaggagagggttccagagaagtgggtgaggatgtgttctgggattatgaggaagaaggggctgaggtccctgattccagtctgaaatctccctttcaggtattttcaaacccagatttgctatgcggggctgtgctacagagagtatgtgctttaccaagcctggtgctgaagtacccacaggcaccaatgtcctcttcctccatcatatagagtgcactcactccccctgaaaagctatctgaacagaggaagataatgtagtgtgaagtccccatttgtcctcagcctgtaactccccgtgtgcctataaagaa

SEQ ID NO: 12455 - DNA, 598 bp, Homo sapiens
  MAP TO CHR19.3; EXPRESSED IN HEART, SIGNAL =  93; EXPRESSED IN FETAL LIVER, SIGNAL = 1.3e+02; EXPRESSED IN BONE MARROW, SIGNAL =  33; EXPRESSED IN PLACENTA, SIGNAL =  17; SWISSPROT HIT: P11518, EVALUE 3.00e-82; NT HIT: gi4506660, EVALUE 0.00e+00; EST_HUMAN HIT: BG180431.1, EVALUE 0.00e+00
ctttgcctttttgagcttggcgatctgagccacagacttgagacccagggccttccctccccagtgatggcggatctcatcctgtcattgtagttggtcctgatagcttcccccagcttagccaaagcacctttgtcttctgagttaacctgtgtgaagacgacagtggtgcaggtcttcctgtggactagacgtcctagtcttaccttccccttgataatgcagtaagggactccccttttatgacacagggcaggcaagaagacaaccagcttgatgggatccacatcatgcgcaatcaccaccagctgaactttctttttctccaccaaggtggtgacagtgttaattcctgctcgaaggacacgtggtctcttaataaggatgtcccctttgtcagcagctttcttctcggcccgggccaacagcctctgcttctcctcttgctttgtctctggtctgtacttgtaggctagcttaagcagctgagtagctgtttggtggtccaggccctgggtgaactggttaatcacagaaaaacactttcagccgcctatagaggatggctctttgctgctgcaacctgatatagtggggc

SEQ ID NO: 12456 - DNA, 534 bp, Homo sapiens
  MAP TO CHR16.3; EXPRESSED IN PLACENTA, SIGNAL = 1.4; SWISSPROT HIT: P33485, EVALUE 2.30e-02; NT HIT: gi11431277, EVALUE 7.00e-62; EST_HUMAN HIT: BE061171.1, EVALUE 3.00e-12
aggaaccaagaaatgtcccctttgaaaggagaagtgtgtcactgccatgggctctagacacatgtaccccacctctgtctccagttgagtgcccattctctggaaatccacaaacattccaagagctagacttctcctgaatcatctcaaattcttcgaacttcactggtctagggaaggatgtgaggaggtgacagaggggcggggcaagacccccaaagaggttaaataggtcactgccaccctcgactctcagcagggtgtctccctgagcagagggacctgcacacagagactccctcctgggctcctggcaccatggccccactgaagatgctggccctggtcaccctcctcctgggggcttctctgcagcacatccacgcaggtgagagcaggggacaggtggccaggggcaggcaccgggaggacaggggttgggggcatgaagaccaccacagcaatacacacgtttgtgtattatttacaccccacctactcccacaaaagacgtgagaagcccacagcactagg

SEQ ID NO: 12457 - DNA, 550 bp, Homo sapiens
  MAP TO CHR14.3; EXPRESSED IN PLACENTA, SIGNAL = 0.9; EXPRESSED IN BONE MARROW, SIGNAL = 1.6; SWISSPROT HIT: O35276, EVALUE 4.60e-01; EST_HUMAN HIT: AI299961.1, EVALUE 2.00e-01
aatgtgctggaatctgaggggcatatgcaaaagtagatttaatttctcttccttacaagggtcaactatttacatgggaaggaaaaacataccccgcaactacaacctgatgtcagtaccaagagcagtatgcaaacgactattacgggcgctcagaagcatcacaatggaagggaagttgcagctgcctatacccacacccacatcttgtctacctgcctgctgcgtcacagcctggctgcattactgggctcacttcagttccaagaaagcttccagaaatcatggcaggcacacctgcagtgagcagatctgtgtctacttgtcctttaagtggacaccacttttctgttcagagcacagatcaatgtgtcagacagagctcttggatgacaatattgtcctggcagggatccagagcggctggggatagagaatattaaatgggtctggtgcagaacagttgaggtgtgactggatgtgacagaggacagcacctctttgacaatgacattatgtgagtttgggtgggctctcagctcaggtttca

SEQ ID NO: 12458 - DNA, 575 bp, Homo sapiens
  MAP TO CHR19.3; EXPRESSED IN LUNG, SIGNAL = 3.8; EXPRESSED IN BONE MARROW, SIGNAL = 9.3; EXPRESSED IN PLACENTA, SIGNAL = 3.7; SWISSPROT HIT: P33374, EVALUE 3.20e+00; NT HIT: gi15309586, EVALUE 0.00e+00; EST_HUMAN HIT: BE892562.1, EVALUE 0.00e+00
gagcctttccctgcctctcaggaccatggcagccgtgggctttgaggagttctcagcgccgccaggctcagagttggcgttgcctcccctatttggtggccacatcctggagagcgagctggagacggaagtggagtttgtgtcaggtggtctgggcggctcagggctccgggagcgagatgaagaggaagaggcagcccggggtcggcggcggcgccagcgggaattaaatcgcagaaagtaccaggcactaggtcggcgctgccgggagatcgagcaggtaggtgagtgcggatcccccggttttggggttccccctggcctaaactaccgccccccgcaatctctgcctttccacatgcccagcctttcttggcttgctgatatattcagtcatttagcttatatattcagtcatttagcatgcattatgtgtctggccctgtgccgggcccctggaagggccatctcccgtggagcttccctgacaacgcagatgggttctctgatgtctcccgggggcctctcaatgcgtggcaccgctcacaggtgaaagcccaagctcttcacatctc

SEQ ID NO: 12459 - DNA, 552 bp, Homo sapiens
  MAP TO CHR19.3; EXPRESSED IN PLACENTA, SIGNAL = 1.2; EXPRESSED IN FETAL LIVER, SIGNAL = 1.2; EXPRESSED IN BONE MARROW, SIGNAL =   1; EST_HUMAN HIT: AW250856.1, EVALUE 0.00e+00; NT HIT: AF298547.1, EVALUE 0.00e+00
aggaaataccaaggcaaggcaaagattgacaaggcaatagaaatcaatgcaattaaacactgtcacttcccccaccccccaggttctacccagtaagatatcttttctctaacttgtcaaagcccattattaagtaacagcttcatttgtgaatgctctcacctttatttctctcaatatacccgtgatacagatatttcatatgtaacaaagataaggatgtgtgcaggtataaaacagaggcagaatcatggctaaaacatctagcccagcaatgaactcattatccctgaggggtaggggccggggaggagaggagtcacaggcagttcaccaacacctggaaaatcgatgacttcatggagaatgaatgactcggggggattcagatcatgaagtcatgagaagaaggcctttctgcccagggatgatgtttctcagtatcaataatcagttgtgggtttttttcttctatttcttccagcagcttattgagttcatcattaaagtcatcgattttcaacctggggtacaatgggggaagaaaaggtt

SEQ ID NO: 12460 - DNA, 574 bp, Homo sapiens
  MAP TO CHR16.3; EXPRESSED IN PLACENTA, SIGNAL = 1.1; SWISSPROT HIT: O00506, EVALUE 2.20e-01; EST_HUMAN HIT: BI599802.1, EVALUE 1.00e-126; NT HIT: gi8923474, EVALUE 0.00e+00
ttccgagtctccttgtgaccaatcactcttagcctaagagactacatcccgcctctagtctgggggcaggaaaaggaggggaaaaaggtcgaccatctttaatacgggcggaggtgacgcctagcttcccgtcagagccgagcaaggtgggcggtgactagaagctcttccgtttattgggctgttgagcgggggccgaccgacggccaggagtttcttttctgcgcttgtgcgttttctgttcggtttccttcccgctagcggggccacgagggttgctaggcaacagcccctgggtgacttggtcttagggtcctgtccggcttggggctgatgaaaggagctgtccgcgcccgggctcttccgagaagtggttgctgacagccacaaagtgaaagggagtgaggcggcgtggacgagtaaggtaagtgctggggtcccttagcgcttgtgggccaggagcagcgcaacacaggtgactttaaatatgtatatcggatattttggaaaatggagatgcgcgcccggctgtaaataaaaatcacccatgcgttcacacgcagagatgaccact

SEQ ID NO: 12461 - DNA, 520 bp, Homo sapiens
  MAP TO CHR16.3; EXPRESSED IN PLACENTA, SIGNAL = 1.1; EXPRESSED IN BONE MARROW, SIGNAL = 1.1; EXPRESSED IN FETAL LIVER, SIGNAL = 2.9; EXPRESSED IN LUNG, SIGNAL =   1; SWISSPROT HIT: Q62625, EVALUE 2.00e-13; EST_HUMAN HIT: BF107461.1, EVALUE 0.00e+00; NT HIT: gi13699866, EVALUE 2.00e-53
tcacttctggcttcttttccaggtgataatagaacgatacaagggtgagaagcagcttcctgttctggataaaacaaagttccttgtacctgaccatgtcaacatgagtgagctcatcaagataattaggtattcagtcacctttgtttcataatatatttcctttgagtaacttcttattctttatgaaacttacagttaaatctttagttctggttaaaatctttaaaaaatatttttcagctgaattcagttctgattcagttatgattaaaacaatttcaacttaaactataaaatgtttctttttttgaggttttatattacttgctagactgcagagcccgtttctttcatcataacatcgtttagatgtttcctgtttaaaatcagtgttacaagttattaaggtattgtacagcaaagctagttaaagagaatgtagactctgtgagtggcagtaaatggcacaggcttagatcttagaatagttcagaaactgtatttgaactgctttctt

SEQ ID NO: 12462 - DNA, 537 bp, Homo sapiens
  MAP TO CHR16.3; EXPRESSED IN PLACENTA, SIGNAL = 1.2; EXPRESSED IN LUNG, SIGNAL = 1.1; SWISSPROT HIT: Q10144, EVALUE 3.80e+00; NT HIT: AF129396.2, EVALUE 1.30e-01
ggggtcattctccatgagttcattcaaagacaaccactgagttagaaactttacaaatcaatatttaccttcctggctcaacccagcctgtgctaactgataacccctctgaagaattttctgaagttgaattgcaaaggtctccgtaggggtcttgcctgcttcaataaaagcgtcttctagttttgttatttctgccaggtacatcttctgactctttcaagttctggcaggttcatgctcatttgagctacaggtgcaaaccaggtaaataactgtccccaaatgcaaggttgcagtcctctagcctcctgcaaacccaatccttcactccagggacaaagaagacagctttccctataaagttaccccacgggattgcagagtttttctgtgggttcacctaagctctgtttatatccctgcaaacaaaggcgcagaaagtcaccggagcagcaaggtgtgtccggtgctgaacgtttctccaggagtgctgcctgcactaagtgtaatgtgactctttcccatccccttctc

SEQ ID NO: 12463 - DNA, 507 bp, Homo sapiens
  MAP TO CHR19.3; EXPRESSED IN PLACENTA, SIGNAL = 1.6; EXPRESSED IN HEART, SIGNAL = 1.9; EXPRESSED IN FETAL LIVER, SIGNAL = 2.4; NT HIT: gi14785876, EVALUE 0.00e+00; SWISSPROT HIT: P26043, EVALUE 9.30e-01; EST_HUMAN HIT: BI766645.1, EVALUE 0.00e+00
taatggagtccctccacaggttacgaaggtccatctcaaacttgtccttgtccaggggcaggcagagggcttgcaccttttgcagttgctccttggccagctggcgctcttggtgctgcagctcccgggttttcacgcattcaaccagctgttcctccgccacgcgtttgttcagcagcacgctttccttatccttagtgcaaatggtcttctccttggctatctccacctccagcgtcttcaccttctgattcagcatgaagagcaaggctaaggaaaacaggaccaggagacccaggaagattgggggctgccgagagcactgggcagggagtccaccaccccggctccctgcagccttagcactcaccatcgcagctcttgttcatgtccttgaattgatctctgcattgcttctcactcaagatgatggcagccatgtacctctgattgttcgtgtagatgacctgcccggaagataggggaaggacgcaggacagagcttag

SEQ ID NO: 12464 - DNA, 524 bp, Homo sapiens
  MAP TO CHR19.3; EXPRESSED IN HEART, SIGNAL =   4; EXPRESSED IN FETAL LIVER, SIGNAL = 3.8; EXPRESSED IN PLACENTA, SIGNAL = 3.3; SWISSPROT HIT: P36507, EVALUE 1.00e-29; NT HIT: gi13489053, EVALUE 1.00e-118; EST_HUMAN HIT: BG740601.1, EVALUE 0.00e+00
gacagaacaggtttggggtgctcactgcttccagctctgtccccggaaaccccaggaccatgggaggactgctgaccacagtcggcaccatccagggggacaggtggtgcgccaggggcagaggggaggcagctgctgaccctggcacagcaggccccgcgcagggcactgcgcgtccagaccggaagttgcagattcaggccgtaccgctgacggggcgcccggggggcctcggccgaggcgagatgctgtgaggctctccttcttccccgtcgaccacgggccggccaaagatggcctccagctctttggcgtcgggcggggggatggggtaccttccgacggccagctccaccagggacaggcccatgctccagatgtccgactgcaccgagtaatgtgtgccctgcaaccgctccggctgcagcagagccagggaggaaagagcccagaggggcgaggatggcagctggaacccgggaggcttgccccgttacagcccccgtcaccctctccatggctaa

SEQ ID NO: 12465 - DNA, 517 bp, Homo sapiens
  MAP TO CHR14.3; EXPRESSED IN PLACENTA, SIGNAL = 0.91; EXPRESSED IN LUNG, SIGNAL = 1.4; SWISSPROT HIT: P46939, EVALUE 3.60e+00; NT HIT: AF031382.1, EVALUE 8.00e-03; EST_HUMAN HIT: BF376527.1, EVALUE 1.00e-57
tcactgagtgggcagtgaaggggggtgatagccctgtagcttggaaatgttttgtaaaatattacttttgcattatgttttatttctttataatttaaagcgtatcagaaaatataagtatcataagtatcatagtatataagtatcaatttggatagatatctaaatttagatagatttataatttagatagatttatcataatttagatagatatctaaatatctttgtctagtgggaaaataacaaagtatttgttaacttaagaatttattaagaattggtccccgtgttaatttgagaatttttttgtcttcaagatcaatgtggtaaaactcattgcagcgttgaagaacttaactgacgtttcaccagatttggacatcaggctgaagatggaagaatcccagaaggaacttgaatcatatatgatgagggctcagcagttactggggcaaagagagagccccggtgaactcatttcaaaacacaaggtgggaatcttttcaaccatcaa

SEQ ID NO: 12466 - DNA, 545 bp, Homo sapiens
  MAP TO CHR18.3; EXPRESSED IN PLACENTA, SIGNAL = 1.7; SWISSPROT HIT: P02686, EVALUE 2.00e-17; NT HIT: X17369.1, EVALUE 0.00e+00; EST_HUMAN HIT: BF945575.1, EVALUE 0.00e+00
catgcatctcggaggaaatccacgcgtaaatgcgggtgggcaatgccacctgagcccctgcacgcctgctgggacagagcacgtccagggtacagtgcggctgagccagaggcggcagccacccttgtactcagcttagttggggattctgggagcccttagtccccgctcagtggagctgagcagagggtaccttaccagcttaaaaattttggaaagcgtgccctgggcatcgactcccttgaatcccttgtgagccgatttatagtcggacgctctgcctccgtagccaaatcctggtctctggccttcggccccctgcaagagaagaccacggagctcaacctccacccgcggtgctgggcacgctgcttgagccactgggagctgccaccagggccccggggaagggcccaggccccggactggactggtgagtggttcaggagccacgggccagcaccacgctgagggggtgggggcgggagaggctgctcccccaggtctaccagggtgttggccgcagagagaggagggctctggtt

SEQ ID NO: 12467 - DNA, 561 bp, Homo sapiens
  MAP TO CHR16.3; EXPRESSED IN PLACENTA, SIGNAL =   1; SWISSPROT HIT: Q28785, EVALUE 1.40e+00; EST_HUMAN HIT: BI835866.1, EVALUE 5.00e-39; NT HIT: gi13786531, EVALUE 9.00e-03
gctggtctaagggtgtcagcttcaggacctccctctgttaaagagcctgggaggaaggcaggcaggatctgggagactgggagggggctaggctgagactgatccccatttcgccccaggaagtgaatgaattgtgtcagtcggtgcaggagcatgtggagctgctgggctgtggggctgggccccagggtgaagccgctgtgcgccaggccgaggatgccatccaaaatgccaacttctctctcagcgtgagcactccccctcctgctacaaggacccttcccctcttagtcaggtgtcagctcgcaactgcttttcctctttggccctcagattctccccattctatatgaagctggaagctccccaagccatcactggcagcttgggcagaagctggagggccttctgagacaggtgggcgaggtctgccgccaggacatccaggtgagagggtactcctgccccaaccccacctccgtttgcaggtttgactcccatcctttagttttaactgtgatatcccctgactcaatattctgttggagttggagcctcaag

SEQ ID NO: 12468 - DNA, 555 bp, Homo sapiens
  MAP TO CHR19.3; EXPRESSED IN PLACENTA, SIGNAL =  82; EST_HUMAN HIT: AL545735.1, EVALUE 0.00e+00; SWISSPROT HIT: P11464, EVALUE 3.00e-57; NT HIT: M22437.1, EVALUE 0.00e+00
agaccttctcaggacccagggccccatgttttcacaccaatacataggtctcaatattgactgatgttctctccacctcctagcatcacttttaaacttctggaacctgcccaccactgcccaagtcacgattgaagccgagccaaccaaagtttccgaggggaaggatgttcttctacttgtccacaatttgccccagaatcttaccggctacatctggtacaaagggcaaatgagggacctctaccattacattacatcatatgtagtagacggtgaaataattatatatgggcctgcatatagtggacgagaaacagcatattccaatgcatccctgctgatccagaatgtcacccgggaggacgcaggatcctacaccttacacatcataaagggagatgatgggactagaggagtaactggacgtttcaccttcaccttacaccgtaagtgattccacatgatccctgggtgttgggggacaggggtcacttctacttcacacacacaggattgtcaggcctggactctgcctgtgtcactcactgcgtt

SEQ ID NO: 12469 - DNA, 541 bp, Homo sapiens
  MAP TO CHR14.3; EXPRESSED IN BONE MARROW, SIGNAL = 1.9; EXPRESSED IN PLACENTA, SIGNAL = 0.99; SWISSPROT HIT: Q92692, EVALUE 2.30e+00; NT HIT: gi6678240, EVALUE 1.30e-01; EST_HUMAN HIT: BF031798.1, EVALUE 2.00e-57
ccatatgcagagtatggctgtgtttttaagaaattgcattttttttttcactaaatagatgattacatcttttttcttgtggggagtgattcttttgtacaatatatttcagtaaatactgcttttcttttgcaaagagatgagacagatgcaagattactgtcaatttttcctgtcttctctccacccctccttcttttctggggggtgggaggagaccaagtggggaccgtttcaatatttgtcctgggagagagggtggtagtgggcaaacctgtggtcaattgcctgcaaggagtcactgtggtacttggttttattttaatgaagccagaatcaatatgctcaattccagtgagaattataaacagtgtgtcgttcagaattcctgagttatgaccgagatgttctctcctataggtgggcctcatgagagatgtggagtcctcatcacggggttgcctggtgattatggaataagcagcggacttacagacactcagcgtccaggcgcaccaggccaccacatcccagacatgag

SEQ ID NO: 12470 - DNA, 542 bp, Homo sapiens
  MAP TO CHR14.3; EXPRESSED IN PLACENTA, SIGNAL = 1.1; SWISSPROT HIT: P33335, EVALUE 6.70e+00; NT HIT: U82671.3, EVALUE 1.30e-01; EST_HUMAN HIT: AL559896.1, EVALUE 3.00e+00
taacctttgaaggcattggcactacatactgtagaatattcttatttcaaaaatgagaaggaagactcttccggttctgactactcacagcagcccagaaaacccacacaaatacccacggggaattataattaaccttaatgaattgccacattccaggctttcaaaggtcttatcctgaaacatcactgctcttcatagtgcacccctgtatctggaggcgtatacaatagcagctgtgaggaaatgctgcaggcaaaacaaacggcagcatcattacggctatttttagcctgtaggatggaatcagctcagggctgctggctcggctcacacacccacctactgaggcgtcagcgttccacagcacaccagagcaggaccatttcagtaacgactcagaagacgtcaggacaattctgactgaacacagaattctccctgaaattgctatatgcaggtaaaagtctcaaggaaacagtggaagacccaatgtgaattttatggttctctcatccaaaaccatctccttgagagaagcg

SEQ ID NO: 12471 - DNA, 565 bp, Homo sapiens
  MAP TO CHR14.3; EXPRESSED IN LUNG, SIGNAL = 1.5; EXPRESSED IN FETAL LIVER, SIGNAL = 0.85; EXPRESSED IN PLACENTA, SIGNAL =   1; EST_HUMAN HIT: BI546042.1, EVALUE 5.10e-02; SWISSPROT HIT: O60152, EVALUE 9.20e+00; NT HIT: gi13449290, EVALUE 5.40e-01
aatgctttggaatcaggtggatatcttggttagagagttctcagaccagagtctcaccatttggcttcaaaaatgcaaatcttcatgctggcccaggggtggcactatttgaaattaaatcagaaaatgtcagctcacagtatgggtcactgtttttcaggcaactgaggaatagaatgtccaggtcatgcatgttctgcccattagatcctgaaaatggccagggcatttctcagcctcaacagtttcacagggcatatgtggaagaccgatgttcattgatctcctttctgaacccctttaggatggtagaatattaggtatttacaaggtccagctttgtgaagaccaaaaaactggtccaagagatagggaaacagctgaagaggttgatggtctatatgtcgatcaagctgaagtcaaggtcaccttgactgaggaaaagccccctgttcctctgcctaagacagcccatgggctctcctggggcatgggaatggcctagacgattcctgagacaagtcagtcctggtccttaaggacacccacactgttaggctcagca

SEQ ID NO: 12472 - DNA, 502 bp, Homo sapiens
  MAP TO CHR14.3; EXPRESSED IN FETAL LIVER, SIGNAL = 1.1; EXPRESSED IN PLACENTA, SIGNAL = 1.7; NT HIT: AF380833.1, EVALUE 1.00e-109; SWISSPROT HIT: P03172, EVALUE 1.20e+00; EST_HUMAN HIT: AI741970.1, EVALUE 4.50e-02
ctcaccatggggtctcagtcagtcagtttttcctgtctgtgtcatgagtgatactctccatacaagacttccttgcctcatatgactgttgagatttcatatgatgtgagcaacatcaaagtaagataagcactaaagataaacaaagtacaactatttatattgtatgcttttggtttttggtctctccccagccctaccattgaccatgccctgctggacatgcccttcctttgactccctggggagatgccctctgacttctgagagcagctggaccacccattctgaagacaccagcagtcctagctttggatgttcgtatacagatctgcagctcatcaatgctgaggagcagacgagtggccaggcttctggggctgactcaactggtaagatggagctctaagccagagggctttgcaaatcacttttggtgtacccaggtccactttaaagtccttttaaaaattgctgcagctggcttcctttgcagaatgag

SEQ ID NO: 12473 - DNA, 546 bp, Homo sapiens
  MAP TO CHR14.3; EXPRESSED IN PLACENTA, SIGNAL = 0.87; NT HIT: AF179713.1, EVALUE 1.30e-01; SWISSPROT HIT: P50077, EVALUE 6.70e+00; EST_HUMAN HIT: BF878331.1, EVALUE 0.00e+00
ggcaaatacaggcagctctctcactcagtccaataaatagatggtattcctaaataccttctctaggaatggatattgagcacctcacaccatctattgatagagaactttacagtttacagagtggttttatagcaattgtcttatttctggtgacttctgaggcttctatcatgataataaagatattcataaaaataatgtggatgttcagatgcccggtccatatggtggactgagctggcacagacggactgtccactctgcccatccccagcccaaacaaataaaaatattggatacaatacaacaaaaaactcttcaaatacaaagccaagcttaaaagcaaggaaagaaaaatctccaagagctcaaagtgaagataaaactcacactggagtaattgatggaagctgaaaatgaacacgtcacaggatattggacttgattataggaactggagactaatagaggagatgagacttcaagctgaactgaggaagagttttgtttttgagcctctgcacaaaaccagggaccagaaag

SEQ ID NO: 12474 - DNA, 546 bp, Homo sapiens
  MAP TO CHR19.3; EXPRESSED IN PLACENTA, SIGNAL = 1.2; EXPRESSED IN LUNG, SIGNAL = 1.5; EXPRESSED IN FETAL LIVER, SIGNAL = 1.1; EXPRESSED IN BONE MARROW, SIGNAL = 1.3; SWISSPROT HIT: P43027, EVALUE 2.30e+00; EST_HUMAN HIT: BI766244.1, EVALUE 2.00e-60; NT HIT: M17821.1, EVALUE 5.20e-01
acatggagggctggatagtgtcagcagaagggtagatgttattctggggtgacagggacagcagatgtttgccatgcttagtgactcattttccctgggccattcaatctctcccacattcaggcaaccaaaaacaggtaccatcctctttcttgtagatccaggagtgggagacgcggatctttacccacagtaagaatgtcaggtccccgggattcatcctggatcagaaggtcaagatcaggcgaaggatcaggatcctagaaaaccagttggacagggtgagggtcaaactcctggtccctcgacctgaattgtgcggttatgggaagaactgggcatggtcattggattctggaaatgctgggcagtgtgtgcacatatgtgtcaggacacaggattctggagggatggaggttcccaaggaaaggagaatgatgggtccttagaggggagtggacattgatttcgggaaccccaaagaacctctgtttctcaggaaacaggccggcccaacctctgataagtgtctcctccttggctgag

SEQ ID NO: 12475 - DNA, 500 bp, Homo sapiens
  MAP TO CHR14.3; EXPRESSED IN PLACENTA, SIGNAL = 0.86; EXPRESSED IN BONE MARROW, SIGNAL = 1.1; NT HIT: AB026906.1, EVALUE 4.70e-01; SWISSPROT HIT: P36213, EVALUE 4.10e-01
cagggaagagaaggtcatcgagggtgggcctgggggcttcccagcagccagcccctgtgactgggagaaaatcctgcccctgggcggaaaggcccccatctctccctaatggtgagagggcaggatcccgaaggggccccaaaccgtacctctcagtgtgcgcctccttcaggcgatttcccaccccatccccgtcttctctgccattcaaaggggcaagggtgtgtaggagaggaggtagggagattcctctctcccgaggatccctggcagaggggcctggcactgcaggggtgcatgcgagaagtgggtgcacgtccgcagagcttgggtgggcagcaacgagagggcttgggtgggcgagaagagaaggcatgggctgcttgcactcattttattccaaccccacagaatgcggctcaaccacgaggtgagttgctgaggctgggcgaatgctctgctcccattttacccagggaagccagatggagacctgagag

SEQ ID NO: 12476 - DNA, 570 bp, Homo sapiens
  MAP TO CHR18.3; EXPRESSED IN PLACENTA, SIGNAL = 1.2; EXPRESSED IN BONE MARROW, SIGNAL = 1.1; EST_HUMAN HIT: BG399979.1, EVALUE 2.00e-01; NT HIT: AF102783.1, EVALUE 9.00e-03
tgtgacactgttatttcccccccacccccactgtaatgtcagagaaacagttactacatggacactaagtgcaaaagaaataaaaattaagaagaatctgagcaatccattcagtcgagcatcactaagtacatcagaagacacagatctgggcactagattcaccacttctaagttgtgactttcttagaatcatcactgttaaatgtggatagcctaatgggagcaggtcaattatgaaacgtgtatgcatgatcacagtatgccgaaggtctcccacaaccaccagtgtagttattgctaagctattaagccagggcctcagtgttaacagagccctgcctagacccatacaggaatgccgactgaccgagagatcggctaggttagttaaagacaaagagaaaacctaaaattgtgtatcatttttacctgcatgaagaaaaacaacttctgaaattgccattgtagaaaataatgtaaccatttcttcagactggcttttgtttctttttttctctctgatgtttttctgtaaatggattattcaggcaagtgaaaaaggcaagt

SEQ ID NO: 12477 - DNA, 529 bp, Homo sapiens
  MAP TO CHR18.3; EXPRESSED IN PLACENTA, SIGNAL = 1.1; EXPRESSED IN LUNG, SIGNAL = 1.2; NT HIT: AF111167.2, EVALUE 7.90e+00; SWISSPROT HIT: Q10043, EVALUE 1.30e+00
atacgcaggagatggtggtcacatactggagttcaggaaagatcagagatgacctcacagatgtgggtgtccttcccacagtggagagaatagaatcgatgggcacggaagatgtatccaaggagaaatgacacaatgaggggctcggtgtcaaatcggaaggaacgccaacacacagtgacaagtggaaaagagaaatcacccaaggagcgctagagaaagcagggaaaacagagagaaagcagctgcaggggccaaaagaagaaaggagcgaaaaatgctccagagactggtcagatgaggaagcaggggctggtggagaggggcgacgcctactctcttctgtcctagttcccttgactttaattgtcacatgctttatttatttatttattggggggtaaaagacagctgtaaaatttaaacatttttctacaaatatgacttcaattccttggaagaattatttccatgagctaaacagacacccagaatggccagccaggcaggcatgtgaggagcaagttga

SEQ ID NO: 12478 - DNA, 505 bp, Homo sapiens
  MAP TO CHR14.3; EXPRESSED IN PLACENTA, SIGNAL = 3.1; EXPRESSED IN BONE MARROW, SIGNAL = 4.1; EXPRESSED IN FETAL LIVER, SIGNAL = 2.8; EST_HUMAN HIT: R58726.1, EVALUE 1.10e-02; SWISSPROT HIT: O00327, EVALUE 3.50e+00; NT HIT: gi15299813, EVALUE 8.00e-03
attccttaggaggcagagcctgaggccaagcttctacactagtgttttacagcaatcccaaggaagcccaagtaagagaagagaagtgaagtagggaaagcaaacataagacggagtgggcctaaactggccatggcttcacaagaatcggcttgttgctgggtcagagaggctgctgggaactaaggtacctcaaaaccttccactggaggggctggtgcttggacaggatatgtacctgccagctcccacctgtctcttattcccctttggtcagagttcacaccatgttggcccaactccccacattttgggggtgcatctgctagatcctttagcagcagatgagaaatccagattccacacccttcaacgtggtacttcatctgggtcctgaagtagtgaaaggacctgcagtagtagcctcggatggccgaatgattcagtccagtggcccagagacaggtagggctaagagggtttgagatgtgcctaagagatggcc

SEQ ID NO: 12479 - DNA, 523 bp, Homo sapiens
  MAP TO CHR16.3; EXPRESSED IN PLACENTA, SIGNAL = 0.82; SWISSPROT HIT: P10247, EVALUE 9.60e-01; NT HIT: L10124.1, EVALUE 3.20e-02
agttgggtagtcagcatgggggaaggaggaggacagtgggtctgtgagggtagttgagggaactgccccagcctggggatcatggagccacattccaattctgaagaagccaagtgctcagatggctgggtggacacatgggaacttgagcatctcttgataggcctaagatgggtgcttctcctgctttgctctcttctgcatggaggctgagaaaagatctctgatcctgttttgagcccctcatctttgaggccttattctcaatatctggtggctgtgaatctttgcttctgtttcctgagcttgttgagggcactctttcacgcgttctctctcttctccccgccccccgacctgtgattggaaatcaggaccatgcctcacctcctggggcctgcagagggtctgcattgagctgcgaggaagatttagggacctgggcatgcctggatttcaggggatagtccttgggctgatgggccccagaagacatacttgctcctttgtcctttcagcaagc

SEQ ID NO: 12480 - DNA, 510 bp, Homo sapiens
  MAP TO CHR18.3; EXPRESSED IN PLACENTA, SIGNAL = 0.96; NT HIT: gi15594346, EVALUE 7.60e+00; EST_HUMAN HIT: AW890637.1, EVALUE 3.00e-43
ttccctttgtttgcatttaggaatctctgcccactttcttactagttactggttatggacaagatctgttggtccacaacagcatgctaaagatgagcaagccagacaaagggaaacaggtttgctgtcacccgtacagcagcaagtgggaagcttccaggtaagagaaagtctcaacattattttaccaacttaagttctatacagaagttcaaaataattaaaaaaaagccaaataatccgctttgaactccagtctaatcttttaatgaaaatttcacctctaacattttgacaaaataaaatacacagtccttgatcctgattcattgtgagaagaggaaaaataagctcaggatgggattatgtagttaagggaggtgagaaaacagagactctttgagttccttctgaaagcaaaagatccatttaattacataccagagatgatatactcaaaccaagacttgctgccatagtctgggcatgcgctctgctccagtttccagt

SEQ ID NO: 12481 - DNA, 514 bp, Homo sapiens
  MAP TO CHR14.3; EXPRESSED IN PLACENTA, SIGNAL =   1; EXPRESSED IN LUNG, SIGNAL = 1.3; SWISSPROT HIT: Q25113, EVALUE 1.10e-01; NT HIT: AF335251.1, EVALUE 4.90e-01
aaaagtcatgcagagggcagggaccccccgccccctctccatgttgtcttccatgagcattcggagcagactgccagagcaggtttctgaactctggtccttgtgctctggcatcccattgacagcactgagttgcaatcctccgggccatgctgttcccacactggctccatctggcctgcagaccatgagagctgcaatgggccatgtgggagaacatcaaatatgaggcacattactaagatgttatcaagcaggagcaggggcttgggcagaaatgggagagagccgagtggaccttgcacgttctcaactatcaattactgtaactagaactcccacagccctgaagagggagcagaatgagcctcattttccacattccgctgctttgaagtgctctgccaagagacattcagcaggagagcccaggaatggcactctcaacagccaggctgcagaggggcttgggctgtctctcctgcaggtatggtgcacacaacctgaccactgt

SEQ ID NO: 12482 - DNA, 581 bp, Homo sapiens
  MAP TO CHR19.3; EXPRESSED IN FETAL LIVER, SIGNAL = 4.9; EXPRESSED IN PLACENTA, SIGNAL = 1.4; SWISSPROT HIT: P36776, EVALUE 1.00e-26; NT HIT: gi16177882, EVALUE 0.00e+00; EST_HUMAN HIT: AI082247.1, EVALUE 0.00e+00
tgggttttgggacttactgcttagaacccggcatcactgtgaatcgccggtccccaggaagccctttcgttcctggaggttagcacacctgctgccctcccacaggcccaggcagggctgaccctgactctgcccccaggccaagcgcgcaggggtgacgtgcatcgtcctgccagccgagaacaagaaggacttctacgacctggcagccttcatcaccgagggcctggaggtgcacttcgtggaacactaccgggagatcttcgacatcgccttcccggacgagcaggcagaggcgctggccgtggaacggtgacggccaccccgggactgcaggcggcggatgtcaggccctgtctgggccagaactgagcgctgtggggagcgcgcccggacctggcagtggagccaccgagcgagcagctcggtccagtgacccagatcccagggacctcagtcggcttaatcagagtgtggcatagaagctatttaatgattaaagtcatttgcagtacggcggcttcctcacctgctgccccgggaagggtgggcgggccacggcttttgattcacgaccaggc

SEQ ID NO: 12483 - DNA, 600 bp, Homo sapiens
  MAP TO CHR14.3; EXPRESSED IN HEART, SIGNAL = 3.6; EXPRESSED IN FETAL LIVER, SIGNAL = 3.6; EXPRESSED IN PLACENTA, SIGNAL = 1.3; NT HIT: AY052369.1, EVALUE 0.00e+00; EST_HUMAN HIT: BI256709.1, EVALUE 4.00e-92; SWISSPROT HIT: Q60996, EVALUE 1.00e-27
tcttaccatgcaggtgttggggcctcgtgggcatcagtcactccacgtgtcatttcttttgtaggtggtgatggcacttctcaaatactggccaaagactcacagtccaaaagaagtaatgttcttaaacgaattagaagagattttagatgtcattgaaccatcagaatttgtgaagatcatggaacccctcttccggcagttggccaaatgtgtctccagcccacacttccaggtatgtggggcttgggggacctgattaaattcttccagtgttcatttgggaaaggaaaagttccatgcgtagctggccatgctttgcctctcatgcaatttaaaggtaaaatccaagtttttacttgaattatacttcaaatacgatgctgtaacttgaattctatagaatacccttgagcatcttgtcccttctgccgcgatactttttctcactaagagcagtcatctggcttctctgtaaagctgtctttatcttcatgttcagtgtgcttccaagttcataaacaccctcctttccacacctgagcatcaatattgatagacaacgggtggccaaagcctcggctctgagatgctcttgct

SEQ ID NO: 12484 - DNA, 513 bp, Homo sapiens
  MAP TO CHR14.3; EXPRESSED IN PLACENTA, SIGNAL = 0.88; SWISSPROT HIT: Q03340, EVALUE 3.60e+00; NT HIT: gi11434308, EVALUE 2.00e-68; EST_HUMAN HIT: BG701924.1, EVALUE 0.00e+00
tagctcatgagaaccccaggcaagtgcggacctacaaagtttgtccgctccggggcactgtagtggcttttaccctggccgggcgggcggggctcagccgggctgggctgggctccgcggctggagccgggctctacccagagcaagaccctgatggctgcggtgtttctggtaacgctttatgaatactcgccgcttttctacatcgcggtggtctttacctgcttcatcgtgaccaccggcctggtattgggatggtaagtgtcccaggggtgagagacgaaggggcggataccgccagagtggggtcgcgacgagcagcagggggcaccggagccggagggccgcgggccggaggacgtcggggattcggtgtccccgggtgcctagaactccgactttctctgggaggaaaacaaggtggacgctgcacctgcgtcactgccctgcatcaccgtttggtccgtgtcgctggggcatcttggggtggtaccgcattggggtgttttactc

SEQ ID NO: 12485 - DNA, 596 bp, Homo sapiens
  MAP TO CHR14.3; EXPRESSED IN PLACENTA, SIGNAL = 1.1; EXPRESSED IN FETAL LIVER, SIGNAL = 1.3; EXPRESSED IN LUNG, SIGNAL =   1; NT HIT: L10058.1, EVALUE 0.00e+00; EST_HUMAN HIT: BE561361.1, EVALUE 1.00e-104; SWISSPROT HIT: P23083, EVALUE 3.00e-38
gggagaatcccctagagcacagctcctcaccatggactggacctggagcatcctcttcttggtggcagcagcaacaggtaaggggctccccagtctcggggttgaggcagaaaccaggccactcaagtgaggctttacccacccctgtgtcctctccacaggtacctactcccaggtgcagctggtgcagtctggccatgaggtgaagcagcctggggcctcagtgaaggtctcctgcaaggcttctggttacagtttcaccacctatggtatgaattgggtgccacaggcccctggacaagggcttgagtggatgggatggttcaacacctacactgggaacccaacatatgcccagggcttcacaggacggtttgtcttctccatggacacctctgccagcacagcatacctgcagatcagcagcctaaaggctgaggacatggccatgtattactgtgcgagatacaccatgtggaaacccacatcctgagagtgtcagaaatcctgatgtgggaggcagctgtgctgagctgaggcagtgatgcagcagtttccttaacttccatcttatctcattttgcatcgacatccac

SEQ ID NO: 12486 - DNA, 551 bp, Homo sapiens
  MAP TO CHR14.3; EXPRESSED IN PLACENTA, SIGNAL = 0.9; SWISSPROT HIT: O95988, EVALUE 4.00e-29; NT HIT: AF110465.1, EVALUE 0.00e+00; EST_HUMAN HIT: AW404913.1, EVALUE 1.00e-88
aaattacggcaatggcagagatggagccccaagagaatactcagctttaacccaaggtgttgacaggttggaaacagtggctaaatttggggattgcagtggggcgaggcagggtgcaggtcagagggggccagaagggccccagccatcctagatggagccacaagtaccagtgccaaggctcttggtctggaattctgaaaacatttacctctgaccctggcagcccactggccattgcttgtgtgcagcccagttggcagggaaccctatccatgatttgccgcctcttttctggtcccttcagtatgaacccagcatcacagtgcacttgtggcagatggcagtgcatacccgggagctactctcctccggccagatgcccttctcccagctgcccgccgtgtggcagctctaccccgggaggaagtaccgagcagcggattccagtttctgggaaatagcagaccatggccaggcaagtgtgtggtggttctaggtgaaagcgacaggtggcccctggtgactgccgtggccctctctcttctgtg

SEQ ID NO: 12487 - DNA, 547 bp, Homo sapiens
  MAP TO CHR16.3; EXPRESSED IN PLACENTA, SIGNAL = 0.86; EXPRESSED IN LUNG, SIGNAL =   1; SWISSPROT HIT: O89053, EVALUE 1.40e-02; NT HIT: U53875.1, EVALUE 1.30e-01; EST_HUMAN HIT: BI772600.1, EVALUE 7.70e-01
tgtttacacagcttggctggcaaggatgttggcagcggggcccttgctggatggaacacgaggccctgctggggctctgagaccaactctgatgcagacctctcccgcctcccacccgccttcccattcctggctggagagggccgggtctgggccagcacagggcaggaaagacctggggatattggccaaggcctgcgttaccttggcctgagcgtgtaattcattcacagtgggggcccagggcctggcatggcattgcctctccctcaatttctctggggatgcgtgctcttttaggcctggttttgatatcactccactgttatccacaaaagcaccaaacttattttgtttcttaggctctgatgagcctcttcttatcaatgcctcttctgtgtctactggtgagaattaacttgtcagagagagccacatccagaattcatggagcaactgggttgaaagggaatatcagaaaaccccagggaagggactcaccgctgaaggatagcggagggtatcctgagtttgccgtaggaagcag

SEQ ID NO: 12488 - DNA, 526 bp, Homo sapiens
  MAP TO CHR19.3; EXPRESSED IN PLACENTA, SIGNAL = 0.84; EXPRESSED IN LUNG, SIGNAL =   1; EXPRESSED IN FETAL LIVER, SIGNAL = 0.77; NT HIT: gi15303543, EVALUE 9.00e-86; EST_HUMAN HIT: AA102252.1, EVALUE 1.00e-73; SWISSPROT HIT: Q14324, EVALUE 9.00e-27
cgcggtctatgagaggtgtcaggaacttgggagccatccggaagtcatgctccttatactcgaacggtttgaaggtgattcctggggagagaggatgcacccgtaaggcgactgatctagattctcccctgacaccaaccagggaacaaaccgcaatcacctctctcccatgactaggtgccgtcaaccccagtggggaggggagggcaggagtccaggtgggacctgggcgagagggtggacggggtgggcctgggctgtggggcaggatggctgtacctgtcttgaggatgcgggccgtgttcttggagacaccaggtgagtcactgagcccacagatgttctcggtgtaaactcggaaatagtattcattgcccacgataaggtcggacacagtacagctagtgtgcctgttacgttcatagacgttgaaccactcctagtgtggggacagggagggaccaggcgggtcggggccacaggatcacacgattacacacaagacacagacgaaagaaggggtgag

SEQ ID NO: 12489 - DNA, 565 bp, Homo sapiens
  MAP TO CHR14.3; EXPRESSED IN PLACENTA, SIGNAL = 0.85; NT HIT: AB009372.1, EVALUE 3.00e-27; EST_HUMAN HIT: BF732351.1, EVALUE 4.00e-46; SWISSPROT HIT: P18840, EVALUE 1.00e-11
cttggagggactcattctcgagtgctctgaggggagcctcagcgtggtgggtgcacccgagtggcatggaagcctcggggcagggagagcgtgggagtcccaggactccacgccaggggctaatcttccagagagggacttccaggccagggtcccacgggtgcctcccctgagtcctcctctctgcatccggaccctttcccccatgctgcaacctcccccacacctgcttgcgaggggctggcctgcctgagcatgcgcccctcctgcagaggcactacgagcagtaccacggctttgtggtcatccacggcaccgacaccatggcctttgctgcctcgatgctgtccttcatgctggagaacctgcagaagactgtcatcctcactggggcccaggtaatcccaggggcccggggctcctaggaacaggggcttcctgaggccacagggcaagtcagcgctgtgggcggccgctgcgggaccccgggcttcctgctcagcccagcagctcctgaggtggctgctgcagggcccgtgctggggctcgcaaatgctcaggtcct

SEQ ID NO: 12490 - DNA, 500 bp, Homo sapiens
  MAP TO CHR14.3; EXPRESSED IN PLACENTA, SIGNAL = 1.2; NT HIT: AE002515.1, EVALUE 4.70e-01; SWISSPROT HIT: P10330, EVALUE 3.10e-01
tggttttggtgacttctcccataggtggtggctatcacagtccaggtggagtgccagaaaaggagaaaacatagccatagctgcttgtggaatacctactatgtgccagtgtaaatgcatctcctctaactcaacaacccattggataatggctggggtttgaaggaatgacctgccctggcttacacacatggcagaggacatgctgtgcacacctctccatgctcatcctttctgtcatgggactgagaggattccaggggatgatgtgagccaggatcagatacttcatgtatctatccatctttactttattcttgcctttaaaggttaccggactcctatgagtcaggacctatggtgggtgctggggtattgaactgaatggacctttcctttcttatttcaaagaatttcatatccagagaagtgaaggccatgtggaaagtaaatgcagccagtataataaagattaggagaacagtgctgaatatgcaacc

SEQ ID NO: 12491 - DNA, 565 bp, Homo sapiens
  MAP TO CHR14.3; EXPRESSED IN PLACENTA, SIGNAL = 0.88; SWISSPROT HIT: O77764, EVALUE 9.20e+00; EST_HUMAN HIT: AL603243.1, EVALUE 2.00e-01; NT HIT: X70810.2, EVALUE 8.40e+00
gtccacattgttctgggaggtaggtctctagctcctgactctttcctaggaagggcttgcctgagcaccaagcgttaacagctatctcactctactgcagacatgacccagcccaaatcaggaaactggataaaaaacatggaaacaatgctgttgcagtatggaaattaaacgaaactggaaacaaatcgaataagagtttctaaatctttaaatctgatgcataaagtagtcttaattaaagtaaaagaggagataaatgagaatttactttaaaaatctgaattttctgagcctttaaggcaaggtctttagaaactggtggcaatgactttttattatggttaatttcccttcagaacttgtgaatttactgttccttcatatggaaattttaacactactcttaggcagatcagacataattaggataattttttgccacacaagtgaaatgaaaagatagatttccctatccttcctacaagataattgggtaaaaaatgaaatagtgagctaaatgaagaaaagttttaaaaataaatgggtgtgggtaagcaaaatg

SEQ ID NO: 12492 - DNA, 502 bp, Homo sapiens
  MAP TO CHR14.3; EXPRESSED IN PLACENTA, SIGNAL = 0.89; EST_HUMAN HIT: AA962054.1, EVALUE 7.00e-01; SWISSPROT HIT: P31629, EVALUE 7.00e-01; NT HIT: D85624.1, EVALUE 3.10e-02
ttcttcctcagggcattttggcattttggcagaaatcttgagctgccttttcctctcctcttttggctcttctccctggggctcagagccgggactatccattaagatcagatgcgtgtaatcatgatcaatttcctgcaagtgtagaagggctgggcacttgcgatgttgggcctcacattttttattctgtttcctcgggtggtgtttttctatctgtaatagcagctggattccaactatgtagtggagagtagaagagagaaatgaaactcctcttaggtataaaaatatgcaatatttgtctggtttctttttctttaaatgaattctctgtagttccagtttccctactgcatgcaatgtgaagaaagctatgggaacgcaggctcaactcaatgcacacttatttgatgccacaaatctgaagaaatgtcactttatttcaaatgtcagtatccagcatttcatgaagaacaaatctgccttagaaagtccccaa

SEQ ID NO: 12493 - DNA, 539 bp, Homo sapiens
  MAP TO CHR14.3; EXPRESSED IN PLACENTA, SIGNAL = 1.1; EXPRESSED IN FETAL LIVER, SIGNAL = 1.7; SWISSPROT HIT: P38758, EVALUE 5.10e+00; NT HIT: gi15616630, EVALUE 8.00e+00; EST_HUMAN HIT: AI492095.1, EVALUE 1.00e-127
cagaaccatttggtcaaagaagtaaataattttaaatatggtttgaccttaattttataaaactatttttgtgatttatataacattcagattaataaactaactgaaaattataattgaatttttagaatactgtaagcaatgtttttatttattgtatttaacattacttttacttaccattcttgttgcaaaaaaaaaaccttgtcttttagagaatacaatgatattatttacattaattcatgtggcttggtgaaaaaaaatgctataactcctttacttaatgggattcttcccctgtggcagtgcaaacggttagagcaggagcttcatcatgtgaaagagcagaaccagacttcagcaaacaacatgagacatctgactgctgaaaacaatcaagaacgtgctctgaaggtaaatctccgttccttcttgcaggcaaattaaggttgtaagcccttggtgccagctttctgtgctgcatatatcagttgtgtacatttcagcagaagtgagctgtggtgtttgccaacaac

SEQ ID NO: 12494 - DNA, 509 bp, Homo sapiens
  MAP TO CHR18.3; EXPRESSED IN PLACENTA, SIGNAL = 0.88; EXPRESSED IN LUNG, SIGNAL = 1.5; SWISSPROT HIT: P10569, EVALUE 1.60e+00; NT HIT: AF120978.1, EVALUE 7.50e+00
gtagccaaagcctgacttgcaacaggtcaaactttctggggaggcttcctggaagaatggggtcattttcatacgtcagggagatgctctgcttctgctaccaagcagcgctgccttcccatcagacccagctctgacagccttttgtctgctgctttcatttctgccaagattttcccacatcctgctgagcctgattaacaaacctggggcccacttttcggtttctgaccaatagagaaaacgctgacagccagcaaggacattgatgctttcttgccaatggcggcggtggcagaggcagagaattctccagctgggccgtttggactggcgcacggccccacgctgggccagctgcaggtgttccagatggccagcctggagcctgctcagctccacagccagcctttgtttatggcctactgtcctcaccatccccgtcaaatgcacatcgagtgccctgccacacctagaactacagcagaaggcttcttgatggagctgat

SEQ ID NO: 12495 - DNA, 576 bp, Homo sapiens
  MAP TO CHR14.3; EXPRESSED IN PLACENTA, SIGNAL = 0.85; NT HIT: gi14738148, EVALUE 2.20e+00; SWISSPROT HIT: P49646, EVALUE 3.20e+00
tcaaggcaatgtgtgtctctgaatcagtataatttctgtagtagctttttataaatttcttgcatttagttttcttttctcttaacccaaacttatctacctatttatgtattttcctctaagtggggtgggaagatacattaaattttggaatttactatgttctcagtacagtttaggcttgagaaaatcaaatgaaataactttttaaattaagactctgatttatttttaggaggaaaggaagtgacaagtacagaagaaataaaaggtgttcattgggcttcatggacatgtgtttcaggccttgaagtaaatggaatttggcccaagtattcagatatcaacgatataaattcagtagatggaaattatattggccaagttttagttacagctgatgactatggaattataaaattattccgatatccatgtttaagaaaaggtaccttttctttcaaaatattaagtaacctctctctcacagaagactttcgtgttcttgcagaaaattagtcttgagataaaggatttcatattttttaaaattacactgattggtgaagggtttca

SEQ ID NO: 12496 - DNA, 556 bp, Homo sapiens
  MAP TO CHR16.3; EXPRESSED IN PLACENTA, SIGNAL = 1.1; SWISSPROT HIT: P57371, EVALUE 1.00e+00
aaaactgggtgcatcctgacccataattgttaccttcatctacctgagctcctgatccttttcccccaactatccttctgctaggctcctgggcaccatactctgcttgtctgcgcttctgttgtagagctaagtgggtggagatgaagatgctgctgttccactgtgggtctggtaaatggagagattggggcatactgtcccttagcccgaagctcactcacctttcatcaacatggtccttctttgaaagaagacctttctcacttctatccaagcaagagaagaatcaaacagatcctgaaatgactgctttgatcattagtaattatttcatcttatttacctttctgagagtggggagagaaatttttgctaactgaattaatccctcccaagaaataccaacctcacctccatgttacatatggctttcccttaaaaaagaaaggtaataacaatcaaggcaggatatttttattaagatgcaaattttcatttcaggaaagaaaatgacactaagaaacttgtaggggccctcgtgtatcctctccct

SEQ ID NO: 12497 - DNA, 501 bp, Homo sapiens
  MAP TO CHR18.3; EXPRESSED IN PLACENTA, SIGNAL = 1.1; SWISSPROT HIT: P07706, EVALUE 2.80e-01; NT HIT: AE007825.1, EVALUE 1.90e+00
atgttttccaccctgtgctcttgcttctggctactgttctctttcacttactgcataatgtttttaggatatatatatttaattcactcttctctattatggcctctatttttctcatattcttttcagatcttcttgacatcactttggccaataatggcgtcaattttagtttacttccatgtaaatatgtttgggtgattttcaaagaacagatacaatgtgaagctataaaccagattcatgtttatctgtcacaagaaaacttggactaagaataaattccacactttccgttaaagaaaacaagaattgtagcttaaccaacatggaatttgtttactgggttatggatttgttaattagtaatcattgatttgacatgtaaccaggttaggtgaatttccctattcattatttccaagtgcaaatcgcaatcacatacttgaaattatccaagatcacatagcaaataaagacaggaacaatgagttgcaagca

SEQ ID NO: 12498 - DNA, 509 bp, Homo sapiens
  MAP TO CHR16.3; EXPRESSED IN PLACENTA, SIGNAL = 0.95; SWISSPROT HIT: P12107, EVALUE 2.40e-01; NT HIT: AF333927.1, EVALUE 4.80e-01
aggccaccaaagtgacctcaggaatctggaggtgagggggtgagaccctagatctcttgcccaggtagatgctgtaggaatggaaagggagacccaggagaaccaggaaggggaagctgttcctagagagcgcatccgtggagcggatgcagacagaggaacctggggaaaacgacctcttgtcattggagccggacagtcccacctgaaggtcagctcaggtcttcaggagctctcagtgtgtgattctgaccaccaagcaggggtcagaacaagggactggccgctggggaggggccacaggcaccaacacccaaagctcagccccatcaacacagcgactccagggaccccccagctcagtgcctgaggcctcagctgccacccagcccctctaggctgcccctgccaagaagaggaccagggacccgagctgtcctcttctccatgcctgggcccaggtggaccctgcgacagccaccagatgcacgctgctacttacgtttgca

SEQ ID NO: 12499 - DNA, 534 bp, Homo sapiens
  MAP TO CHR14.3; EXPRESSED IN PLACENTA, SIGNAL = 0.95; SWISSPROT HIT: P97832, EVALUE 6.50e+00; NT HIT: AF418272.1, EVALUE 2.00e+00
ggctgatggcaaaacttctcccacccagatgacctccctccaccaacacctgagaggccctcaggcgatctgatgcgaggccaggccgctgggggcctccggcagggacagtccgcagaaggaggaaggcagatggcagaagcggcagtgctgtccggtagggaaggccccgacgtccgcccttccccagaccgtgggctcccctcgcttccaggggtggaggagagaagagctggagaaacgtgccacgactcaaacaaatttacttccgtggtggattctgatttttttgaacaaaatgaggtgagaaatgtcacatttctttcttcctgcttcaagtcaaatctaatctggcgaggctggaatacaattcttttcatgacagaggctctcttcttccctctcggggtcctatcggggtcctatcaaggtcccggggtgcgggcaggagaggcctctggtttctggttgccactggctggtttacagacccctcgtcctcacccccctggtcctcaatgccctcctgttgag

SEQ ID NO: 12500 - DNA, 599 bp, Homo sapiens
  MAP TO CHR16.3; EXPRESSED IN PLACENTA, SIGNAL = 1.5; EST_HUMAN HIT: BI825630.1, EVALUE 1.00e-33; SWISSPROT HIT: P43694, EVALUE 3.90e-01; NT HIT: J05253.1, EVALUE 3.70e-02
tggtactcctgtcccacctccaagatacccaagtccttgtttgaaagagccctttccctgtgacatgtcttattcactcagagcccctttgggctgcctggggagcagggatagggatcaggaatgggtcagtgcctcagcaaacctcctcaagaatgtgcccagttctgacagtgccatgccatgcactcgctgttgcagtgactcactgaccaggctggccacacgaatgttctcttccaggatctgcaggcagaaatgagcagccatcggcaaagcctccctccttcctctcctccccactgccccatggaggctgcctgcctgtctggccacttcccacctacctgcagcacaatggctggcattggtgagtaataggagccagacgggtctgtgttgggcccatgctcccggccccactcagctacctccccatccagtgcattctgcagccactgagacacacttgcctggggggaggggccaggggcaaaggaatgtagcagggatctgaccctgctggagatgggtagacattccactctgcagataaaggcccacagcagataagtaggacttctctggacctgtgcctc

SEQ ID NO: 12501 - DNA, 593 bp, Homo sapiens
  MAP TO CHR16.3; EXPRESSED IN PLACENTA, SIGNAL = 1.1; EST_HUMAN HIT: BF989507.1, EVALUE 2.10e-01; SWISSPROT HIT: O84098, EVALUE 2.60e+00
tgaggcatccaagaccctacaccttccaaagaaccccgatctcctttctatttgtggaggaccccaagtgttttctagctcatctgtttagaaagttacttctctctctagaccaaataccccttctctcttgtacatcctatcaggaaaatgcaatgaggtcattgccaatttcaaaaacaactaccttacaacccattcgggtttcactctggaactaaccaccagcagacaccagactgacctgggtctgctcaggaacatacggcctgcctctccataggcctcctcacccagaggatagctgctgtctgtgcaggaacccagaggatcatgcccttcacacatgctgggactaggggggcatttcgtggtgatgtttggcttcagtttaaaactctctcttgctttaggccatgaacaccttttacacctgtcttgtccaagatcctccttgggctgctagctagattgaaaacctaactgcttgcctgtgcgttgtgaaaggccctttgcaatctgccttcaattcctctcagcacaccatattctccctcagtaattccaagcacacacgctctatgctccactca

SEQ ID NO: 12502 - DNA, 595 bp, Homo sapiens
  MAP TO CHR19.3; EXPRESSED IN PLACENTA, SIGNAL = 3.2; SWISSPROT HIT: O43914, EVALUE 1.00e-14; EST_HUMAN HIT: BF915128.1, EVALUE 0.00e+00; NT HIT: AF019563.1, EVALUE 0.00e+00
cttctaaacttgcctcccccacccccgtcataactctgtgcctcagtttaccttctttttcctcctcaggtctccgtcctgtccaggcccaggcccagagcggtaggcctagacccagcagtccctctctctacctcccagagacctccctgtctccgtctctcccacaccctttccaaacctccctgccgctgacccccctccccacagttcccagcacacactgacctcccctgacccctgtgctgcagattgcagttgctctacggtgagcccgggcgtgctggcagggatcgtgatgggagacctggtgctgacagtgctcattgccctggccgtgtacttcctgggccggctggtccctcgggggcgaggggctgcggagggtgagtggggctagcaggggacatcctgaggacttgcctagatgggggtggggggctgggtaaactcccagatctcaaacatccaaagggatggtaatggaggtgctgatttggaatgacaaaacaccctcaactcaccactctgcctgtctctgcaccccacaacacccctcacctccagcagcgacccggaaacagcgtatcactga

SEQ ID NO: 12503 - DNA, 511 bp, Homo sapiens
  MAP TO CHR18.3; EXPRESSED IN PLACENTA, SIGNAL = 1.2; SWISSPROT HIT: P53826, EVALUE 6.20e+00; NT HIT: AF120992.1, EVALUE 0.00e+00; EST_HUMAN HIT: BG677183.1, EVALUE 6.00e-97
tgccactgaacctaatgaacagtaaaaaatttacccaaacgtaaaaacccaagtttatgaagtcatgttaaactgcattacctgatgtcttcatctgtgacaataaaagctttgcagaggggttgagatgtgttaagccaaacagcagggttcttttccacagcagcggagacttgccctgtgattggcgcagagcttgtgtgcaaagcactggcaacagcagataaaagggtctcatcattgctacctggaccaactcctgcaatgagaaacaagtactagttaaaggaaatgtctcaatgtgctgagcaaactttatgtgacataaaacaactgatatttttatattcatttgggatcatatatgtaaaactgacataagacaaagcagcaaaagataatatatctacttaatagatatgacacactaaagaattcacactaaagaaatagtaacaaaatagctgagcattttttcttactttaaaaaacaaatcctcatgcttgctgt

SEQ ID NO: 12504 - DNA, 567 bp, Homo sapiens
  MAP TO CHR19.3; EXPRESSED IN PLACENTA, SIGNAL = 0.84; SWISSPROT HIT: Q9NXH9, EVALUE 7.00e-11; NT HIT: gi14763529, EVALUE 5.00e-75; EST_HUMAN HIT: BI756406.1, EVALUE 0.00e+00
tgtctcccgctaaattccagggctgccagctcctatgctcaggccccacctcacagatctcccccacggccgctgtgcgaggttggtctcctgaggccaggttttcactctctttcagttcaaccttttcctcctcttgctctgacaagtccacgaccactttttgcgtgtccttctctcctggaaccttgactgcagccacccagaggcacaagtcagagaataacaaggtcccctctgagaaacctccccttaatctccaaaatatcgtccctgaaatccctgcggaaaggctgaaggagcagaacccagggcctgctatgtggctgaagcccctctggatttgggcggcagaagagcccaggcagggagataaacttgtgtgacccccgcccaccagaagcctggacctccactcactctggattcctttggccccaagctgaatgcgagcaaactcggtgatcacagcacatctggtgggagacagaggactagctcataccccgcccccgccatccacactgacccactagccgatgccaggctaacgtctgacccctgctc

SEQ ID NO: 12505 - DNA, 595 bp, Homo sapiens
  MAP TO CHR16.3; EXPRESSED IN PLACENTA, SIGNAL = 0.87; NT HIT: M91199.1, EVALUE 9.00e-03; SWISSPROT HIT: Q10155, EVALUE 2.60e+00
tccccaatccgttactcaagccctggtgctaagattcatcttggatctcctcctgccttcacttatattttgttattgttctgttctctgtcttacctcccagtagctatttcccaagattcactgaattcagacattggcaacttcctggcaggagctgcctctggtaggaggagggaagctgccacggccaagcagacttgctgcgactttcctcttctcccaaagttctcccaaaccctcaggggcaagcagagtgtatgtaggtgggcggggcctcccactccttttccctttggtctctgaaggcttccagatcctcatggcacccagatctacttgggtcagctgcactagccctgaccctgggtcagagtgaggcttgggggcgagagggggctggtctcccttctgattgcctattgacccctgaatcattagctgcttggaatcaaatgttcctgaccggccggctctggtgggcacacagccatgagatcagtcaggcctgcctgatatatctgtggcccagctcattcaaaatcaatgccatgatcctctcaaatggaggctccctgggaggatgcattgattt

SEQ ID NO: 12506 - DNA, 585 bp, Homo sapiens
  MAP TO CHR16.3; EXPRESSED IN PLACENTA, SIGNAL = 4.9; SWISSPROT HIT: P70553, EVALUE 1.90e+00
gaaggttagggagactgggggccccagactcaaggttggggagactggggagagggaaagcgaggaagaagcgtaagtgtatcttacagtttaaaaccataatgggacatatcattttcttagttctccatttattaataaaatgcccaataccttctggcatgtgctttgaactgcttttaattatcttcagttggatggagaaaaggtaatggggacctcataatagtcgtggagggacaactgggatttatttccatagggaaggcagagactgtttgccagggaaccaaggcctttcaaagttgaggacacttcccggtgccgtgcggtgtaaatcacagtgcaaactatgcgattatcccctgcagaggaatcgagtgtgactttatgggattcttcaccaagcacttaggaataatctgatataaaacagcaggggtggagagtaatgacaacttcaaattagtttaatgaatgtttacatttaaaaaaaaaaggcttttctgcaaacctgaaaataagaagtgacagcttcctttcctatttcccttgcaagaggtacctcctggttttcagcctgag

SEQ ID NO: 12507 - DNA, 527 bp, Homo sapiens
  MAP TO CHR14.3; EXPRESSED IN PLACENTA, SIGNAL = 2.2; EXPRESSED IN ADULT LIVER, SIGNAL = 1.5; EXPRESSED IN BRAIN, SIGNAL = 1.6; EST_HUMAN HIT: BF223156.1, EVALUE 0.00e+00; NT HIT: gi14750914, EVALUE 1.00e-116; SWISSPROT HIT: P00734, EVALUE 9.70e-01
gccctctattcctccaatccccaacccgccataatcctttccttcttcctctggctacgccactcacctctgatcgttcacagctgcattggcatggtagtaaccagccaccaccagaccggcctgtgctccccacacatccacctgtcgtaggaaaggggccatcagtaattaaattgtgccgctggctttgtggatgcgcactgctgccaagggaccggggatgaacttgggctggggtgttgggtgggttcgcggtgggggatgggcatccaacggaggcacctggttgagggcgacctccaacatgacggacagggccaggtggctgtggaagaggggcacacagtcggtgaggcacaggcattctccagaccgcggcgctggcgccaaaaacagcccgttgactgcggcgtgtgggtaccgggcagcatgcaggcacatcttcacgtaggccagggccgagatctccacctcccccatggcgagcgaggcctggacgggaagcagcaagccggattagtacc

SEQ ID NO: 12508 - DNA, 528 bp, Homo sapiens
  MAP TO CHR19.3; EXPRESSED IN LUNG, SIGNAL = 2.9; EXPRESSED IN PLACENTA, SIGNAL = 1.6; EXPRESSED IN FETAL LIVER, SIGNAL = 1.7; NT HIT: gi14765143, EVALUE 0.00e+00; SWISSPROT HIT: P53197, EVALUE 1.00e-21; EST_HUMAN HIT: BI963972.1, EVALUE 0.00e+00
gctctcaggtggcaggtaaggggccagcaggacgcacatcctgaggcctggtgggaggccgggccgcccgtgctcaccagctcgttggcgtgcttggaccaggccagattgcacacttgggagcccgtgtcgatacactgcagtggttgtcctgtcagcgtgttccagaagcggatacagcggtcagctgtgccgccccccgaggccagcagcccgtgctgatgtggggaccaggcgatggccttcacggccgccaggtgctccgtgtactgctgcacggggctcaggctcgagtgattccagaccagcagctgggggacaggggctgtgaggccggggctgtcccagccctgtggtcccataggccggtcctcacaggtgtgacgacctgccctggcaccccaccccacactcctcctgctgctccctcaaggacccctgggggcacacactcgtcaccctgtgccacagggcaggactggctgagcaggaaggacaagcctggtgccctgctgatggctgtggagt

SEQ ID NO: 12509 - DNA, 570 bp, Homo sapiens
  MAP TO CHR1.3; EXPRESSED IN PLACENTA, SIGNAL = 0.48; EXPRESSED IN ADULT LIVER, SIGNAL = 1.4; EST_HUMAN HIT: AL519147.1, EVALUE 0.00e+00; SWISSPROT HIT: Q49901, EVALUE 7.00e-19; NT HIT: gi7710153, EVALUE 0.00e+00
aaaagccttgctgtgattcgttgaaacttcctatagaaaacccaccaatttcttcacctcctggcacacagtgtatgctaattctttggcttttgctgatccaatttgtaaaaccttctctaaatggtccttgtccagcttcagtttttcaatttcacgcttaattggggcaaacttctcaatcacagcatctgccacggccagcttgtagcgagcagtgttcatgcccgcgctgcggcgcaccacttcctccacggagagccccgtcaccgcggcatgcaccgccactatgttggacacgccagcgcggccagccgggtcataggtgacctccgaggtgaagtctgtcacagccttgcggaatttctgcactatctcctctgggctgtctgttattcggacggtggccagtttgtcagggtctgatttcgacattttggcagaaggatcacgtagggattttaccttcttcatggatgctaggttaaaaacaccaacacacacatacccaaaacaaaaacaaaacaaacagatcaccaagatgtacacacagacagttcccaacttgca

SEQ ID NO: 12510 - DNA, 597 bp, Homo sapiens
  MAP TO CHRX.3; EXPRESSED IN BRAIN, SIGNAL = 1.4; EXPRESSED IN LUNG, SIGNAL = 1.5; EXPRESSED IN HEART, SIGNAL = 0.88; EXPRESSED IN PLACENTA, SIGNAL = 0.89; SWISSPROT HIT: P46100, EVALUE 9.00e-18; EST_HUMAN HIT: BF083330.1, EVALUE 0.00e+00; NT HIT: U97087.1, EVALUE 0.00e+00
gaaggaaagtccccctgttctatgtttgtgttaacttgtttctgctttagtttggtgggaaaaaatcccatttagatgtaagaaattatttagctaagtgtttttttaatgctgtttcttagaagttttggttatgtttttgatgtgtttatgtaaaggaagtttttaacttggacctttaaatttaacttaatgaagctgttatttttaggtgttcagtttatgtgggattgctgctgtgagtctgtgaaaaaaacaaagaaatctccaggttcaggatgcattcttgcccactgtatgggccttggtaagactttacaggtaagagctgaagaatatgaaggtatcctgtttttgtggattcattaatatatattggattctattatgtttcaggcacagtcgtaggggctgaagataaagcagtgaacaagaataacaagatctgtctccaaggagcttatattctagtggaggagagagctgctaatcaaataagaaatatgtactttcagaaaatgaatgttaagggaggatattgagttaggaaaggcatcttttaggaggtaatgtttgagcagaggtcctaatgaagcg

SEQ ID NO: 12511 - DNA, 570 bp, Homo sapiens
  MAP TO CHR6.3; EXPRESSED IN LUNG, SIGNAL = 2.1; EXPRESSED IN PLACENTA, SIGNAL = 1.7; EXPRESSED IN FETAL LIVER, SIGNAL = 3.1; EXPRESSED IN BRAIN, SIGNAL = 1.8; EST_HUMAN HIT: AU137616.1, EVALUE 0.00e+00; SWISSPROT HIT: Q9UPE1, EVALUE 5.00e-20; NT HIT: gi14782988, EVALUE 0.00e+00
caaattcacctaggatgcccaatggctgtggggatctccacagggtcaagtaagcaaacccaaatgaacatgttggattaaaaaaaaaacaagatctagaaactcttgaaggaagagcttcaccctgaaaagggaagaggaaaatgcttgaaggggaagggcggagggtcagtgtgtgatctctgctgtggtgctgggcaggggcttaggagttaagccaagggtgccggagacactcggcggcagtggctctcttctcagggatcagctccaacatgggcagtaagaaatctgtgaagccagctgcctcttcctgcgaccactcatacttctccactagaacctcaaaaaggccccaaggtttcagcttcgtgatatgtttcaggtcacctgcagtgaagacagtacagaaaaagccactgatcaacacagacaaatgacaaggtactcttgtggaaacccacaaactaacccatgtagtctatgaggaatcaaattttgcaatcagaatctaatccttcattcacaaagcatttcttttctgacatatgcctcagaaagaagtgcctc

SEQ ID NO: 12512 - DNA, 515 bp, Homo sapiens
  MAP TO CHR11.3; EXPRESSED IN HEART, SIGNAL = 0.7; EXPRESSED IN PLACENTA, SIGNAL = 0.64; EXPRESSED IN ADULT LIVER, SIGNAL = 0.46; EXPRESSED IN BRAIN, SIGNAL = 0.68; EST_HUMAN HIT: AW439069.1, EVALUE 1.80e-01; SWISSPROT HIT: Q9H346, EVALUE 9.00e-46; NT HIT: AF121976.2, EVALUE 2.00e-12
gttattggctgcagcattcccttctgtttttctgctttctattaggttagagtgacagactctccaacctccaactggttagtgattggtcttgagaaaaatcctcagcactctctctcgaatctgctttgtcctgactccatagattacaggattgagggctggtgggacaaccacatacaggttggctaatataatatgtatatactgtgggatattatggccaaaacgatgtgtcaagaatgaaaaaaatgctggtgtaaaaaaggctaagataacaccaatatgagaaccacaggtgttgagagctttgagtcgagcttcccaggagggcaggcagaagacagcatacaggatcctgacataggagagaataataaggataacatccagtaacaagagagatatgttgccaaggccaaacctaatgttgactttgatgctggcacaggccagacgggcaatgcccatgtgctcacaataagtatgagggatgatacgatgcccacagaagg

SEQ ID NO: 12513 - DNA, 505 bp, Homo sapiens
  MAP TO CHR1.3; EXPRESSED IN PLACENTA, SIGNAL = 1.5; EXPRESSED IN HEART, SIGNAL = 1.4; EXPRESSED IN BRAIN, SIGNAL = 1.3; NT HIT: U81852.1, EVALUE 0.00e+00; SWISSPROT HIT: P54868, EVALUE 8.00e-87; EST_HUMAN HIT: BI825692.1, EVALUE 0.00e+00
ctccaattccagcacctttcttacataaggttcgtggccgtacataccatcccaggaactggactccatccagttggcagcattgaagagggaggcagtaccaccgtagcaggcattggtggtatctatgccctcaatatcagtattgcctgaatcctggaagagttccatgagcactgttttgacagctttggacttgtcaatgatggtctcagtgcctacttccagcctgcccacagagtcccatgggagctgtatgcgctccatcagccgttgcaccaccgtcaggcacagggagttgatgtcctcttggactgagcagaagcccatacgggtctggcccaagcccactgtatactttcctgcttccacattgttatacttctccaggtcagtttggtccacatattgggctgggaagtagacctccagggccaggatgcccacgtcctttggccaagtatctgttttggccagggggacagcagaggctgtagaaaacctg

SEQ ID NO: 12514 - DNA, 596 bp, Homo sapiens
  MAP TO CHRX.3; EXPRESSED IN HEART, SIGNAL = 2.2; EXPRESSED IN PLACENTA, SIGNAL = 3.8; EXPRESSED IN FETAL LIVER, SIGNAL = 3.5; EXPRESSED IN BRAIN, SIGNAL = 2.5; EST_HUMAN HIT: BI195213.1, EVALUE 3.00e-99; SWISSPROT HIT: P40615, EVALUE 1.00e-30; NT HIT: AJ010395.1, EVALUE 0.00e+00
acaagctgagagctgaacccggacaaatggatccagtcagcttgatgaatacatgcttagtatgtggaattccaaaaagcgcggaccaccaagatctggcaggggacagaacgtacacagaaaccaaaacaatatccttgctttaggatttttttttttcttaatgaagaaatagtttccagcagacaaaacatagaagggaaatacagaaagcttttcactctagccagtccttccctccctctcccacatacctgcactctgttgtgacttcaccaagcgagtggctcgttctatgcacacgattaaacaaccagtcaccttgggatccagcgtaccactgtgccctgtcttctccacccgaagtatccgtcgaatccaggctaccacctcatgggaagaggggttagagggcttgtcaagattaatgaaacctgtcctggaatggaaaaaaaaaaaattaatgtatcacccactcttaatgctccagtgaaacaacaaatctgaaaagttaaaaagaaaaataattcactgcgggtacaggttatatattcaagacaaagctattctggcatgccactgccttcctgaatagc

SEQ ID NO: 12515 - DNA, 518 bp, Homo sapiens
  MAP TO CHR19.3; EXPRESSED IN FETAL LIVER, SIGNAL = 5.5; EXPRESSED IN BRAIN, SIGNAL = 2.8; EXPRESSED IN LUNG, SIGNAL = 4.9; EXPRESSED IN PLACENTA, SIGNAL = 2.3; SWISSPROT HIT: P09012, EVALUE 1.00e-09; NT HIT: M60784.1, EVALUE 1.00e-111; EST_HUMAN HIT: AW518377.1, EVALUE 1.00e-85
acaatgaggtacaggcaggggcagctcgcgatgccctgcagggctttaagatcacgcagaacaacgccatgaagatctcctttgccaagaagtagcaccttttccccccatgcctgccccttcccctgttctggggccacccctttcccccttggctcagccccctgaaggtaagtccccccttgggggccttcttggagccgtgtgtgagtgagtggtcgccacacagcattgtacccagagtctgtccccagacattgcacctggcgctgttaggccggaattaaagtggctttttgaggtttggtttttcacaatcatttgtctgtctgattttcttgctcttcatggttcctttccctccacctcagcagcacatcctgggtttttggacctcttggcattttgaggtttgcaaccttggggaaacataggatagtgtagtaatattgttcaaactcaggttacaatgactactttggcagttttgtatgttgtcccaattcacagcaggaaat

SEQ ID NO: 12516 - DNA, 592 bp, Homo sapiens
  MAP TO CHR11.3; EXPRESSED IN LUNG, SIGNAL =  14; EXPRESSED IN PLACENTA, SIGNAL = 1.1; EXPRESSED IN FETAL LIVER, SIGNAL =  11; SWISSPROT HIT: P08109, EVALUE 3.00e-34; NT HIT: Y00371.1, EVALUE 0.00e+00; EST_HUMAN HIT: BE385967.1, EVALUE 1.00e-112
gttgggcacgtggtcttaaccctgagctgagccccatctgttcccctccctcgccaggtgccagtgcccccgggagtcatcgggcttttaactactccggaatgcaccccatactgaaaaaccaacctcaccttcccaaggtaggcttctgcaatttccttcatctttgtcagaaccatagaagacacctcctctggatagaagcttttggtctctcccttgtattctacttggaccttgggcctgccagcatcattcaccaccataaagggccaatgtttcatatcagactggacaacagcatcatcaaatctgcgtccaatcagacgtttggcatctgtaaaaggtgtcaaatgaaaacactttcaatttcatagctcttctgataaaactcaagtccatgattactcaaatacctaacagttcataggtaggtgaattcaactaccatataggtagcaaaggttcaaacttcaacctcctacgttatccagatttcagcctgaaaggtttctacaacctgttttataacagacttgataacaagtctctcagctcagtttttctaaaatcaaaaagttccctcctcacg

SEQ ID NO: 12517 - DNA, 551 bp, Homo sapiens
  MAP TO CHR6.3; EXPRESSED IN LUNG, SIGNAL = 4.1; EXPRESSED IN HEART, SIGNAL = 3.8; EXPRESSED IN PLACENTA, SIGNAL = 1.8; EXPRESSED IN ADULT LIVER, SIGNAL = 3.4; EXPRESSED IN BRAIN, SIGNAL = 5.1; EST_HUMAN HIT: AF038242.1, EVALUE 1.00e-88; SWISSPROT HIT: P38679, EVALUE 1.00e-15; NT HIT: gi15303148, EVALUE 2.00e-83
gcaggtgttaaagcagaggctgctcagatcagtaaacgtgcatagttcatgccaatgcccccccaataccttgctgtccaaaagaaggttgtctggtttgatgtctctgtggatgaatccaagttggtgaatagagtctatggctaatactgtttctgctatataaaactgagtctcctcttctgtcagagtgtcttttttcatcaacaaggtcatcatgtcccctggaaacaagaagatacaaagccaccacacacacacacacacacacacacacacacacacacaacatacgagtgagtaccaattttcagatatgtcttccctatctgccaaaataaggcggctaaacagacctcttctgtgtgccagagatagacccacatggccaacatgggaagaaatgggattttcacacctaagctagctaaggttgaccactaagctgtgatttctattttacttttgagagaaaaagaaaatttctcccacactttaaaaaacaactgtatttgcttaggataattttttggactcggggtaaaatgcta

SEQ ID NO: 12518 - DNA, 508 bp, Homo sapiens
  MAP TO CHRX.3; EXPRESSED IN PLACENTA, SIGNAL = 1.5; EXPRESSED IN FETAL LIVER, SIGNAL = 2.4; NT HIT: U52111.2, EVALUE 0.00e+00; EST_HUMAN HIT: BG979264.1, EVALUE 1.00e-101; SWISSPROT HIT: P41564, EVALUE 1.00e-14
gcagtgactctgctcctgtgacacgtccagaagaagccactccacagggacaaaagcccaccagcgggtgccaggggttgggggaaggtgtggggacagatagcttatggggacaggctttcctcgtggggtggtgaaaatgttctggaatgacctggtggtgacggcagtacaaccctggatatccaaaaaactactaaatcatgcattttgaacgggctaaccggatgggatgagtgtgcctcactaagtctgtgaacaggagaaaggcggcaagccgcggcactgccaccggcactcactgtttcaaacaccgcgtacacatggccatagttggccccagccacaaggcctgggcccccgaccagtcccgcgcagacattgttgacgatgttgccatagagattgggcatcaccatgacatcaaactgctggggccgggacaccagctgcgggacaaggagggggctggctgaggagcagattcggaagcatgggtgagagaagc

SEQ ID NO: 12519 - DNA, 585 bp, Homo sapiens
  MAP TO CHR6.3; EXPRESSED IN LUNG, SIGNAL = 1.4; EXPRESSED IN PLACENTA, SIGNAL = 0.99; EXPRESSED IN ADULT LIVER, SIGNAL =   1; EXPRESSED IN FETAL LIVER, SIGNAL = 1.1; SWISSPROT HIT: Q14738, EVALUE 2.00e-19; EST_HUMAN HIT: AW517240.1, EVALUE 1.00e-98; NT HIT: gi14781565, EVALUE 2.00e-68
ctctctttccattccatgcccccttcatctgtgtcccagtggctctttccccttaagctgaatatattgggtttcatccatgtctggtacgaggaggctataaagggtaaaaaacaaaacaaaacaaaaccctactctggccttaagaaactaacaacataatggtaggaaacaaaaaagcaacagagtacctctctcaggtcaatagtgaggcatcactttggaagtctcagtacaaatacaatagaatcagcaatataatagaatcactgctttctaagacttgctggcccccactccaggggacctctgcatttcccctggcgggacctatgtcaccctggccactgccttccctggctgctgcctcactggctgctttccctcccttgtacccccagctcctagacctatttgacagtgaggatcctcgagagcgggacttcctcaagaccattttgcatcgcatctatggcaagtttttggggctccgggcttatatccgtaggcagatcaaccacatcttctacaggtgaggccaggagcccaggcttaggagcaaaaccttctgctactgaggtgggg

SEQ ID NO: 12520 - DNA, 507 bp, Homo sapiens
  MAP TO CHR3.3; EXPRESSED IN PLACENTA, SIGNAL = 2.1; EXPRESSED IN HEART, SIGNAL = 2.3; EXPRESSED IN FETAL LIVER, SIGNAL = 8.3; EXPRESSED IN BRAIN, SIGNAL = 3.7; SWISSPROT HIT: Q14624, EVALUE 1.00e-23; EST_HUMAN HIT: AL532024.1, EVALUE 8.00e-87; NT HIT: U42016.1, EVALUE 1.00e-117
atggagtcatagcactggggggtgtggagaggggaggagggtgggaaggcacctacatggagaagttggtgatgaaggctttcttgggcagctccatctggaaggtggcctcctgcacagtattggccctattgaccactcggctggtgacgaccgtgtgggcaaatcgggatgagaccctggagtccacggtgaggctgtagatgtcgatgccattctggaccagcaaagaagaagggggttgcagggtttcaatgccacctcagctcggggtgacgctcttcaagagttggccctgactctggctctagaccaaaccctggctcccaatctgactgagccactgaccaggcctcaggctgaacccagtgaggcatctcatatgtgaacatttgtctcaggtaagagatagcagtgtgcttcattccccaccctacagcaccacagggcaggggccacgtccttcttgatctataggggcccagagcaccccttggagaagaacaa

SEQ ID NO: 12521 - DNA, 511 bp, Homo sapiens
  MAP TO CHR19.3; EXPRESSED IN ADULT LIVER, SIGNAL = 0.52; EXPRESSED IN LUNG, SIGNAL = 0.83; EXPRESSED IN HEART, SIGNAL = 0.78; EXPRESSED IN PLACENTA, SIGNAL = 0.53; NT HIT: gi5922000, EVALUE 3.00e-79; SWISSPROT HIT: Q9Z188, EVALUE 1.00e-21; EST_HUMAN HIT: BF932994.1, EVALUE 1.00e-115
cactcagctgcgaagtatgcatagtgttcttggtgggtctccttgcctggagggagaagaatggtgcctggctctgccctgctcccacccctttcttcgtgacatgccctgccccaacaggtggtgaaagcctatgatcatcagacccaggagcttgtggccatcaagatcatcaagaacaaaaaggctttcctgaaccaggcccagattgagctgcggctgctggagctgatgaaccagcatgacacggagatgaagtactatataggtgaggcctgggactggcagggctgtgggcacctgggatagcgggagctggagccagtagggatgggtcacacccccgccctactctcaggaggaggctgatgtcttcagagcagggtttggtctgtgcttctctgacatcagtgattctcctgctgcttttatgatttttgtcctattttcttggtaatggtcagaggttactgagtgctcaccaagggccaggctctcttggaagcacttg

SEQ ID NO: 12522 - DNA, 529 bp, Homo sapiens
  MAP TO CHR1.3; EXPRESSED IN BRAIN, SIGNAL = 8.5; EXPRESSED IN FETAL LIVER, SIGNAL =  11; EXPRESSED IN LUNG, SIGNAL =  13; EXPRESSED IN PLACENTA, SIGNAL = 4.7; SWISSPROT HIT: O75914, EVALUE 6.40e+00; EST_HUMAN HIT: AI309063.1, EVALUE 0.00e+00; NT HIT: M84332.1, EVALUE 0.00e+00
tcagacactttggcaggatgtctggggcctcaccagcaggagcgcgtgcaagccgggcaggcggtccacctagacccacagcccctcgggagcaccccacctctgtgtgtgatgtagctttctctccctcagcctgcaagggtccgatttgccatcgaaaaagacaacctctacttttttcttttgtattttgataaacactgaagctggagctgttaaatttatcttggggaaacctcagaactggtctatttggtgtcgtggaacctcttactgctttcaatacacgattagtaatcaactgttttgtatacttgttttcagttttcatttcgacaaacaagcactgtaattatagctattagaataaaatctcttaactatttcaccggctctccagtgcttccacacaggcatgctgcccccaggagatggtgggtgcatcagccagctttactctaggaagtacaggtgactgcctagggccgccacctcagtccacaccctccccatgttccctcctgagtgt

SEQ ID NO: 12523 - DNA, 554 bp, Homo sapiens
  MAP TO CHR4.3; EXPRESSED IN LUNG, SIGNAL = 1.2; EXPRESSED IN HEART, SIGNAL = 0.99; EXPRESSED IN BRAIN, SIGNAL = 1.2; EXPRESSED IN PLACENTA, SIGNAL = 0.68; SWISSPROT HIT: P28332, EVALUE 2.00e-08; EST_HUMAN HIT: AV690649.1, EVALUE 6.00e-51; NT HIT: M84403.1, EVALUE 7.00e-56
aaggcccttccagctctaacttgagtttccagattcagagatgatttgtctgtaatcaatttttattcaaaatatttcaagacaagtattatgaaggatgccataaaaatttacaagtacagattaaaatagggtttgaaggtagaatttttttaaattaataattagtacaatagctgtaaataagcctgagttttatcctttgggcagttagcctatgctttacctccctaaccttttatctggctggatttaaaaattgatggaaatgtttaatgaaaaagaaatacaaagatatgtagttttattatttttttttctgagttgaatatccggataagaatatgtaacttacagtaagaagctctggcttttggcttttggtgtgatttttttttttttttttttttttacctttatgcgaacttcctttgcctttggtggggccacttctacctcttcaatagaaaatggtgcaccaggcttccagagtatggctgctttgcatctgatgacctgggaaatagaatacaggggcagaaagagaagctcct

SEQ ID NO: 12524 - DNA, 549 bp, Homo sapiens
  MAP TO CHR1.3; EXPRESSED IN PLACENTA, SIGNAL = 1.7; EXPRESSED IN HEART, SIGNAL = 2.3; EXPRESSED IN FETAL LIVER, SIGNAL = 1.2; EXPRESSED IN ADULT LIVER, SIGNAL =   2; NT HIT: L05187.1, EVALUE 0.00e+00; EST_HUMAN HIT: AI923984.1, EVALUE 0.00e+00; SWISSPROT HIT: P35321, EVALUE 4.00e-24
tggttcacttgatccttccccaaatccatcctcaaatgcacccgagcaacaagaagactagctcagtcagtgagacgttcagccttacgcagaggctcaggagccctccagaatgagggtaagggacatctttttagaggtgcaaaggagcgattatgattcagggtgacagcatgctaactgcagggtcaataggcaaatgggattcataagcagaatggagtagggtgttcagtatccagtggccagctcctcaagggcatggctgtggaccacattacttctgcttggtcttctgctgggctggtgctggagtgaccgttgaagggcagggctcaggcaccttgggctggcagggctctggaaccttgggctggcagggctcaggcactttggggtggcagggctcaggcaccttggggtggcagggctccttggttttggggatgcatggttcctggggtggaggctggcaaggttgtttcacctgctgctgctgaggctgagggggtggggtgcaaggctgcttctgctgctgagaattcatgc

SEQ ID NO: 12525 - DNA, 541 bp, Homo sapiens
  MAP TO CHR11.3; EXPRESSED IN LUNG, SIGNAL = 0.78; EXPRESSED IN PLACENTA, SIGNAL = 0.71; EXPRESSED IN BRAIN, SIGNAL = 0.77; NT HIT: gi14773497, EVALUE 2.00e-80; EST_HUMAN HIT: BI019084.1, EVALUE 3.00e-80; SWISSPROT HIT: Q01978, EVALUE 2.30e+00
ttgccatccaggtaggagacatgaactagaagcagtgcagagagatgtgtcagcctggcgttttgccccttagagtaccgcctacccctccaagttctgcctcttccaccagccagcccatcaccacttctcttcacggaccaactcccatccccaacccatgcaggaccccggcagccacctctgacagctgtctcagcacagcctttggggatgttggtagccagggccagctccaccaggttcacctctcgatcctcaggaaagtagagttcaccctccctggcggggcgcatgggcagtgcctcctgtgatccgtaaccacacacagcctgaggaaaaagggaattggagagcagcctgaatccagggagggagcaggcgtcaggatccaggatgaggctccactgaccagagcagagagcccacgtttgaaggaagtccagaagtcccaagaaaagtggtggaagcctgggactcagagccaccactggggacttgcctggagcatccggggctccctgggtcaagggaaagaaca

SEQ ID NO: 12526 - DNA, 529 bp, Homo sapiens
  MAP TO CHR14.3; EXPRESSED IN HEART, SIGNAL = 0.64; EXPRESSED IN PLACENTA, SIGNAL = 0.63; EXPRESSED IN BRAIN, SIGNAL = 0.78; EXPRESSED IN LUNG, SIGNAL = 0.79; SWISSPROT HIT: Q9UHC1, EVALUE 1.00e-102; NT HIT: AF195658.1, EVALUE 0.00e+00; EST_HUMAN HIT: AW896052.1, EVALUE 0.00e+00
cttacggacgattggtttggagaaaccaattaatttatctgttttcctactatcattggaaacgtgtctataccaggggaaagagggggatgtatcagataatatgcaatctgtttgtgattttttgctaccttcctgaaaagcagaaaacattgtataagttgctgtaggttcattctctagcccataacttatattcgttctgcaattttttttgttgggcaattgaccagattctttacttaaagtgctggctaaatctttgatgtctggagtttcaactgaatgacgtgttctatttccaaatgtttcttgggcacgtgtgggaccaggtctaacataatttttaaatgaatgttctgtttcagttgatttagttttttcattttgtactacatgagttataaagccagtggaacataatttaactcgcccataactaaaaacatttcttcttccacaattgctagattctttttttttctctttctctgtctgagcactatgtactccccataatgttgttgca

SEQ ID NO: 12527 - DNA, 525 bp, Homo sapiens
  MAP TO CHR12.3; EXPRESSED IN BRAIN, SIGNAL = 0.91; EXPRESSED IN LUNG, SIGNAL = 0.7; EXPRESSED IN HEART, SIGNAL =   1; EXPRESSED IN PLACENTA, SIGNAL = 0.76; EST_HUMAN HIT: BG232061.1, EVALUE 0.00e+00; SWISSPROT HIT: P30936, EVALUE 3.00e-07; NT HIT: gi9966838, EVALUE 0.00e+00
tttggtcctggaggagacagtcctgaattctggtgactagggtcacagttctaatggagcctatggaaactccggggccctctttttaaaatggagccatatgcttggcggaattggcggttcatggctgcatagagcacagggttgatgcaaccattgagccaggtgaggttggcagcaagcatgtggaccacccggggagcctggactctggcatccagaatgttgagcagcaagaaggggatgtagctcagggcaaagcagaggaacacagcaaaacacattcgagtcaccttcccaaattccgatgaagaatccggagctcttctggctcctttaattggctgggctttggcagatgcttctggagggcttttctctgccatctgcttagctctcttgctgttgatctggtctcccacttctgatgagtccccttccagggtctgggtggtggcagcactgactggctcagatgaaatcccctcactgggtcctcctgatgctaacctgctgtccagctcc

SEQ ID NO: 12528 - DNA, 515 bp, Homo sapiens
  MAP TO CHR9.3; EXPRESSED IN BRAIN, SIGNAL = 2.3; EXPRESSED IN LUNG, SIGNAL = 2.7; EXPRESSED IN HEART, SIGNAL = 2.6; EXPRESSED IN PLACENTA, SIGNAL = 1.8; SWISSPROT HIT: P07902, EVALUE 8.00e-26; NT HIT: M96264.1, EVALUE 0.00e+00; EST_HUMAN HIT: AW365282.1, EVALUE 0.00e+00
gtagcacagccaagccctacctctcggttatcttttctcccgtcaccacccagtaaggtcatgtgcttccacccctggtcggatgtaacgctgccactcatgtcggtccctgagatccgggctgttgttgatgcatgggcctcagtcacagaggagctgggtgcccagtacccttgggtgcaggtttgtgaggtcgccccttcccctggatgggcagggagggggtgatgaagctttggttctggggagtaacatttctgtttccacagggtgtggtcaggagggagttgacttggtgtcttttggctaacagagctccgtatccctatctgatagatctttgaaaacaaaggtgccatgatgggctgttctaacccccacccccactgccaggtaagggtgtcaggggctccagtgggtttcttggctgagtctgagccagcactgtggacatgggaacaggattaatggatgggacagaggaaatatgccaatgatgtggaggcttggaggta

SEQ ID NO: 12529 - DNA, 533 bp, Homo sapiens
  MAP TO CHR13.3; EXPRESSED IN PLACENTA, SIGNAL = 3.7; EXPRESSED IN LUNG, SIGNAL =  28; EXPRESSED IN HEART, SIGNAL =  13; EST_HUMAN HIT: BI828213.1, EVALUE 0.00e+00; SWISSPROT HIT: P23821, EVALUE 2.00e-93; NT HIT: gi14753571, EVALUE 0.00e+00
aattaacatccttgcccgtgagcttcttatagacaccagaaaaagtttcaaccttgtgttccacattgttctgctgtgctttgtccaaatgaacctttatgagccggctgccatctagtttcacgcggattctcttgcccacaatttcgcttgggaagaccaagtcctcaaggatggcatcgtgcacagctgtcagagtatggctcctgggacgcttttgcttattttttgtacggctttttcgagttggcttaggcagaattcttctctgaacgataaagacgacatgcttcccactgaactttttctccaattcgcgtactagccggacttgaattttctggaaagatttcagttgaggaatgggaacaaagattatgatagctttccgaccaccaccaagttcaatttccttggctgccgtaatattcagctccctgagctgagctttgaggtccgagttcatctccagctccagaagagcctgggagatgccggactcgaactcgtccggcttctcatcattgggcttc

SEQ ID NO: 12530 - DNA, 522 bp, Homo sapiens
  MAP TO CHR1.3; EXPRESSED IN LUNG, SIGNAL = 0.71; EXPRESSED IN PLACENTA, SIGNAL = 0.64; EXPRESSED IN ADULT LIVER, SIGNAL = 0.43; EST_HUMAN HIT: BE297363.1, EVALUE 0.00e+00; SWISSPROT HIT: Q9UBY9, EVALUE 2.00e-28; NT HIT: gi15299242, EVALUE 0.00e+00
ttgtaatggggttagcgaggctttgctggcaggcgtggggcggggggacagggaaagggaagggagaggcactcagattttgatctccgtccggaaggtctgctggacgtgttctgtatgcgggtgacgccgtgcccggatagtgaggctgccgtcctcccgcagagccgaggtcaccgacgtcgggtccacgtcctccggcagctggcacttgtgagcgaaggtgttcatgacagtgccgtcagccgccagctggggaaggggtgacccgtcaggcaggctgccccgacccctgtcctgcttgtgacaagccagagccctcttctccccattctaaccccagccagaccccacatgccgaggggctctgccctcaggtgccgaggggctgcccagggtggtgatggccacaggccaaaggctctgcagggacagcgcaggggtgcttcgcagagctccagtagctccaaggaacaggccagggacatggggaagaggtggggcttggagagagaggaggct

SEQ ID NO: 12531 - DNA, 536 bp, Homo sapiens
  MAP TO CHR6.3; EXPRESSED IN PLACENTA, SIGNAL = 1.6; EXPRESSED IN LUNG, SIGNAL = 1.1; EXPRESSED IN HEART, SIGNAL = 1.9; EXPRESSED IN ADULT LIVER, SIGNAL = 1.9; EXPRESSED IN FETAL LIVER, SIGNAL = 0.66; NT HIT: U88079.1, EVALUE 0.00e+00; EST_HUMAN HIT: BF946748.1, EVALUE 0.00e+00; SWISSPROT HIT: Q15776, EVALUE 2.00e-76
tggaaacgaacttcctgagcttttcaggctctaatggctgaagaatcaagaaagccttcagccccatccccaccagaccagactcctgaagaggatcttgtaatcgtcaaggtagaggaggatcatggttgggaccaggaatctagtctgcatgaaagtaaccctcttggccaagaagtgttccgcctgcgcttcaggcagttacgctaccaggagacactaggaccccgagaagctctgatccaactacgggccctttgccatcagtggctgaggccagatttgaacaccaaggaacagatcctggagctgctggtgctggagcagttcttgaccatcctacctgaggagctccagacactggttaaggaacatcagctagagaacggagaggaggtggtgaccctattagaggatttggaaaggcagattgatatactaggacgaccagtaagtagaaggaggtatgcgtgctatgactgtgggagtcctggaagcttggtagagggacataggcatcacagtgggagagcaga

SEQ ID NO: 12532 - DNA, 582 bp, Homo sapiens
  MAP TO CHR9.3; EXPRESSED IN BRAIN, SIGNAL = 0.59; EXPRESSED IN PLACENTA, SIGNAL = 0.51; EST_HUMAN HIT: AA866116.1, EVALUE 0.00e+00; SWISSPROT HIT: P43853, EVALUE 7.40e+00; NT HIT: AF090189.1, EVALUE 0.00e+00
ttgcttgctggtgatttgacacacattaaagaagcccatttttatggtctcgcttatttcttttccttctttagatggagggcttttacccaaacttggagaaaatgcatcacggaatattagtagtggaaaggattttagcaatcatctaggtcgggtccgtcatttatagatgaaaatctttagatggagaaaggttttacaacttaacattctacggctagttagtggcagagctgagacaaggtctcaaacgtgtaccaataactagactaatatcatttcctctatcgttctaatttaaaactacgtttcaagtcacctttccctgaaaatgttatgtacccacttaacattttcagactgaataatcagcatctttgctgttgtggttttgcttttcaaaggtaatagtgggatagctcttcaagctgaaactcctgggataaaggaatcctgggagccagcatgtaggatgtgtccatcttcatgctccgtcttcaccttgcactggcactcctccaccagcatcaccaccttgatcacggaggaaagttcagtgcagttcagtggcaagtgcat

SEQ ID NO: 12533 - DNA, 507 bp, Homo sapiens
  MAP TO CHR19.3; EXPRESSED IN HEART, SIGNAL = 0.95; EXPRESSED IN PLACENTA, SIGNAL = 0.74; EXPRESSED IN ADULT LIVER, SIGNAL = 1.3; SWISSPROT HIT: Q05481, EVALUE 8.00e-29; EST_HUMAN HIT: BG697763.1, EVALUE 0.00e+00; NT HIT: gi15303997, EVALUE 0.00e+00
gtgggaaagcattctcttggctcacttgctttctacgacatgaaagaattcacatgagagagaaatcctatgaatgtcaacaatgtggtaaagccttcactcattcccgttttcttcaaggacatgaaaaaactcatactggagagaacccgtatgaatgtaaggaatgtgggaaagcatttgcttctctcagttccttgcatagacataaaaagactcactggaaaaaaactcacactggagagaacccatatgaatgtaaggaatgtgggaaagcatttgcttctctcagttccttgcatagacataaaaagactcactagcattctctctagaatgtatggaatgtgggaaagcatttattaattgtatttcatttcagatacttgtacgaaacacattggagatagaccctgtgaatgtaagcacttggtaaagccttaagtagtttcagtttctttccagtacagtcatcccttgatacctgctgggtattggttccagcac

SEQ ID NO: 12534 - DNA, 569 bp, Homo sapiens
  MAP TO CHR3.3; EXPRESSED IN LUNG, SIGNAL = 2.4; EXPRESSED IN HEART, SIGNAL = 2.1; EXPRESSED IN PLACENTA, SIGNAL = 2.2; EXPRESSED IN FETAL LIVER, SIGNAL =  18; EXPRESSED IN BRAIN, SIGNAL = 2.4; EST_HUMAN HIT: T68764.1, EVALUE 3.00e-62; SWISSPROT HIT: Q06033, EVALUE 5.00e-33; NT HIT: X14690.1, EVALUE 1.00e-102
cctcgtgtctatctgggagcagggagttgccggggggaggcccccacagactgaaggacgcagtcagggacaggcagagtgaacattaggagccattaggacgggcccagccctggggcatggatgcccagctgcagcatcagtgggagcctgacctggggcttgagatgactggccccgtgcgaacttcagggcttctatgaggaggtggccaacccactgctgacgggtgtggagatggagtaccccgagaacgctatcctggacctcacccagaacacttaccagcacttctacgatggctctgagatcgtggtggccgggcgcctggtggacgaggacatgaacagctttaaggcagatgtgaagggccatggggtgagtggggacagggcctggaagtgtgctggggatggggtatcagcagtggtagggctctggcctcatgagggtccaggagtggtggcccctgaacctgatccacccaagcctccagccccttgcctccttctacccccaccctaggccaccaacgacctgaccttcacagaggaggtggacatgaagga

SEQ ID NO: 12535 - DNA, 539 bp, Homo sapiens
  MAP TO CHR19.3; EXPRESSED IN PLACENTA, SIGNAL = 4.1; EXPRESSED IN HEART, SIGNAL = 2.4; EXPRESSED IN FETAL LIVER, SIGNAL = 2.2; EXPRESSED IN ADULT LIVER, SIGNAL = 2.4; EXPRESSED IN BRAIN, SIGNAL = 3.6; EST_HUMAN HIT: AL548364.1, EVALUE 1.00e-85; SWISSPROT HIT: P35585, EVALUE 1.00e-25; NT HIT: gi14210503, EVALUE 9.00e-86
gtagtgcctggagaagtggggccaggggcggggctagggaggatcccccgggccaggctgaggggcatgtgtcctggagaggctgccagctcaccttggcctccataaccccgggccgcattgggccctgctgcaggccaaaagccagttcaagcggcggtcaacagccaacaacgtggagatccacattcccgtgcccaatgatgccgactcacccaagttcaagacgacggtggggagcgttaagtgggtccccgagaacagcgagatcgtgtggtccatcaagtccttcccggtgagcactctgtccagacatccacgtgccccctgcgcctgtctctgcaaggcagcctgggtgcctcaggaccccctgcacctcaagatggggtgacagtggccactgtgtcttccacacctggggcttctgaaagggtggacggagagctgaggactggagtgggaggaagcagaggctgactcggcccctgggcccctttctgccttcctcttgtttgtgaaccagcctctgtcttcacctc

SEQ ID NO: 12536 - DNA, 586 bp, Homo sapiens
  MAP TO CHR1.3; EXPRESSED IN FETAL LIVER, SIGNAL =   2; EXPRESSED IN ADULT LIVER, SIGNAL = 2.2; EXPRESSED IN BRAIN, SIGNAL = 2.3; EXPRESSED IN PLACENTA, SIGNAL = 2.3; EXPRESSED IN LUNG, SIGNAL = 2.2; EXPRESSED IN HEART, SIGNAL = 2.2; NT HIT: gi14743552, EVALUE 5.00e-60; EST_HUMAN HIT: AA677535.1, EVALUE 0.00e+00; SWISSPROT HIT: Q9K097, EVALUE 1.50e+00
caaaggagccaaggctgtaggcaagagagaccaagaggtaggagatggcatccaagaaagggatgagaatgtgagatccagaaggaaaagcagttggaagaaacaggaaaacagaccctcagagacacaaaggatgctgagagagtggcagagagaagagttgaaggggagaagttgctagaaccttgctgccctcctgcccccctaccctcacctgggtaccagcccaggggcctcggtctgcaaggtctgtagtccctgctggatctgcagcaatgcctgcatggctcggggattggtaaggatggagagtgactctgggttctgcatctggtgggaaataagcagagaaaggcatcaagaggtggcaggaaagaggagacaacctcaactaggagtccagagtcaagctctgccccaacttcatttccacccattgggcttcagggactaccccttgccctcaacctccacccatctaggctcctcactcacctgctgcaggaagactgggagctgcaggcggagctgctcctgcagttgggggttccccgcgaagagcggcacattcaccatcatctgccag

SEQ ID NO: 12537 - DNA, 501 bp, Homo sapiens
  MAP TO CHR6.3; EXPRESSED IN FETAL LIVER, SIGNAL =   1; EXPRESSED IN ADULT LIVER, SIGNAL = 0.67; EXPRESSED IN LUNG, SIGNAL = 0.83; EXPRESSED IN PLACENTA, SIGNAL = 0.61; NT HIT: AF076957.1, EVALUE 1.00e-69; SWISSPROT HIT: Q9Y5X1, EVALUE 5.00e-20; EST_HUMAN HIT: AA233068.1, EVALUE 2.00e-69
cttctggcaggcagttcttcacacatcatgacaaatttcctatggtggggatttaggtttctgtcccctcactgtcactggaggaagtgagaaataactaaccaacataattttaactcctttcagaaataagtttggtgtgaatgagacaactctcaatattctctgatgccatattaacacaatgtcctaccttctcatctcggaaatttaggaactgctggaaaacttcactttctgagattactggatggcgacacatcctggtcatccaggcctgaagtctctccatgcgcattttgataaattcctcttcaaagcggcctgcaagcgacacaccaagaatgacatacaactttgtctaaaatgaatgactgttaccatactgtaactgaaaaaccatttctatgtctactggctattgggtagaaagctatttagcaaaaggtaaaccatggagatttttaactaatctaaaaaacaagcaacacaacgaatgct

SEQ ID NO: 12538 - DNA, 565 bp, Homo sapiens
  MAP TO CHR6.3; EXPRESSED IN LUNG, SIGNAL = 0.89; EXPRESSED IN HEART, SIGNAL = 1.5; EXPRESSED IN PLACENTA, SIGNAL =   1; NT HIT: gi14758076, EVALUE 9.00e-80; SWISSPROT HIT: Q9UK97, EVALUE 2.00e-26; EST_HUMAN HIT: AV702030.1, EVALUE 1.00e-121
ctgagatgatgatgatggggaaaaaaatctgatatttttagagtatttaacagtttttaaagcactcatacattcttgtgatagtcaaaacgactctttactgcatgcaaatattatgttacttttagtgtcactgttgcatactatttctgtaaacatagaagtgaggtaaggtttcattataacttatgcatcttttcttttgcagaaaccacttgactataaatacagatattttcgtcgtgtccctgtacaagaagcagatcagagttttcatgtggggctacagctatgttccagtggtcaccagaggttcaacaaactcatctggatacatcattcttgtcacattacttacaagtaggtgaatgcaataaaaataacaaggttacactataaatgtatacttcgtatccagcttaagaatttcagatatgtttctaatttctcagagttaacactacattacaaactaaaaccagtactactacaaactactacaaaccaagaaaatggcccaaacgaaaaagactaagcatgcttgaggaagcagagcatctggaac

SEQ ID NO: 12539 - DNA, 554 bp, Homo sapiens
  MAP TO CHR2.3; EXPRESSED IN LUNG, SIGNAL = 4.3; EXPRESSED IN HEART, SIGNAL = 3.2; EXPRESSED IN PLACENTA, SIGNAL = 3.6; EXPRESSED IN ADULT LIVER, SIGNAL = 3.5; EXPRESSED IN BRAIN, SIGNAL =   5; NT HIT: Z46361.1, EVALUE 0.00e+00; SWISSPROT HIT: P52789, EVALUE 1.00e-18; EST_HUMAN HIT: AL042637.1, EVALUE 1.00e-103
cacagtgggtcagacacaggcccacatgctgtctttctgtttcccagggagaaagatggcatccggaaggcccgtgaggtcctgatgcggttgggcctgcaccccactcatgaagactgcgtggccactcaccggatctgacaaattgtgtccacacgctccgccagcctgtgcgcagccaccctggccggcgtgcttgcagcgcatcaaggagaacaaaggcgaggagcggctgcgctctactattggggtcgacggttccgtctacaagaaacacccccagtgagtcagtgtgcagggcctggagatgcggagttcctggagtacctggggctgagtgactcctcatgccagctccattttgcatttcaggggtggtgtggagggaccatagagctgagggtcttggtggaatgaaagttcccacctgggcaagggggaatgggaggaagtcatatctggtgtgggtggaggtgatttctgaaggctactgatgactcgggctctccgcagagctcctctggctgctggacactctctttgccaccctcttg

SEQ ID NO: 12540 - DNA, 536 bp, Homo sapiens
  MAP TO CHR2.3; EXPRESSED IN LUNG, SIGNAL = 1.2; EXPRESSED IN PLACENTA, SIGNAL = 1.6; EXPRESSED IN HEART, SIGNAL = 2.3; EXPRESSED IN ADULT LIVER, SIGNAL =   2; NT HIT: AF202118.1, EVALUE 0.00e+00; EST_HUMAN HIT: W00468.1, EVALUE 0.00e+00; SWISSPROT HIT: Q01822, EVALUE 1.00e-40
ttgggttttgtggaggagacgcgttcccgggcgaattccatggagtctgcctcgagtacagattcggaaaatgtgccaggcattgagaaaatttcaggaaggagctctccgtggaacttctcctggtacaaattctgttcctagggacccaggagggctgcgctgggactttgattctaactagctccactgctcacccacattctgtccccggcctcaggcctggctgacgccctgtctttacgttgcaggcaaactcgccgagtatggggccgctagcccctccagcgcgatccgcacgaatttcagcaccaagcaactgacagaactggaaaaagagtttcatttcaataagtacttaactcgagcccggcgcatcgagatagccaactgcttgcacctgaatgacacgcaagtcaaaatctggttccagaaccgcaggatgaaacagaagaaaagggaacgagaagggcttctggccacggccattcctgtggctcccctccaacttcccctctctggaacaacccccacta

SEQ ID NO: 12541 - DNA, 592 bp, Homo sapiens
  MAP TO CHR9.3; EXPRESSED IN HEART, SIGNAL =   1; EXPRESSED IN PLACENTA, SIGNAL = 0.91; EXPRESSED IN FETAL LIVER, SIGNAL = 0.54; EST_HUMAN HIT: BG164056.1, EVALUE 0.00e+00; SWISSPROT HIT: Q12968, EVALUE 1.10e+00; NT HIT: gi14744878, EVALUE 0.00e+00
caggcagaacccctagacaccctcggcccacccacagcctctccggctgccgaaggacgagggacgagggcaaggcagagttctctgaggtccccaggccttcaccccatctgtcagtctgtgtcttctaggacagaaggtagttgtttttttttcttttaaaacgtctgttcaaaataaaaaacaaaagcacacgcgcaagagagcgggaggaacggaggctgcctgcgaggcagccaagtccttggtttatgcagagggctgtagccttttccatttcgtgttgtcgttttccggacaagcagaggttgctggcaattggagccggtggcttcaggcgggggatgggtgcaggacaggggagaggagagccggggcctcccgggtcaagggcagccggctgtgtgtggatgcggaagaaggctgggtggacgcacggggttggtgtcagggctgaggtggcctcatggcacagaaggaggtgagtggttcccaggcatctggaagacacaaggaggcaagatgggttaagatccagccacagcggataggggttaaggtctggccacggaggataggcacagagagctgg

SEQ ID NO: 12542 - DNA, 556 bp, Homo sapiens
  MAP TO CHR6.3; EXPRESSED IN ADULT LIVER, SIGNAL = 1.3; EXPRESSED IN BRAIN, SIGNAL = 1.8; EXPRESSED IN HEART, SIGNAL = 1.8; EXPRESSED IN PLACENTA, SIGNAL = 1.1; SWISSPROT HIT: Q14738, EVALUE 5.00e-42; NT HIT: gi14781573, EVALUE 1.00e-109; EST_HUMAN HIT: BE270075.1, EVALUE 1.00e-109
accagttctagtgggcatcgggagttggtggaatggaagttttggggtattttgcggggaagggagttccagagaatgcgggaagggggtgccagggagcaggatggtggcagggtggggtaagggaaagcccttgaaggcaagcagggcatcgcagtgaaggactacagaggagaacctgactgctggggcccccacagattcgccaacccaggagcgggaggagctgtttatccagaagctacgccagtgctgtgtcctctttgacttcgtgtcagacccactcagtgacctcaaattcaaggaggtgaagcgggcaggactcaacgagatggtggagtacatcacccatagccgtgatgttgtcactgaggccatttaccctgaggctgtcaccatggtgggcacagggaaaggacacaggggggactggtgaggggctctggagaagcccaggtggagctctaactggccctacccctcagttttcagtgaacctcttccggacgctgccaccttcatcgaatcccacaggggctgagtttgacccagagga

SEQ ID NO: 12543 - DNA, 549 bp, Homo sapiens
  MAP TO CHR1.3; EXPRESSED IN LUNG, SIGNAL = 1.3; EXPRESSED IN HEART, SIGNAL = 1.2; EXPRESSED IN PLACENTA, SIGNAL = 1.2; EXPRESSED IN BRAIN, SIGNAL = 1.3; EXPRESSED IN FETAL LIVER, SIGNAL = 1.5; EXPRESSED IN ADULT LIVER, SIGNAL = 1.5; SWISSPROT HIT: Q15543, EVALUE 2.00e-25; EST_HUMAN HIT: BG675152.1, EVALUE 1.00e-113; NT HIT: gi14746117, EVALUE 1.00e-108
tccccagatggtaattttcggaaactacaaaaagtgtcaagatccataatttgcttcatcaaatgcttttctagctcgtttcaattcttcattcatagtaagcaagtctttaaccctggcaaacttccttgggtcctttcgaatcaagaagacgatatcttcaacttgtactcgaccttgtcttccaattgacattgccttgtgagtctattacaaagaaacatattacatttaacttttttaaatctaatattttactgttttaatttgcatttattaattgcaagtgaggtagaagattttctcttattattattattatggctattcatttgtgaattatctttctactcatgtcctttgtctattttctactggattattagcaatgttctcctttatgcttcacaggcactttaaaaaaaatcttaaggacatgaaagctgtcaactttattgttccttttttgttttttgatatatgtagattttgtcttcatttatataaaataattttataattttgtgtacccacccatttcatttatgc

SEQ ID NO: 12544 - DNA, 583 bp, Homo sapiens
  MAP TO CHR19.3; EXPRESSED IN PLACENTA, SIGNAL = 2.6; EXPRESSED IN FETAL LIVER, SIGNAL =   2; EXPRESSED IN ADULT LIVER, SIGNAL = 2.3; EXPRESSED IN BRAIN, SIGNAL = 2.6; EXPRESSED IN HEART, SIGNAL = 2.6; NT HIT: gi14759506, EVALUE 6.00e-50; SWISSPROT HIT: Q92973, EVALUE 1.00e-18; EST_HUMAN HIT: M86093.1, EVALUE 0.00e+00
ccatctgcctactgactccctgccctgccccacccccacagatgcatgtcccaggcccactcactgatccccagtgacccagccctccacagatgcatgcccagcctgccctctgacctccagctgctcaccttcccacaggtgcacgtccctcaggaacatcagggacaacgaggagaaggactcagccttccgcggcatctgcatgatgatcggtgtcaacccggggggcgttgtgcaggttggggcagctgggctctgagggcaggcgcgggcgctgggctcgggcggcccctcacctgggatccgtcacgtttcaggactttattttcttctgcgatgctgtagcctcctgggtgagcccgaaggatgaccttcgggacatgttttataaggtgaggctctgtctgggccctgatctagttccgggagcaggcaggggtgagaccatctggtaacaatggggcctggggatgggggaagaggcgcactccccttgttctgcccctgcctacccctcaccaccaccctccccacagattctccacggcttcaaagaccaagttggggaagataactggca

SEQ ID NO: 12545 - DNA, 530 bp, Homo sapiens
  MAP TO CHR1.3; EXPRESSED IN HEART, SIGNAL = 0.66; EXPRESSED IN PLACENTA, SIGNAL = 1.1; EXPRESSED IN ADULT LIVER, SIGNAL = 0.91; EXPRESSED IN BRAIN, SIGNAL = 0.94; SWISSPROT HIT: P48507, EVALUE 1.00e-33; EST_HUMAN HIT: AW964047.1, EVALUE 1.00e-112; NT HIT: gi13626331, EVALUE 1.00e-112
acatgtggaaaagtcaccccgcaggggtggccactatgtgcatgatgctcaacagtgtgcagcaaagactgaaaagggcaagttcttcctggagtgctcatgatcctgccatccctcacctgtgcccactgatacagctgttccaactgtgttttgtctagatcagaggtacctatggcaacaatctttttgctctgaactaagttttctaattcctcccagtaaggctgtaaatgctccaaggaaagattaactccatcttcaataggaggtgaagcaatgatcacagaatccagctgtgcaactccaaggactgaacaggctgataggaaggaagacacaaagaaaataaatgcttacatcataaaaacaaatatttctaatgttttcaaagtatcccactgaattctgtccatattcttcacttgttttcaaaataacagattatttcatagtttacttttcatttagaacatttctatctttcaaaaatgtgtaagtgcccatttacctacttgctctgtgtggca

SEQ ID NO: 12546 - DNA, 580 bp, Homo sapiens
  MAP TO CHR10.3; EXPRESSED IN HEART, SIGNAL = 0.66; EXPRESSED IN ADULT LIVER, SIGNAL = 0.46; EXPRESSED IN PLACENTA, SIGNAL = 0.46; SWISSPROT HIT: Q01294, EVALUE 3.20e+00; EST_HUMAN HIT: AL559802.1, EVALUE 1.00e-95; NT HIT: gi9506856, EVALUE 7.00e-96
actccccttccatccatttccaatgctcccccctctgctacttttctaaaactctaagatgttacattataggatttcctacttaggcatctattcgtgtgcttggatttgactttatagctggtatgtcaggtgccccagtgtagagaacacatttcccccaatattttttcttggtgttagaaactcagtcggattaaccatgcaacaaatgcagcaacagttcttttaggaattcctacgcttgtgctattgaattaaaatattctcaatcttctcatatcataaccaatcaagataatgattcctttctactcaaatattatgcttaaaaattatcttctttcagtttttccagatgcaaataggtttttataccattaatgtgattttccctactagagtccttaaatgcactggaagaccaagatttagatgctctcatggcagatctggtagcagacataagtgaggctgagcagaggacaatccaggcacagaaagagtccttgcagaatcaacatcattcagcatctctacaagcatcaattttcagtggtgcagcctctcttggttatgg

SEQ ID NO: 12547 - DNA, 563 bp, Homo sapiens
  MAP TO CHR20.3; EXPRESSED IN LUNG, SIGNAL = 0.68; EXPRESSED IN PLACENTA, SIGNAL = 0.76; EXPRESSED IN HEART, SIGNAL = 1.2; EXPRESSED IN BRAIN, SIGNAL = 0.58; EST_HUMAN HIT: AA180106.1, EVALUE 1.00e-76; NT HIT: M33772.1, EVALUE 0.00e+00; SWISSPROT HIT: P02586, EVALUE 1.00e-21
ctttcgcgtcctctttcatctggcgcaccatcatgaccaagaactcctcgaagtcgatggtgccgctgcctgcgggcagcaggtggcagactgagcctgagcccagccgctgccgcctctccccaccatcccctgcctccgagggacacccgctcaccgtcctcatccacctcctcgatgatggcgtccagctcctccttggtgggtgtctggcccagcatcctcatcaccgtgcccaactccttgacgctgatgtccccaccaccatcagcatcaaacatgtcaaaggcagccttgaactctgcgagggagggcagagggcagaggtgaggcctgctggactgtcagcctcacacctacccccccccaacccccaccctgcctagaggccaacatgtccccagcatacatccacccagcccccagcctgccgcgcctcactcaccagcgatcatctcttcgctgaggtaggacctggcctcagcctgctggtccgtctgcaggagacacagagaaagtctgagctgaagaggcagccccagagcagttcctcacctcaaagc

SEQ ID NO: 12548 - DNA, 542 bp, Homo sapiens
  MAP TO CHRX.3; EXPRESSED IN PLACENTA, SIGNAL = 0.57; EXPRESSED IN LUNG, SIGNAL = 0.76; EXPRESSED IN HEART, SIGNAL =   1; EXPRESSED IN FETAL LIVER, SIGNAL = 0.58; EXPRESSED IN ADULT LIVER, SIGNAL = 1.1; EST_HUMAN HIT: BF029426.1, EVALUE 2.00e-90; NT HIT: gi14764711, EVALUE 2.00e-80; SWISSPROT HIT: O55123, EVALUE 5.10e+00
attattggtgggagcctgtgtttcttcctgggtagaattgaataagattttccaggaaaggcatttgtgtagctaattacagattatggtgcaaagtatgtctcatattcctccccctaaccccagctaattgctgtatacttgacagtttatttcaatattgtattaagacattggttttgtgctggacagagtaaaagggagatggtatttttttttaaaagaacaatttatttcataattaagtatctaaatacttggttgggaataaatgactaattagaacagtacctttaggtattctgatacctctacttagaaatgccttttcttttcttgcaaaaattacttggcagatttgatgaaaaagaaaatgtgtccaactgcatccagttgaaaacttcagttattaagggtattaagaatcaattgatagagcaatttccaggtattgaaccatggcttaatcaaatcatgcctaagaaagatcctgtcaaaatagtccgatggtaagtctttgtttttgtctgtgtaaagctcgg

SEQ ID NO: 12549 - DNA, 558 bp, Homo sapiens
  MAP TO CHR1.3; EXPRESSED IN HEART, SIGNAL = 1.2; EXPRESSED IN PLACENTA, SIGNAL =   1; EXPRESSED IN ADULT LIVER, SIGNAL = 1.1; EXPRESSED IN BRAIN, SIGNAL = 0.83; NT HIT: gi14725834, EVALUE 1.00e-130; SWISSPROT HIT: P53611, EVALUE 3.00e-20; EST_HUMAN HIT: AW516066.1, EVALUE 0.00e+00
aaatttcttgtcgcttgttgctaacaaaattagtatatggtaaaggtcaggtattcataatttgaagttaaagaagttttcattttgtgatctgtatataaattcttttttaaataggtggatccttttcataccttatttggaattgctggattgtcacttttgggagaagaacagattaaacctgttaatcctgtcttttgcatgcctgaagaagtgcttcagagagtgaatgttcagcctgagctagtgagctagattcattgaattgaaagttgcatagtatagttttgccattttaacatttctgtatttgaagtgcttatcgaatctaaaagtgactactgttaatattttgtatattgtgttaaattaattttaataaattatataattatacatattgtaaaataaagaccggtattttattttctgctttttattctgaagtcctgttattctgactacagttctttgtgtatacttctgtgtctgttatgttcaataactgagctaacataaaataactctaggtttctacttgatttttcccccatg

SEQ ID NO: 12550 - DNA, 593 bp, Homo sapiens
  MAP TO CHR11.3; EXPRESSED IN ADULT LIVER, SIGNAL = 0.49; EXPRESSED IN BRAIN, SIGNAL = 0.62; EXPRESSED IN PLACENTA, SIGNAL = 0.54; EXPRESSED IN LUNG, SIGNAL = 0.54; NT HIT: gi13632856, EVALUE 4.00e-85; SWISSPROT HIT: P39429, EVALUE 1.00e-03; EST_HUMAN HIT: AL544165.1, EVALUE 6.00e-85
tcacacaggaaagctgatcggcatatgcctttcttagaagttctgttacttgcatatctacaatagtgataactagtataaatgtttttttaagaaagacatgcaaaacaaattctacacttatgtactaaaatggcttattgaaccttctttttcttaaaaatcatttttcccaaaattgataatgtagactcagagtcggagtcacatccttatctactgctaaccccctcaagtacacatttaagaacaatattttaagaagtagtgaatttaacaaatccaagttagtacatgcctctttatcttcaaatgccattgatgcagcacagttgtcacaagaaacctgtctccttggacaatccttcagaatgtgaatattaatatggaatttttggaagggacgctggcattggggacaatccataagagcaaactcacaatgtgcttgatgatcctataattaaaaaaataatggattagcattagccaactctgaagtcttctacatataagctctcctaatcatatactgttctctttcagcaggctactgaacctactttgtctaatgcacaccacagaaccattca

SEQ ID NO: 12551 - DNA, 599 bp, Homo sapiens
  MAP TO CHR14.3; EXPRESSED IN LUNG, SIGNAL = 1.2; EXPRESSED IN PLACENTA, SIGNAL = 0.94; EXPRESSED IN HEART, SIGNAL = 0.75; SWISSPROT HIT: Q45730, EVALUE 4.50e+00; EST_HUMAN HIT: AW021044.1, EVALUE 0.00e+00; NT HIT: gi14749902, EVALUE 0.00e+00
gtcaggaaaaagggagggtgttactttttttgattgatcattaaggaagttagaggaataaaaacacagtaaaaggtttaaaacattaaggaacatttttcaggtataaattttataaatacaaaacaaattcacaaattactctcaatactaaataaatatctagttaataaacttggacttaatacctgcagccagcactggtacagcacttcaaggttataagattggattcattcatgtgtagtgttgaaagaatgtactcaaacaattaattaagacataaacaccttttctaaactgtgctatagcggaagactcatccatgtagataactctcccttaataccaccactttaaaaaaaaatcatcaataacaaaataaatcgtgggtgaaaaaatattttccaagatctctggacacatgaatgatctcaaaaatgtacaaaaacctctgtaaaccagtactgtatccaatacatctatcaaacttattagatactgaacaaaactgtagcaaaggatatctttcctacattctcctgagtgcttaatattaaaattgagaatatagtgcaggccacactttcatgtggtca

SEQ ID NO: 12552 - DNA, 505 bp, Homo sapiens
  MAP TO CHR12.3; EXPRESSED IN LUNG, SIGNAL = 0.7; EXPRESSED IN PLACENTA, SIGNAL = 0.66; EXPRESSED IN ADULT LIVER, SIGNAL = 0.71; EXPRESSED IN BRAIN, SIGNAL = 0.73; NT HIT: gi16163898, EVALUE 0.00e+00; SWISSPROT HIT: O35594, EVALUE 1.00e-23; EST_HUMAN HIT: BI861909.1, EVALUE 0.00e+00
  unsure 106
  unsure 107
gaaaacataccatattcctccgactatagcaatagaaataaacccctgtaactgagatttaattattcttgtttttttttaatgatagaaacttcgggaaaaacannaaagttatacgagaaagtcatggtccaaatatgaaacaagcaaaaatgtggcgtgatttggaacaattaatggaatgtaagaaacagtgctttctgaaacaacaaagccaaacttccattggtcaggtaattcaggagggtggggaggaccggctaatactgtgaattcttgtgtcatcgtttggggttttacttgataccactagctataagcctaatctcataatgtatttcttttttgaaactgatttgtatagcattttgttttcagaagagccattctttattaagttttcatagaaaataatgttaaggtagatttagtttgaatgttttttcatatgaaaaagaggcttttattcttttccatagtttagacatcactggcgtcttctgag

SEQ ID NO: 12553 - DNA, 537 bp, Homo sapiens
  MAP TO CHR4.3; EXPRESSED IN PLACENTA, SIGNAL = 0.57; EXPRESSED IN LUNG, SIGNAL = 0.64; EXPRESSED IN BRAIN, SIGNAL = 0.73; NT HIT: gi4758009, EVALUE 0.00e+00; EST_HUMAN HIT: W45459.1, EVALUE 4.00e-89
atgcaatcaaaactcccagccacctaaaataaagcagtgcaaatcctattttcaaacataattgaaaaataatgaaatgagggatatttctgaataacttgaaaatcctgttgtatcaataatttaacctgaaaaaaaaaatccattcccagcagcacatcatacctcactgaacaaactgtgacatcacagccaaagtatgaacaaaaaaacttgtgccccggaaaagtgaacagaacactactgtgttgtaaacaaaaggaaaaacaggatggatcagtttgcacatggtgtcagaatttcaggaaaggtgctcacacctgtaaggaagagataacgctttcatgcagcatacaaaatgttttgctttctctccttttatctagacatatacatatttttacatcatctgtacatagagaatttgaacccacacaacattctgaaagtaattactgttccatcattatctgaaaagggagaggggttgggggagggggtcgctaccaagtctactggactgtcttcatggcatca

SEQ ID NO: 12554 - DNA, 546 bp, Homo sapiens
  MAP TO CHR19.3; EXPRESSED IN LUNG, SIGNAL = 0.99; EXPRESSED IN HEART, SIGNAL = 0.67; EXPRESSED IN PLACENTA, SIGNAL = 0.62; EXPRESSED IN ADULT LIVER, SIGNAL = 0.69; SWISSPROT HIT: P32447, EVALUE 1.00e-03; EST_HUMAN HIT: BE901770.1, EVALUE 0.00e+00; NT HIT: gi8922548, EVALUE 0.00e+00
gtttcatgggggagatcaagttggccatgggagcggttctctgaggggaggccggggtcggcccgggggtgggggtccccgcacaggcccagcctcaccgtccgccagggcttcactgcactcgaagctgatctcgaaccggaaggggctgtggaaagggctcgggttctccaggaccgccacgttcagcaccgacaccttggccatcgcctcgcctcgccgcgccgcagcaggggcaggggctgtggctgtggcggaggccgcgcctgggtccggtggggtcagtggggtagggctgaccaggtccactcccgcctcttctctccgagaactgaagtgcgcacctagtccgcgcgccgccttcaaatagccggcctccgccctctggccaatcaccgccaacgctccctggcggcgcgcgcaccccctcagccagtcctggagcgccgatcggcgcgcgcccagactcctcggaccaatcagcggagctccctctccgcagcgtgtgaggagggcgaaactatctccaagcttcttagcgtgtcc

SEQ ID NO: 12555 - DNA, 554 bp, Homo sapiens
  MAP TO CHR12.3; EXPRESSED IN PLACENTA, SIGNAL = 2.9; EXPRESSED IN HEART, SIGNAL = 3.3; EXPRESSED IN ADULT LIVER, SIGNAL = 3.3; EXPRESSED IN BRAIN, SIGNAL = 2.7; SWISSPROT HIT: O00744, EVALUE 8.00e-50; EST_HUMAN HIT: BF056880.1, EVALUE 0.00e+00; NT HIT: gi5803222, EVALUE 0.00e+00
aactgaggctgggtgacttgctgatggtgagtgtcagtcactcatcacactttatcctatcatttccctatgcctctcaaactctaaccaggcctcaaaagctggggagacccaggacaagatgtacacacatacctggcgccccaccctgttgttgtggattcgcattcgtgcctggatgtcccggggagcttccctggaatccaagaaatcccgagagaacttctctccaaagtccatgtcatggttacagccaccccattcccatgtgtcctgggggccagggctggggcttgagccagggccagggctgggcagagagtgggggaaactcttgcctcgggacagtgcctgcagctgcagcagtttggccctcagccgatcctgctcaccactgcccttccagccacagccacagctcaccagcttgcccaggctgcaggccgtggctactgcgtgcatgaccccagcagccagcatggagaaggaaaaagcactttctcggaaacctggggatgagaagggtgtgatggtggaggtaaggttgacaggca

SEQ ID NO: 12556 - DNA, 567 bp, Homo sapiens
  MAP TO CHR2.3; EXPRESSED IN PLACENTA, SIGNAL = 1.8; EXPRESSED IN BRAIN, SIGNAL = 2.5; EXPRESSED IN ADULT LIVER, SIGNAL = 3.2; NT HIT: gi14785826, EVALUE 1.00e-114; SWISSPROT HIT: Q13459, EVALUE 4.00e-23; EST_HUMAN HIT: AI597946.1, EVALUE 0.00e+00
agtgacgcttttgtgggttcacgccccagctcccacctgcagccttttcggccctctcggcccgcaggcgtccggcctcccgaagcactgccatggcccggatagcagcccggagcacggcccagcggaacacggccacggggtccatgccgatgagctcccgcacgtaggagctgtcactgccccgcagcagggccacgatgtctggccgcatgtagtccatgttcttctcccggaagtcctggtgggggatggatgtgggcggtcactcggggatagtcactcaccggcgcctaccaaagaccccgggctggcgcaggaagggctgacggtggggtggggcccatcctaagtgcaaatggcagttcttgaactatggcgccttggacattggagccggggattcgcggtgggttctgagcacctggaacctcgcccacaggaggatcctcccacatgggcttctgggctgactgtggcttccctcaggcttccaccagtggtgatgggcagacacctaccttgatctgatatttcaccttccctgcgaagtgctggatgatgaaa

SEQ ID NO: 12557 - DNA, 545 bp, Homo sapiens
  MAP TO CHR10.3; EXPRESSED IN LUNG, SIGNAL = 0.49; EXPRESSED IN PLACENTA, SIGNAL = 0.65; EXPRESSED IN ADULT LIVER, SIGNAL = 0.73; NT HIT: gi14745310, EVALUE 1.00e-117; SWISSPROT HIT: P52732, EVALUE 1.00e-34; EST_HUMAN HIT: AU127456.1, EVALUE 1.00e-115
ttcatcagattcctttcaccgtatccattttgtctaacacttatttttaaaaatatagctgcttaacacagttgaagaaactacaaaagatgtatctggtctccattccaaactggatcgtaagaaggcagttgaccaacacaatgcagaagctcaggatatttttggcaaaaacctgaatagtctgtttaataatatggaagaattaattaaggatggcagctcaaagcaaaaggccatgctagaagtacataagaccttatttggtaagttcaggctgttctgttctagtcttgatgtgttaagtgtaatgttgatttcaaaactgataattttgtgaaacatagatgacggtgtcaccaatactctctaccatgcacaaactatttgttcagggtgaagattaatgcttttattgtctttgaattaaaacaaatcttttttccctccccaccctcccttctgttttctataaaatgttacatttattaagtaactaagtatataaacgttagaagtagaagtcctctttttccctgactccg

SEQ ID NO: 12558 - DNA, 516 bp, Homo sapiens
  MAP TO CHR9.3; EXPRESSED IN FETAL LIVER, SIGNAL = 2.3; EXPRESSED IN ADULT LIVER, SIGNAL = 2.6; EXPRESSED IN BRAIN, SIGNAL = 6.2; EXPRESSED IN HEART, SIGNAL = 3.4; EXPRESSED IN PLACENTA, SIGNAL =   3; NT HIT: gi14740809, EVALUE 2.00e-96; SWISSPROT HIT: P39570, EVALUE 1.60e+00; EST_HUMAN HIT: BI489663.1, EVALUE 2.00e-96
gagaactgaggcccagacaggggcagcgcacttatccaaggtcacacagcaagcagcaagatgaaatcaccggaggcagggccttgactctcagggtccacctttcctttaggaaagaacaggtggagggagtggtgatgctgggcagtagggaggagctccccaaagcagctgcgctaccttgttgccgagaatggggacatagccgtcagtgatgctccacttcttgaggttgacaggtcggcggctacggccccgcagggagccgtaatggaagacctcattggcactgttggagctgtagaggatgaggatggtgatgagggcaaagaggatcacgaacactgctgaccgctgctcctggagagaggagaggtcagtgagggcccagctgccgggcaggctcagcgcccccacctccttgccacctaccatgcctggttaactcctgctttttgttgcagaccaggtcaggcactacttcctccaggaaggcctccttcagccacctcagtc

SEQ ID NO: 12559 - DNA, 589 bp, Homo sapiens
  MAP TO CHR14.3; EXPRESSED IN LUNG, SIGNAL = 1.1; EXPRESSED IN HEART, SIGNAL = 0.91; EXPRESSED IN PLACENTA, SIGNAL = 1.4; EXPRESSED IN BRAIN, SIGNAL = 0.8; EXPRESSED IN FETAL LIVER, SIGNAL = 1.2; EXPRESSED IN ADULT LIVER, SIGNAL = 0.73; SWISSPROT HIT: Q15436, EVALUE 2.00e-39; NT HIT: gi14747688, EVALUE 0.00e+00; EST_HUMAN HIT: H90824.1, EVALUE 0.00e+00
tcagcatgactcttcataagcccttcaaatctctagtaaaatactgttggtttgactttaaattttaaagatatagttaaaagtgaagggtgtttaatctgtataacaatttaaggcacatgaaaagaaaactgaagccagcactgaatttaaagcctttgttataatacaattatattagttattcataataaaaatttgtcctagaaacatacagaaggcatttataaacatatatagagtaattttcagataggtaaaaactaccattcttgttgtttacctgcagttgtttggcagacaaatcttttgttcctctgaagacatagctttttgaaatgccttcacatccaagttcatgaacctgaaccattctcccaaaagtaataagtccaaccaaagctgtaggtggtaaaagacttaatgacatctgcatggattctttcagggcttgtaaatcttcatcttccatgcaagtatcaaccacatagaggaatatcaaaggcatctgaggaccacgcttttaaaaaattcaccaaaaagaaaaaatatgtagtttaaagcacagcatacaagacagtcaacaggg

SEQ ID NO: 12560 - DNA, 600 bp, Homo sapiens
  MAP TO CHR2.3; EXPRESSED IN PLACENTA, SIGNAL = 1.6; EXPRESSED IN LUNG, SIGNAL = 2.2; EXPRESSED IN HEART, SIGNAL = 1.2; EXPRESSED IN ADULT LIVER, SIGNAL = 1.4; EXPRESSED IN FETAL LIVER, SIGNAL = 1.2; EXPRESSED IN BRAIN, SIGNAL = 1.6; NT HIT: gi16160019, EVALUE 0.00e+00; SWISSPROT HIT: P55920, EVALUE 1.00e-106; EST_HUMAN HIT: AL531903.1, EVALUE 0.00e+00
cgatggttttcagaggttggaagagacattgacagacgaagaagtgtaggaggtaacacgatgacgtgccaagaactccttgctgaccaggccatgcatagccaggatcttgaggaatccatggcgaaaattttggccgatgaaggcgtagatgatggggttgaggcagctatggagaaatcccagaatctcagtggcatccagggcccggccgatgttgttgcggcgctcacagctctcctggatcacctgggtcctcatgagggtgtctgccagcaggaccaggttgtagggcagccagcaaagcaggaagatgaggacgacagcaaagatgaccctcatggctcggtgcttctgccccatgtgggccttaaacagtgtacgcagggtgaatccatagcagaacagcatgacaaacagcggcacgatgaagccaaaggtgtgaggcaggatccgcaacaccatccgccattttgctgtgtcatttcccaggacctcatagcaaactggactggaattgtttggatggtaagcctggcggaaaaggaagaagggcagggacagattcatagacagtccccagcagccaagacaaacaaa

SEQ ID NO: 12561 - DNA, 579 bp, Homo sapiens
  MAP TO CHR1.3; EXPRESSED IN HEART, SIGNAL = 1.1; EXPRESSED IN PLACENTA, SIGNAL = 1.1; EXPRESSED IN FETAL LIVER, SIGNAL = 1.1; EXPRESSED IN BRAIN, SIGNAL = 1.5; EXPRESSED IN LUNG, SIGNAL = 1.5; NT HIT: L77729.1, EVALUE 0.00e+00; SWISSPROT HIT: P33765, EVALUE 2.00e-59; EST_HUMAN HIT: BI822569.1, EVALUE 0.00e+00
ttgtagcctcatttcccagctgcctcaattgctgcccaccccacgccgcaggctacctgacggtaagcttgacccgcaagtatcggtccacagcgatggccagcaaggacatgatggaggcgtgggtaaagataagcagtaggcaagtcataaaaaggcagctgtagaagtggattgtgatgcccaggctgacaacaatggccaaaggcatgaccagcaccccaacagcaatgtcagccagggctagagagacaatgaaatagaaggtggtggtctgcaggctggggttcagcttgaccacgcagatgaccagcacgttgcccactatggcgcagagtccaatgaaaatttccatggtgatgtaggtaacattggccaatgacagagcagtgctgttgttgggcatcttgccttcccaggggaacctccacagggacaggtgagccagcaagatccgtctgtagggccagtgggcctagctctcgccagacgtcttcccagaggtccatgtgcagtgacagtctaaaattcccaacttgctcattcctacccttttctggtggggtgatctcttggaaa

SEQ ID NO: 12562 - DNA, 530 bp, Homo sapiens
  MAP TO CHR12.3; EXPRESSED IN BRAIN, SIGNAL = 4.3; EXPRESSED IN HEART, SIGNAL = 1.7; EXPRESSED IN PLACENTA, SIGNAL = 2.5; NT HIT: gi15304842, EVALUE 0.00e+00; EST_HUMAN HIT: AU119775.1, EVALUE 0.00e+00
cctgttctgccaagacttcctcctctttgtttgcatttaatggacacagtcttagaaacattacagaataaaaaagcccagacatcttcagtcctttggtgattaaatgcacattagcaaatctatgtcttgtcctgattcactgtcataaagcatgagcagaggctagaagtatcatctggattgttgtgaaacgtttaaaagcagtggcccctccctgcttttattcatttcccccatcctggtttaagtataaagcactgtgaatgaaggtagttgtcaggttagctgcaggggtgtgggtgtttttattttattttattttattttatttttgaggggggaggtagtttaattttatgggctcctttcccccttttttggtgatctaattgcattggttaaaagcagctaaccaggtctttagaatatgctctagccaagtctaactttatttagacgctgtagatggacaagcttgattgttggaaccaaaatgggaacattaaacaaacatcacagccctcact

SEQ ID NO: 12563 - DNA, 580 bp, Homo sapiens
  MAP TO CHR5.3; EXPRESSED IN LUNG, SIGNAL =   5; EXPRESSED IN HEART, SIGNAL = 5.1; EXPRESSED IN PLACENTA, SIGNAL = 4.6; EXPRESSED IN ADULT LIVER, SIGNAL = 5.6; EXPRESSED IN FETAL LIVER, SIGNAL = 3.5; EXPRESSED IN BRAIN, SIGNAL = 6.3; SWISSPROT HIT: Q16950, EVALUE 3.20e+00; NT HIT: gi14727658, EVALUE 3.00e-92; EST_HUMAN HIT: AA478869.1, EVALUE 1.00e-119
cagggaaatttgacaccaccctcacctccaggccccaaaaggcctgagtctgggaccccagtcacctcggtacccaagctcctgactcttacctcagtcccaaccccttgacaggcaccaggatcatctacgaccgaaagttcctgctggagtgcaagaactcacccattgcccggacacccccctgctgcctccctcagattcccggggtcacaactcctccaacagcccctctctccaagctggaggagctgaaggagcaggagacagaggaagagatacccggtaaggaaagcaggaattaagaattgtcccagcctttgagttcaaatgccactgtgacacagtgcgggggttcagttccaagaggggtttctgcactgatgctgagcctgcagatcctcagaccagcaacctgtcttcctgccttttctctctccagatgacgcacaatttgaaatggacatctaatccagtgcagatgacctggcatgtggagttacagagggatccctcatgccactgctgccaccacctcttcctggggcatccaaaggccagctggcctcatctaatctgg

SEQ ID NO: 12564 - DNA, 575 bp, Homo sapiens
  MAP TO CHR5.3; EXPRESSED IN FETAL LIVER, SIGNAL = 2.1; EXPRESSED IN ADULT LIVER, SIGNAL =   2; EXPRESSED IN BRAIN, SIGNAL = 2.2; EXPRESSED IN PLACENTA, SIGNAL = 1.7; EXPRESSED IN LUNG, SIGNAL = 1.9; EXPRESSED IN HEART, SIGNAL = 2.1; NT HIT: gi14734137, EVALUE 7.00e-53; EST_HUMAN HIT: BI918265.1, EVALUE 4.00e-52; SWISSPROT HIT: P28818, EVALUE 1.00e-07
caaactacctctccaaggcgagcaatatgcttgtaaccgatcaaggagtgttgtagtattaggccctctgtcctatctgtgaagctctgtgagatgaaccacatttggtgtggggtctagcagttggtctaagatattcatgttggctttgatacttttagctttctgccatttttttcatagttagaatttagtggtgaacttcatgcttccacacatgcagctgtctgcctcactgacctgcaatgagatggcaggcgccctctcctgggtgtttcatttccctccctcatctcttgcagactgactgcatgaaggccgaatgctttgagtccttgtcggccatggagctggcagaacagatcaccctcctggaccatgtcattttcagaagcattccctacgagtgagtgccaccccccacagcagcagggctcggctgctctagctgtcttagaagttgacattattcctaaggcaggttgtgtgtatgtctgtcccctcagttcctgtgtgagtatctaccagttgtttccatccatggaactggcacgcctctgtgtccagcactctgc

SEQ ID NO: 12565 - DNA, 583 bp, Homo sapiens
  MAP TO CHR17.3; EXPRESSED IN LUNG, SIGNAL = 1.5; EXPRESSED IN HEART, SIGNAL = 3.1; EXPRESSED IN ADULT LIVER, SIGNAL = 2.4; EXPRESSED IN PLACENTA, SIGNAL = 2.2; SWISSPROT HIT: Q9UL17, EVALUE 3.00e-24; NT HIT: gi14774791, EVALUE 1.00e-85; EST_HUMAN HIT: AA333532.1, EVALUE 5.30e-02
aacccagtggcacttacgactcaaagttctcccggaatcctttggcaaaggggttattatcaattttcagctgagtaatctagagagaagggaaatagagtcacctgagtcctgagtctggggctcgggaactttccaaatccctcccaaggaagacagtgggccccactctgccctcctccccaccggggctcaggcagccctcacctcggcattctggtaggcagtcacggcaatgaactgggtttcttggaaagtaaagatatgcgtgttggaagcgttgcaggctgcctctggctctccgtcgttcacctcaacgatatgcagccggggctggtacttatggagggactggagcacaatcatctgtagacagagcaagacggttgtaggggtggggaggaaggatttcgaggatcccatcacccccaccaacagctggccccacgtgaggctagcaagcaccttgaggtcatcctgtccattcccctgctctgccaccatgtaacttcccccaagctttccaactccagtgtccggactctttggggcaccaattctagcctcttgccccctcttctac

SEQ ID NO: 12566 - DNA, 522 bp, Homo sapiens
  MAP TO CHR5.3; EXPRESSED IN PLACENTA, SIGNAL = 1.1; EXPRESSED IN BRAIN, SIGNAL = 0.81; EXPRESSED IN ADULT LIVER, SIGNAL = 0.97; SWISSPROT HIT: P28301, EVALUE 6.00e-18; NT HIT: AF270645.1, EVALUE 0.00e+00; EST_HUMAN HIT: BF061345.1, EVALUE 4.00e-61
attttctgcctttggtctgcttacaagaaagctgctgtagtagcagaaacagatacattctatgtataatgtttggcatgaacaaaaattatttgtgacaacaattacttagctaagcaaataacacttacggtgaaattgtgcagcctgaggcatacgcatgatgtcctgtgtagcgaatgtcacagcgcacaacattgttggtatagtcagattcaggaaccaggtagctggggtttacactgacctgggcaacacaaagagttcctcagtatttctttttccatagggctacaataaggaaatgttaatgaggacttagctaaatcaagcagggaagggattttaacttaagtaagtggttaaactctggagacgttatggaaagagactgcatattttcccctgaagttctttaaaataagacagattagattagattagatgtttataaatagttgaggatgtataatgcttccaataccatgattatttaacatttgaatccagagaagagggcct

SEQ ID NO: 12567 - DNA, 510 bp, Homo sapiens
  MAP TO CHR17.3; EXPRESSED IN LUNG, SIGNAL = 0.89; EXPRESSED IN PLACENTA, SIGNAL = 1.1; EXPRESSED IN FETAL LIVER, SIGNAL = 0.6; EXPRESSED IN BRAIN, SIGNAL = 0.81; SWISSPROT HIT: O88597, EVALUE 3.00e-24; NT HIT: gi14785898, EVALUE 3.00e-76; EST_HUMAN HIT: AV752912.1, EVALUE 0.00e+00
tcctgtgtatttccaagggcttcagggaaaaaccttcttgaaactggagaggaggcttgagctctatgccaagaaaaccccctaaaccatctaaggcaacattcttctactccaaggactaggtggtcacattctgtcctgcttgcagtactgggtcagtctctgcccatcaatgtcatgtgattctgtgccatttttttgctttcccaccatttatactgttttgcctccattattactgctgcttcaattctgttcaatttggtcctatacaagttcactcagcattgcgctatactgacctgtagggaagacaaaaacgtgtctcgcctttctcaacctcttctttgaactgctgcacacagtccaggaaagccaccattgcatggtcaaacttgttgtcccagaaaaaccgcaaccccccagaacagtataacggcagctcctgcccaagaagagaaaactggctatggatctggcaccaagaaaggcttccagagattgttccca

SEQ ID NO: 12568 - DNA, 506 bp, Homo sapiens
  MAP TO CHR11.3; EXPRESSED IN ADULT LIVER, SIGNAL = 1.3; EXPRESSED IN BRAIN, SIGNAL = 1.5; EXPRESSED IN PLACENTA, SIGNAL = 1.6; EXPRESSED IN HEART, SIGNAL = 1.6; SWISSPROT HIT: P11219, EVALUE 9.30e-01; NT HIT: AF081250.1, EVALUE 3.00e-73; EST_HUMAN HIT: BI824239.1, EVALUE 3.00e-65
ctttgggatctctgcctcagttccccccaactctctgaggaacactgtcagagtcttggctcaatttttcacttcaggagactatacttggtacctgagagaagcatgacaccctgtatggcccttggggacagtctctgctccagggattcctcacatcaggctccacaattaccgtaatggaagctttgaagttttccagttctttctcagtgttctcctctgtcaggttgcgttccctttcagcctggttaattctagattccagagtgtagctgtcatttctaaaggccaaggacagttgcacaaacacgttctgttgggaacaagggtgtgagagaggtgctgggaggagttactgcagaggacaaggctgcagctgtgctccttgcacgagcgttttgcaacggcccctggaacagccgccaaagcaccaaagcagccatgtgcaagggaaacgctcacttcacaggaaaccacaaaaaagatggtaaagcagggaccaa

SEQ ID NO: 12569 - DNA, 519 bp, Homo sapiens
  MAP TO CHR1.3; EXPRESSED IN PLACENTA, SIGNAL = 0.66; EXPRESSED IN BRAIN, SIGNAL = 0.58; EXPRESSED IN FETAL LIVER, SIGNAL = 1.1; EXPRESSED IN ADULT LIVER, SIGNAL = 0.63; NT HIT: M73255.1, EVALUE 0.00e+00; EST_HUMAN HIT: BE875778.1, EVALUE 0.00e+00; SWISSPROT HIT: P19320, EVALUE 1.00e-45
tgcactgggatgatgcttagcaattgctaatattattttttgccctttcagtatcacccaagaatacagttatttctgtgaatccatccacaaagctgcaagaaggtggctctgtgaccatgacctgttccagcgagggtctaccagctccagagattttctggagtaagaaattagataatgggaatctacagcacctttctggaaatgcaactctcaccttaattgctatgaggatggaagattctggaatttatgtgtgtgaaggagttaatttgattgggaaaaacagaaaagaggtggaattaattgttcaaggtgagtagaatgtgaaaaaggaatgataaaggtgctgtcagtgggatttgagcaatagtcaacacagcttcaatgctgaaattgcttcccttagtttcactgatgacctatctgattgccatatcctttagcacaaatatatgtttatcttactagtactctgtggaagtcttccctcccagagtttccatggctctgctt

SEQ ID NO: 12570 - DNA, 565 bp, Homo sapiens
  MAP TO CHR11.3; EXPRESSED IN LUNG, SIGNAL = 2.3; EXPRESSED IN PLACENTA, SIGNAL =   2; EXPRESSED IN HEART, SIGNAL = 2.3; EXPRESSED IN ADULT LIVER, SIGNAL = 2.5; EXPRESSED IN BRAIN, SIGNAL = 2.9; SWISSPROT HIT: Q13490, EVALUE 2.00e-28; NT HIT: gi14770186, EVALUE 0.00e+00; EST_HUMAN HIT: AA281621.1, EVALUE 0.00e+00
tggatgtgaaacaagcatggtgtcctgtaacatgtgagacagtcctaagagctccactgagaaacaatgcaggtgactaacatccccaaatacctgatgccatttcttcagcttgtttttccttctcctcttctcttttttcatcttcagcattaagaagtgctgacacaatatcattaactgttttatagttctctccagttgtcaggattttactttgaactgtttgtttcaccaggtctctattaaagcccatttccaaggcagatttaaccacaggtgtattcatcatgacagcatcttctgaagaactttctccaggtccaaaatgaataactatttgaaaagaaacatgctaatattaaattccacaaacataaacctatggaaaaaagtatcatggcacaatctttattcatcctttactctcatattctggtaaaggagatgagctatatgcatcgattacctataactccaataaaagtttgaacttcataatggtcaaatgagaatacaattaatatgctatactttttacaaaacccacctctctggctacatc

SEQ ID NO: 12571 - DNA, 597 bp, Homo sapiens
  MAP TO CHR16.3; EXPRESSED IN FETAL LIVER, SIGNAL = 0.46; EXPRESSED IN ADULT LIVER, SIGNAL = 1.5; EXPRESSED IN BRAIN, SIGNAL = 1.7; EXPRESSED IN LUNG, SIGNAL = 1.5; EXPRESSED IN PLACENTA, SIGNAL = 1.2; EST_HUMAN HIT: AI690260.1, EVALUE 0.00e+00; SWISSPROT HIT: P10842, EVALUE 4.40e+00; NT HIT: gi12739321, EVALUE 0.00e+00
gagctactgatgaaacggggcaaccgtttagaatgcaaactgctttctgtgttcacaggaagctggcatatttatagagaggaaaagaactttcaggcaagctagctcaaggacacagctaaaagattaacttactcccattctccttcatgtaagtccaaacttctctttcctcaggactatgagcaaaggaacagtttccaacatattgacattttttcccagaagcaatatggttgcacagctgtataaaaaaataggaatatgattaagacaaagtacacctagtaaaacggcctaatttttacatttaagcaaaagaagcattattatccatgctaatacttagtaatcaaattctaaagtaagattaatttgactctactcaaattaactatatgctctaaatatatgaaatgatattaaggtttctatctcaaaatttttcaaaagaaaatgtccaaaacagagtaaagcatggaacattttcttacaagaaaatgtctacaaactcacttactcagaacatttaatctccacaatgaacatccctggccctctcagtctgacagctcctgtttccctgcccaacactaa

SEQ ID NO: 12572 - DNA, 564 bp, Homo sapiens
  MAP TO CHR3.3; EXPRESSED IN PLACENTA, SIGNAL = 0.61; EXPRESSED IN BRAIN, SIGNAL = 0.4; NT HIT: gi10835130, EVALUE 2.00e-71; EST_HUMAN HIT: BI829953.1, EVALUE 3.00e-71; SWISSPROT HIT: Q01344, EVALUE 2.00e-21
actctccactctgcctgctcacttcttgttttactaggctactgtctcctgttctgttggtaattttatgggaaacagaaaaccagtacccaatccatggtgcctaaaaagttactaaacattcttccttaagggaaagaatcatccaaaagttaaaatattctgtgatgctgtttaacgctgaacaatacacccggcgctagctcacaggcattcttagagagacactattctactggtaacataacatagagcctgtcagtaattttatttttttaatccaaaattttatttgataaagaaaatgcagtcaaaatgcatatttattctcaataaggatatccattagaataaacacttacgtcatcttcttttggagcgttaattttcacttgatattctagattaacattcctttgctcttgatcaggatttggtttccattgtaaaagaacttgagccaaaacagtaactttaatggtgaaattgacaggtgggagaagtgaaactgttgattcaaagaataaacaaacaacacaatgttcaactggacataggcagcac

SEQ ID NO: 12573 - DNA, 517 bp, Homo sapiens
  MAP TO CHR9.3; EXPRESSED IN PLACENTA, SIGNAL = 1.4; EXPRESSED IN HEART, SIGNAL = 1.2; EXPRESSED IN BRAIN, SIGNAL = 1.6; SWISSPROT HIT: P30203, EVALUE 2.80e+00; NT HIT: AF095143.1, EVALUE 0.00e+00; EST_HUMAN HIT: BG007394.1, EVALUE 2.00e-66
ataccacagacaaggagccgaaatcagatgattcaggcaggcagtgctgaggtcagccacagccacagagctggggccgaccctgggccctgccacacgccaagtccctccagcaacacccgggaaccacgaagctcactggcaatcagcacccgggctgctcaacttctttctgtcctgcaaacaaacttcctcaaagaaagggaaagttgctaagataagcaaatctacgagcaaataaagcatttaattatcttcaaagtaaaaccatcaccttacatcatggggtaggtgtcctggtgggaatgaagccagcagggcacaggtttcccaaagacgttcctcagagtgacctgggacccaaaggccacctccagtggctgaccctgagtgatccgagctagtcctccctgagacagaagcagaaggttgatgagtgagagacagaaagaaaaatgaccctaagccagccttcccgatggccactcctccctctggggtgatgtttaggctggtg

SEQ ID NO: 12574 - DNA, 515 bp, Homo sapiens
  MAP TO CHR22.3; EXPRESSED IN PLACENTA, SIGNAL = 0.74; EXPRESSED IN ADULT LIVER, SIGNAL = 0.65; EXPRESSED IN FETAL LIVER, SIGNAL = 0.8; EXPRESSED IN LUNG, SIGNAL = 1.1; EXPRESSED IN HEART, SIGNAL = 0.62; NT HIT: AJ007378.1, EVALUE 1.00e-111; EST_HUMAN HIT: H72018.1, EVALUE 3.00e-52; SWISSPROT HIT: P19440, EVALUE 3.00e-22
ggacttgctctcctggactgtgtggcctctcttggttttgatataagcaggagctgtggacccacatggccagtcactgaccctcctccaccaggaacttcctgcaggctcaggcaagacaggaggaccccatggctctgggctacagctcagggtttccactgcagagttcctcacccaggtccttgaggttacccactcaccagccgcctggatgtccttcacaatctgggccatgaggctgccgttgtagaaggcctgggcaccctcgatggccagcatctcataggtgtcagccagccgcggcagggtcagtctctccccctcccgaagcacctttctatcccggcagaacacctcaccggggcagagggggctcatgtgaggcagcaggtggggtggactcagctagaccaccccccacacctgcccacacaggagaccagcacaaagcaggggcagcacctgtcacaggtgggtggccctgtcactcagcgctcatcctcctagtgtcc

SEQ ID NO: 12575 - DNA, 564 bp, Homo sapiens
  MAP TO CHR17.3; EXPRESSED IN HEART, SIGNAL = 1.3; EXPRESSED IN PLACENTA, SIGNAL = 0.92; EXPRESSED IN BRAIN, SIGNAL = 1.4; EXPRESSED IN ADULT LIVER, SIGNAL = 1.4; EST_HUMAN HIT: AI650714.1, EVALUE 2.00e-04; SWISSPROT HIT: Q9UF02, EVALUE 1.00e-75; NT HIT: AF142621.1, EVALUE 0.00e+00
ctcctgaattgcaaagggaggtgggtgccacctcagcaaacttcctgggcctctgggctgagcatcccctctcccctgctgcccaaccaggcctctctctcgtggtgggcctggtgctctacatctccagcatcaacgatgagatgctcaacaggaccaaggatgcagagacctacttcaactacaagtatgggtggtcgtttgccttcgccgccatctccttccttttaacggaggtaaagcccgtcaccctaagtatggataggctgggcctgggcactgccccactgagccggggagagtggggatgggggagaagggacattccacaaccattttggaccccggaccacccactctacttcccttcctcatcccagaatgtgtcactgtcttacctttctgggtctcctccggccaggatgtccccaggaccctgctcctgtccccacgtccacttcccaccccactcgagctgtgtcctgtgcagaccccagccaagggagatgaggcaggccccagcagcgagcccatcctctgctgtcttctccctgtagagtgccg

SEQ ID NO: 12576 - DNA, 578 bp, Homo sapiens
  MAP TO CHR3.3; EXPRESSED IN PLACENTA, SIGNAL = 0.52; EXPRESSED IN FETAL LIVER, SIGNAL = 4.9; EXPRESSED IN ADULT LIVER, SIGNAL = 8.3; EXPRESSED IN BRAIN, SIGNAL = 0.53; SWISSPROT HIT: P00450, EVALUE 8.00e-37; NT HIT: D45036.1, EVALUE 0.00e+00; EST_HUMAN HIT: BF921039.1, EVALUE 1.00e-113
acaggaccaatgactcttgcaacagaaaaattgcaagtaaacaatcttaggaaacatataaattgattgtaatatgtgtaattgtttggatactgatccaaacaacagacctaaaaagtcagttggggaaatgtgaacattgattggctatttgataactttaaagagttatgatgtgtgttattattattttaaggtgtgataattgtgggcatttttaaagaagtccttatcttttaaaggtatatactaaagtatttttggagataatgatgaggttagatatttctatttctgtcaaatgatcattttcaaagagattgaacaatttttttttccccagttggacttacctgtctcccatttgcatgtaaacttcctttcttgcatattttcattggcccaataagcccagtgaatatatctttagtgggttccacagcagaataatacatcttagctagacacacaggatctgcattagtgggtcctacttctttggggacagtccattcataggtgaatgtttctgtgggtgccacatgggaggctgaaggaggcacacctgtgagaaaggt

SEQ ID NO: 12577 - DNA, 583 bp, Homo sapiens
  MAP TO CHR15.3; EXPRESSED IN ADULT LIVER, SIGNAL = 0.79; EXPRESSED IN FETAL LIVER, SIGNAL = 0.56; EXPRESSED IN PLACENTA, SIGNAL = 0.75; NT HIT: M91815.1, EVALUE 2.00e-59; EST_HUMAN HIT: BF850777.1, EVALUE 3.00e-59; SWISSPROT HIT: Q13972, EVALUE 1.00e-18
gcctgccagattctaactgctcatcaatgatagtgatggctgtcattggggaagctggacccaggctcccaaatgggggcaccctatgcagcaggttgggccttggggggcagagtgtgggtgggccccaggttgagtcatctgggcttcaacgccccccttcccctgcctggctggggggaacgcaccatcctcatcttggagaagttgaccaggccgtcttccgtgtaattgggcgtcccctcctcgatgaaggccaggtcggtgaggtacatccccaggtaagggacacagggtgggtcacaacttggaagcaaacggcattaacacaagtttttcattttaaaaaagtaacgtctaccaagaacagaacatcccgcatgcaccttttgctttgctagaggcaaagggacttgcagtcaccaagaatcacactacactctagaactgactattctacacgcccaggactgtcggctgggtctcagggccagtcctctggggtggtgggggcaacatggtgctgactggggcctcttacacccactggggcatctcagattgtctctttcctccctgagcc

SEQ ID NO: 12578 - DNA, 581 bp, Homo sapiens
  MAP TO CHR3.3; EXPRESSED IN PLACENTA, SIGNAL = 1.6; EXPRESSED IN LUNG, SIGNAL = 7.1; EXPRESSED IN FETAL LIVER, SIGNAL =   5; EXPRESSED IN ADULT LIVER, SIGNAL = 2.7; NT HIT: gi14735111, EVALUE 0.00e+00; EST_HUMAN HIT: BF229587.1, EVALUE 0.00e+00; SWISSPROT HIT: P10630, EVALUE 7.00e-34
aaaccacggctcaacatttcatctgcttcatccaaaacaaacattttgatccattttggagctgttagaaacaaagtcatactgtcatttctagatctactcagtgatacaatttgacttttcaactatgttaacagttttaaaaaaaatactctcttaaagacaatacttacaaaggtatcttctgtttaacatatcaaacactctcccgggtgtaccaacaacaatatgtggtgcttcagcctgcagtttttgcatttcatttcgaacatttgttccaccaatgcaggcatgacaagtggctcccatatagtctccaagtgccagaattaccttttggatctaaaacccaagccttaattattattccgcagaactccaggatcaatgactaatttttaaagcataaaggcaaatataatctggtctgccaacagcttttatgcatgcacagcacaaaactacttccaagcttaaaatgcagacgacctaactgctgcaaggtaaaattcccttaatgtctttcttatgccttgtcaaacttgggatgctgctgctccacgcatcagctagacaatcca

SEQ ID NO: 12579 - DNA, 595 bp, Homo sapiens
  MAP TO CHR17.3; EXPRESSED IN BRAIN, SIGNAL =   1; EXPRESSED IN HEART, SIGNAL = 1.6; EXPRESSED IN PLACENTA, SIGNAL = 1.3; SWISSPROT HIT: P34896, EVALUE 5.00e-16; NT HIT: L23928.1, EVALUE 5.00e-57; EST_HUMAN HIT: AW963072.1, EVALUE 0.00e+00
gacagccagtatcctcaggccagttctcttttgcccacatgtccctttttaaatgcaccaccatcacagtggtgacaatgtgacttagggacagagccccgtttatcttgtaggtgacagaagcgctctgcggcccagtggactgcggctggggaccccagcactgacgtcccgtggacttttggaaaaagacttccaaaaagtagcccactttattcacagaggtaaggataaaagtttggaagttgccacatcttattgtgtgtatttagtttctgattgtgatgagtagctgagaccctgccactgaaagacaattctgcaccaaggctgagtgttggggtgggagacagcaaaaaacacatgtaaatcaccttgtctgagagggttataaatttgggctgcccaggacatctgtccaagggtgggtgcatctcagagtaattgaggtaagcatggagaccttgtgccctgccacactccccagctgggggacattctgacatttgtgcctcggcccccagccattgtaccccctttggtgtgtagtgtggggtgactcatttgtgtcttgtggcacagggatagagctgac

SEQ ID NO: 12580 - DNA, 514 bp, Homo sapiens
  MAP TO CHR22.3; EXPRESSED IN FETAL LIVER, SIGNAL = 2.8; EXPRESSED IN ADULT LIVER, SIGNAL = 2.6; EXPRESSED IN PLACENTA, SIGNAL = 0.96; SWISSPROT HIT: P14648, EVALUE 5.00e-18; NT HIT: X16163.1, EVALUE 1.00e-126; EST_HUMAN HIT: AL134733.1, EVALUE 1.00e-123
tggaaagggtctcattcctggagggggcatgcctactggcgtccctctagcaaggggaagcccaattggtgggcccatgggtggtttcataccaggtggaggaaacataatgcctagaggtggggctgctctgccaacaggtgggggtggagcccccggtcctggtgggtactgtgttggggctccagtaatgctcttctctgtggagtcattacctgctgggatggtcccccaactcctgggacggggcctgctaatccaccaggagcctggggaattggtacaccagctgatactcctctaccagctgccctaacaactccagggcctcctgcagctccagcaagtggtacccgagcaatgccagtatattttgggggtagcccctccacagtcatggataccaagttctccccatgcagcaacaccagaccccaaaagtgcttttcttcgagctctggttgcttcacgttctttggcttgatctttctgaactcatcacaatcgcagagga

SEQ ID NO: 12581 - DNA, 562 bp, Homo sapiens
  MAP TO CHR1.3; EXPRESSED IN BRAIN, SIGNAL = 3.3; EXPRESSED IN LUNG, SIGNAL = 4.2; EXPRESSED IN PLACENTA, SIGNAL = 2.9; SWISSPROT HIT: Q9Y6W5, EVALUE 2.10e-01; NT HIT: M37435.1, EVALUE 0.00e+00; EST_HUMAN HIT: BF344011.1, EVALUE 0.00e+00
tgaacactgtacctgcctgctgaacagcctgcccccgtccatccatgagccagcatccgtccgtcctccactctccagcctctccccagcctcctgcactgagctggcctcaccagtcgactgagggagcccctcagccctgaccttctcctgacctggcctttgactccccggagtggagtggggtgggagaacctcctgggccgccagccagagccggtctttaggctgtgttgttcgcccaggtttctgcatcttgcactttgacattcccaagagggaagggactagtgggagagagcaagggaggggagggcacagacagagaggctacagggcgagctctgactgaagatgggcctttgaaatataggtatgcacctgaggttgggggagggtctgcactcccaaaccccagcgcagtgtcctttccctgctgccgacaggaacctggggctgagcaggttatccctgtcaggagccctggactgggctgcatctcagccccacctgcatggtatccagctcccatccacttctcacccttctttcctcctgacct

SEQ ID NO: 12582 - DNA, 560 bp, Homo sapiens
  MAP TO CHR16.3; EXPRESSED IN BRAIN, SIGNAL = 1.9; EXPRESSED IN LUNG, SIGNAL = 1.9; EXPRESSED IN PLACENTA, SIGNAL =   1; SWISSPROT HIT: P34110, EVALUE 3.00e-10; NT HIT: gi15318054, EVALUE 0.00e+00; EST_HUMAN HIT: AI695097.1, EVALUE 0.00e+00
cctcaaagcagaggcttcactacaggatgagactctcttttttaacaaaacaaagcaattttgttcatcagatttccaagcaccccaaatgtttcacctccagaacacaaggccatgacaactgatccctgttatggatcctgtctgctatcatgcagtcaggaatgaccttacctcctccccatttttgtccgtgtttctgccagaccagaagagatgtgcacaggtgctcacagctcggccctgatcaggtttctttagaagtttggatgcagcaagggcacactgagtcctcagaggttcgtgattctcttcactgaagcacttcatcctttcaaaagtgccaatgatcaaggtgatggcagctagctgtgctttggaatcgctgatttcatcttcatacagagaaaatgcctagtgaacataaagcagaaaggactttcaaggaccaaccatcctctagttgagcattttccaaagtacttgtcaccaaacctccatcctgtgagacttctgcagccttcatatcagaacatgctgcaccctctcttgagagccac

SEQ ID NO: 12583 - DNA, 549 bp, Homo sapiens
  MAP TO CHR6.3; EXPRESSED IN LUNG, SIGNAL = 0.86; EXPRESSED IN PLACENTA, SIGNAL = 0.52; EXPRESSED IN BRAIN, SIGNAL = 0.44; NT HIT: gi16162452, EVALUE 2.00e-71; EST_HUMAN HIT: BI254739.1, EVALUE 3.00e-71; SWISSPROT HIT: O00716, EVALUE 2.00e-21
cttggtgaactggatttggcccttaggctgtggtttgctgacccctgctctagaggatgacagtctttcatagagttggactagtagggaaaaagcaagtgaaaaacgaacattgttcttactttccatttttagacaagaattactatggcttttatttctaaaagaacttctgattcgaacttctcccacttctgttcatagagcctacaaatacatttggcaagtacccaagggcccattgaggtttacttatgtccagaagagactgaaacacacagtccaatgaaaacaaacaaccaagaccacaatgggaatatccctaaacccgcttccaaaggtaaaaactccacttttgtcttttagaaactatgttaaaaatgagggtgactagaaccatctgtattggaaccacaagcctaggcaagaaacacaaacttctattggtattaggtaacatgttttaaaagacattctgactggtttgcagaagaaaataatgatttgggaaaaacggctccttcacccacttatggagtcgcttcaggc

SEQ ID NO: 12584 - DNA, 502 bp, Homo sapiens
  MAP TO CHR2.3; EXPRESSED IN BRAIN, SIGNAL = 0.28; EXPRESSED IN LUNG, SIGNAL = 1.4; EXPRESSED IN PLACENTA, SIGNAL = 0.47; EXPRESSED IN ADULT LIVER, SIGNAL = 0.39; SWISSPROT HIT: Q01118, EVALUE 1.00e-75; NT HIT: gi16157121, EVALUE 0.00e+00; EST_HUMAN HIT: BG724147.1, EVALUE 1.80e-01
ctgtttctggcattggtgagctcatttagttcatgcaaggatgtaacagctgaagagaataatgaagcaaaaaatctccagcttgcagtggcaagaattaaaaaaggaataaactatgtgcttcttaaaatactatgcaaaacacaaaatgtcccaaaggacacaatggaccatgtaaatgaggtatatgttaaagaagatatttctgaccataccctttctgaattgagcaacacccaagattttctcaaagataaggaaaaaagcagtggcacagagaaaaacgctactgaaaatgagagccaatcacttatccccagtcctagtgtctcagaaactgtaccaattgcttcaggagaatctgatatagaaaatctggataataaggagattcagagtaagtctggtgatggaggcagcaaagaggtaagatgtttaaatatcctgattgcttagtggtgatttatagtattgttgataaggaagtaaatcagcgccgaag

SEQ ID NO: 12585 - DNA, 530 bp, Homo sapiens
  MAP TO CHR18.3; EXPRESSED IN LUNG, SIGNAL = 0.76; EXPRESSED IN PLACENTA, SIGNAL = 1.4; EXPRESSED IN HEART, SIGNAL = 1.1; EXPRESSED IN ADULT LIVER, SIGNAL = 0.99; NT HIT: gi13646672, EVALUE 0.00e+00; EST_HUMAN HIT: H74208.1, EVALUE 1.00e-128; SWISSPROT HIT: P23606, EVALUE 8.50e+00
gattttggcaggatagcagcacaggattggatattccatattcatcactttgacaatgtaaacctttcataaaataatattttgcttaaaaattagaatcattcaaaggtctgatcattctgttccctgaggcccgccggggaggtctggcttcataccacaggtttcctgctttcttggtggagcgtaagcaccactgcatttcaggaagaccctgaaggacagccatgagaaagcccccgcggaaggagggcaggagggctctgggtgggtctgtgttgaaacaggccacgtaaagcaactctctaaaggtcaaaccaccatagatttgaatctgctggtcatttgccatctggatttttaactgaatgaatctcatgggtttaaccaaacatgcatgtaatcctgaataccatgaattaaatgcggaattgcccagggacgaggaaaccttcaagaaacaaggtcaaagggacaacagatataactgtcacaataaacaattctgttgacgtggaaatgcacatgac

SEQ ID NO: 12586 - DNA, 571 bp, Homo sapiens
  MAP TO CHR13.3; EXPRESSED IN PLACENTA, SIGNAL = 0.75; EXPRESSED IN LUNG, SIGNAL = 0.85; EXPRESSED IN HEART, SIGNAL = 0.63; EXPRESSED IN BRAIN, SIGNAL = 0.39; NT HIT: AF255433.1, EVALUE 0.00e+00; EST_HUMAN HIT: AI702437.1, EVALUE 1.00e-95; SWISSPROT HIT: P28715, EVALUE 1.00e-28
tgaagagaaaaatcccggagttttttccattaacaattctcccagatattagcatttggttaaaccaagcacttaaaggagtccgggatcgccatgggaactcaatagaaaatcctcatcttctcactttgtttcatcggctctgcaaactcttattttttcgaattcgtcctatttttgtgtttgatggggatgctccactattgaagaaacagactttggtaagtgtcgtatagtttttagtaagtgtcaaataatttttttctttctgcattcttagaaaaattcacataaaatttttgttttctctttagaattttagaaacagacttattttgacacatacttaattacatctacttttttatcttgaacaattaatttttcttttaaaaagttttatgagagttcatcatgggtacaatgataaaatttaacttttaaataaaactaactactaaaaaccttgctgttgagagttttcccttcagaggatcttgttaggtgttttatatttatttcaaggatgcggccatcactcagaacactgtggaaaccctcttttgggaag

SEQ ID NO: 12587 - DNA, 532 bp, Homo sapiens
  MAP TO CHR1.3; EXPRESSED IN FETAL LIVER, SIGNAL = 0.66; EXPRESSED IN ADULT LIVER, SIGNAL = 1.6; EXPRESSED IN LUNG, SIGNAL = 0.9; EXPRESSED IN HEART, SIGNAL = 1.8; EXPRESSED IN PLACENTA, SIGNAL = 1.1; NT HIT: gi14725935, EVALUE 1.00e-54; EST_HUMAN HIT: AW178029.1, EVALUE 0.00e+00; SWISSPROT HIT: P32469, EVALUE 6.00e-09
ttccaataagggggaaaacctagcataaaaaaattagtgttaaaaaattcagtctatgtatatactaagcagcctagtatcaaatagtagtatgttttatgattcataaaatacaattaaatgtattttcaatttgtggaaaaataaaacatttttatttaattccactgaaaaacctcctttgttgcattacctgtaaaccacagcagcctacagcattcattatggaggcattgtgaataactctataaggaattcccagctttgttgctcttagaacaagatcactgtgtgttgtggccctgtagtgagaaaagattagattggattaaagcaaacaacacttttaagacagtaaagctatatttcctgagttcatgtcaattaaagaggcaggagcactgcctttcttcaaattcttccacacacctgcataaggctttcatctgagctttttagcaagaaaatgcaagactaaacatgcccttcaaaatgctgagttgctactgtaacactcctaaagcagccttgg

SEQ ID NO: 12588 - DNA, 512 bp, Homo sapiens
  MAP TO CHR3.3; EXPRESSED IN FETAL LIVER, SIGNAL = 3.4; EXPRESSED IN ADULT LIVER, SIGNAL = 4.4; EXPRESSED IN BRAIN, SIGNAL =   4; EXPRESSED IN HEART, SIGNAL = 3.1; EXPRESSED IN PLACENTA, SIGNAL = 6.3; SWISSPROT HIT: Q05655, EVALUE 3.00e-33; NT HIT: gi15297768, EVALUE 1.00e-103; EST_HUMAN HIT: BF857291.1, EVALUE 1.00e-103
tcaccatgtcaggctgattctatgcacaggactcagacaggagttcctgggaacatggtgagagagcaataccccgtatgttaggactgcagcaccactgaggctgccattccagagacaggaagctcctcacccaaagcccagtgtctgccagcccctgccccagcccagcccagaccagcccagcccagcccagggcctccaccttctccaggatgtccttggactccttggtgatccagcggggataatgtggcgtgtccacacggatggactcgaagagttcatcctcatcatcaccatggaagggggactggccaatgagcatctcgtacagaaggaccccgaaagaccaccagtccacagagaatgtgtacttcaggccctgtaggatctggcggtggggagagcagcaggtcagcaggagctgaggtgctgaggctgagaggggcccctgggcacgaagcctagccaggccgcctcagcctatgggctttggcttggacatcact

SEQ ID NO: 12589 - DNA, 555 bp, Homo sapiens
  MAP TO CHR16.3; EXPRESSED IN HEART, SIGNAL = 6.7; EXPRESSED IN FETAL LIVER, SIGNAL = 3.6; EXPRESSED IN BRAIN, SIGNAL = 7.7; EXPRESSED IN ADULT LIVER, SIGNAL = 4.9; EXPRESSED IN LUNG, SIGNAL =   6; EXPRESSED IN PLACENTA, SIGNAL = 3.8; SWISSPROT HIT: O75324, EVALUE 7.00e-32; NT HIT: gi15315836, EVALUE 0.00e+00; EST_HUMAN HIT: BG719930.1, EVALUE 0.00e+00
tttttgtcagggtgagggtgggatgggcaggtctgagaacgattaaaaatagaccccgtggaagtgctaaccgcagctcgtcaacctgctttgtctttcaggactcccgtgtccagcctgagttccagcctcactgagtggccacccccaaagtgctgccagccgaggaagcccccagcactgaccatgtctattatggaccacagccccaccacgggcgtggtcacagtcatcgtcatcctcattgccatcgcggccctgggggccttgatcctgggctgctggtgctacctgcggctgcagcgcatcagccagtcagaggacgaggagagcatcgtgggggatggggagaccaaggaacccttcctgctggtgcagtattcggccaagggaccgtgcgtggagagaaaggccaagctgatgactcccaacggcccggaagtccacggctgagccaggatgcaaggctcctggtcctgtttgcagccggccaagaggcgctgggaggggcaaaaccatacggatgcgctgctgtctgagaggaagggctgacac

SEQ ID NO: 12590 - DNA, 600 bp, Homo sapiens
  MAP TO CHR5.3; EXPRESSED IN FETAL LIVER, SIGNAL = 1.1; EXPRESSED IN ADULT LIVER, SIGNAL = 1.1; EXPRESSED IN HEART, SIGNAL = 0.73; EXPRESSED IN PLACENTA, SIGNAL = 0.82; NT HIT: L37742.1, EVALUE 0.00e+00; EST_HUMAN HIT: H91779.1, EVALUE 0.00e+00; SWISSPROT HIT: P20700, EVALUE 1.00e-32
aggctttgtaagggagccagacttgacttttaccaaaaccacatcttaacatttttttggctaagtacagaaaaattatatgtatatttacagaacttacatttgtggaatatgtcttttattcttttatcagccaaaactatcctgaggtctgtgttttgtatttgaggaattttgggttttaatttcttaaaatctcttgaattctagtgagttagagattccatagggttgtactgttttccagtctaggaaatgatttaaaatagctgcctggtgctaatgttggaatgttcctagaaagtaaatatgtttccttgcatcttaagtctagagcatgtttggaaaggattcaagaattagaggacttgcttgctaaagaaaaagacaactctcgtcgcatgctgacagacaaagagagagagatggcggaaataagggatcaaatgcagcaacagctgaatgactatgaacagcttcttgatgtaaagttagccctggacatggaaatcagtgcttacaggaaactcttagaaggcgaagaagagaggtaaggaacttaagggtcaccctaccttatggtccactttttgcctctca

SEQ ID NO: 12591 - DNA, 545 bp, Homo sapiens
  MAP TO CHR17.3; EXPRESSED IN LUNG, SIGNAL = 1.2; EXPRESSED IN PLACENTA, SIGNAL = 0.81; EXPRESSED IN HEART, SIGNAL = 1.3; EXPRESSED IN FETAL LIVER, SIGNAL = 1.1; EXPRESSED IN ADULT LIVER, SIGNAL = 1.1; NT HIT: M33320.1, EVALUE 0.00e+00; EST_HUMAN HIT: BI003498.1, EVALUE 1.00e-113; SWISSPROT HIT: P08514, EVALUE 1.00e-35
cactggaggaacaggagagcaagggtcgaggagatttggccctagccccaatatacccctggtccagtcccatgtaaccactcatctggcccacaggaggcatgatctgctggtgggcgctccactgtatatggagagccgggcagaccgaaaactggccgaagtggggcgtgtgtatttgttcctgcagccgcgaggcccccacgcgctgggtgcccccagcctcctgctgactggcacacagctctatgggcgattcggctctgccatcgcacccctgggcgacctcgaccgggatggctacaatggtgagggaagagaggagccctacttgctgcagaggggttaacagccactcaaaaagcatggagttggcctgagggcagccagaaccaggatgggttttaagcatataagtatgtggcttagacacatggggtgctgagtggagagcagatgggagagttgaagactaattaggaagtgtttgccttaatccaagcaagagacaatgaccacctggatgtggattttggcagtggagt

SEQ ID NO: 12592 - DNA, 587 bp, Homo sapiens
  MAP TO CHR2.3; EXPRESSED IN ADULT LIVER, SIGNAL = 1.1; EXPRESSED IN PLACENTA, SIGNAL = 4.3; NT HIT: AF227166.1, EVALUE 0.00e+00; EST_HUMAN HIT: AW960985.1, EVALUE 2.00e-94; SWISSPROT HIT: P22448, EVALUE 1.50e+00
tccacccattacctggagagagaaagctatgtagatggcaacagagccagtgactgtgcccaggcctaggaaggtgccggattcactgcaacaaacaataaagagctcattgtcctggaggcttgtgcagcaaccctcataccccaataccggtccgtagggacccaggcaggactcctttccaagctccctcagggaccccctacctagccaaggcagcaatgtctcacacctgacatcgaggcaggagacgacttcatggccacaggacttggtccgaaggggcaagaagttggagccatcccaggctgtgaggtagcagggagggggctggcgcaggcgcttgtggggaatttgcactgtgaagagtcgcaggccagcaggctggtctggaacctgcccaaacctgggggccggatgaggggctattcagctcctagggcctgcccaaccctcctcagaggtttgtgcaccacctgcaccctggtcagacctggggtaacactcaacaagttcctccccagctctcccatccccagtcttttccctctcccccaccacagctgggctatgcctctttcagccac

SEQ ID NO: 12593 - DNA, 505 bp, Homo sapiens
  MAP TO CHR19.3; EXPRESSED IN FETAL LIVER, SIGNAL = 2.5; EXPRESSED IN ADULT LIVER, SIGNAL = 1.8; EXPRESSED IN BRAIN, SIGNAL = 1.5; EXPRESSED IN PLACENTA, SIGNAL = 1.5; EXPRESSED IN HEART, SIGNAL = 1.7; NT HIT: X93093.1, EVALUE 0.00e+00; EST_HUMAN HIT: BF868352.1, EVALUE 0.00e+00; SWISSPROT HIT: Q14773, EVALUE 5.00e-55
gtgggggaagggtagttgacagtcgctctatagggagcgcccgcggacctcactcagaggctcccccttgccttagaaccgccccacagcgtgattttggagcctccggtcttaaagggcaggaaatacactttgcgctgccacgtgacgcaggtgttcccggtgggctacttggtggtgaccctgaggcatggaagccgggtcatctattccgaaagcctggagcgcttcaccggcctggatctggccaacgtgaccttgacctacgagtttgctgctggaccccgcgacttctggcagcccgtgatctgccacgcgcgcctcaatctcgacggcctggtggtccgcaacagctcggcacccattacactgatgctcggtgaggcacccctgtaaccctggggactaggaggaagggggcagagagagttatgaccccgagagggcgcacagaccaagcgtgagctccacgcgggtcgacagacctccctgtgttccgttccta

SEQ ID NO: 12594 - DNA, 585 bp, Homo sapiens
  MAP TO CHR17.3; EXPRESSED IN PLACENTA, SIGNAL = 2.4; EXPRESSED IN FETAL LIVER, SIGNAL = 1.5; EXPRESSED IN ADULT LIVER, SIGNAL = 1.2; EST_HUMAN HIT: BG760357.1, EVALUE 0.00e+00; NT HIT: gi14772631, EVALUE 0.00e+00; SWISSPROT HIT: Q92932, EVALUE 8.50e-01
gagccttcctgtgacctgagctgccccctgcccatccagggagcaggcggggatccccctgcggaaggacacaagtgaacccagaatggtgcctcaaggcaggcagcctggcccagatggtgcccccactccccagacccaactctaaccaggcctggccctctcctgtgtcttgcagaacttcagcgagagggaagcatcgagactctgagtaacagctcaggctccaccagcggcagcataccaagaaactttgatggctaccgatctccgctgcccaccaatgagagccagcccctcagcctcttcccgactggcttcccgtaggtaccagcaacctgcttctgactggccagccccctcccctgctggaggaggggagaagccccgctctggtcctacccttcagtctctgctcttccttcatcaaccaccttccccaagcttagtgacagcagccgcccatcctacctggatggagaagagacccttctccaagcacctcagcgcacttgccctctgccacacctgtcggtggaggctgtggccaggagagactgtagaagctcggtccctgtgtatgtt

SEQ ID NO: 12595 - DNA, 511 bp, Homo sapiens
  MAP TO CHR17.3; EXPRESSED IN LUNG, SIGNAL =  19; EXPRESSED IN PLACENTA, SIGNAL = 2.3; SWISSPROT HIT: P23131, EVALUE 2.00e-17; NT HIT: gi15309255, EVALUE 3.00e-67; EST_HUMAN HIT: BI759863.1, EVALUE 2.00e-72
  unsure 94
  unsure 156
  unsure 157
  unsure 158
  unsure 162
  unsure 163
  unsure 164
  unsure 165
  unsure 170
  unsure 171
  unsure 187
  unsure 342
  unsure 353
gtgacaagatgatggtcccccctccaacacaatatgagcaaaaacttaagatacttatctcacactgcctctcaatggaaaacaaacttgaggnccttgaaaactgatccattttccaataaaggaaagcgtccccccactactcatcagtattannnaggnnnntgggnnctcagtgtttactcancccttttttctgagctctggtttgcctttcttgactgtggccatcaccatgtcacccacaccagcagcgggaagtctgttcagccgtcccttgatccccttcacggagatgatatacaggtttttggctcctacaaaagaatgtaaataaaaatnaaaaaatgttngagggccatcaggccgttccatcagtataacatttcccaaacacttccaaagcccctccctccactcactgcccaagcagttagtccgcaagaacgccttgtcacaccaccgattgaagcaaacaacacatgttgccacttcacccaaaagcgatgtt

SEQ ID NO: 12596 - DNA, 590 bp, Homo sapiens
  MAP TO CHR2.3; EXPRESSED IN LUNG, SIGNAL = 2.1; EXPRESSED IN HEART, SIGNAL = 1.4; EXPRESSED IN FETAL LIVER, SIGNAL =   2; EXPRESSED IN ADULT LIVER, SIGNAL = 2.2; EXPRESSED IN PLACENTA, SIGNAL = 1.6; EST_HUMAN HIT: BE777961.1, EVALUE 1.00e-126; NT HIT: gi13699869, EVALUE 1.00e-127; SWISSPROT HIT: P13995, EVALUE 2.00e-23
ctgtgctttctgctttggacaaattatacttaaaattaaattaagaaaatgctataggcaggtattgaggtaatgcttattattgttatacttacaactcccacacagttaacctactagatatttctttaatagatttctttataggttacttagatgtataaatattccttgaacaactctgtatgtgcatgttattttactagtgtgttcacaaaaccttgaatgatgtagatgtgatttttgagttttatgcttatgtatgttactttttccttgcatgcttgtttaataatatattaaagtacacacatgtcctttgccataactaaagcagcctgcctgtcttgtttctatgtaggagtcagacaaaaagctgggtatatcactccagttcctggaggtgttggccccatgacagtggcaatgctaatgaagaataccattattgctgcaaaaaaggtgctgaggcttgaagagcgagaagtgctgaagtctaaagagcttggggtagccactaattaactactgtgtcttctgtgtcacaaacagcactccaggccagctcaagaagcaaagcaggccaatag

SEQ ID NO: 12597 - DNA, 584 bp, Homo sapiens
  MAP TO CHR5.3; EXPRESSED IN PLACENTA, SIGNAL =  10; EXPRESSED IN HEART, SIGNAL = 5.1; SWISSPROT HIT: P09486, EVALUE 8.00e-25; EST_HUMAN HIT: AW889519.1, EVALUE 2.00e-78; NT HIT: M25745.1, EVALUE 2.00e-87
gtgctaacgcttgaggaagggaaagagagagggacagttggatggacagagaaggatcaggaagacgcccaagagacaggagtcaaataggcagagagagcagagacaggcagagaggacagacaacagacagaccaagagagcggagagtggggggatgacaacccagcaccctgggagcagtgtttctgcccatgccccttgcttctttgttcagacactcactctgcttgatgccgaagcagccggcccactcatccagggcgatgtacttgtcattgtccaggtcacaggtctcgaaaaagcgggtggtgcaatgctccatggggatgaggggagcacgcagtggagccagctcggtgtgggagaggtacctgcagggaaggaggcaggggagggcctgaggcatggaaaagctccacacccagccttgggaggcaaccggggagttagcctgccccagagcatggaggaaaggatatttaaagcaggacaaaaagccagaatcccaggtctacccctagctctgccactgactgctctgagactcagagaacagcagtgcaccattcggaacctcagtt

SEQ ID NO: 12598 - DNA, 509 bp, Homo sapiens
  MAP TO CHR3.3; EXPRESSED IN LUNG, SIGNAL = 5.2; EXPRESSED IN HEART, SIGNAL = 4.3; EXPRESSED IN PLACENTA, SIGNAL = 3.2; EXPRESSED IN FETAL LIVER, SIGNAL = 4.3; EXPRESSED IN BRAIN, SIGNAL = 3.4; SWISSPROT HIT: Q10005, EVALUE 2.00e-12; NT HIT: gi16161066, EVALUE 2.00e-74; EST_HUMAN HIT: BE165750.1, EVALUE 2.00e-97
cccgtctctacttctccagctttagaatttgagtcatttaagtatgtgtttgcttcattcctgtttgggggctgatttgtactcttcaaagagttttgtcagctttagatctctgagggatagattgccagagaaggggaagtttcagtccaggcatatgtgcagagccttgatcaattgaggaaaggaaaggctgttttacacaagagagaagctgatgttgtttatgcacttcctaggtagttagaaacaaacctgtggcaaggcaggctcctggcaaacggaagtgcaattgtcggcaagagatgcggaccacccagctgggccctgggcgcttccaaatgacccaggaggtggtctgcgacgaatgccctaatgtcaagtaagtgaaagcaccttctttgttctaccaagaaacacttgttaatttcgttcatctagtcaaacactaatggtccatactagatctttctctgtcccctccccactgccatgttctgcaaaaggat

SEQ ID NO: 12599 - DNA, 531 bp, Homo sapiens
  MAP TO CHR21.3; EXPRESSED IN LUNG, SIGNAL = 1.4; EXPRESSED IN HEART, SIGNAL = 1.5; EXPRESSED IN PLACENTA, SIGNAL = 1.3; EXPRESSED IN FETAL LIVER, SIGNAL = 1.7; EXPRESSED IN ADULT LIVER, SIGNAL = 1.2; EXPRESSED IN BRAIN, SIGNAL = 1.4; NT HIT: gi13646642, EVALUE 0.00e+00; EST_HUMAN HIT: AL043017.2, EVALUE 0.00e+00; SWISSPROT HIT: Q13112, EVALUE 9.00e-65
tttcttccacggacggttactgctcatttgtgacatttgagaaagatgaacttggaattcctttgaaagagaagccagttttgaacatgagaactcctgatacagcaaagaaaaccaagagtcagacacatcgagggtcttcgccaggacccagaccggtagagggaacccctgccagcagaacccaagaccccagcagccccggcacgactccccctcaggccagacaggccccagccccaacagtcatcagggaccctccctccatcactcctgctgtcaaaagccccttgccggggccttcggaggagaagaccctgcagcccagtagtcaaaacacaaaagcccacccatcccggagggtcactctgaacacactgcaagcctggagcaagacaacaccccggtaagaacttgttggaacaagatgtcattgcaaaatgaaacacaaaatgcagacagaacgctcccaccctgctgcaggtgaaatttcaggcggtgaatgcttcatgccagtaggttgccagagag

SEQ ID NO: 12600 - DNA, 580 bp, Homo sapiens
  MAP TO CHR1.3; EXPRESSED IN ADULT LIVER, SIGNAL = 0.67; EXPRESSED IN LUNG, SIGNAL = 0.43; EXPRESSED IN PLACENTA, SIGNAL = 0.5; EXPRESSED IN HEART, SIGNAL = 1.3; NT HIT: gi13632632, EVALUE 2.00e-77; EST_HUMAN HIT: BF926083.1, EVALUE 2.00e-97; SWISSPROT HIT: P39877, EVALUE 3.00e-11
ttttccaggggatgaaactgaggctctgactccattcaataccatactttgaattagtggcagagccaggatttgaacccaggtctgctcatttttcaattccaaactcttaaccagttctccatactgcttgcacctcccttcccactaatggagagaataaaaaagagacatgcaggtccctccaagccctgggtgggagaaagggtaggagatgttgggcagtgggcctaaagcagggctgggctgcctgggtgtcacctggggacatgggctatcttccaggtgtgcctgctgtgcaaggaggcttgctggacctaaaatcaatgatcgagaaggtgacagggaagaacgccctgacaaactacggcttctacggctgttactgcggctggggcggccgaggaacccccaaggatggcaccgattggtgagctgatcgctataactgccctttaggctccaggctctgcacccatgttttcttattcaattccatatcagttctggaagatgagtattaaagtaccattttacaaataagaaaactaagcctcaaagaaattagctggcaatccca

SEQ ID NO: 12601 - DNA, 590 bp, Homo sapiens
  MAP TO CHR17.3; EXPRESSED IN PLACENTA, SIGNAL = 0.94; EXPRESSED IN FETAL LIVER, SIGNAL = 0.95; EXPRESSED IN BRAIN, SIGNAL = 0.87; EXPRESSED IN LUNG, SIGNAL = 1.7; NT HIT: AF227759.1, EVALUE 7.00e-87; EST_HUMAN HIT: AI150703.1, EVALUE 1.00e-119; SWISSPROT HIT: P06394, EVALUE 3.00e-11
tcatatcttgaactcggtgcctgctgcatattggtttaagatattaatttgtattttggcagttgagtatgtattatatttaatatttagtattcatgataataaatgcatgcagccaaattatgtccgctttccagtggaaagtgggatctaagttgcaagcagatttcagtatattacgccatctatgcagattattttacctacccatcatctcctcctataaggagacagtaggtctcaatttctttttccaggtggagcttgatgtccaggagctgctcatactccagcttctggccctcggtctcggttctgacctggtgcagctgctcctccagggccccgatctgagcctggatctgcgccagctgcgcacagtagttgctctcggtctctgtcaaggagcactccagggagtgtttctgtcaggaagcaataaagagaacttgaaatggatatgcagatatgcagggatttctttgatacatgattttctcctgctgttaactttacatataattgtttcagatttcacatggacacatagttaagactctgtgatactgcttgaaaatgagcaaatcctt

SEQ ID NO: 12602 - DNA, 503 bp, Homo sapiens
  MAP TO CHR17.3; EXPRESSED IN HEART, SIGNAL = 0.98; EXPRESSED IN PLACENTA, SIGNAL = 1.3; EXPRESSED IN LUNG, SIGNAL = 1.3; EXPRESSED IN BRAIN, SIGNAL = 1.1; EXPRESSED IN FETAL LIVER, SIGNAL = 1.8; NT HIT: gi16164705, EVALUE 1.00e-100; EST_HUMAN HIT: AI133586.1, EVALUE 1.00e-100; SWISSPROT HIT: P23342, EVALUE 3.00e-04
atgtcgtatagcactggggcgatgcaggtgctccctgctctgggtgtcctgggtcccaagcagccagcccaagacccccctctggatgaggcctttgccctgcaggctttagtcttgacttttccagcagggcagtgaaatatatgcggctggccttgtcaatacaggacaggtctagattctgcactcttttctgccccaggcaaaaggctttctgtccaccagggtgaaccacatacagaactaattcacctttccctgctcctgccctttcaggatgcaattcgacagctaggaggcatagtgcgtgacggagagaaggtggtggagataaacccagggctactggtcacggtgaaaaccacctccaggagctaccaagctaagagcttggtcatcacagcaggtccttggaccaaccagctcctccgtcccctgggcattgagatgcctctccaggtaagaggagctggaagcccgagagttggtgctcaagagaagcc

SEQ ID NO: 12603 - DNA, 566 bp, Homo sapiens
  MAP TO CHR17.3; EXPRESSED IN FETAL LIVER, SIGNAL = 1.1; EXPRESSED IN BRAIN, SIGNAL = 0.96; EXPRESSED IN ADULT LIVER, SIGNAL =   1; EXPRESSED IN PLACENTA, SIGNAL = 1.1; EXPRESSED IN HEART, SIGNAL = 1.1; NT HIT: gi7661657, EVALUE 3.00e-98; EST_HUMAN HIT: AW247018.1, EVALUE 0.00e+00; SWISSPROT HIT: O32848, EVALUE 1.60e-01
gctcctgctttttccacttgtaccaaggacagtgccatccggcccacttcccttatctggccttctgctgccgcttcgggcatttgcgctggtggtccctgtgcagctgggccgctcctcatccctggctgacttacccccgccccctggcagcactgcctccaggacccacctttgcccagccctgaggtggcgcctgtgatcaccaccacagcattccgcaggtaggccttcccgcgcacccactgcagcagccggaagaggccgaagacgcccaggcagccgaacagcaggggcaggatggctgtggaggtgatgaagtccatggccttcaccttcggcagactcttcctggaagaaccaaaaccaaacacaccagtgacaaagtagcagagttcaggggactttcctaggctcttcctctcatctgatatgaatcccagatctccctctgtggactccagctctaagccctagcaagcattgacccaggccctgcaccctcggccgactgttcagcattgtagaactttcttcctctcagtactgacatgagcggacagaaa

SEQ ID NO: 12604 - DNA, 507 bp, Homo sapiens
  MAP TO CHR2.3; EXPRESSED IN LUNG, SIGNAL = 1.2; EXPRESSED IN HEART, SIGNAL = 1.1; EXPRESSED IN PLACENTA, SIGNAL = 0.76; EXPRESSED IN BRAIN, SIGNAL = 1.3; NT HIT: L15533.1, EVALUE 0.00e+00; EST_HUMAN HIT: AI200793.1, EVALUE 3.00e-80; SWISSPROT HIT: Q06141, EVALUE 3.00e-20
agatgcttcatggccttccctttccccccaaatattccccagaatctgagctccagtgctccctgaagtacttcctgggcaggcacaggggacagggagtgggcctgggcaacaatagcaccttgagaggtaacagagaggggaggatatactggcacctgtgtggggtcatggagcccaatccagacgtatgagtagctgttaccaatgctcttcaccagggaggacacgaaggatccctcagccccactgagcacagacaccaggtttccagagggccgcttctggcaggccagctttgagggcaacaaagagaatgagagggagcctgagacctgctgagggagggcagggcaaaggtaggtgggaggaggactgtgtgaaagataaacgtgttcatcctcattcccaaggaactctcctgaatggagaccctcctccccctgagaccggtcacctccaacaccacatctaaccactcacatctgcatctgtccaggattttgg

SEQ ID NO: 12605 - DNA, 565 bp, Homo sapiens
  MAP TO CHR5.3; EXPRESSED IN BRAIN, SIGNAL = 1.2; EXPRESSED IN LUNG, SIGNAL = 0.58; EXPRESSED IN HEART, SIGNAL = 0.51; EXPRESSED IN PLACENTA, SIGNAL = 0.58; SWISSPROT HIT: Q9Y5I3, EVALUE 7.00e-61; NT HIT: gi14861872, EVALUE 0.00e+00; EST_HUMAN HIT: BF089693.1, EVALUE 0.00e+00
gtatctctggtggagagcggccaggcgccaaaggcgtcttcgcgggcgtcggtgggtgtcgcgggcccagaggcggcgctggtggatgtcaacgtgtacctgatcatcgccatctgcgcggtgtccagcctgctggtgctcacactgctgctgtacacggcgctgcggtgctcagtgccgcccactgagggtgcgtatgtgccgggcaagcccactctggtgtgctccagcgcgttggggagctggtcgaactcacagcagaggcggcagagggtgtgctctagcgagggcccacccaagaccgacctcatggccttcagcccaggcctatctccaagtcttaacacgtcagaaagaaatgaacaaccagaagcaaatttggatctttctggtaatgtaagtccaactttcgagttttggctttaaatatttttcatatttaacttgtctaatcatcttttcaaatatcactttaaaaaatgtcttcaaggtgttcactaacgttgaaataaatcataccattgaatgtagatatcctattaatggcagttttgtcttgaatgga

SEQ ID NO: 12606 - DNA, 523 bp, Homo sapiens
  MAP TO CHR19.3; EXPRESSED IN PLACENTA, SIGNAL = 0.99; EXPRESSED IN LUNG, SIGNAL = 2.3; EXPRESSED IN BRAIN, SIGNAL =   1; NT HIT: gi4503780, EVALUE 0.00e+00; EST_HUMAN HIT: BI912536.1, EVALUE 0.00e+00; SWISSPROT HIT: P79242, EVALUE 1.00e-75
tgctggctacactgttctgcggatcctcccattggtggtgcttggggtcacctttgtcctcggggtcctgggcaatgggcttgtgatctgggtggctggattccggatgacacgcacagtcaccaccatctgttacctgaacctggccctggctgacttttctttcacggccacattaccattcctcattgtctccatggccatgggagaaaaatggccttttggctggttcctgtgtaagttaattcacatcgtggtggacatcaacctctttggaagtgtcttcttgattggtttcattgcactggaccgctgcatttgtgtcctgcatccagtctgggcccagaaccaccgcactgtgagtctggccatgaaggtgatcgtcggaccttggattcttgctctagtccttaccttgccagttttcctctttttgactacagtaactattccaaatggggacacatactgtactttcaactttgcatcctggggtggcacccctgaggagaggctgaaggtg

SEQ ID NO: 12607 - DNA, 578 bp, Homo sapiens
  MAP TO CHR19.3; EXPRESSED IN PLACENTA, SIGNAL = 1.1; EXPRESSED IN LUNG, SIGNAL = 1.3; EXPRESSED IN ADULT LIVER, SIGNAL = 0.98; NT HIT: gi14767182, EVALUE 0.00e+00; EST_HUMAN HIT: AW245753.1, EVALUE 0.00e+00; SWISSPROT HIT: P51693, EVALUE 2.00e-28
attttggaattggaaaggggaaataagaatttccagccgtctcacaaaagggtgtgaaatgatcacttcaagactccctgctgccctaggctgggagttggggttctggggctccaggaagaggggaggtctgggctcggctgaaggggtgaagggggccgggtcagggtcgttcctccaggaagcggtaagtggggttctcatagccgtgccgctgcagttcgcggagctgctgctcctccagggtcagcatggggtccacctgcaacgagcaggggagggaaaggacagtgtggtgcgggggcgggactgcccgcaagtctctcaggccgcccacacccgggctcaggaactcttcccacacctccaccacgccatggttctcacctccaccacgccatggctgatagccccgtagggcttcttcctgcgcaggagcagcatggagaggacgatgagggagcctccgcccgctcccatgatcagcagacccgacacagcctcacgggacacccctgtcccagctggtgcctgcagggagaggagatggggcagagggcttctttgagggtcctgtg

SEQ ID NO: 12608 - DNA, 522 bp, Homo sapiens
  MAP TO CHR1.3; EXPRESSED IN PLACENTA, SIGNAL =  58; EXPRESSED IN FETAL LIVER, SIGNAL =  79; NT HIT: gi14730911, EVALUE 0.00e+00; EST_HUMAN HIT: BG685781.1, EVALUE 0.00e+00; SWISSPROT HIT: P25444, EVALUE 2.00e-93
tgcccattaagggatctgagatcattgactttttcctgggggcctctctcaaggatgaggttttgaagattatgccagtgcagaagcagacccgtgccggccagcgcaccagtttcaaggcgtttgttgctatcggagactacaatggccatgtcggtctgggtgttaagtgctccaaggaggtggccaccgccatccgtggggccatcatcctggccaagctctccattgtccccgtgcgcagaggctactgggggaacaagatcagcaagccccacaccgtcccttgcaaggtgacaggccgctgcggctctgtgctggtgcgtctcatccctgcacccaggagcactggcatcgtctccacacctgtgcccaagaagctgctcatgatggctggtatcgatgactgctacacctcagcccggggctgcactgccaccctgggcagctttgccaagggcacctttgatgccatctctaagacctacagctacctgacccccgacctctggaaggagactg

SEQ ID NO: 12609 - DNA, 575 bp, Homo sapiens
  MAP TO CHR5.3; EXPRESSED IN ADULT LIVER, SIGNAL =   1; EXPRESSED IN LUNG, SIGNAL = 1.9; EXPRESSED IN PLACENTA, SIGNAL = 0.9; NT HIT: M18737.1, EVALUE 0.00e+00; EST_HUMAN HIT: BI763335.1, EVALUE 0.00e+00; SWISSPROT HIT: P12544, EVALUE 4.00e-50
ttggggctcactcaataaccagggaagagccaacaaaacagataatgcttgttaagaaagagtttccctatccatgctatgacccagccacacgcgaaggtgaccttaaacttttacaggtacgtatctttgattgtcttctcaaaagtcatagaaccttctacaatctggccgccgacgtgaaaacctttccttggtgcccctgttgtaaaaactcacaataaagaggatcctgaaattttggactataatttaaaatgtaaatatttatcttatcccattaacactttatgtttttcttccaacagctgacggaaaaagcaaaaattaacaaatatgtgactatccttcatctacctaaaaagggggatgatgtgaaaccaggaaccatgtgccaagttgcagggtggggcaggactcacaatagtgcatcttggtccgatactctgagagaagtcaatatcaccatcatagacagaaaagtctgcaatgatcgaaatcactataattttaaccctgtgattggaatgaatatggtttgtgctggaagcctccgaggtggaagagactcgtgc

SEQ ID NO: 12610 - DNA, 520 bp, Homo sapiens
  MAP TO CHR3.3; EXPRESSED IN LUNG, SIGNAL = 1.1; EXPRESSED IN PLACENTA, SIGNAL = 0.6; EXPRESSED IN FETAL LIVER, SIGNAL = 0.58; EXPRESSED IN BRAIN, SIGNAL = 0.41; EXPRESSED IN ADULT LIVER, SIGNAL = 0.67; NT HIT: S69002.1, EVALUE 1.00e-119; EST_HUMAN HIT: BG427944.1, EVALUE 1.00e-103; SWISSPROT HIT: Q03112, EVALUE 2.00e-39
tgtcacgagtgcatttgtccagctcactggagttccaaattttccatctgcacaaagcctcaaaattcagcataacattgcagaaaaaatacacaagttgtatggtacaacatgccatttctaacctttgcaaatcaggaaaaacttggtcacattccttacactcctggatcgtgtgtatctcttggagatcattctcgctttcgagtttttgctgaaagtcctcttcaaccattgaaaatgctgagtgaggagtactgcatggaaacttttggtgatctgctagttcagccttagattcaaagagctggtcacagtcttcgcagcgatattgccgttcttctgtgaaaacaattcaggtgttaggattgggtggtcaggaattgccatcacaaaccagccaatcttaccaaattttacaagacataataggtattatttgattgtcatttctatcttgtcaattttaatctggattagaaatatcatatgtaaagaaccaaggacagagactggaaca

SEQ ID NO: 12611 - DNA, 591 bp, Homo sapiens
  MAP TO CHR10.3; EXPRESSED IN PLACENTA, SIGNAL = 0.98; EXPRESSED IN BRAIN, SIGNAL = 0.72; EXPRESSED IN ADULT LIVER, SIGNAL =   1; EXPRESSED IN LUNG, SIGNAL = 9.4; NT HIT: AJ243211.1, EVALUE 0.00e+00; EST_HUMAN HIT: BG954398.1, EVALUE 0.00e+00; SWISSPROT HIT: P30205, EVALUE 9.00e-39
taggacgtgccttgagtgtggaacattccttagattcttgacctcatgatagggatggatgaagggttcttgttttcccctgtaggatctgaatccagtttggccctgaggctggtgaatggaggtgacaggtgtcagggccgagtggaggtcctataccgaggctcctggggcaccgtgtgtgatgacagctgggacaccaatgatgccaatgtggtctgcaggcagctgggctgtggctgggccatgttggccccaggaaatgcccggtttggtcagggctcaggacccattgtcctggatgacgtgcgctgctcagggaatgagtcctacttgtggagctgcccccacaatggctggctctcccataactgtggccatagtgaagacgctggtgtcatctgctcaggtgggcctccaagacttttggtttcctctcttggggtagattttgctcaggaaggttttattatgttctaatctcctcacttagagctttttcaacttttcctatatttctgatacctccttagctctctcctaggaaaccgcatgagtcttcaccacattgccaggttttgaggaggtcag

SEQ ID NO: 12612 - DNA, 579 bp, Homo sapiens
  MAP TO CHR4.3; EXPRESSED IN FETAL LIVER, SIGNAL =  11; EXPRESSED IN LUNG, SIGNAL =  14; EXPRESSED IN PLACENTA, SIGNAL = 3.2; EST_HUMAN HIT: AA598669.1, EVALUE 0.00e+00; NT HIT: X87373.1, EVALUE 0.00e+00; SWISSPROT HIT: O73813, EVALUE 1.00e-30
ttccagtcatcaaaccatgctatccttggtcaaacacccatagcacaaccactctaaggaactttgggtctcacctgccattttttgaccatggaacacattttgtcacgggtaagatccatgccatggaagttagtcaggcagtttttaccctgaacatcttcagtaatcagcttgaattttctaaatgcaacttcatcattctgcaaatcagcaagactcacttcaaacacacgacccttgagaccatcagatgcaatttctacaaaagaaaaaaacaagtatcttaacatttaggaaccatataagcaaagtcaagcctgtaaactgagggtagaaattaagttaatggtaaattataaagaccttaacctttgttatcaaatctatccagacaccagtgacttatcaacagtacttatttgaagctcagaactacccatggcacattttcttaattcaaaaagcaccatcttgcttctctccaagtgctgtactaaaaatgatcaccacaggtgccaaggctgcaaccaagagctgacatttccttaaagtctcccaccacaggaccaacaacag

SEQ ID NO: 12613 - DNA, 514 bp, Homo sapiens
  MAP TO CHR19.3; EXPRESSED IN PLACENTA, SIGNAL = 2.8; EXPRESSED IN ADULT LIVER, SIGNAL = 1.6; EXPRESSED IN FETAL LIVER, SIGNAL = 2.4; EXPRESSED IN BRAIN, SIGNAL = 5.4; EST_HUMAN HIT: AA318256.1, EVALUE 1.00e-130; NT HIT: gi16163040, EVALUE 3.00e-82; SWISSPROT HIT: P49147, EVALUE 2.00e-06
ctttcagtccccagaagcagctgatcctctttcttcctgggcaccacaggtggcatccgggacaagataatgagcagccggaagcacctccacctggtggatgctggtttagccatcaacactcccttcccactcgtgctgcccccgacgcgggaggttcacctcatcctctccttcgacttcagtgccggagatcctttcgaggtaatcgagaagggctttggggccggtcctgggtgggaggtgggctgcggcgaagctgactttgcggaggaactgaggacgcgggctgggaagcgggcaatggggaggtgctggctgggaagtccagagagccaaatcaactcacccatcgctcccgaagcacccgcggtcggccacatccaacgaacttctgatccaaagccatcccagaccttcccgggcccctcttcctggcagatgactctccccgcttctgcgtcctgcctgcccattcataccagtttgaactgcaacagcctagctcctcacc

SEQ ID NO: 12614 - DNA, 595 bp, Homo sapiens
  MAP TO CHR3.3; EXPRESSED IN HEART, SIGNAL = 1.2; EXPRESSED IN PLACENTA, SIGNAL = 1.2; NT HIT: gi14736627, EVALUE 0.00e+00; SWISSPROT HIT: P32246, EVALUE 3.00e-85; EST_HUMAN HIT: AL552677.1, EVALUE 0.00e+00
aatcaaacggacagctttggatttcttctcatttggtcgtcttagcagaatctttataatccctgtgtagcagatgatcatgaccaacaaaggcaataccagcccaaagaggttcagtttcagagcctgaaacagcttccactctcgtaggctttcgtgaggaaagtgaaggctgcaggtgtggtgagtgaattcccattgggtcttggaaaagtataagcctggcatggaagccaagatggccagggcccaaatgatgatgctggtgatgacaccaaaagtgacggtccgtgcccgcaaggcaaacacggcgtggacgatggccaggtacctgtcaatcgtcagcaggatgatgaaaaagatctcgctgtacaagcctgtgtaataaaacccagagaggatcttacacatggcatcaccaaaaacccagtcatccttcaacttgtagtcgatccagaagggaagcgtgaacaggaagagcaggtcagaaatggccaggttcaggaggtagatgctggtcatgttttttagcctcttgtattgcacaaggaccaggaccaccaggatgtttccaaccaggccaatgacaaatacc

SEQ ID NO: 12615 - DNA, 576 bp, Homo sapiens
  MAP TO CHR6.3; EXPRESSED IN LUNG, SIGNAL = 1.3; EXPRESSED IN FETAL LIVER, SIGNAL = 4.1; EXPRESSED IN ADULT LIVER, SIGNAL = 1.2; EXPRESSED IN BRAIN, SIGNAL = 1.3; EXPRESSED IN PLACENTA, SIGNAL = 0.92; EST_HUMAN HIT: BG700434.1, EVALUE 0.00e+00; NT HIT: gi13644823, EVALUE 0.00e+00; SWISSPROT HIT: P02304, EVALUE 2.00e-40
catgcgagattaagcacgagtaattaaacgttacctgcaaatctacacatgtgcacagtaactacttctcagcaaaaatctggaacaaagcaggataacaagatgtctgctcttttatgaaaaaagtgggcggccctgaaaagggcctttggttgaaaatgaaaataagagtgcagcaagcaggagccttagccaccgaagccgtaaagagtgcgtccctgtcgcttcagcgcgtagaccacatccattgctgtcacggtcttgcgtttggcgtgctctgtgtaagtgacagcgtcacgaatcacgttctccaggaacaccttcagaacaccacgagtctcctcatagataaggccagaaattcgcttgacaccgccgcgacgagcaaggcgccggatagctggcttagtgatgccctggatgttatcgcgcaaaaccttgcgatgacgcttagctcctcccttacccaaaccttttccacctttaccacggccagacatgactaagcaacttctaaaaccaacttaagaaacctaaacgccaaggcaaagcaacgcccttatatgccgggaattc

SEQ ID NO: 12616 - DNA, 600 bp, Homo sapiens
  MAP TO CHR12.3; EXPRESSED IN PLACENTA, SIGNAL = 1.6; EXPRESSED IN BRAIN, SIGNAL = 1.3; EST_HUMAN HIT: BE247142.1, EVALUE 1.00e-118; NT HIT: gi14767623, EVALUE 1.00e-118; SWISSPROT HIT: Q9UQQ2, EVALUE 3.00e-67
gtacgctggaacccagactcagcccaggacataaggtagccccctgcgaccaccatcacccatcttatctaacaggtgcttctcctggggggctgctggacccggcctgccagaagacggaccatttcctgtcctgctacccctggttccacggccccatctccagagtgaaagcagctcagctggttcagctgcagggccctgatgctcatggagtgttcctggtgcggcagagcgagacgcggcgtggggaatacgtgctcactttcaactttcaggggatagccaaggtatggggtggggtggggtggggtggggcaggcaggaccgtgccacccctctccactggagttcagggtcctagagggacagcccgagcccaccatcctctcctcccacagcacctgcgcctgtcgctgacagagcggggccagtgccgtgtgcagcacctccactttccctcggtcgtggacatgctccaccacttccagcgctcgcccatcccactcgagtgcggcgccgcctgtgatgtccggctctccagctacgtggtagtcgtctcccaaccaccaggtctgaccctactgccctttgctgaag

SEQ ID NO: 12617 - DNA, 538 bp, Homo sapiens
  MAP TO CHR17.3; EXPRESSED IN PLACENTA, SIGNAL = 1.1; EXPRESSED IN HEART, SIGNAL = 1.3; EXPRESSED IN ADULT LIVER, SIGNAL = 1.5; EXPRESSED IN BRAIN, SIGNAL = 0.94; EST_HUMAN HIT: AL563518.1, EVALUE 1.20e-02; NT HIT: gi6007850, EVALUE 1.00e-125; SWISSPROT HIT: P38570, EVALUE 3.00e-39
ggtataggccagggaaggagacaggtaccgccacaacctcccctgaacctgaaggggccgaggtgaagccctggtctggaacctccccccaacctgaaggggctgaggtgaggccctggtctggaagctccccctagcctgggggacttctttctttcactgggcattcccaacccccgagacctgcccagcacttaggactgaagccgacttggggcttgggtcatcatatctgagagaggtcagagccccagaggagaggaaggagagggccccatgggtcacctgcgaggggctggcggagaggccgtcccagtgtccattgtagatatacacactgccgaagctggcaccatcatctgccccaaaaccttccaggggggccccgatggccacatctgtgagcttatcctgactgagatcccccatagccgccatggcaaagccaaagcgggcattggtgaacccggggtgcccactcagtatgcgtgccaaggagaaagaaccatcctgtaaagcaaacaaacagctcagccct

SEQ ID NO: 12618 - DNA, 519 bp, Homo sapiens
  MAP TO CHR17.3; EXPRESSED IN FETAL LIVER, SIGNAL = 1.7; EXPRESSED IN ADULT LIVER, SIGNAL = 1.8; EXPRESSED IN LUNG, SIGNAL = 2.4; EXPRESSED IN HEART, SIGNAL = 2.2; EXPRESSED IN PLACENTA, SIGNAL = 2.2; NT HIT: gi13632792, EVALUE 1.00e-118; SWISSPROT HIT: Q15027, EVALUE 3.00e-53; EST_HUMAN HIT: AL047399.1, EVALUE 0.00e+00
cctcctacctaggtcctgcctcctccaggctgactcagagcgcctcctgcagctgtgggtcagtgctgtgcagagcagcattgcttctgccttcagtcaggctcgccttgatgacagcccccggggtccaggccaggtaccttaacctgggggtgcggagccaggctgcctgtggagatggggcaccctttaccctaggccccttggccaccctttcttcccctctctcccccagggctcaggacacctggccataggctctgctgccaccctgggctctggtggaatggccaggggaagggagcctgggggagtcgggcacgtggtggcccaggtccagagtgtggatggcaatgcccagtgctgcgactgccgggagccagccccggagtgggccagcatcaaccttggtgtcaccctctgcattcagtgttccggcatccacaggttactccacaaggcccatgcgggagccccactccttcgggccacagtgcggctccaatacagagcgcatca

SEQ ID NO: 12619 - DNA, 527 bp, Homo sapiens
  MAP TO CHR1.3; EXPRESSED IN PLACENTA, SIGNAL = 0.85; EXPRESSED IN FETAL LIVER, SIGNAL = 0.71; EXPRESSED IN BRAIN, SIGNAL = 1.3; SWISSPROT HIT: Q01780, EVALUE 1.00e-21; EST_HUMAN HIT: BE934235.1, EVALUE 8.00e-78; NT HIT: gi15297713, EVALUE 5.00e-78
attcctcccaacttgactggtctaggttgaaataatgaaatagtacactgaaaagcactaaaaatcttgtatgagctcacatgcatgagttacaaaaggctggctgaccttaacgatggctgggtctgtgaggctctcattgagaatgtacatgtcacttcgaagctcgagggtgtcaatgatgaagtcttccgtccgagtagaaatttgcatcaggcaggtcagtcccaggaagctcctgtaagagtggtgctaaaccccacagaaggaggggagaagaggaaaaacaaagattatattagactttcctttactgattttgaaaagtcagctacaaagctaagttatatgattaattttttaccaaaaaaaattacaattagtattaattttatacttctccaacaggtgaactcacagaaaaatgtaaaaattttacccagggtcatttataagatacctccaagtcaactgcaaattcctgacaattcaagagcttttcgttgagttccacgagttcatccagg

SEQ ID NO: 12620 - DNA, 501 bp, Homo sapiens
  MAP TO CHR12.3; EXPRESSED IN PLACENTA, SIGNAL = 1.4; EXPRESSED IN LUNG, SIGNAL = 1.1; EXPRESSED IN BRAIN, SIGNAL = 2.1; NT HIT: U48363.1, EVALUE 5.00e-10; SWISSPROT HIT: Q02817, EVALUE 4.00e-05; EST_HUMAN HIT: BI006334.1, EVALUE 0.00e+00
ttgaatagaggccatgggagtcacacagtggtaaggaacagtactgactatacatggagggctgggggtgccttttggattagggactacctcagagggaactttattaagattagtctttggttctgagggagcaatgggagctgacagagttatcactgaccctgactcagctacagccactgaaggaggtgaagtaagaaggttaggtggaaaagcagaactcttctgaactgagtggggagccagggcaaccagagctaagggagctgaagaggaaggggtccctttcagagttggagctatcatgggagaggctagagctaaggcagctggggagatgggaggccctattaggtttggtaggaaggttggggcttcaggggcagttcccaaaggtagggctgttccagaggatgactggggaaaaggaacttctaaaggggtcgaggcaatagtagagggggaagggaatggggaagcctggttagcagctgagag

SEQ ID NO: 12621 - DNA, 549 bp, Homo sapiens
  MAP TO CHR4.3; EXPRESSED IN ADULT LIVER, SIGNAL = 0.57; EXPRESSED IN BRAIN, SIGNAL = 0.57; EXPRESSED IN HEART, SIGNAL = 0.51; EXPRESSED IN PLACENTA, SIGNAL = 0.57; EST_HUMAN HIT: BF749403.1, EVALUE 1.00e-123; NT HIT: gi5174508, EVALUE 1.00e-123; SWISSPROT HIT: Q15797, EVALUE 2.00e-40
ttgctgtgcttccttagctggtgttttggttatctgatagtaattggagaaaattgttctccaattttctccaattaggagaataaggagagtgtcatattaagaagtacctgctttaaacatcatagaaaaactgtatacattataatagcaattgcttttccagtgtcttcattccatgatcctgagccaattcaacaacacggtttcagtttttgagagcctgaggcactaaccttggttgatataacattttctttcctctagatgttcaggcggttgcttatgaggaaccaaaacactggtgctctattgtctactatgagctcaacaatcgtgtgggtgaagcgttccatgcctcctccacaagtgtgttggtggatggtttcactgatccttccaacaataagaaccgtttctgccttgggctgctctccaatgttaaccggaattccactattgaaaacaccaggcggcatattggaaaaggtgagtttttgctttaacctctttcagatgtttatctgttgtgtccctgttcctccagag

SEQ ID NO: 12622 - DNA, 570 bp, Homo sapiens
  MAP TO CHR22.3; EXPRESSED IN LUNG, SIGNAL = 7.8; EXPRESSED IN PLACENTA, SIGNAL = 3.8; EXPRESSED IN HEART, SIGNAL = 4.9; EXPRESSED IN ADULT LIVER, SIGNAL = 4.9; EXPRESSED IN BRAIN, SIGNAL = 7.5; EST_HUMAN HIT: BF923923.1, EVALUE 1.00e-122; NT HIT: gi4506086, EVALUE 7.00e-56; SWISSPROT HIT: P46196, EVALUE 4.00e-16
atgccctctgtgctccatactggtgcagctgtcccctttatacatgcgtttaccccgcccctacctgttgcaggtggcctggaggaagtcttctgagatagacagagttacggggggagggatttcaagctgtgccccacagcactcgtcctcaaggcaaaggtgggcttgttggaagaaccgggtatggcagcaggtatatctcaggaaaatctaagcaagatatggttggtccactgctggctgatctatgtccctgaagcagcagccaggaacatgagctcttacctcgtcactcgggtcgtaatactgctccagatatgggtgggccagagcctgttctacttcaatcctcttgtgtgggttgaatgtcaacattttgtccaataagtccagagctataaagagaaaggttttgcagtagtgagagcagaagtagtcacagaaatacttcaatttcctgtttaagtaacttacccacaaaacaactgagctaagcatgactacagagagagcagccagcacaaagggtgctgactatatctccaagcctcccgagactgtgaacat

SEQ ID NO: 12623 - DNA, 596 bp, Homo sapiens
  MAP TO CHR4.3; EXPRESSED IN ADULT LIVER, SIGNAL = 0.51; EXPRESSED IN PLACENTA, SIGNAL = 0.57; EXPRESSED IN BRAIN, SIGNAL = 0.47; NT HIT: AB008826.1, EVALUE 2.00e-84; EST_HUMAN HIT: AV731003.1, EVALUE 0.00e+00; SWISSPROT HIT: O60760, EVALUE 2.00e-20
caaacaaacaaacaatgtcgcatgtttatttcagctcatattgtctgctaaagctttatactggtttacctttatattctctttctgtaagttttgtgttttcacctctaataggaaatttgcttgatcacacagcatttatttagtctgaactgctgcttttcaatttaaagctacatgagcttcgaaaaccttgatttttttttcatttccctgaggaaaaacaaaaggttctgaaagcatatttttcctacatttattatttttgctacttacttgatttgatttcaggccagtcagcttgttctattctgtggtcttcatactgtatgtccaaataagcaaatatgtaacgaataatttctgctctccccctcatattaaaataagtgagtttgtagtttggcatggtgcaattctggaaaaagaaaaagggagggattattttaagagccctctagagatgcctcaatatttttcttcagaattttttggaaaactttatggcatctcttgagattactggagacattagaggatatttcaaaaccaaaattataaatcactatctaattacatacggggaaacttggttg

SEQ ID NO: 12624 - DNA, 503 bp, Homo sapiens
  MAP TO CHR2.3; EXPRESSED IN HEART, SIGNAL = 7.5; EXPRESSED IN LUNG, SIGNAL = 5.9; EXPRESSED IN PLACENTA, SIGNAL = 5.1; EXPRESSED IN BRAIN, SIGNAL = 6.5; EXPRESSED IN FETAL LIVER, SIGNAL = 6.1; EXPRESSED IN ADULT LIVER, SIGNAL = 5.8; NT HIT: gi14729317, EVALUE 0.00e+00; EST_HUMAN HIT: AL580043.1, EVALUE 0.00e+00; SWISSPROT HIT: P97772, EVALUE 9.20e-01
tagcacagccacataggcacagagacacacaggccacagcaccaagaacacacacacacacacacacacacacacacacacacacacagacaaaaccacagggctaagacacacggacaaagtgcgggctttggggcccctgcatagacagagcgagggccatgtggggagggggcccctactgacctcccccaggcataggcacaccaacagcacatagacaggcagatgcccccagccagccagcctgccacacagacaaatggactgcagggaaaggatgttcgtggctccacatgaaccatggggagatggcaccacaggccttcaacacaccctgccacactgaggcctgggagtccccgcccctgaactagtcacatctattcccctgactcccaccccactccccgccacactttggtcttgcccactggggctggggctggggctgaggctggggaaactggcaggtggtaggagggagagaggaaggggtatgg

SEQ ID NO: 12625 - DNA, 591 bp, Homo sapiens
  MAP TO CHR11.3; EXPRESSED IN FETAL LIVER, SIGNAL =  13; EXPRESSED IN ADULT LIVER, SIGNAL =   2; EXPRESSED IN BRAIN, SIGNAL = 1.3; EXPRESSED IN PLACENTA, SIGNAL = 1.6; EXPRESSED IN LUNG, SIGNAL = 1.8; EXPRESSED IN HEART, SIGNAL = 2.2; EST_HUMAN HIT: BF528298.1, EVALUE 0.00e+00; NT HIT: M95623.1, EVALUE 0.00e+00; SWISSPROT HIT: P08397, EVALUE 1.00e-20
acccacagttggtaggcatcactgctcgtaacattccacgagggccccagttggctgcccagaacttgggcatcagcctggccaacttgttgctgagcaaaggagccaaaaacatcctggatgttgcacggcagcttaacgatgcccattaactggtttgtggggcacagatgcctgggttgctgctgtccagtgcctacatcccgggcctcagtgccccattctcactgctatctggggagtgattaccccgggagactgaactgcagggttcaagccttccagggatttgcctcaccttggggccttgatgactgccttgcctcctcagtatgtgggggcttcatctctttagagaagtccaagcaacagcctttgaatgtaaccaatcctactaataaaccagttctgaaggtgttgtgtgtgcgcgtgtggagttggcgggaagataggaacaaacacaaagccctttcatccttacctcagaggctgggacttttgcccagagttctcctggtacgtcctttctgcttctgcctcaatagttttcatttcacacagaataaattgtctcccaggaacaccaagaaa

SEQ ID NO: 12626 - DNA, 574 bp, Homo sapiens
  MAP TO CHR4.3; EXPRESSED IN PLACENTA, SIGNAL = 0.47; EXPRESSED IN ADULT LIVER, SIGNAL = 0.58; EXPRESSED IN BRAIN, SIGNAL = 0.81; EST_HUMAN HIT: AL538200.1, EVALUE 5.00e-73; NT HIT: gi4504022, EVALUE 9.00e-74; SWISSPROT HIT: P48168, EVALUE 7.00e-23
acgttcagaaagcttgcatcacttatttattagctttttattgatgaccattaaaaactaattctgacatagagaaataagttattgtatatgatgccctaggattttaaatctgtgccgtatgcttattatttaaacttgttctttctttaagatgaatatctttaactcttgtactagtacttccattagtgaccatgggttttacctctttacattttaaactacaatttcatataagaaggtcttattttctttcctttgctatgtttaagatttgaattatgaaaatatttaaaaagcattattaattatattttaaactaacatttatttgtttttgtttatagttggttacacaactgatgatttacgatttatctggcagtcaggagatcctgtgcaattagaaaaaattgccttgcctcaatttgatatcaaaaaggaagatattgaatatggtaactgtacaaaatactataaaggcacgggtaagtaatattctttaaataaaacgaagttctatttcaaagatacattttaattaatacatagccaaggggagagtagaaaa

SEQ ID NO: 12627 - DNA, 533 bp, Homo sapiens
  MAP TO CHR17.3; EXPRESSED IN LUNG, SIGNAL = 0.99; EXPRESSED IN HEART, SIGNAL =  29; EXPRESSED IN PLACENTA, SIGNAL = 1.6; EXPRESSED IN FETAL LIVER, SIGNAL = 7.9; EXPRESSED IN ADULT LIVER, SIGNAL = 1.4; EXPRESSED IN BRAIN, SIGNAL = 1.2; EST_HUMAN HIT: W07530.1, EVALUE 4.00e-98; NT HIT: X58854.1, EVALUE 0.00e+00; SWISSPROT HIT: P12829, EVALUE 2.00e-28
taccttgcttggatgggaagctctgtgtcctctaggagcactaatgggtgtaccacccagaattggctgcagcccaagccctgggtgctgtcagacttggggtgaggccccctcttgaccctctgctcccttgagcacctgctcacattgatttctctttctttaccctgcctgcctgaagagatgaatgtcaagatgctggactttgagacgttcttgcccatcctgcagcacatttcccgcaacaaggagcagggcacctatgaggacttcgtggagggcctgcgtgtctttgacaaggagagcaatggcacggtcatgggtgctgagcttcggcacgtccttgccaccctgggtatgccagctgggcagagatgaagaccaagtgggaggaatggaggggtgggaggtgccaaggtgacatatgctggttgggtggggggtggtatacaagggtctttgcatcctgaggataatgacctgatccaggccctgtctccctgggctctgcaagaacaaccattcccagttgg

SEQ ID NO: 12628 - DNA, 560 bp, Homo sapiens
  MAP TO CHR12.3; EXPRESSED IN LUNG, SIGNAL =   5; EXPRESSED IN PLACENTA, SIGNAL = 3.4; EXPRESSED IN FETAL LIVER, SIGNAL = 3.7; EXPRESSED IN ADULT LIVER, SIGNAL = 3.1; EXPRESSED IN BRAIN, SIGNAL = 3.3; EST_HUMAN HIT: BE798165.1, EVALUE 3.00e-96; NT HIT: gi14758313, EVALUE 2.00e-96; SWISSPROT HIT: Q13438, EVALUE 6.00e-24
gagcagagtgatagggcagggggtgactttagcaagtaggcttaaggaagtactcctcctaccccacgcagaccctcaatcttgctttagcccttttctgagatcttctatcctaacctgctcctacgttcagcaaagtgtcatcagtggttgcaggattctttgcttctttcctgtccgtgtaatctgtctactcctccagtggtcttcttaaccactacaggtcccctagatcctgcctcattcagtggactccagttcttggatgaactgctagtttccaagccctcattctatctaacccagtccctttcaccttcagcaagcagggagcatctctcattgggctcaacaactcagggatcccaggcccttggtaagcaggtgtttcctcctccctttcacgctggaagtgaatagctccagctggcaggcgacactcatagcgctgtttgtacttagaggagacaatcaccacgtccgaagattggctctgggaaagaagggagggtcggggggcaaggaagcaaagaaaggctgggatcagggagaacaacgaa

SEQ ID NO: 12629 - DNA, 515 bp, Homo sapiens
  MAP TO CHR1.3; EXPRESSED IN PLACENTA, SIGNAL = 0.9; EXPRESSED IN LUNG, SIGNAL = 0.81; EXPRESSED IN ADULT LIVER, SIGNAL = 0.88; EXPRESSED IN BRAIN, SIGNAL = 0.66; SWISSPROT HIT: P26374, EVALUE 8.00e-96; EST_HUMAN HIT: AU139019.1, EVALUE 0.00e+00; NT HIT: gi11422912, EVALUE 0.00e+00
aataaaaagggggtgttgccaaaccgtccgagacactgaaggaagtttttagttgcgttaagaccatctattgtagtgcaagatgattctgatgtcattgcaattgagtgcagtacaaaatgttgaaggttgggagttagttttttagtttttaagtattctgaaaatgaacactgcctgaaagcttggtattcatcaggatgttgttcatactctaaacaaaatgtgagaaatttcattagcatcctcttttcaaccatggtgagttccttgctattaaagacatctgctctggaacaaggaacttgttctacctttccttcccgaaatgcaagaatcctagtgacatttttaaattctacataacgactaacatctgatttgattaaaagatcaattagcaatccttgagaatacagcagttttgacaccaaatcaatattaaacctcctgccttctttaactatttgagagtaagtaatcctatttctaattggttcatcggccttatcttc

SEQ ID NO: 12630 - DNA, 518 bp, Homo sapiens
  MAP TO CHR12.3; EXPRESSED IN LUNG, SIGNAL = 3.5; EXPRESSED IN HEART, SIGNAL = 3.8; EXPRESSED IN PLACENTA, SIGNAL = 3.5; EXPRESSED IN FETAL LIVER, SIGNAL = 4.7; EXPRESSED IN BRAIN, SIGNAL = 2.4; EXPRESSED IN ADULT LIVER, SIGNAL = 2.8; NT HIT: gi4885624, EVALUE 0.00e+00; SWISSPROT HIT: Q12815, EVALUE 2.00e-42; EST_HUMAN HIT: BG393134.1, EVALUE 0.00e+00
gtgactgggctgaggaagagggaaaagagatgggggatcaggaataggacagtgtgggtagactactgaacgcacatcttgatgtcacactggggtgctctctcccaccacagcgcatcggtatcctgcaacagctgttgagacaggaagtagaggggctggtagggggccagtgtgtccctcttaatggaggctcttctctggatatggttgaacttcagcccctgctgactgagatttctagaactctgaatgccacagagcataactctgggacttcccaccttcctggactgttaaaacactcagggctgccaaagccctgtcttccagaggagtgcggggaaccacagccctgccctccggcagagcctgggcccccagaggccttctgtaggagtgagcctgagataccagagccctccctccaggaacagcttgaagtaccagagccctaccctccagcagaacccaggcccctagagtcctgctgtaggagtgagcctgagataccggag

SEQ ID NO: 12631 - DNA, 571 bp, Homo sapiens
  MAP TO CHR6.3; EXPRESSED IN PLACENTA, SIGNAL = 0.7; EXPRESSED IN HEART, SIGNAL = 0.85; EXPRESSED IN BRAIN, SIGNAL = 0.44; EXPRESSED IN ADULT LIVER, SIGNAL = 0.71; SWISSPROT HIT: O75715, EVALUE 2.00e-19; EST_HUMAN HIT: BI547441.1, EVALUE 1.00e-11; NT HIT: gi11526405, EVALUE 7.00e-62
gatgcagagctgtttccctccctgggcctctgtttccttctctgtaaaatgggtaaccccagggaatcatccttgcacaaggcagaacctctacctagaccaaaattgttcctcctctaactgcagaactaaatgcactccaggaggagctgaagccctatggtctagttgtgttgggctttccctgcaaccaatttggaaagcaagaaccaggagataacaaagagattcttcctgggctcaagtacgtgtcttcttgaaatccaataggaggcgcctgtgtacctttcctcagtctccagaggcccttccagctcaggaactttctggggaggtatggattaataggctcaggggcattacaagcagagtttaactttggcctaccgtgatgagcgtctggcagtttccagactctctctccatccctggctgagacttggatggactatggaggacagaagggatggaggaaaagagacaagtcatgggatagagagaaataaagtgagtcagagagcccaaagtcaaaacatggccatattcctccccacccacaacgatacttccc

SEQ ID NO: 12632 - DNA, 588 bp, Homo sapiens
  MAP TO CHR14.3; EXPRESSED IN PLACENTA, SIGNAL = 0.98; EXPRESSED IN FETAL LIVER, SIGNAL = 0.57; EXPRESSED IN ADULT LIVER, SIGNAL = 0.95; EXPRESSED IN BRAIN, SIGNAL = 1.3; EST_HUMAN HIT: BE891013.1, EVALUE 4.00e-98; NT HIT: D84368.1, EVALUE 0.00e+00; SWISSPROT HIT: P54803, EVALUE 2.00e-32
tcagccagatccacattgagaacatcaatcttaccagttgtagtctcctataatactgattgtgttggatgcatcggcagcccacgtaatgggtctctggttgagaacttggcgtagcgtgaagtgatgctcgccagggtcttcaatatttgtaaaatattcaaatacaccagtttgatcagcaaagtttggagcttcactaaaaaatgggtaatctgttcagaatgtaagaaattctctgtttagtatcaaatccttcagaagctctccttgctgatattttatagtatgtctgaaacacttctgaaagcttttaaataaataaataaaatctaaaccaaagtttagggcctaggtctaataaagatacattaatttttgtatcatcattactaaatatcaagatgatgagttcgacatatagatgctgcataatatttaatccaggcatctggtgtagaggaaaggtcatgagttttgaagtaagacctagattcaaattcgagttcagtctgtcgccctggacaagctatttaactgccctgcatctaaagtttcttcatttccaggtttgcaggaggacaagag

SEQ ID NO: 12633 - DNA, 583 bp, Homo sapiens
  MAP TO CHR4.3; EXPRESSED IN FETAL LIVER, SIGNAL = 0.62; EXPRESSED IN ADULT LIVER, SIGNAL = 0.94; EXPRESSED IN PLACENTA, SIGNAL = 0.86; EXPRESSED IN HEART, SIGNAL = 0.71; SWISSPROT HIT: Q9Y4Y8, EVALUE 5.00e-16; EST_HUMAN HIT: BG720961.1, EVALUE 0.00e+00; NT HIT: gi5901997, EVALUE 3.00e-58
gcgtgactgccttcctagacttcattcagattggcatagagttgttttgtgcttaagctgttgagtttcatttatggtgtgaatttttatattaagcatctaagaactaatgaataaagagattgtctgctctaaggtataccctgtaattttcaactcttatttgccttgtgtatcttctttttgactaaatatgtctgcaggggtcctggcttgcctggatggctacatgaatatagccctggagcagacagaagaatatgtaaatggacaactgaagaataagtatggggatgcatttatccgaggaaacaatggtaacatttcttcgccctacagtacagcattcaaaataagcctttctatttataatccagatcaccaaagaggtttctagataatttaaaagtccacttttaggcttgattattttaaaatgcttatatgtcagatcttcagtttgaccagttattttgtagatgcttcatggaattttgaaaccaaaattctctccttcccttcctttagtgatgaggaactgagggacattgttctccttacctggaaccctgctttctcgaat

SEQ ID NO: 12634 - DNA, 581 bp, Homo sapiens
  MAP TO CHR10.3; EXPRESSED IN PLACENTA, SIGNAL = 0.66; EXPRESSED IN LUNG, SIGNAL = 0.49; EXPRESSED IN HEART, SIGNAL = 0.86; EXPRESSED IN ADULT LIVER, SIGNAL = 0.55; EXPRESSED IN BRAIN, SIGNAL = 0.68; EST_HUMAN HIT: BG875680.1, EVALUE 0.00e+00; NT HIT: Z66526.1, EVALUE 0.00e+00; SWISSPROT HIT: P50391, EVALUE 5.00e-97
  unsure 319
  unsure 323
  unsure 327
  unsure 328
  unsure 329
  unsure 332
  unsure 333
tacagaccaccttatccgccaggaactccagagccttggagtggttcttgtggaagacattctccaggatgctgttggccaggaagggcagggagaggacacaggcaatgacccagatgagcacaatccccaggtaggcctgtgagatgctgggcttccagcctgttgggttgatgatgagctgatgcctctccagggccacgaggacgagcgagaggatggagaccgtcaccgacatgcactggatgaaggccgacatcttgcagagggtctctccaaagatccagtagtccatgatggtgtagacggcggtcaccgnctgncaannnagnnacatgaggaagtcagagaaggccaggttggcgataagcaggttggtcacgttggctttctccttctgcctcacagtcacacacatcaggcagaggttacccaggacccccacgacagtctcaatgctgtaggaagtgacgatgaagaccatcacgtccacggaatcctggcaatgttcagagaagttgtatggggtgcccaggggtttgcttctgttttcaccttgtggagattttgggagcagcaag

SEQ ID NO: 12635 - DNA, 532 bp, Homo sapiens
  MAP TO CHR20.3; EXPRESSED IN BRAIN, SIGNAL = 1.3; EXPRESSED IN HEART, SIGNAL = 0.54; EXPRESSED IN PLACENTA, SIGNAL = 1.5; SWISSPROT HIT: O95793, EVALUE 9.00e-19; EST_HUMAN HIT: BF808023.1, EVALUE 0.00e+00; NT HIT: gi14786261, EVALUE 3.00e-64
cagggaaaaggaagggaaaggtgggctaaagctgatgagttctgatcaagagtgagaaatcgatccaatcagctatgacaaaaagtcttcaaaaatatgaacactatcaaacgattcattgctctcaaggtctatgggacaatctttctcccatcttcctcaggctagtaacaagctgaaccaaggcaggctccacataaacacacaacaccccaatccctcacccaaggtgtgacgtaccatatcatggcaggactccacatccttgccgataccatggctgatcagaggtggctgagaggagcaattgataagagatacaaattcgttcttgttgtttttggggaagtctttgtattcaacctaagggggaaaagagagctgaggctaggtagggaacagcaagtatgagtgggctggagggctgcagctccaggccccacaagcaagatcaccagctcttttttccaactcagccccactgtggccatactaacacctgccctgtcagcccagaaccttccaggaacct

SEQ ID NO: 12636 - DNA, 560 bp, Homo sapiens
  MAP TO CHR16.3; EXPRESSED IN LUNG, SIGNAL = 0.56; EXPRESSED IN PLACENTA, SIGNAL = 0.6; EXPRESSED IN HEART, SIGNAL = 0.66; EXPRESSED IN BRAIN, SIGNAL = 0.55; NT HIT: AF314194.1, EVALUE 0.00e+00; SWISSPROT HIT: O00253, EVALUE 2.00e-31; EST_HUMAN HIT: AI572835.1, EVALUE 1.00e-114
acggccacgtttgaaataaccacagccttgggggtggtcccatcctttattggagtttccttgccccttccctagccctgaccttgacgttggccaggtaaggtgcggcttgcagggattcatggcagtacccagcttgcggcagtagcagaaggcattgaagaagcggcagtagcacgtggcacatgggtcacagcaaggcacgtgctgtcccaggcaggactcatgcagccttacgcagcgacgtgaggagcggggctcgcggtcctgcaggtctagtacctgcaggggtggggaaccagcacaggcctctaaagacagatccagggatcttacctgtcccaacctgtgcaggatggcagtggagcatgggaaggggtggtcggtagtgtcgtcgctggtgagggagtttggagctggggagaggagctaatacccaatgccccctcccaagggccaccaccttacccttttccctgagcagttacctctgccaaggcctgagcctcctgcaacagatcctcttctgcctgttctgcagttgtcttcttcagtggggc

SEQ ID NO: 12637 - DNA, 523 bp, Homo sapiens
  MAP TO CHR19.3; EXPRESSED IN FETAL LIVER, SIGNAL = 0.59; EXPRESSED IN PLACENTA, SIGNAL = 0.48; EXPRESSED IN LUNG, SIGNAL = 0.47; EXPRESSED IN ADULT LIVER, SIGNAL = 8.6; EXPRESSED IN BRAIN, SIGNAL = 0.35; EST_HUMAN HIT: AV650260.1, EVALUE 2.00e-63; SWISSPROT HIT: P20853, EVALUE 2.00e-15; NT HIT: gi14572198, EVALUE 0.00e+00
tttgctggttgtgtccaaagctaggtggggttcacggagaggatgtagttgggaggtgaaatgaggtgattttataaccagccaaagtccacccctttttttcaggcagtataaaggcaaaccaccccagccgtcaccatctatcattccactgccaccatgctggcctcagggctgcttctggtggccttgctggccagcctgactgtgatggtcttgatgtcagtctggcagcagaggaagagcagggggaagctgcctttgggacccaccccattgctctttattggaaactacctgcagctgaacacagagcacatatgtgactccatcatgaaggtgtcccaaggcagggagatgggtggcacggggtgggggctgcccagttggctgaggctttgtggcaggggattgaccagtgtggaccagagtcttaggaaagggagttttggagtttcagcatcagggtcctaggctggaaagacaggatcttgggatgtccagctccctgactgtgagaacc

SEQ ID NO: 12638 - DNA, 535 bp, Homo sapiens
  MAP TO CHRX.3; EXPRESSED IN FETAL LIVER, SIGNAL = 0.62; EXPRESSED IN ADULT LIVER, SIGNAL = 1.6; EXPRESSED IN BRAIN, SIGNAL = 1.2; EXPRESSED IN LUNG, SIGNAL = 0.7; EXPRESSED IN HEART, SIGNAL = 1.5; EXPRESSED IN PLACENTA, SIGNAL = 1.2; EST_HUMAN HIT: BE302429.1, EVALUE 2.00e-75; SWISSPROT HIT: O95239, EVALUE 1.00e-19; NT HIT: AF179308.1, EVALUE 1.00e-75
tgaaatgattgctctgcctgctattttctcacctgaaaacacctctagtatatttctaaatggaatacctatgtttgtaaattccaatgggggtaaatgcaaggatgagaatttattacccgtatctcctggttcagtttggagacagtacgctctgtggattcctttagtttcagaagtttggactgctcattcagtttcttcttcagatcagcaatttgaccctccagctcctggagacgtttgcggcggcgctcactcaacctaaacacagatgctgtagaagtgaggactaccagcagcaaagcctgacttcaaaagacataatactagactcccagagttacaacactgacatatataaaataggtgactagtcacatagccatcttaaaaaaagaataccacccaaacaaccaaacctgtctcaataataggagcttaatacaaagagtaagacaacttttagtacacagcaatgcaactgcctcaatatacgccgccccttttgcatcaaaatggttctttgaaggca

SEQ ID NO: 12639 - DNA, 595 bp, Homo sapiens
  MAP TO CHR2.3; EXPRESSED IN FETAL LIVER, SIGNAL = 0.39; EXPRESSED IN BRAIN, SIGNAL = 2.6; EXPRESSED IN HEART, SIGNAL = 0.65; EXPRESSED IN PLACENTA, SIGNAL = 0.74; SWISSPROT HIT: Q14585, EVALUE 1.00e-123; NT HIT: gi12741684, EVALUE 0.00e+00; EST_HUMAN HIT: AW949650.1, EVALUE 0.00e+00
tttggatcagcccttactcgacatcaaagaattcatactggtgagaaaccttatgtatgtaaggaatgtgggaaggcttttaatagtggctcagatctcactcagcatcagagaattcacactggtgagaaaccctatgagtgtaaggagtgtgagaaagcctttagaagtggttcaaaacttattcagcatcaaagaatgcatactggagagaaaccttatgaatgtaaggaatgtgggaagacctttagtagtggttcagaccttactcaacatcacagaattcatactggtgagaaaccctatgaatgtaaggaatgtgggaaggcctttggtagtggctcaaaacttatccaacaccagctaatccatactggtgaaagaccctatgaatgtaaagaatgtggaaagtcctttagtagtggttcagctcttaatcggcaccagagaatacacactggtgagaaaccctatgaatgtaaggagtgtgggaaggctttttatagtggctcaagccttactcagcatcagagaattcatacaggtgagaaactttatgaatgtaagaactgtgggaaggcttatgggagggatt

SEQ ID NO: 12640 - DNA, 543 bp, Homo sapiens
  MAP TO CHR2.3; EXPRESSED IN PLACENTA, SIGNAL = 3.3; EXPRESSED IN HEART, SIGNAL = 1.8; EXPRESSED IN BRAIN, SIGNAL = 0.47; EST_HUMAN HIT: AW629592.1, EVALUE 0.00e+00; SWISSPROT HIT: P02461, EVALUE 7.00e-36; NT HIT: AY016295.1, EVALUE 0.00e+00
tgcagacacattagcagtcaacattatgaatgcctttacaggtaaacaaacaaaatcactttattactggattttataaccaattcccattcttttttgtgactattcaggagaatactgggttgaccctaaccaaggatgcaaattggatgctatcaaggtattctgtaatatggaaactggggaaacatgcataagtgccaatcctttgaatgttccacggaaacactggtggacagattctagtgctgagaagaaacacgtttggtttggagagtccatggatggtggttttcaggtaggaaaggatatacctttttttaaataagtcacctctatatcctttgtattcttcctatatgttcatcacaaagcaaagttactaggttggtacaaacataattgcagtttttgctactgaaagtgatggcatgcaataaaaatattttcacacataaaatactcgtacataaaatatataaacagcccatattacaatatgcatacacatactacatgaatccctcgcgtgcagttacaact

SEQ ID NO: 12641 - DNA, 600 bp, Homo sapiens
  MAP TO CHR22.3; EXPRESSED IN LUNG, SIGNAL = 0.54; EXPRESSED IN PLACENTA, SIGNAL = 0.75; EXPRESSED IN HEART, SIGNAL = 0.58; EXPRESSED IN BRAIN, SIGNAL = 0.74; EST_HUMAN HIT: AA024440.1, EVALUE 0.00e+00; SWISSPROT HIT: P36151, EVALUE 1.30e-01; NT HIT: gi15277336, EVALUE 1.00e-103
gagggagagaaggggatgtcataaaagggacaaaggagggagagcagagcctaccccacagcatagagcttccggatgggggcggcccagccccgcctctccgcctgtcgcctgatcaggtcctcggcatactggtaagtgaggatgctgggtttgcccatcaggccctcgtatctcagctccttgcccgtcactttctggtaaatggtttccaggcacagcagaaaggtgccatgtccaaacctgccagaaacgagcacgcagcagttcagtcttcctgatctccaggctcttctagagaacacgactgccactgtctaagcagcaaacacacagaccagccttttccccagggtaagagctgacatgtagcagacactgtgcaggcactggaggcagcatttcacatttccctctcagaaaaactctatgagatgacgctatttgtaaaacgaggaaaccaaggcacagcaagattaagtaacttgttcaagagggcagagctaggattacaactcagtctgactccagagcttaaatcctgctgtagagctgaggcagactacggttgcgcttctccccttctttgctggtgtccat

SEQ ID NO: 12642 - DNA, 505 bp, Homo sapiens
  MAP TO CHR19.3; EXPRESSED IN LUNG, SIGNAL = 0.86; EXPRESSED IN HEART, SIGNAL =   1; EXPRESSED IN PLACENTA, SIGNAL = 1.3; EXPRESSED IN FETAL LIVER, SIGNAL =   1; EXPRESSED IN BRAIN, SIGNAL = 1.5; SWISSPROT HIT: Q9QX66, EVALUE 5.00e-18; NT HIT: AF108133.1, EVALUE 8.00e-40; EST_HUMAN HIT: BI668246.1, EVALUE 0.00e+00
aacacaggggactggtgttcaccagggaaggctcaggcacaggctttaggcttaaggggcagaggtggacgtgccaggcggggcgggcagcagggcacgcggggggcgggcggcactcacgtcgttctcggaggttccgcacaggctgcaggatttgcactcgatgcactgccagcggtaggtccgcacggctgccgtcatgttcaccgtgaattgtaaacacgaggggtgtcctgggggccaaggggcaggggtgcagttaggaggtcaccgtgcccctggtgggcactgaccggcaggggagccatagctcagcccctacccctggctcatgacgccaggatgagctgccgggatccacagcctgaccccacacctgcccagcaaccacgtggccggcagcagtcccccggccaccacagtctcctaccacaaccaccatggcaaccacactctgctccccagaacgccatggcaaccgcattccattacccacagtgctgtg

SEQ ID NO: 12643 - DNA, 581 bp, Homo sapiens
  MAP TO CHR9.3; EXPRESSED IN LUNG, SIGNAL = 1.4; EXPRESSED IN HEART, SIGNAL = 0.87; EXPRESSED IN PLACENTA, SIGNAL = 1.2; EXPRESSED IN FETAL LIVER, SIGNAL = 3.2; EXPRESSED IN BRAIN, SIGNAL = 0.66; NT HIT: L07772.1, EVALUE 4.00e-82; SWISSPROT HIT: P07711, EVALUE 1.00e-16; EST_HUMAN HIT: AA329575.1, EVALUE 2.00e-63
cattgtcggcaacatactggaagcaaaataatggttctccaaaaatgcagccaacattgccttgaagcctagagcagtccaccaggtctgcacactcagtgaaactagtttctcagttttcctaacatctgtccttacagagccccagctgcactaaaagcataagaagatgcacacttaccatgataaaagaataaaaaagctgtcattcacaaagcaaatagcaaaactttgacaacagctcatctttctgaatactatgaactgcaagttgttctacactccactaaagcaaagaggtcgatcacctcttggctttcctggggagatgggaggtctgaatctgacactgtcttacctgatccttcacaggagtcacgtagcctttctctctccaatccacagatttgcggatgtcatgaagcagaggttcctggagcactttccccttcctgtgcttctggttttgaaagccattcaccacctgcctgaattcttcactggtcttcaaggaaaaggaaataaaatgttgaaaagcaagagattactttaataaagaaccgaggagaggaagcacagag

SEQ ID NO: 12644 - DNA, 598 bp, Homo sapiens
  MAP TO CHR12.3; EXPRESSED IN LUNG, SIGNAL = 1.7; EXPRESSED IN PLACENTA, SIGNAL = 1.2; EXPRESSED IN FETAL LIVER, SIGNAL = 1.9; EXPRESSED IN BRAIN, SIGNAL = 1.2; NT HIT: gi14767370, EVALUE 0.00e+00; SWISSPROT HIT: P29375, EVALUE 1.00e-84; EST_HUMAN HIT: AU140331.1, EVALUE 0.00e+00
gctgctttttggagttctgcactgatgatcttttcagttttttctcgagccgcctgttccaccatacgctggctcaacacagatagtttggccagggcagaggatagttcatctgtggctagagcctgccgcgctctatcttgccaactcatagcacgttctgtcaaacactgcagggcctctccttcaggcaaccgtacgggcaacttctgaagggataccaggagtgacagaatagtctctagcctgggccttcgagaccgcatacaaagagggcaaaggaattttacttctttagcttgccagctggatccttttttttgggaacttgatttaggaagaggaacacagctgttatggaaccagtctttgcagagctcacactgtagcataaacccactggctgtcttgcggcaaatgcaaaattttacttcttctatgcggtccaccattgtcatcttggctaggttggctgctctgagagaatgcatggcttcaatctctttttgctcccgttctttgaaaactgccacctgtacaagacaaacatttaattgaaaagagtcactgcaatataccccccaaaataccaaatcct

SEQ ID NO: 12645 - DNA, 512 bp, Homo sapiens
  MAP TO CHR18.3; EXPRESSED IN HEART, SIGNAL = 0.51; EXPRESSED IN PLACENTA, SIGNAL = 0.65; EXPRESSED IN LUNG, SIGNAL = 0.47; EST_HUMAN HIT: BE258122.1, EVALUE 1.80e-01; NT HIT: U90660.1, EVALUE 0.00e+00; SWISSPROT HIT: P47211, EVALUE 9.00e-54
caagttgcagcatcgcttactagctcattctgtttgtttctgtgtctggtccacttatatggaaactcaaccataaggatactctatcttttatcacacatgagtacaattggttgatggtggggtgtctattcgacttttactttctttagtatcactcaggtgtgaatctttgcgaatgtgacacttgaacacttgtttataggccttcctgaaattttcagagagaaatgcataaatgataggattcacggaggaattgctgtacgccaggcagtgggcggtgattctgaagaggaaggaagccggcgtcagcgggaaaactccaaactcagcccagagatggatgatgtggtgcggcagccaggagattccaaacaccacaaccaccaccagaactgtctgtgcagtctagaaaagaagaagaggaggaggaggaggaggaggaggaggcggtaagggagaagaagaaggaaggaaattcattgattacaacacaaaaggaatccagc

SEQ ID NO: 12646 - DNA, 516 bp, Homo sapiens
  MAP TO CHR19.3; EXPRESSED IN LUNG, SIGNAL = 1.8; EXPRESSED IN HEART, SIGNAL = 1.6; EXPRESSED IN PLACENTA, SIGNAL = 1.6; EXPRESSED IN FETAL LIVER, SIGNAL = 1.2; SWISSPROT HIT: O43765, EVALUE 7.00e-14; EST_HUMAN HIT: AW955322.1, EVALUE 2.00e-72; NT HIT: gi16177785, EVALUE 1.00e-72
catggggactccagttcttgtgtggcaggggtgttctcatgtctgtctccctcagtcctgcccctgggcccctcgaaagccaggtttgtctccactgagctgacagcgggcagggggtggcaccatccgaggtggtttgggggttgccaggaccgccggggacgagggctttggcggggcctcctggagctgggcagatgggaacagtccatccccggtgctctcctccagcctggcgctctccagcctcaacaagcacgtggaggccgtggcttactacaagaaggctctggagctggaccccgacaacgagacatacaagtccaacctcaagatagcggagctgaagctgcgggaggcccccagccccgtgagtgcagcgggggcgagtggctccagaacgccgagctgactgtgtgggtgggggacaggtcctcgggcgcaccagtggctctaggcttaacctgggtgtcgtgagggtccggggtttgtttcagttggtggtgagatgcacag

SEQ ID NO: 12647 - DNA, 593 bp, Homo sapiens
  MAP TO CHR1.3; EXPRESSED IN PLACENTA, SIGNAL = 0.75; EXPRESSED IN LUNG, SIGNAL = 0.74; EXPRESSED IN FETAL LIVER, SIGNAL = 0.79; NT HIT: gi4507712, EVALUE 0.00e+00; SWISSPROT HIT: Q99615, EVALUE 5.00e-35; EST_HUMAN HIT: BI759094.1, EVALUE 0.00e+00
aaggcccatttgtgataagctttcttggtctcgtcctcagaggcattattgtccactcccagaatcttgtagtaatctttcttcttactcttcttcagtttcagctgtgcattttttaggagctgtttgtgttcttttgttttctctgtctgatacactttttcataattgtgcactgcttcttcatactgtttggtgttcatgtaacactgagctcttctcaagcaggcttttaaataggtgtcattgagcttcactgtatttgtgcagtcttgtattgcattatctagtttcctaagcttagaattaaccataacccaattatagtagagtttagcttagtttttatattgttggggtttatccccaggggtcatgtgtacagttcgtatgctagcttgtaatttccttccttaaatgctttatttctgtcttctttctttgctttgagtgctttgggatttctgcaagcaacgcaggccctctcatggagccatcctaagagcctatacaaaaactgaaatgacttgtcaatacaatcttcataataaaggcaaagaccttatacatacagaggatctgcattggtggac

SEQ ID NO: 12648 - DNA, 593 bp, Homo sapiens
  MAP TO CHR4.3; EXPRESSED IN ADULT LIVER, SIGNAL = 0.64; EXPRESSED IN HEART, SIGNAL = 0.89; EXPRESSED IN PLACENTA, SIGNAL = 0.83; EST_HUMAN HIT: AW341495.1, EVALUE 1.00e-67; NT HIT: AF195956.1, EVALUE 2.00e-34
aaaaccaattttaccattacctggtaatatcttatattcaggaagtattcaacaaacttttgctaaggataaccattttaaaatgaccacattaatgtcttaaattttattcctatgataactttattcctttaaggacttaccttagctgcatgatatgtaccagcttcaagtaattcttttttagcttctttggcaagcaggttaaaccgacttaacattgcagccttacaaagccgacttgccattgacataccacttttaaatggggaactaagcagagagaaataaaattttttaaatttctttttcagtaatttatgttggcaattgtatagattaaaatcaatatggatctacaaaatatttcttgattatttgcaatatacatagtaattttttttttacataagaggcattcttaatatttactttctgaagtaaatttcttaaattacattttaaattatttagtattgcatcaaaaattaatgtagaagattgaccttggaacatttctattgtatgaagcaaaattaacctatgatgatacaaattaaacagcagttctatgagggattcactggaaatgg

SEQ ID NO: 12649 - DNA, 598 bp, Homo sapiens
  MAP TO CHR4.3; EXPRESSED IN PLACENTA, SIGNAL = 0.6; EXPRESSED IN ADULT LIVER, SIGNAL = 1.1; EXPRESSED IN BRAIN, SIGNAL = 0.8; EST_HUMAN HIT: AL046789.1, EVALUE 1.00e-24; NT HIT: gi10938004, EVALUE 8.00e-25
gggttgtttgttccatgtgtctgtgtgtatatgtgttcatgaaaacacatatctagatgttcttggatgaatgtgatttaagcactgttgcacagtctggcacataacaggtactcaaaacatgatatgttaagttttctaaacaggtaatatctactgagaagatacatttttacaactaaactaaaagttaacaatttgctcactgctcagaaaacttttttcaaaatcatattttttctcaaaaaatttaaaaaaataagtatattaaatctaaaatgtgaaacatgaacatttacctgtaccacaagtgtttttctttcttcaactaaggaatcatctttttctttttccttctttctgttttgggattttttagataaagaaacatttctggcatctttctgtacttttaactgtagttcttgggaaaacctacataaaaatataataaaataaaattgtaagacatggataaacctacaaaaaaattgactttcaagatatttattttttaaaaattgaatgttaaactagtctatgttattaaaaatgagaaaaatcctggcctagatcagcagtttggaaagggtggtgt

SEQ ID NO: 12650 - DNA, 599 bp, Homo sapiens
  MAP TO CHR12.3; EXPRESSED IN LUNG, SIGNAL = 0.9; EXPRESSED IN PLACENTA, SIGNAL = 0.88; EXPRESSED IN HEART, SIGNAL = 0.82; EXPRESSED IN ADULT LIVER, SIGNAL = 0.55; EST_HUMAN HIT: AA121882.1, EVALUE 0.00e+00; SWISSPROT HIT: P31908, EVALUE 3.40e+00; NT HIT: gi15306621, EVALUE 1.00e-106
cggaaggaaggggagagtctattcaactaatcatttgcatcacatgcacccaaggaaaaaatgtttacctggtggagccacggttaaccttttttccttgctgagccggtgcccttggatgaattcactcatggaaggggggcccttcagaagaaatgattctgtggaggtgggatcagggggaactcttaataaattctgtaggtaggaagcccctgaagtcctgggacggctctgatcacaaagggaaggtgaaaattgtcttgcaggagatccaagaaaaatacatataggaaacaaaaaagttttactttaattaccttttaacgcctcaccagtgacaacattatttatactggcatttaattttttaaatatgtaaatcaatctttttgctttttttttttttagtttccacatcaggatacaaccctatttggaaactgttctggatactggaaaaaagatttattacagttagtcagcttgaaccgcaaatagaaaatatattatttgagtctttaatgaaagctcctaaaataaaaatgttaccattaaccgaaaatacagggtaagtaactcaacagccaggactcaca

SEQ ID NO: 12651 - DNA, 516 bp, Homo sapiens
  MAP TO CHR12.3; EXPRESSED IN PLACENTA, SIGNAL = 0.86; EXPRESSED IN LUNG, SIGNAL = 0.92; EST_HUMAN HIT: BE762929.1, EVALUE 3.00e-49; SWISSPROT HIT: Q14161, EVALUE 1.00e-12; NT HIT: gi16163903, EVALUE 2.00e-49
atcaatttgggggttgtgtgtgtatatatgtataaaggatattaaattttaatcaatcaaaacatttagaatagttttcctgggaaaaatgaaacatgacatcagccattccccaactactattcctttccaaactgagccacttgcctgatttcgtgttgatgagtactcaggattgaccggaagaaaggggacgaccgttgtctcggttaccagggcgctgtggttttgcgtggcaagccagactagtcagaggaaagagccagagacaaacctcatcacgcctgtgtgccactgctcctgggaggcacagctcacgcactacgaggggaaacacactctgaagccaacacacgcaaaggcaaacgtcgacactcgcaccatcaggacagcagaaattggactagtaaaacactgagcctggcagcttttcactgcccactgataacagaagcttattagataaagccacgtcaagtcacctgcatccgtctctcgcctgtcaacttcatcgta

SEQ ID NO: 12652 - DNA, 599 bp, Homo sapiens
  MAP TO CHRX.3; EXPRESSED IN FETAL LIVER, SIGNAL = 1.1; EXPRESSED IN BRAIN, SIGNAL = 1.5; EXPRESSED IN PLACENTA, SIGNAL = 1.2; EXPRESSED IN LUNG, SIGNAL = 1.3; EST_HUMAN HIT: AV752564.1, EVALUE 1.00e-126; SWISSPROT HIT: P46100, EVALUE 1.00e-28; NT HIT: U97088.1, EVALUE 0.00e+00
tttgagaagtggcaagagggattaaaagatgatgagaagcttgaggtaacttattttaaatgttttctattattaaaatagtcacatgaaattcatatagtaaactatttttaattttttttaatttttaatgttttttaaccagtgatgcatatttcagtgggaatatttaatattcacatgtttttagtagctacttaaaaaaatctttatttccccacaaaaggtttctgaattagcaactgtgaaacgtcctcaggagagaagctacatgctgcagaggtggcaagaagatggtggtgttatgatcataggctatgagatgtatagaaatcttgctcaaggaaggaatgtgaagagtcggaaacttaaagaaatatttaacaaagctttggttgatccaggtaaggtattaatagacagtgacataaagaagcaagttgaataaaaaatgtgtttatattttaacaaatagtaattgcacagctactaagtatctggtctttgttgtggttatccttcaggtttttgccttttagaaaattcttagtatttcaatagaataaaatcacccttaatgtcgccagctgttcagaatt

SEQ ID NO: 12653 - DNA, 555 bp, Homo sapiens
  MAP TO CHR19.3; EXPRESSED IN LUNG, SIGNAL = 3.4; EXPRESSED IN HEART, SIGNAL = 3.9; EXPRESSED IN PLACENTA, SIGNAL = 3.8; EXPRESSED IN FETAL LIVER, SIGNAL = 4.2; EXPRESSED IN ADULT LIVER, SIGNAL = 3.7; EXPRESSED IN BRAIN, SIGNAL = 4.5; NT HIT: gi16163626, EVALUE 1.00e-91; SWISSPROT HIT: O00160, EVALUE 3.00e-27; EST_HUMAN HIT: BI030546.1, EVALUE 0.00e+00
ggatctaggctgggggatagatacctatggacaggtgtgtctgtgccaggtgagggtatacctgtgatggaacagatggatctaggctgggggatctatgcctgtgggcaggtgcatatgggccaggtgagggtgtacctgtgatggaacagatggatctaggctgggggatatctggctgtgggcaggtgcatctgggccaggtgagggtgccaggctgtagtcagggtcttgctgtgcccacccactagtgcctcaccttgaagcggcggtcgtacttggtgaccgaatcggcgaagtccacccgctccctcttgcccaggaactgacgcagctcgggccgctcctccagccccaggtagtccccgacgaagttccgattgatgctgttgcgcctccgctccttcttgttcagcaggatgttggaagctgcggggacagagggtggagggcagagctcctgatacagctcctccaggtccttgtgcccccaccccgcgccgtttacccgaagcctctcaccttcctcccgcatctcctcgtacttccggacag

SEQ ID NO: 12654 - DNA, 557 bp, Homo sapiens
  MAP TO CHR1.3; EXPRESSED IN LUNG, SIGNAL = 0.94; EXPRESSED IN PLACENTA, SIGNAL = 0.69; EXPRESSED IN BRAIN, SIGNAL = 0.77; EXPRESSED IN ADULT LIVER, SIGNAL = 0.85; SWISSPROT HIT: P20800, EVALUE 8.00e-12; EST_HUMAN HIT: BI760483.1, EVALUE 4.00e-58; NT HIT: X55177.1, EVALUE 5.00e-63
tcgctcctctgctagtctcccagacacctgctccccagggcatgcccgggcttgcagctaccctatgcccctgcaggctgggtgcccacctaccagggccttcgaaggcagaaggtggcacaggcggggtccctggcactggagcactgacagcgccttggcagggagcggcgccggcgtcttggcgggtttcccaggccgtaaggagctgtctgtctgtgggcgggcagccagcaaggtagtggtgtggggtggagagaaagagagagagagaaaaaaataaagagagagaggattaaataaaccacaaccattggcaagcagggactgtccacactgcccactgggacagccacccatgccagcagggtgccaatgaaaggtgaccagcccttgacctcaagaagtcacaccactgaagtcacaggctactccacaagggtcctggtagcccttggcaagaccctccccttctctgggcctggcttggctcactgagagctcccagcatgggggcaaggaaatctgtgatcctacctgaagttgggaattgggaa

SEQ ID NO: 12655 - DNA, 504 bp, Homo sapiens
  MAP TO CHR1.3; EXPRESSED IN FETAL LIVER, SIGNAL = 2.4; EXPRESSED IN BRAIN, SIGNAL = 0.96; EXPRESSED IN LUNG, SIGNAL = 1.9; EXPRESSED IN HEART, SIGNAL = 1.6; EXPRESSED IN PLACENTA, SIGNAL = 1.5; SWISSPROT HIT: P14543, EVALUE 5.00e-55; EST_HUMAN HIT: BI462795.1, EVALUE 1.00e-82; NT HIT: X84819.1, EVALUE 0.00e+00
gggagcttaccttgcctttctggtctgggtccctgctgggcccttggtagggggccacggattcccaagtgacaaccaccgcgctactaggctggaaagagatctccgggaaccctctgtggacacactctgctgctcgctgagtgatggagggggataagtcttctcgataataaaccttccccaggccatcggtcgtgtccaagtccgccaggaaaggggcgactgcaccgaatgttggtgggaagagcccgggatgggattctttggccgggggttcactcgtagcaatgatgccatttgtggtgacctgtacaaaaccaagtgtggttaaaaggaatgcagaaacgggtcctttctcagtaagactgagcacccactcctagaatactgtcagctgtacccatgctgtgtagaatacaacagaatctgagaaagatacgagcctgaaccgcataccccagcattcatttctaggcaaaatgggctgtgtggaaagagaac

SEQ ID NO: 12656 - DNA, 588 bp, Homo sapiens
  MAP TO CHR5.3; EXPRESSED IN PLACENTA, SIGNAL = 0.71; EXPRESSED IN LUNG, SIGNAL =   1; EXPRESSED IN HEART, SIGNAL = 1.9; EXPRESSED IN BRAIN, SIGNAL =   1; NT HIT: gi14726545, EVALUE 1.00e-108; SWISSPROT HIT: P49744, EVALUE 1.00e-40; EST_HUMAN HIT: H30138.1, EVALUE 1.00e-105
atggtgcctgaggttttgagcttccttaaggttacttggccccttcaagactgttctgaactccctcaactctctctgcagggcatggagattgtacagaccatgaacagtgatcctggcctggcagtgggtatgtccagggcctcagttgccactcacatagaattcttccagctactagtgtggtttgtctattgttctaatcttatctggtccctacagggtacacagcttttaatggagttgacttcgaagggaccttccatgtgaatacccagacagatgatgactatgcaggctttatctttggctaccaagatagctccagcttctacgtggtcatgtggaagcagacggagcagacatattggcaagccaccccattccgagcagttgcagaacctggcattcagctcaaggtattggtggtttgaagtcattcatctccctttcttctggacctctcatcttttttcagatattgtgttttcccatgtggtacttagttaatctaaaaaaaattgatgcatttatgctaacgttagagtcagggaagactacagttgacccttgccttcattcctgtgt

SEQ ID NO: 12657 - DNA, 500 bp, Homo sapiens
  MAP TO CHR4.3; EXPRESSED IN PLACENTA, SIGNAL = 0.67; EXPRESSED IN BRAIN, SIGNAL = 0.51; SWISSPROT HIT: O15516, EVALUE 1.00e-23; EST_HUMAN HIT: BF939285.1, EVALUE 0.00e+00; NT HIT: AF097454.1, EVALUE 1.00e-120
tgaatgggatgctttgtttgtattcaaatataacaattacctgcagcccctgaccatggaccatctgaagttgttcttgaatttttcttagttcttcttgttgccgatgaatatttgcttctatcatgcgtgtccgttgttccaattggtctttcagatgttgcatggctcctaattgagctgaaaactgaaactgaagtaccatgtacggaaaaagtgtaatatattttagaattacttactccttataattgcacaacatgaaaagtaagcagtataacatgagtgaaggatgataacatccttcactagttatgtcccttagtttctaatccacccatctttgctctgctttgtaatattggacctggaccttcaaaatatttctcctttgccagcaggcacaaagttatccacatcagtaggtggtgctggagggacactgccaagaaagtgctcaactcctggttctggtgcttcttgctcttatgtcagggtgc

SEQ ID NO: 12658 - DNA, 562 bp, Homo sapiens
  MAP TO CHR17.3; EXPRESSED IN PLACENTA, SIGNAL = 1.3; EXPRESSED IN HEART, SIGNAL = 1.8; EXPRESSED IN BRAIN, SIGNAL = 1.2; SWISSPROT HIT: P81067, EVALUE 1.20e-01; EST_HUMAN HIT: BG680860.1, EVALUE 0.00e+00; NT HIT: gi11426859, EVALUE 0.00e+00
tgtacagaaagagaccggggtatgaccagctgaactagcacccagggacccagtgtacccagcctctggcctcgtgccctgctggggaaggcctcacccagcgaaggccggagaagcggttgggccctggcacacagggctggctcagtgtgcggacagaggagaccactctgctcctggggccagaggccattcaatagcctgccttcgtccgggcccctcctgggcctccccggccaggcacgtggcaccgtcgccttgacaccgccatctcttttctttaaggcttcaggcagcgcgcacaggctctggcagccgtctcaggcaggactgggcaccaagcttgcagccgaaggccttgccccaaactaccagcgtttctgcaagcagcttgaagggctgaccttgcagccgggtgagccaagggcactttgctgccaccgctgcattcccagagatcaagcagcccggtgccgtggccagtgaactcagaggtgctggtggacgggctaggactttggggttaggccatggggctctttctctgaaggccactttcctg

SEQ ID NO: 12659 - DNA, 540 bp, Homo sapiens
  MAP TO CHR1.3; EXPRESSED IN BRAIN, SIGNAL = 0.8; EXPRESSED IN HEART, SIGNAL = 0.6; EXPRESSED IN PLACENTA, SIGNAL = 0.57; SWISSPROT HIT: P50150, EVALUE 2.00e-18; EST_HUMAN HIT: AI339945.1, EVALUE 0.00e+00; NT HIT: gi4758449, EVALUE 0.00e+00
tgaaattgaatgccacgaagaaaacagatggaaacataagacaagccccggccactgttggctgggcagggatgggtgttggtctcactccctaaggcttagagcatgcatggtctctacaggggactttgaaggtcagaaaaggaggcgttttcatcacacacggagttagagaatggtacaaaagaacttcttctcgcgaaaggggttttctgatgcaggcactggaatgatgagaggatcttcccgcacgtgagcttcacagtaggccaggaggtccgcggctgcctgggagacctgtgagggcacagagcagaggtgctcagttaaaggcccctttgcagagtgagtccagggaaggggtgtccacgtacagcggggacaagccctagggtaggctgtattgtgtgcacggcctacgacatggtcatgcccaggctggagggagggtttgtgcagatctaggagactggttcgaagcgggcctccaagaaggggaggctgccctcgcatggcaggccagcatggagacaggactga

SEQ ID NO: 12660 - DNA, 560 bp, Homo sapiens
  MAP TO CHR11.3; EXPRESSED IN BRAIN, SIGNAL =   3; EXPRESSED IN LUNG, SIGNAL = 1.6; EXPRESSED IN HEART, SIGNAL = 4.8; EXPRESSED IN PLACENTA, SIGNAL = 2.4; SWISSPROT HIT: P35609, EVALUE 4.00e-35; EST_HUMAN HIT: BF791123.1, EVALUE 1.00e-70; NT HIT: gi13638877, EVALUE 1.00e-97
tctcccctaaagccatttcccagcccccagagctggctctggcataactgccctcctcccaggtccgaaagctggtgcccagccgtgaccagacactgcaggaggagctggcacggcagcaggtaaacgagaggctccggcgacagtttgcggcccaggccaatgccattggaccctggatccaggcgaaggtggaggtaagggctgggatagtgggtccaacctggggggatggggccagagctgggccacagggagttgggagccctcatgctgcctgggaaccccctgcaggaagtggggcggctggcagcagggctagctggctctctggaggagcagatggctgggctacggcagcaggagcagaacattatcaactacaagactaacattgaccggctggagggtgaccaccagctgctgcaggagagcctggtgttcgacaataagcacaccgtctacagcatggaggtgggatcacaccctctcaggagagtggggaggcagcactggctgaggaggcccagggagatcacagctggacagagcatgtgtgt

SEQ ID NO: 12661 - DNA, 592 bp, Homo sapiens
  MAP TO CHR22.3; EXPRESSED IN BRAIN, SIGNAL = 1.8; EXPRESSED IN LUNG, SIGNAL = 0.72; EXPRESSED IN PLACENTA, SIGNAL = 1.8; EXPRESSED IN HEART, SIGNAL = 0.96; SWISSPROT HIT: P46060, EVALUE 3.00e-19; EST_HUMAN HIT: AA381306.1, EVALUE 0.00e+00; NT HIT: gi16168503, EVALUE 5.00e-72
tttccagaaatgcacgacaggaattctggctcattttcggatgggttaacaggcttggagagggcacgtgacgccccaggtctcttggttgagtgccagccctgggattagcatccagaactgtcagcctactatgccgagtgcacctcaaggctgcaggggcaggatggacagaaaccactcaccctaaaagcttctgccaaggcagtggcgccatcattctccagacggtttctgccagccacaaagaccttcagggccagaggcttgccttgggcactggatttccggtgacattcggtcagagctgcagccaggatctgtggggaaaggcaaggggccctggtcatgggcaggagccccttctcccagcggggtggccactgctgctgaactgctcttcaacatcccacgccacccatcggtgcaggtcaggggacgcaggactgctaacagctcaacagtcacaccttaaatatgtccagcacttcagttacacaaggtttttatctctaatgctgtgtcacaccagcctgagaggtttagcttcactttcgagacggggagaccaagccctactcaggaaagggag

SEQ ID NO: 12662 - DNA, 508 bp, Homo sapiens
  MAP TO CHR1.3; EXPRESSED IN ADULT LIVER, SIGNAL = 0.46; EXPRESSED IN PLACENTA, SIGNAL = 0.47; NT HIT: AF009255.1, EVALUE 0.00e+00; EST_HUMAN HIT: BI459619.1, EVALUE 2.00e-53; SWISSPROT HIT: P51797, EVALUE 2.00e-19
aagcagaaccaaattcacggtgaatcacggccatagtgacattttcatcatgagtgtggatgaacaaaaggccctcatcccgattctttcatctgtgcattcagaatgtgaagaatacacttgcccgtgtggctgccgttggtagaggtcagtttttggcctgtttgattgatggggaaagctgtgcagccacctgttttggacccggctggagacatcccacttgaagactcaaagtcaggtgtccttgtactgattttctgattccttcttctcaggtcacagaagatgtgaattcaagtatcaagacatttttttgtcccaatgatacctacaatgacatggccacactcttcttcaacccgcaggagtctgccatcctccagctcttccaccaggatggtgagtgtctgcactgcagcccaatcgtgggtgattggtgtcatctcggacacagccaggcttgcccttcattccaagcaagaccaggacttctttgtaacgccca

SEQ ID NO: 12663 - DNA, 506 bp, Homo sapiens
  MAP TO CHR15.3; EXPRESSED IN ADULT LIVER, SIGNAL = 0.67; EXPRESSED IN BRAIN, SIGNAL = 1.1; EXPRESSED IN HEART, SIGNAL = 0.7; EXPRESSED IN PLACENTA, SIGNAL = 1.1; EST_HUMAN HIT: BG721586.1, EVALUE 6.00e-91; SWISSPROT HIT: P26440, EVALUE 5.00e-27; NT HIT: AF191215.1, EVALUE 0.00e+00
ttaatctgggctgcgttttccactcccttgtaccacaccactcacagttcagtatggcggctccggcctgggctacctggagcatgtgctggtgatggaggagatatcccgagcttccggagcagtggggctcagttacggtgcccactccaacctctgcatcaaccagcttgtacgcaatgggaatgaggcccagaaagagaagtatctcccgaaggtgaggaaatggaaatgtaatacacgctaatctcacagtgcaaccaccaactaaaagataccctctccccttgggggccagtcagacctgctttctgtagcatgctgccatgaaccaaatgtggttaggaaggggccatggattgctttaaaatacttgagccaaaaataataaaaataggaccagaactcttgcattgaacaacagacagacaacatttgaagagaactctaagaaatggaagagtaggactagcttcctttgcaaagggaatggaaaaaggagaggc

SEQ ID NO: 12664 - DNA, 573 bp, Homo sapiens
  MAP TO CHR19.3; EXPRESSED IN PLACENTA, SIGNAL = 1.7; EXPRESSED IN HEART, SIGNAL = 1.6; EXPRESSED IN ADULT LIVER, SIGNAL = 1.5; SWISSPROT HIT: P06870, EVALUE 3.00e-69; EST_HUMAN HIT: BI832821.1, EVALUE 0.00e+00; NT HIT: AF277050.1, EVALUE 0.00e+00
tttgacgacgaaaacacagcccagtttgttcatgtcagtgagagcttcccacaccctggcttcaacatgagcctcctggagaaccacacccgccaagcagacgaggactacagccacgacctcatgctgctccgcctgacagagcctgctgataccatcacagatgctgtgaaggtcgtggagttgcccaccgaggaacccgaagtggggagcacctgtttggcttccggctggggcagcatcgaaccagagaattgtatgtgggggcagactgtgtagcccaaggcggggatggggactcctgcgtccaagggagaaagggccagggaagcaggtgaggtcgggctgcagccctttttctcccgggttcgtagtctcatttccagatgatctccagtgtgtggacctcaaaatcctgcctaatgatgagtgcaaaaaagcccacgtccagaaggtgacagacttcatgctgtgtgtcggacacctggaaggtggcaaagacacctgtgtggtgaggcagccctgcccccagggtctggaagggctgagggaggggactcagcctctgaactg

SEQ ID NO: 12665 - DNA, 519 bp, Homo sapiens
  MAP TO CHR22.3; EXPRESSED IN ADULT LIVER, SIGNAL = 1.2; EXPRESSED IN LUNG, SIGNAL =   1; EXPRESSED IN PLACENTA, SIGNAL = 0.66; NT HIT: Y18000.1, EVALUE 0.00e+00; SWISSPROT HIT: P46662, EVALUE 2.00e-21; EST_HUMAN HIT: BG035553.1, EVALUE 1.00e-120
tccgagactctggtttgtcccatctcagtgttcaaggcagatctgggcgggagaacagcacatgatcccacttcagctaagagcactgtgccctccagatgcggtctgaggagacagctgacctgttggctgaaaaggcccagatcaccgaggaggaggcaaaacttctggcccagaaggccgcagaggctgagcaggaaatgcagcgcatcaaggccacagcgattcgcacggaggaggagaagcgcctgatggagcagaaggtgctggaagccgaggtgctggcactgaagatggctgaggagtcagagaggaggtgagggggcaccgggcaccagactggcgaggaggctggcgaagggccgcagaccagcctgccctgaggctgagctctacagcagttgtcctcaagctgcttgcccatcttctgggccgtggggaggctcctccttggctgatggtgactggtgctttatccattttggggctggcgctactggttgggcacaggaactcagt

SEQ ID NO: 12666 - DNA, 580 bp, Homo sapiens
  MAP TO CHR2.3; EXPRESSED IN LUNG, SIGNAL = 0.58; EXPRESSED IN PLACENTA, SIGNAL = 0.63; EXPRESSED IN ADULT LIVER, SIGNAL = 0.94; NT HIT: AF130996.1, EVALUE 0.00e+00; SWISSPROT HIT: P07174, EVALUE 3.70e-01; EST_HUMAN HIT: BG720236.1, EVALUE 8.20e-01
tcttttggcaccactcacagctccagagccctcgttggctccttggcttgtcctgggaggacagcccacaggcatgcttttcaggatgcagcatgtggctgggaggcaggtggcacaacccccgcccactccagtatgtctgcacacaaggactccacagcatccagccgctcaatctgcaccagttttgtgagtagctcagggatgctgtagcctgccgtgctgatgcggtcaaagagttgcatgccgtctgtcatgcccccaatctcatccctcttcaggccgaagctctcggcgaggtggcgccacgttttcacaacagccttctcagagttgtacgtggagctgagcattcggctagtcttctcgaggcaatcaaatggcagctccgtggggctaagacctacagacaccaatggccacagttagatgttgcaagtcacagtcaatagaaggtcaacactgaaaaattatttaaatgaaataaaaattatttgaaaaaaatttttttaaaattataaaacatgcagaaagccacctaaaacaaatgcataacttaaggcaaacgacacctagaacg

SEQ ID NO: 12667 - DNA, 547 bp, Homo sapiens
  MAP TO CHR17.3; EXPRESSED IN ADULT LIVER, SIGNAL = 0.59; EXPRESSED IN LUNG, SIGNAL = 2.9; EXPRESSED IN PLACENTA, SIGNAL = 1.3; NT HIT: X76761.1, EVALUE 0.00e+00; SWISSPROT HIT: P31645, EVALUE 4.00e-24
cagccattagaggtcttcgccatggcacaggtacatacatatatagggttgcatgcctcctggtgaatctcattttgaatagagcataacaagataatccttttctcccaaaacaattagtagtctgaacacacacatatacacactaactagcacgtacctctttaaatgtccctggagtgatgatcaaccgataagctatatatgtggggatgcaaatgaaagatgaggttcctatgcagtaacccaagatgatactccagtaaggataattatattggaaaagtcgtagttgtggcgggctcatcagaaaactgcaaatgatgaactaaaacagaaattccaagaaacattaaaaaccttaacaatatccactcagatagagatgtttccgataccacaaacaccaaatgctaaagctaagatactttcaggaaattcccaagatgtgatatatcctggattgaactctgacacacagaattaccaacttctgtacccaagctgcaagactacaccagccaggtgctttccctgattttcctcc

SEQ ID NO: 12668 - DNA, 577 bp, Homo sapiens
  MAP TO CHR8.3; EXPRESSED IN PLACENTA, SIGNAL = 0.9; EXPRESSED IN LUNG, SIGNAL = 1.5; EXPRESSED IN HEART, SIGNAL = 0.73; NT HIT: gi4502310, EVALUE 2.00e-80; SWISSPROT HIT: P31401, EVALUE 2.00e-24; EST_HUMAN HIT: AU133550.1, EVALUE 3.00e-80
tttgaatttatgttgccgggagatttttctaaatcattcttaaggacagtatttaaaatgaacatgatgggattttcaactttgtactttggcatgttgaaacaaacatgttgtaagcaagcttgttgtaatatcgtgcatgatactcttctgcttgacctgctgtcaggtttcagcagccagggaagaggtacctggtcgacgaggttttccaggttacatgtatacagatttagccacgatatatgaacgcgctgggcgagtggaagggagaaacggctcgattactcaaatccctattctaaccatgcctaatgatggtaagttttggtatttggattataacacacctaatcattttaaagagagagaagacccatctaccttttcgagttgaagttattttgagaacacatcccctaagagtttatcttggttatttgcctaaataaaacatttttcatttgaaaattacccacagttattatcctattgtggaggaaaagcaattttcttcataatttaagtttttaactttattaggtactattgagtgcctgctgtttgcaggacactg

SEQ ID NO: 12669 - DNA, 575 bp, Homo sapiens
  MAP TO CHR16.3; EXPRESSED IN HEART, SIGNAL = 1.8; EXPRESSED IN PLACENTA, SIGNAL = 1.6; EXPRESSED IN FETAL LIVER, SIGNAL = 1.8; EXPRESSED IN ADULT LIVER, SIGNAL = 1.9; EXPRESSED IN BRAIN, SIGNAL = 2.1; SWISSPROT HIT: P33485, EVALUE 6.40e-01; EST_HUMAN HIT: BI912998.1, EVALUE 1.00e-70; NT HIT: gi16164946, EVALUE 2.00e-68
taggtgaccgtttccagtcccggactccctgccctgggccgaggagggtcaggggtgggtgcaggaggcttgaaggcggtggaaagaggtttcttgggcggagaaaggccccgtggcttagagccacttgacccagcaggggaggagcctctgtggacgtccccggctctgttcctagcagacaggctgctctcgctgacccttctggccttcgaaggcctaaacacagctgcctccaaggaccgctgcctggcctgcattgaggaaccctttttctccccgctgtggcctctgctgctggccctgtacaggtatggacccagctgtacaaccacctgcgtggcctagtgtcttccagcccagtcccccaggaggcctgccctgctccctggcactgtctgctcccctccatccccaagactcgtgtttgctccccctagcctgtgctttaccctgaggccatcctcaggggcttccagtttgcaggtaggattattgccactctcccgtgcctggggtcttggcaacgctggggctttttgcttgagatacatagccagttttctccaggactg

SEQ ID NO: 12670 - DNA, 554 bp, Homo sapiens
  MAP TO CHR19.3; EXPRESSED IN LUNG, SIGNAL = 0.82; EXPRESSED IN PLACENTA, SIGNAL = 0.81; EXPRESSED IN ADULT LIVER, SIGNAL = 0.76; EXPRESSED IN BRAIN, SIGNAL = 0.66; SWISSPROT HIT: P28340, EVALUE 5.00e-36; EST_HUMAN HIT: BE798460.1, EVALUE 6.00e-91; NT HIT: gi15303523, EVALUE 4.00e-91
ctgaccacgtcagaccacagcacgtccgcctccagctggcactgcgtagcctgtgggcatgggtgggtcagcggtggcagcagggtaccagctccccacccagccctgccctgggaagccctgcaccttctccttcagcctcagggcgtatttcccagctgggagctccagccagttgcagccgacgatgtccgtgtccaccatgaacctggagggggctgggggtcagtggacaggggctgcccgagggtggggatagaggccggagaagtgaggcagaggccgtaccggatctcaaagtcgacgttggcctcgtagggcgcgaagctgggcgtgcccaggcctgccacacggatgccctgttccaggagacggcgggccggggccacgaggcgcggcagcgccacggtgatgcgcaggaacggggaggggccgtgcccgtggtacccaaacatgcctgtggatggaagaagctgggaccagccaatggcctcccgaggggaccctccaacccgctgatcctgggggagcactcactctctcgggagcacagt

SEQ ID NO: 12671 - DNA, 580 bp, Homo sapiens
  MAP TO CHR8.3; EXPRESSED IN PLACENTA, SIGNAL = 5.6; EXPRESSED IN LUNG, SIGNAL =   7; EXPRESSED IN ADULT LIVER, SIGNAL = 3.4; EXPRESSED IN BRAIN, SIGNAL = 5.4; SWISSPROT HIT: P49060, EVALUE 1.00e-42; EST_HUMAN HIT: AL539198.1, EVALUE 0.00e+00; NT HIT: AF050163.1, EVALUE 0.00e+00
actctcttgaaggtgggtgggccgctaccaccaagaatatctcctgaaatagggcctacaatcataaatgcacaggactatatccttgggtgattctactctaacaccacatctcacctattttagacatgccaaatgaaacactctttgtgaatttctgccgagatacaatcttggtgtctcttttttacccagatgtggaccagctagtgaagtgctcccacgagcgctccattcatctcttcatcgactctctgttgaatgaagaaaatccaagtaaggcctacaggtgcagttccaaggaagcctttgagaaagggctctgcttgagttgtagaaagaaccgctgcaacaatctgggctatgagatcaataaagtcagagccaaaagaagcagcaaaatgtacctgaagactcgttctcagatgccctacaaaggtaggctggagactgttgtaaataaggaaaccaaggagtcctatttcatcatgctcactgcatcacatgtactgattctgtccattggaacagagatgatgactggtgttactaaaccctgagccctggtgtttctgttgat

SEQ ID NO: 12672 - DNA, 539 bp, Homo sapiens
  MAP TO CHR15.3; EXPRESSED IN FETAL LIVER, SIGNAL =  21; EXPRESSED IN BRAIN, SIGNAL =  23; EXPRESSED IN LUNG, SIGNAL =  46; EXPRESSED IN PLACENTA, SIGNAL =  18; NT HIT: J00071.1, EVALUE 0.00e+00; SWISSPROT HIT: P53480, EVALUE 5.00e-61; EST_HUMAN HIT: BG699191.1, EVALUE 0.00e+00
gctagggaatgggaggaaagggattatccctttttcaactgggggatctgattcacagcaaggtcggtgacttgggaatgtgattcatcagtaactgtccccagagcccagcatacctgtggtacggccagaagcatacagggatagcactgcctggatggccacgtacatggcagggacattgaaggtctcaaacatgatctgagtcatcttctcccggttggccttggggttcagcggggcctctgtgagcagggtggggtgctcctcgggagccacacggagctcattgtagaaggtgtggtgccagatcttctccatgtcgtcccagttggtgatgataccatgctcgatgggatacttcagggtcaggatgcctctcttgctctgggcttcatcacctacgtaggagtccttctgacccatacccaccataactccctatgagaagaaaaaatgagaaaatcatgctctcaccatgtcaggaatataatcagtgtcttgtccatttatatctaactgcccaagtcaaggaacat

SEQ ID NO: 12673 - DNA, 573 bp, Homo sapiens
  MAP TO CHR1.3; EXPRESSED IN PLACENTA, SIGNAL = 2.1; EXPRESSED IN LUNG, SIGNAL = 2.7; EXPRESSED IN HEART, SIGNAL = 2.3; EXPRESSED IN BRAIN, SIGNAL = 2.6; NT HIT: gi14730483, EVALUE 9.00e-80; EST_HUMAN HIT: BE062448.1, EVALUE 8.00e-04
tcattcgtgttgagctggagcctgcctgcactggctgtcaccagcatctactcttgaagctagatgcatctgtgcttttcacagttagagctgctgatgaacataaacaagatgttaactgacttgtcttacttggcctcagtgcataatcccacatcaccaccatcttcaaagaaagcacctccaccttcaggagcatctcaaaccatcaaatcaacaaccaaacgttcacccaaaccaccaaacaagaagaagactaagaaagttatagaatcagaggaaataacagaaggtaggaagatgacagatataatcaaaggagctttcttagatgaagtaacttgtaggtgactgcttatctaagcccattctcagagaacagggtaatcttaggaatcatgagcctcattacactcgaaggttttagactttgcttttaagtaaagtttaagacaaagtataaactctcagctctttctgtatttaccaaacccagcatgagtctgggttaaaacaaatcagaagggacaaatcttactataaaaaacaaaaaccaccccatgattttctttg

SEQ ID NO: 12674 - DNA, 585 bp, Homo sapiens
  MAP TO CHR3.3; EXPRESSED IN PLACENTA, SIGNAL = 2.2; EXPRESSED IN ADULT LIVER, SIGNAL = 0.83; EXPRESSED IN BRAIN, SIGNAL = 0.78; SWISSPROT HIT: O18964, EVALUE 3.80e-01; EST_HUMAN HIT: AA350763.1, EVALUE 2.00e-72; NT HIT: gi14730458, EVALUE 1.00e-72
gcctgagttgtagaggcaggatgttagctcaaagttgctcctggccatctttgacaccatatgaggggaactcatctgagataagtcccaaagagatcagagatgcagaaacagatcctaacgatatcatttaactgcctggatccagccatacctgaagcttattttcattatagaagcagttaattccctttttgtttaacccagttggagttggcttttctgtcaactgcagtgaactcaccaggatgtagaaggtgataaaaatggggctggaggtgatgcggatcttcgcccgagcagatggaagcttccagagcaggaagatgaggaagagcacattggggatgagcagcaagaggtcccagtaccggaccctggcggatgggcacaggagctggctcactggcgaggccacatatgcaccccctctccaagacacaatctgccccaccctcaccacccccctacaccaggaaaagccactgacactcagcgagcctgcccagcgttgtgactgcctcacctggaggtgccaatgtcttcgtagagcagcagcaggcagcgatgaggcacactgatgtt

SEQ ID NO: 12675 - DNA, 592 bp, Homo sapiens
  MAP TO CHR16.3; EXPRESSED IN LUNG, SIGNAL = 1.5; EXPRESSED IN HEART, SIGNAL = 1.4; EXPRESSED IN PLACENTA, SIGNAL = 1.3; EXPRESSED IN ADULT LIVER, SIGNAL = 1.4; EXPRESSED IN BRAIN, SIGNAL = 1.7; NT HIT: AF212843.1, EVALUE 0.00e+00; SWISSPROT HIT: P46934, EVALUE 1.00e-01; EST_HUMAN HIT: AW874693.1, EVALUE 0.00e+00
ctcttaggcactttcaccgccttcctctccaggccctgcccctttgacgccggccgtcgcgatattgcggagactggatttcagcttcgtggtcggcggagcggcccctggagggcgcagtgcgcaggcgtgagcggtcgggccccgacgcgcgcgggtctcgtttggagcgggagtgagttcctgagcgagtggacccggcagcgggcgataggggggccaggtgcctccacagtcagccatggcagcgctgcgctacgcggggctggacgacacggacagtgaggacgagctgcctccgggctgggaggagagaaccaccaaggacggctgggtttactacgccaagtaagggggccgcagtggggccgcggacgcacctgggaccctgcacagcccacggacgccacctgcgcggggaggacgcgcactccagcgcagcgcgtgcggtgcaaagtgaaagtaactgttaaggagcttcagggaaaagggtccagggttcccagtaggggccggcccccttggtgggcctcgggtccagcgggggtcacctggtggcttcccggcgcgccctctgctgttcaggatgcag

SEQ ID NO: 12676 - DNA, 510 bp, Homo sapiens
  MAP TO CHR9.3; EXPRESSED IN HEART, SIGNAL =   1; EXPRESSED IN PLACENTA, SIGNAL =   1; EXPRESSED IN ADULT LIVER, SIGNAL = 1.2; EXPRESSED IN BRAIN, SIGNAL = 1.3; NT HIT: gi7549806, EVALUE 5.00e-72; SWISSPROT HIT: Q9UKT8, EVALUE 8.00e-21; EST_HUMAN HIT: BI020454.1, EVALUE 0.00e+00
ggcagtgtctaccatcctccacgccctccctcaaaaagcctgataagcaggagacttcttccaagtcttcctaccttggtgacccattccgtgtgcccggtgagtgtgttcaggcatgtcccagcagataaagcccatactttcacagtgaagtctgcagagccgctcaccaagatatccagttcatcattgtagtccacgctaaatactagtgcatataattacacaaagttaaaacatgtctctgtcagtgggtcttttataatagagttcaataatgtttattttccccaattatataatttcccaaccagagacaccgtaagaatgatgctattcaactagcaattttctgataaaactatttcaaaattcttactattatagcttattattctaaggtggaaagtcctaggaataatacaatctcttttatttgtggtagctacagtgagaggcaaaacaaatgttggagataatggcattccttcttaggactgcctgcctgac

SEQ ID NO: 12677 - DNA, 520 bp, Homo sapiens
  MAP TO CHR3.3; EXPRESSED IN LUNG, SIGNAL = 2.3; EXPRESSED IN HEART, SIGNAL = 1.4; EXPRESSED IN PLACENTA, SIGNAL = 2.9; EXPRESSED IN ADULT LIVER, SIGNAL = 2.1; EST_HUMAN HIT: BI601050.1, EVALUE 0.00e+00; NT HIT: U36926.1, EVALUE 0.00e+00; SWISSPROT HIT: Q16850, EVALUE 4.00e-60
tcgtatgcaactccctacccaaacacaggtgttgtcaggcgactgtagacatcttctgcattcaggacttcatttttactattaaaaagcagtgcagcagcatcactacccagaaggtaagtaaatgccttgcctaccatgataaaactaaatacaggtccataattcccatatgcattttctagaaattcagttggacttttcccaaatgctatggcatgcccaaggaaaggaactggggagaaaatgtacggaggacttttcgcccctgcggtcagctggaccaggtggccggcagcgagacggaacaagtagaccaggctgagggtgaaggcgcaggcgatcagcagcatggacaagaggttgccgcctgccacctcctccatcgcctggcccagcacctacccacccgcctgtagcaagcccagcagcatcatcccggccgccgccgccatttcactctgtcggagacactgaaggccgaggtcgccaccgatcctcctaatcgacggagcaagag

SEQ ID NO: 12678 - DNA, 587 bp, Homo sapiens
  MAP TO CHR22.3; EXPRESSED IN LUNG, SIGNAL = 1.5; EXPRESSED IN HEART, SIGNAL =   2; EXPRESSED IN PLACENTA, SIGNAL = 1.9; EXPRESSED IN FETAL LIVER, SIGNAL = 1.8; EXPRESSED IN ADULT LIVER, SIGNAL = 1.8; EXPRESSED IN BRAIN, SIGNAL = 1.7; NT HIT: gi14777017, EVALUE 1.00e-60; SWISSPROT HIT: O75419, EVALUE 6.00e-16; EST_HUMAN HIT: AA576429.1, EVALUE 5.00e-76
catctaacttggggtggctgggtggggaccaaggcgtctcctggtgacagcgtccctggaggctttggggagtggagtgactgggcgctgttgggctctgggctctgagtgttgagctggggcccaccataccctgacggagggtgctctccgactccatagacaaagaaccggcgctgcaaactgctgcccctggtgatggctgcccccctgagcatggagcatggcacagtgaccgtggtgggcatccccccagagaccgacagctcggacaggaagaagtgagcagcttccactcgtcctgggactggagggtcgggggtgttggggttatcagcttattagccctgctgagtagagtggtatttgcctctagtgtctgtcctggggcggggggtgggaagggtccattgcaggccgcctggcccccgacatgtcttgtgtgtcagcagcttttttgggagggcgtttgagaaggcagcggaaagcaccagctcccggatgctgcacaaccattttgacctctcaggtgagagtctcctgccactctgccacactttcccacctgaccctttgaggctattgca

SEQ ID NO: 12679 - DNA, 574 bp, Homo sapiens
  MAP TO CHR2.3; EXPRESSED IN BRAIN, SIGNAL = 1.4; EXPRESSED IN PLACENTA, SIGNAL = 2.6; EXPRESSED IN HEART, SIGNAL = 1.9; NT HIT: AF077197.1, EVALUE 5.00e-72; SWISSPROT HIT: O95183, EVALUE 4.00e-19; EST_HUMAN HIT: BE875854.1, EVALUE 5.00e-73
gaaaccttagggcagctgtgcattgactgggtagacgccattctggagcaggtgagaaaagaatcagctttgtgggagggtggggtcctgggaagatcccaccttgggacagcttagaggaagctgaggtgctggaagccgggacttacctaggtcctaggccctgccttgacgtgcaaggggaggagcctgtgagacttaaggtgtgccgcactcaccccgaaggccagaccttcactccgcacacatcatacccttacacgaaggatgctgttactctcatgctgtacccacctacagggggagaaggaggcttctagatctcaggggcagatgagggccaggtgggggcctcatgcagccctgacctcgggcttggtgtccaggcaggaatagagttggagcggtgccagcagcaggcgaacgaggtgacggaaattatgcgtaacaacttcggcaaggtcctggagcgtggtgtgaagctggccgaactgcagcagcgttcagaccaactcctggatatggtgtgaggcctgggggagcatggaggggaggggagaggattgggaaagtc

SEQ ID NO: 12680 - DNA, 552 bp, Homo sapiens
  MAP TO CHR17.3; EXPRESSED IN PLACENTA, SIGNAL = 1.5; EXPRESSED IN ADULT LIVER, SIGNAL = 1.1; EXPRESSED IN BRAIN, SIGNAL = 1.1; NT HIT: gi16164077, EVALUE 2.00e-80; SWISSPROT HIT: Q14847, EVALUE 1.00e-12; EST_HUMAN HIT: BI830268.1, EVALUE 5.00e-79
gcagaggtgaaaactgaggcttggcaagattaggtagcttgtccaaggacacacagctggtgcttccagagcgagacctggctttctgtacccaaagctcttgggtagtctctcccatcctgggatcttgagggtcacgggaaggaactgggtggtttgcagtgggacccttcacctagtgccttctgaccttgcagataaaataccatgaggagtttgagaagagccgcatgggccctagcgggggcgagggcatggagccagagcgtcgggattcacaggacggcagcagctaccggcggcccctggagcagcagcagcctcaccacatcccgaccagtgccccgggtgagtgcaggtcctgttggtgcagatgacctgaggcgaggccagtggggtggggaggaagccaggagaagacagacagacagatacaccttccggagccttgctcttaatcaacaggcgattatgcctcttgtgtgcaagaggggaccagaggacctgaggccgggccagctggggtggggaggaagtcggcgagagacagac

SEQ ID NO: 12681 - DNA, 545 bp, Homo sapiens
  MAP TO CHR16.3; EXPRESSED IN PLACENTA, SIGNAL = 1.8; EXPRESSED IN HEART, SIGNAL = 2.3; EXPRESSED IN FETAL LIVER, SIGNAL = 2.5; NT HIT: gi13654697, EVALUE 1.00e-111; SWISSPROT HIT: O95255, EVALUE 7.00e-36; EST_HUMAN HIT: BE390493.1, EVALUE 3.00e-03
tgcatttgttagggagggtctggctctgtctggaggtttgggggcaggcactgaaagccaccagcaggcaggccttgcagacgccttccgctagtggggagggactgggagaggttctgaagcttccagaaaaggagggatgtgccctgtccttcccgttccctccagcctcatcttaaggacacagatctttgcctggaccccagacgttttgcacactgttccagggggacagggtgacccagggaggggtggggtaaaggagtcctgagcaccccttggtgcagctgggaggagagggatgaggagggcaggtgaggcgtaccttggagacagccgaggagcccgaagatcccgccacgcagggctgcctgcgtctgctgcccacctactgcagggtcgtccgcccacaggctcagccagtagccccggcagaaggaggccacttgctggcagaggaagaggaagagtgcgtagaggcagagaggggtgcccacggcacgcaggtaggccaggtgcactgtggccttcacctgtagcacaca

SEQ ID NO: 12682 - DNA, 529 bp, Homo sapiens
  MAP TO CHR5.3; EXPRESSED IN PLACENTA, SIGNAL = 0.99; EXPRESSED IN BRAIN, SIGNAL = 1.3; EXPRESSED IN ADULT LIVER, SIGNAL = 1.1; NT HIT: gi14722298, EVALUE 2.00e-90; SWISSPROT HIT: P17342, EVALUE 6.00e-28; EST_HUMAN HIT: BG427953.1, EVALUE 2.00e-90
ctcttcctggttgccaaaagtaacatgcgggggcgcctcacagttgtgaagggagaatggcctctttatggtggctggcttggaattataaatatttttatttcttccataggagatggctcatggaagagaggagacaaacacgactttgaagctaagcaagcatactcgtccctccagacagtcactctactgaggacagtgaaacctgagtttgagaagttttccatggaggtgaaaagttcagttgagaaacaagggctcaatatggaggattacgtaagtgcctgattatgagcctagacctttagcatcctgaaaactgtcttctaattaaatcagagatgacagagtgtcccattctgagccattcaaaaattcctaggttcaggtctgaatgtcactgttgccttctgtgtgtgtgtgtgtgttttttttttttttcctttctgggtggttttcctccttccctcctcagtatacccactatcatctctacccttcacttacactttttcagctgctgcag

SEQ ID NO: 12683 - DNA, 556 bp, Homo sapiens
  MAP TO CHR5.3; EXPRESSED IN LUNG, SIGNAL = 2.2; EXPRESSED IN HEART, SIGNAL = 1.3; EXPRESSED IN PLACENTA, SIGNAL = 1.3; EXPRESSED IN BRAIN, SIGNAL = 1.1; EXPRESSED IN FETAL LIVER, SIGNAL = 2.5; EST_HUMAN HIT: AV714414.1, EVALUE 0.00e+00; NT HIT: gi16159871, EVALUE 1.00e-113; SWISSPROT HIT: O49160, EVALUE 1.00e+00
tcctggcattaaggcaaaagactgcaagtacacaaagaagtgggacgtcttaaggtaacttactctgttgctgaatcattgtattcagtgatggctgctggggtttggaaggctgcataccaggtagtaagttgtctaggctgatgtttacactggggtcagaccaagtagagggcaaggttttgctgactgatttctggaccatatctgtattctgattatagagaggattaggcttctgcagcactgtgctaacattttgcaaaggctggaaaatagaaaaatgctctaaaaattaagcatctgttctataaaaattatcagatggcaatttaatcacaacaatgaacttctgaaacaaaaagaaccactaatgttctatgctaatgtcttcaataccctgaatcattagcttcccaaagaggttcctctgaagtcccaatcaggtttgaggtggataaaaccaacaacttacctacactaacaattattctcccatcactcaaagtctagaagccaccatccctggcaaatgcccaggggaactaccgatttt

SEQ ID NO: 12684 - DNA, 593 bp, Homo sapiens
  MAP TO CHR12.3; EXPRESSED IN LUNG, SIGNAL = 0.6; EXPRESSED IN PLACENTA, SIGNAL = 0.56; EXPRESSED IN BRAIN, SIGNAL = 0.94; NT HIT: gi14784200, EVALUE 4.00e-85; SWISSPROT HIT: P09613, EVALUE 2.00e+00; EST_HUMAN HIT: Z43250.1, EVALUE 0.00e+00
ctaggctcccctccagaaacccacactgcccagctctggcactatggggaacctgagcttcccgagagaggccccccagctatagggacggctcttgggggagtgcaggcaattgtttcaataacttcatctatatgtatgaagcactccactcaggatttagcactgaacgcagcaaatgctagccactctcactgtcctcttggaacatacatgctaatgggaactaaaggggtctctgggagcttataaaggcagtggtgggaggccgcggtaggcattccctacctgtaaccactctgcccattttctctcctagatgggggctgtgacgactatgcagagggccgagtttgcaaagttcgctttgatgctaacggagccacaggaccagggagccgggaccccgcccaggtgaagctgctgcctggaaggcacatgctcttccctcctcttgagagagtccactacttacaggtatggaactgggggatacatctcctacccttggtgccgctcatcacttttctccagtgtctgttaggcaccccaatcccctcttccctagccctggctttcagggcaccatagag

SEQ ID NO: 12685 - DNA, 544 bp, Homo sapiens
  MAP TO CHR11.3; EXPRESSED IN FETAL LIVER, SIGNAL = 0.66; EXPRESSED IN ADULT LIVER, SIGNAL = 0.96; EXPRESSED IN BRAIN, SIGNAL = 1.2; EXPRESSED IN LUNG, SIGNAL = 0.79; EXPRESSED IN PLACENTA, SIGNAL = 1.1; EST_HUMAN HIT: BG952000.1, EVALUE 3.00e-83; NT HIT: gi15310741, EVALUE 0.00e+00; SWISSPROT HIT: Q09772, EVALUE 2.60e-01
cgttttcaagagctgcttccccagctcgctctccacggggccaggctgagggctgttcagggccattttcccactgctgtttgtaacaggagctaggcctttgggtgtggtctcggggtactggaggggatcgaagttttccttttgttctattgcaatctctttggacttctcaactggaggaggacgaggagccagcctgccctgagacactttcctctggtcattctgcttcctgtcagctagccctttggggacgttctgaaaaagacaaggtagagctggaaccctcgggggcaggttgaggggaaacaggtgaggccacttctgctgtggagtctctgcccccacacaccttgccaaggggcccatttgtataagtgtgtatggggtatgagtggacgatgtggaaggagagggcttctgcccgaggtttgtcaaacagacaggaaaatggaacctgcaatccaaaaccagccaagaatttcccaagggataggagctgaggaaaactgaatagaaggcagctttggccctaactcag

SEQ ID NO: 12686 - DNA, 538 bp, Homo sapiens
  MAP TO CHR17.3; EXPRESSED IN BRAIN, SIGNAL = 0.83; EXPRESSED IN PLACENTA, SIGNAL = 0.59; EXPRESSED IN HEART, SIGNAL = 0.72; NT HIT: AB012942.1, EVALUE 0.00e+00; SWISSPROT HIT: O75106, EVALUE 3.00e-69; EST_HUMAN HIT: BG108394.1, EVALUE 0.00e+00
gatagcagctttggactcggccgtaacagccgaggcttggtgcggggagtggactgcccctatcaagccacgatggtggacatccatatattagtgggcaaaggggcagtccagctgcttccaggggctgtgtgtgtatttgaggaagcccagggactgccccttcgaaggcaccacaattaccttcaaaatcatttctatggtggtttggccagctcagcccttgtggtcaggtctgtgtcatctgtgggcaactatgactacatttgggactttgtgttgtacccaaatggggcacttgaagggcgggtccatgccacgggttatatcaacacagctttcctgaaagggggagaggagggcctcctctttgggaaccgtgtgggggaaagagtgctgggaacggtgcacacacatgccttccacttcaagctggacctggatgtggcaggtgagtgctgaggggatgaggatggagacttgggggcggggtcaggtggggtggagggaagggaagggaatctcccaggtcaagctg

SEQ ID NO: 12687 - DNA, 508 bp, Homo sapiens
  MAP TO CHR1.3; EXPRESSED IN PLACENTA, SIGNAL = 0.9; EXPRESSED IN BRAIN, SIGNAL = 0.86; NT HIT: AJ131016.1, EVALUE 0.00e+00; SWISSPROT HIT: P36594, EVALUE 3.20e-01; EST_HUMAN HIT: AU118011.1, EVALUE 0.00e+00
tcttcccaattggctgctaccaagaaacagtgactccagaatgatcaggagccttgtggtaggctcctgttttccctaagtatcttcaggagacaccctgtccctgtattaaaagggcagggagttaaaaggttaaaataattttggtaactgtctgagacgttttacatctaagaaggtgcctactgaattcatgctattcatctgctttagcgtttcagaaggttgcaaactttcaggaaaaattgtaatgtccccttcattttctttctcaggatgttgagtgaactctgctttcccggttcgaaggttcactgcaggacttggtttaaggttctttactaagaaagctggcttttcagtcaactgctgttttgcttttgtctgcaaaacttcatttgtaatatttctcaatactggcgtatctgcgttggtccccacagattcacagttagaacaattaattatttcatggtcattcttagaaggctctttctgaccaccaagc

SEQ ID NO: 12688 - DNA, 507 bp, Homo sapiens
  MAP TO CHR14.3; EXPRESSED IN LUNG, SIGNAL =   2; EXPRESSED IN PLACENTA, SIGNAL = 1.4; EXPRESSED IN ADULT LIVER, SIGNAL = 1.6; EXPRESSED IN BRAIN, SIGNAL = 1.2; EST_HUMAN HIT: BI907734.1, EVALUE 1.00e-76; NT HIT: M28879.1, EVALUE 0.00e+00; SWISSPROT HIT: P10144, EVALUE 1.00e-24
aatatggcaggcttggtcactctgctgtttcttacttcagcagcacctctggaaccaaccttcccctctctccacaaacttaactgcccttttctcaccctctaaggagacctcctggcatgtgtgttcacaggagcccagggagctccttgggaagaaggcaggggtctctgtggagtgtttccaggagggtgtgggctgttttctgctcctcaccttccccaacagtgagcagctgtcagcacgaagtcgtctcgtatcaggaagccaccgcacctcttcagagacttctgatcccagatcataagataagccatgtaggggcgggagtggggcttggcctcatgtcccccgatgatctcccctgaaggaaaagtctgtctgcttgtgggcacccatggaatctgctgggtgggcacctgcttagtggctccagaactcctgggcatttgggagcctgggatagcctggagttgggagtggcctggaggaaggggcttcaatttc

SEQ ID NO: 12689 - DNA, 546 bp, Homo sapiens
  MAP TO CHR1.3; EXPRESSED IN PLACENTA, SIGNAL =   1; EXPRESSED IN FETAL LIVER, SIGNAL = 2.7; EXPRESSED IN BRAIN, SIGNAL = 0.68; EST_HUMAN HIT: AL580130.1, EVALUE 1.00e-121; SWISSPROT HIT: Q14739, EVALUE 4.00e-27; NT HIT: L25940.1, EVALUE 0.00e+00
agacagcagggcataaaagcctcagtacataatatttaataaattaaactgagactaaaattaatactcacgtttcagaacaataattagagaagccattggccaagacacttcatttggatgactgactaaataaaaggcttggaagctgtaaataaagggaacccacaccaagtctccaaaagccagcatgaatccaaatccatcgtggatgatgtccatggtcgtcaacaacgcttcctataaggatacagacggggaaagggagaaggagcttctgtgtttaaagtattcaaataaagtactagtttacaggcaaatgtaaaaagtgctatgggcgggtccacaatcaacatttttttgttaaaggggagagagatctggttcccctggcctgctaggtctttctgctgtcacattctcccgtcacgccagcctctcgctcatgctctggagataacagatctctaaagcatctcccatgcccccatgcccaggccctcccctctgctgacaacccctcctccaacctccacataggcccta

SEQ ID NO: 12690 - DNA, 555 bp, Homo sapiens
  MAP TO CHR5.3; EXPRESSED IN PLACENTA, SIGNAL =   3; EXPRESSED IN LUNG, SIGNAL = 1.5; EXPRESSED IN ADULT LIVER, SIGNAL = 3.3; EXPRESSED IN FETAL LIVER, SIGNAL = 2.9; NT HIT: AF119159.1, EVALUE 0.00e+00; SWISSPROT HIT: O14511, EVALUE 3.00e-19; EST_HUMAN HIT: AI218308.1, EVALUE 7.00e-63
gcttgagtacagggacgagcagtagccatggccaccctgggcaggaggaaaagctgtttccctagagagatagctagggaagttcatcgttggcgagtggggggaatgccagcctcaccttcccttcccttgtgcagaaaacagcggaagcagatgcacaaccacctccggcagaacatgtgcccggcccatcagaaccggagcttggccaatgggcccagccacccccggctggacccagaggagatccagatggcagatgtgagtggctttcctggggcccccttctgagccctcagtggacagccagccttctcatgccccctgcaaggatgggccagggcagcagccagcctatcccatggccagccttgcctgctaggcactgcctcaccaggatggctggccttggtttgctcacttccatgaggaaggggtgggggttgatttgctggagccatcgctgccccaacatcaagtcactctcacacagtgggtctccccaaccaggagctcagtcagtgctcatcacttccctgtccccaacaagaaaga

SEQ ID NO: 12691 - DNA, 550 bp, Homo sapiens
  MAP TO CHR19.3; EXPRESSED IN HEART, SIGNAL = 1.9; EXPRESSED IN PLACENTA, SIGNAL = 2.1; EXPRESSED IN FETAL LIVER, SIGNAL = 1.5; EXPRESSED IN ADULT LIVER, SIGNAL = 2.3; EST_HUMAN HIT: BI830667.1, EVALUE 5.00e-36; SWISSPROT HIT: Q08493, EVALUE 6.00e-29; NT HIT: AF157814.1, EVALUE 0.00e+00
tttaatgtcccctgctcctggaagttccccttgttcctccctctgatccagccctgactcatgggggctgaaggtgtctgtgtctggctgtatctcccccagactgaggtctatcataggaatctttcttttgtttcttagtactcctaaaatgtcgtccaggcagtgactcaacaaagctcacccaggaaggtccgggagatgtactcggacacctggttcccggagcggctggtttcggacaggtgggtcaactcccggttcaggatccgcttgaactggggcggagagaaggtgaagaccgtgatgatggggcaccgtgggccgaggcaggtgagctcagcgatctgccccacctcaccttgttggaggccatctcccccaccgagtgccgggtctgcagcgtctccaactgatccaggcaccagtccagctcgtctagcgtctccaatgccagcttctgccccgtgtcctctgggagccgaggcagtcaggggcctgcccaacccccccgctcagggaccccacgcctctcgcgacttcgtctctt

SEQ ID NO: 12692 - DNA, 541 bp, Homo sapiens
  MAP TO CHR18.3; EXPRESSED IN PLACENTA, SIGNAL = 1.1; EXPRESSED IN ADULT LIVER, SIGNAL = 1.7; EXPRESSED IN BRAIN, SIGNAL = 1.7; EST_HUMAN HIT: BI862315.1, EVALUE 0.00e+00; SWISSPROT HIT: P51580, EVALUE 2.00e-78; NT HIT: gi14763717, EVALUE 0.00e+00
cgatcacctggattaatggcaactaatgctcctctatcccaaatcatgtcaaatgtgccaatatttgtcctgggaagatcaaaaatactgcaacagtatgatgaaatgttccccgaagaactcttaaatgctttggttccaggaatttcggtgattggttcttctgagtaagatagattctgctctgtaaaaaattctcgtatcccaagttcactgatttccacaccaactacgctgtgtccccggtctgcaaaccatttcatctcaacctcttttctgcaaagaggaaaaaataccctcagtccactctctcctttaagaaaagtatctaaatgtttctttaatagctgaggtccttgttcctgatgaaaagcagtgttgccgttcacccacttgtcttgccattcttccagagttagtacttggtttttctgtacctcagtattggagtactcttcaatgtcaagtgaagttcttgtaccatccatagtttcatagacacctttttctcacaagcatatgtcttccatgcctcgcttac

SEQ ID NO: 12693 - DNA, 562 bp, Homo sapiens
  MAP TO CHR19.3; EXPRESSED IN PLACENTA, SIGNAL =  39; EST_HUMAN HIT: BI756663.1, EVALUE 0.00e+00; SWISSPROT HIT: P25112, EVALUE 1.00e-07; NT HIT: AB007164.1, EVALUE 0.00e+00
attctcatttcatcacggggttctgatggttccctttaacgatctgtattctggccccgacacgttctctgaattcatatctgcttcccactccgcggtgcctttccgcggcccgcccttacttcttcctccactccggtggggacccgtaggtgcgcgtggaattcatggacgacacgagccgatccatcatccgcaatgtaaaaggccccgtgcgcgagggcgacgtgctcacccttttggagtcagagcgagaagcccggaggttgcgctgagcttggctgctcgctggtgggtgcaaagaggacacccctttgatagacctttggttggtggtagggaggcttcgttaagcccagggtgagagggtttgggaggcagagtctacatacagagactgacaagagggaggcgggagtttgccaattgctgcggggcctgtcaacatctcatgtttgggtctgtttacagggtcttggatgtcgggttcgaccacttggccgatgggaatggtctgtcacagtctgctccttttttttgtccgccacacgtaactgagatg

SEQ ID NO: 12694 - DNA, 576 bp, Homo sapiens
  MAP TO CHR21.3; EXPRESSED IN LUNG, SIGNAL = 2.2; EXPRESSED IN HEART, SIGNAL = 2.7; EXPRESSED IN PLACENTA, SIGNAL = 1.1; EXPRESSED IN FETAL LIVER, SIGNAL =   2; EXPRESSED IN BRAIN, SIGNAL = 2.5; EST_HUMAN HIT: BF700056.1, EVALUE 0.00e+00; SWISSPROT HIT: Q05086, EVALUE 2.00e-60; NT HIT: gi14754382, EVALUE 0.00e+00
cccacatgtccccagtaaagaagggagtcacagacaacaggtgactactgtggttttcttacagcctttttgtactgggacactatcaccaccacaaatttatccctcttgttatatttttaaatttttaaaaaattttttcttccttttttgtgttttgttttgttttacagcatgccaaatgcttcacatatgtgatggccttcaacaatctctccttaagtttttctttgcctgaatattctggaagtaaaagcacattaaagcaagtaggagatgtaggtaacctttctgtgtctgggccatttttggctagaatcatcactaattttcctggtcctcccacaggtgctctgtctgtgcccactgtaaactgcaagaagagtcttttctgttcatccataaatgaatgatttcccagaactccctcatcagaacggagtccctggtatagccaccgtcatattccgtagtttcttctagtgcttggaaatctagattctggcttccacatataagcaattcaatttcttctggtctgagtaagtactttaagggagattcattggacaccgt

SEQ ID NO: 12695 - DNA, 592 bp, Homo sapiens
  MAP TO CHR18.3; EXPRESSED IN BRAIN, SIGNAL = 0.84; EXPRESSED IN PLACENTA, SIGNAL = 0.83; EXPRESSED IN LUNG, SIGNAL = 0.73; EXPRESSED IN HEART, SIGNAL = 0.79; EXPRESSED IN ADULT LIVER, SIGNAL = 0.82; SWISSPROT HIT: P48595, EVALUE 4.00e-74; NT HIT: gi11425214, EVALUE 0.00e+00; EST_HUMAN HIT: BE148535.1, EVALUE 0.00e+00
gtcaccctgagtaacgggagtgatcataattcacctatgtaattcctagggtgctctctctactactgtttttcattccactttggaattactgattctttctttcttggttccaaatgggcagctggaaaaggccatcacctatgagaagctgaatgagtggaccagtgcagacatgatggagttgtatgaagtgcagctacaccttcccaagttcaagctggaagacagttatgatctcaagtcaaccctgagcagtatggggatgagtgatgccttcagccaaagcaaagctgatttctcaggaatgtcttcagcaagaaacctatttttgtccaatgttttccataaggcttttgtggaaataaatgaacaaggtactgaagctgcagctggcagtgggagtgagatagatatacgaattagagtcccatccattgaattcaatgcaaatcacccattcctcttcttcatcaggcacaataaaaccaacaccattcttttttatggaagattatgctccccctaaatcctgcatatctctcaacaaacaagaccatcttacagtgtgaaaaatgtaccatgagatgga

SEQ ID NO: 12696 - DNA, 528 bp, Homo sapiens
  MAP TO CHR5.3; EXPRESSED IN ADULT LIVER, SIGNAL = 0.74; EXPRESSED IN PLACENTA, SIGNAL = 0.62; NT HIT: U20158.1, EVALUE 2.00e-71; SWISSPROT HIT: Q13094, EVALUE 5.00e-25; EST_HUMAN HIT: N66137.1, EVALUE 0.00e+00
gccatacagcacggactctcaaagatcgctccatgaaggcatgcagagtggcataaataaagactttgggaaaatgtcgaaatttgaaatccttacctctttccctcggagtccagttcccaacaagtaaacttgactttccttctgataacggatctggatgttgtaaactttatctttgtacaacaccatgaggacatatggattggttgttgtttttttagagctgtctctgaccagaaatgtgccatcctaaaaagacaaattcctgttattatgggagcagtaaaagtcaatatttttgttgcttgtaagagtagtagacaagcctctagggatctgacaaacatgtcagttgcactttgcagcttcttgagtgcaaaacctgtcattcaacgaacattcagttctccaaacagctacatatcccatgtgtcatgagttattttgttattaagaaaggcaacagagattgtatcaaagaaatttccaagtcaatctcgttaaagcctcctgataaaaacggaa

SEQ ID NO: 12697 - DNA, 594 bp, Homo sapiens
  MAP TO CHR18.3; EXPRESSED IN PLACENTA, SIGNAL = 0.6; EXPRESSED IN FETAL LIVER, SIGNAL = 0.83; EXPRESSED IN BRAIN, SIGNAL = 0.42; SWISSPROT HIT: P36119, EVALUE 2.60e+00; NT HIT: AF120978.1, EVALUE 3.00e-15; EST_HUMAN HIT: BG679375.1, EVALUE 0.00e+00
tctggacactccaggaaaccgagacgaccacctaatttgtttgttttctgtttcaggccacgtaaactcttagtaaatgcaaatgcgtattttactgaactgcaattgaaagaaccgttatagaaaagaacacaaaatgacagaattattaaaagagaagaaaaacattatttcgtggctgaaaagctgaaccagcaattcaggaaatggaattcgtatttagaaacataccacatacaaaatccgaagtgggtggtttacaaatgattaaggaatgctaatttacagtaaattgcgtccttaagagggcatacacattagttgtacttattatatgtcagtttgacgtaggtactgatttgttgcatgtgctcacaagtgttctatgctcacccccactttagaatgggagtatcacagtgtcattcttaattggcttttaggtattaccaccttgctcttgactggaaatgcaactgtggttaccacctgtgctgcaggtccgtcctggttccctgatttgtgtttcctgttctgcctggatcctgattctcagaaaccagttactggacttctgatccacatcctgaccct

SEQ ID NO: 12698 - DNA, 591 bp, Homo sapiens
  MAP TO CHR12.3; EXPRESSED IN BRAIN, SIGNAL = 0.76; EXPRESSED IN PLACENTA, SIGNAL = 1.7; EST_HUMAN HIT: BI000801.1, EVALUE 0.00e+00; NT HIT: X14008.1, EVALUE 0.00e+00; SWISSPROT HIT: P79179, EVALUE 8.00e-29
gcataatgggcatatggctgtttattatactaatgtctctaattttctatacatttagaacatttcataaaaaaaaaagtaaaacaattgaaaaaggaccatacaactaaattatcccaaaacctccccaaagtaagcaggagcaatggcattgttctggacaaagcatcagtaaggccattgacagtaaattaataggtcattccagaaacttctgtatattaaaaaacatcaaccttttatgataccacttctttaatttcttactcagggaattatgaggaaaataataatgactttctggaagttgagatgtagtttttctaggtccctcatgaacctttcaaggctttttcatttgtattgagtctcaattcttgtaagtataaccagattggtcaaatattagcttgtcttaccactgcaggataaatgacaggcattaactgctcctggggttttgccatcattacaccagtagcggctattgatctgaaatatcccataatcagtgcttctgtctccagcattgtagtttgtagctcgtgtgttgtaaccactctcccatttggccaaacacatccctgaaaa

SEQ ID NO: 12699 - DNA, 502 bp, Homo sapiens
  MAP TO CHR16.3; EXPRESSED IN PLACENTA, SIGNAL = 1.1; EXPRESSED IN ADULT LIVER, SIGNAL = 1.5; EXPRESSED IN HEART, SIGNAL = 1.6; NT HIT: gi14776489, EVALUE 0.00e+00; SWISSPROT HIT: Q9NWB1, EVALUE 1.00e-43; EST_HUMAN HIT: AU118435.1, EVALUE 0.00e+00
ccatggtgacccctagaaagtacgcggggcacgatcgtcctgggatctgggaggaaggtttctgcatggtggctcctcatgacgttctctccctctctgcacctttttgatttttcagggtaatcaggaagcagccgctgcccctgacacaatggctcagccttacgcttcggcccagtttgctcccccgcagaacggtatccccgcggaatacacggcccctcatccccaccccgcgccagagtacacaggccagaccacggttcccgagcacacattaaacctgtaccctcccgcccagacgcactccgagcagagcccggcggacacgagcgctcagaccgtctctggcaccgccacagtaagtggacgtgtttgctacgggtgggaggttatggggaggcgcccccagccctggtaatggcagcgggggtgcacccccatctacccagggactctgggaaacagatcagtccctaagcccaccctcatcataccagct

SEQ ID NO: 12700 - DNA, 554 bp, Homo sapiens
  MAP TO CHR5.3; EXPRESSED IN PLACENTA, SIGNAL =   2; EXPRESSED IN LUNG, SIGNAL = 4.9; SWISSPROT HIT: P31040, EVALUE 2.00e-35; EST_HUMAN HIT: AL581761.1, EVALUE 0.00e+00; NT HIT: AF171025.1, EVALUE 0.00e+00
ttattaagccccctccatcctccggtaatagaaatttaaagtgcaatctagaaaacaatacagtactttcttgaaggaaacatctatcttttcctgtaagatctaaagagacaactgcgaggtgggccccgtcgtcccagccttctttccagctgtgggggaggagccagcaccatcacctgccccttgtagttggtgggaatgccgcccatgttataatgcacggtggggaggacagggatcggctccttcgtgacgtccacgccagcgaagatcatggctgtctctgaaatgccaggcaggcgcgtggccagctgctctggaggtaggtggtgcagctgcaggtagacgtgatctttctcagggccacagcctctggtaagacagaacaccatcacatacggcagagaacggcaacggcaggagacctgagaatacgtcatcttggaagtgtgtgagtttcaacatgttttgatactgaggaaaatttcccctcatgtatggtcaccctctcatcaaatcttttctaagcagctactgtgtgccagggacaa

SEQ ID NO: 12701 - DNA, 555 bp, Homo sapiens
  MAP TO CHR3.3; EXPRESSED IN FETAL LIVER, SIGNAL = 1.9; EXPRESSED IN PLACENTA, SIGNAL = 0.91; EXPRESSED IN LUNG, SIGNAL = 2.5; EXPRESSED IN BRAIN, SIGNAL = 1.4; NT HIT: gi16157147, EVALUE 3.00e-64; SWISSPROT HIT: P37105, EVALUE 5.30e+00; EST_HUMAN HIT: AV713332.1, EVALUE 4.00e-64
aatgaaacgtaacttgcgggtatttcttattttgagaaaacatcacattttctttctttctttctttgaaacattttcctctcttttttaggaagctgttttaggttatgtgaaagagatgtttcctcatctctaaggcttaccagaagctctgatttgaagagaataaatggattttgcacaaaaccacaggaaagtcccggagctccatcccgtaagtttttattttttctatttatggagttggtagctcccataagagtaggaaaacttggaatcaaaagaacccaaaagagaagaggttcctatatcataccctcccatgtagagagaacacattgtgttcacattgtgcatgtgcacatgaccaatatgagcacaacatggaggcctgagggaggcccatgttcctacatcatacctcccatgttttactcatatgcaggcccatcttcctacatcacacttctcatgttttactcatacgtaggcccatgttcctacatcatacctcccatgttttactcatatgcaggcccatcttcctacgtcaca

SEQ ID NO: 12702 - DNA, 597 bp, Homo sapiens
  MAP TO CHRX.3; EXPRESSED IN PLACENTA, SIGNAL = 2.2; EXPRESSED IN HEART, SIGNAL = 5.6; EXPRESSED IN ADULT LIVER, SIGNAL = 3.9; EXPRESSED IN BRAIN, SIGNAL =   5; NT HIT: AJ271718.1, EVALUE 0.00e+00; SWISSPROT HIT: Q9Y6K9, EVALUE 2.00e-34; EST_HUMAN HIT: AW291418.1, EVALUE 1.00e-112
ctggcctctgacttcctgagcctcaggcccatgtgggcccaggcagggcccggcaggccgggctgcccagctcccctccactgtcccctctgccaccagatgccatccggcagagcaaccagattctgcgggagcgctgcgaggagcttctgcatttccaagccagccagagggaggagaaggagttcctcatgtgcaagttccaggaggccaggaaactggtggagagactcggcctggagaagctcgatctgaagaggcagaaggagcaggctctgcgggaggtggagcacctgaagagatgccagcaggtagtcggggcagggccaggttctgaaaacccgcggtgacgccagtgttccacaagggaacccgtggtcggggtcccccaaagcaccctggggctcagtgctgtgccgggagggctcggaactcagaaaagccgtcacactcccagttccggtttattacaaggaaaggacacaggttacggtgagcgaaggctcagggcgcacagggcgggctccaggagagaccaggcgtgagcttcagcggctcctcgcccaggggagttgtgcagacggcacctgtttcttt

SEQ ID NO: 12703 - DNA, 500 bp, Homo sapiens
  MAP TO CHR4.3; EXPRESSED IN PLACENTA, SIGNAL = 0.73; EXPRESSED IN HEART, SIGNAL = 0.68; EXPRESSED IN ADULT LIVER, SIGNAL = 0.41; EST_HUMAN HIT: BE550219.1, EVALUE 0.00e+00; NT HIT: AF163864.1, EVALUE 0.00e+00; SWISSPROT HIT: P37840, EVALUE 2.00e-09
tttgcatggcatttatctgggttaatgcctgaaacaagcaagaccaatataaaggtagcactttttcacaaggggagggtcaggtagccgttccccacagtaagtatcttgctccctgcctccaggcttcacatgaaaatgaaccgtaatctcaccagcttataaatgtaacacaaaacgtacacagccataccttgcccaactggtcctttttgacaaagccagtggctgctgcaatgctccctgctccctccactgtcttctgggctactgctgtcacacccgtcaccactgctcctccaacatttgtcacttgctctttggtcttctcagccactggtacaaataaagagcaacaacagattaaagggtggtagaataacagtgacttaaaatcattccacttccactagccatcggcttccatacacctgtatctacacatgccatagataactgagtggtcagaagaaacaaaagccaccaagatgtccaagtga

SEQ ID NO: 12704 - DNA, 503 bp, Homo sapiens
  MAP TO CHR6.3; EXPRESSED IN BRAIN, SIGNAL = 2.4; EXPRESSED IN PLACENTA, SIGNAL = 1.4; EXPRESSED IN LUNG, SIGNAL = 2.6; NT HIT: gi14758076, EVALUE 3.00e-85; SWISSPROT HIT: Q9UK97, EVALUE 4.00e-24; EST_HUMAN HIT: AA004420.1, EVALUE 0.00e+00
tgttccagagttgagctacccttccttgatgagtcctaaaatgctgttctccccataggcacaactccagatgttccgagctcagtggatgtttgaacttgctccaggtgtaagctctagcaatttagaaaatcgaccttgcagagcagcaagaggctctctccagaaaacatcggcagataccaaaggaaaacaagaacaggcaaaagaagaaaagttaagtattatagatattgtaacaaattacatttttttttttttggcacatggaaattttcactgacacagtaagtaggcattataaccagactttcgggacataaacacatatcttgtaaaataaaaattttgactagtatactagtttatatatttctcacaatttcttctaggtactttggatggtaccactactcctgcatggcttttttctctgtgggtacactgtcttcattgagctgtcttttgttaatttatagacctctgggattcatgtggttcct

SEQ ID NO: 12705 - DNA, 550 bp, Homo sapiens
  MAP TO CHR3.3; EXPRESSED IN PLACENTA, SIGNAL = 0.48; SWISSPROT HIT: P43535, EVALUE 1.00e-18; NT HIT: gi8922935, EVALUE 0.00e+00; EST_HUMAN HIT: AU138652.1, EVALUE 0.00e+00
cagcggctgctagttactccctagccgggagtcctcacctgccagcagcaatctgggcagtgagctcccgctccctccgtagcaaatcctctcgcacactgtcactctccagcacactctgcagggcaggagtgtcatctccagcaacctcttgctcaacgtgcagcagggaaatgtgggctggaacccgcagactccgggtggccagcatcttcagtaacgttgtcttccccaacccattccgccccaccagcccgtaacggcggccccatgccaggttcacatccgctccagccagcagtactctgcaggagtggagaaaggagaccaaagatgctctagaaataggtgcacagcaagtttaatgacaaacctaacattgtttatagccccgtttcacctctccaaattgtcctctaattagaaaaagaaagccaacccctgccaccactattccctcacctatcgccaaaagacacatcaaagttctcaattcgcacatcataggatttgttcttgccagatgattccaaccgactctcctttctgc

SEQ ID NO: 12706 - DNA, 530 bp, Homo sapiens
  MAP TO CHR1.3; EXPRESSED IN ADULT LIVER, SIGNAL = 0.78; EXPRESSED IN PLACENTA, SIGNAL = 1.4; EST_HUMAN HIT: AL546821.1, EVALUE 0.00e+00; SWISSPROT HIT: O75381, EVALUE 5.00e-21; NT HIT: gi16157337, EVALUE 0.00e+00
ccgcttggcatctatctcagctgtaggatctttgctcctgaaaggaggggtggaagggctccatcctgtcccttgcccagtgtccctgggggagcagctcaccatcgccgagcccttgcgggtcagggaaggcgtggcccttcgaaggggggcgtcctgaatgccgccaccaacctcctccccttcttctccctctaggaggcagttccctccatccccatcagccccgaagatcccctcctggcagatcccagtcaagtcaccgtcaccctccagccctgcggccgtgaaccaccacagcagcagcgacatctcacctgtcagcaacgagtccacgtcgtcctcgcctgggaaggagggccacagccccgagggctccacggtcacctaccacttgctgggcccccaggaggaaggcgagggggtggtggacgtcaagggccaggtgcggatggaggtgcaaggcgaggaggagaagagggaggacaaggaggacgaggaggatgaggaggatgatgatgtgagccatg

SEQ ID NO: 12707 - DNA, 514 bp, Homo sapiens
  MAP TO CHR19.3; EXPRESSED IN LUNG, SIGNAL = 0.89; EXPRESSED IN PLACENTA, SIGNAL = 1.5; EXPRESSED IN HEART, SIGNAL = 1.9; EXPRESSED IN BRAIN, SIGNAL = 2.4; NT HIT: AF117647.1, EVALUE 3.00e-82; SWISSPROT HIT: Q9ULV8, EVALUE 8.00e-26; EST_HUMAN HIT: BE903324.1, EVALUE 5.00e-82
gaaagagcctggtgaagacgtcgaactcgaagatggacacgtgcccgctgcaggtgaggtcaatggtggtgcgcaaggccagggctgtgcagcctggttccacagggtggcaggtgcccaggagggactcaaactcagcccagggcagcacacacctgggtgggagaggggtgggggagacaccgctgaggcctcccagagcctatgatgggagggtctccaggaaagaagcagctgtgggcctggacccctgggtccctgggccagggcaggatggggctccgggagctgaggacaagggcttactcaccgggctccgcaactttccctccagaaggtgtgggcgggggccttggtgagctggtacatgtgtccacagtactttcccccggggaagagtgcgtgcagctctgcgtgcatgtggctgaagatgatggccagcttggccacgtgtcgcctgtggggatgggcaaggactctggctatccttggggctcccactgacaccctcttc

SEQ ID NO: 12708 - DNA, 572 bp, Homo sapiens
  MAP TO CHR9.3; EXPRESSED IN FETAL LIVER, SIGNAL =   1; EXPRESSED IN BRAIN, SIGNAL = 1.4; EXPRESSED IN HEART, SIGNAL = 1.4; EXPRESSED IN PLACENTA, SIGNAL = 1.4; SWISSPROT HIT: Q15569, EVALUE 5.00e-17; NT HIT: gi14739649, EVALUE 3.00e-64; EST_HUMAN HIT: BG819640.1, EVALUE 1.00e-55
cgtgtggacgattttcactgcgcggagaagatcggggccggcttcttctctgaggtctacaaggtaggaccggccgagagggcagaggggcgggaccgagccttcaaccagaggctgaaactagggggccgggagtgcggggaagagggtccagactccggcgacccgcccgacctgcccggccctcgccggctgctcctgcccccaggttcggcaccgacagtcagggcaagtcatggtgctgaagatgaacaagctccccagtaaccggggcaacacactacgggaagtgcagctgatgaaccggctcaggcaccccaacatcctaaggtgagcggccccagtctctgggcagcttgctgggcgggagagaaagggaaagatcccgcgggaaaagtggaactgaggaggagctgaggcctttaatagcctatccttctatcttccccatcctcttgcaggttcatgggagtctgtgtgcaccagggacagctgcacgctcttacagaggtgaggataggccacgaaggagggatccccaccccccttcacccccaaggataaagggagtc

SEQ ID NO: 12709 - DNA, 542 bp, Homo sapiens
  MAP TO CHR15.3; EXPRESSED IN FETAL LIVER, SIGNAL = 0.97; EXPRESSED IN ADULT LIVER, SIGNAL = 0.86; EXPRESSED IN BRAIN, SIGNAL = 0.74; EXPRESSED IN PLACENTA, SIGNAL =   1; EXPRESSED IN LUNG, SIGNAL = 0.91; EXPRESSED IN HEART, SIGNAL =  80; SWISSPROT HIT: P08023, EVALUE 5.00e-37; NT HIT: J00071.1, EVALUE 0.00e+00; EST_HUMAN HIT: AA651688.1, EVALUE 1.00e-105
ccctttaatgagccatcaggacttgaggttgagctgtgtgggaatccaaactatgacttcttttaactcaagggcttcttgagccttctagattttactctgggagaccctaagatttccagggaaaatcgtgcctctgcaccagaccctacaactcaccaatgaaggagggctggaagagtgtctcaggacagcggaagcgctcattgccaatagtgatgacttggccatcaggcagttcatagctcttctccagggaggaggaagaggcagctgtggccatctcattctcaaaatccagggcgacatagcacagcttctctttaatgtcacggacaatttcacgttcagctacagaaataaagagtatcacagtcatgctctgaagcaagaagtcaattatagggaggtaggcggattcagtgagagaggaggaaagcagacccacactgtggcagatgagacacacacactcaccagtggtgacaaaggagtagccacgctcagtgaggatcttcatgaggtagtcagtgaggtcccga

SEQ ID NO: 12710 - DNA, 541 bp, Homo sapiens
  MAP TO CHR3.3; EXPRESSED IN LUNG, SIGNAL = 0.47; EXPRESSED IN HEART, SIGNAL = 0.97; EXPRESSED IN ADULT LIVER, SIGNAL = 0.7; EXPRESSED IN BRAIN, SIGNAL = 0.8; EXPRESSED IN PLACENTA, SIGNAL = 0.6; SWISSPROT HIT: P51685, EVALUE 3.00e-71; NT HIT: gi15295591, EVALUE 0.00e+00; EST_HUMAN HIT: BG741873.1, EVALUE 1.00e-08
tttggaaacctttcacacccacacctttgctcactgctactagcatgccattcaagaaaatgttttttatatttagtcttcattgatcctcacaaaatgtagtctacgctggaggaacgggaggagtgctgctggcaggatgatgacttttcacagctctccctaggcatttgtcttcctaggtagttgaagatttggctgcaacttttctgaaatatttctgagaggtgtttcttgaacttctccccaacaaaagcatagataacagggttcacacagcagtgagtaaaggaaatgatttctgtgacatgggtggcataagtcagctgttggcttatgctacatccatccaagatgtgcatactgtgcaaggaagtgaggaaaagaaccacgttgaatgggacccagaaaagtaaagatgcaatgaccacaatgagcaccaacctgatggccttggtcttgttgtggttttgacacctcttcagctggtgcaggattttaatgtagcagaacataaagatggtgaatgggatcaacaagc

SEQ ID NO: 12711 - DNA, 511 bp, Homo sapiens
  MAP TO CHR16.3; EXPRESSED IN FETAL LIVER, SIGNAL = 0.48; EXPRESSED IN ADULT LIVER, SIGNAL = 0.7; EXPRESSED IN BRAIN, SIGNAL = 0.91; EXPRESSED IN PLACENTA, SIGNAL = 0.56; SWISSPROT HIT: Q92179, EVALUE 2.00e-10; NT HIT: AF176839.1, EVALUE 0.00e+00; EST_HUMAN HIT: BE857538.1, EVALUE 1.00e-105
tccgtattcctgggaaagtgctcgactgagaccttgggagtcttgggaagtccaatgggtagggtagccgaatctgagggctgatccctgagggcactgggcagtaattggggcatgggatgggcatgagggcccgggtccctaaagttgcccactccacccgaaggcccccagccgcccgcatgtggctgccacggttctccagcaagacagtgacagtgctcctcctggcacagaccacctgcctcctgctcttcatcatctcccggccagggccctcatccccagccggcggcgaggatcgtgtgcacgtgctggtgctgtcctcgtggcgctcgggctcatccttcttgggccagctcttcagccagcaccccgacgtcttctacctgatggagcccgcgtggcatgtgtggaccaccctgtcgcagggcagcgcggcaacgctgcacatggccgtgcgcgacctgatgcgctctatctttttgtgcgacatggacgtgtttgatgc

SEQ ID NO: 12712 - DNA, 562 bp, Homo sapiens
  MAP TO CHR11.3; EXPRESSED IN ADULT LIVER, SIGNAL = 2.1; EXPRESSED IN BRAIN, SIGNAL = 1.8; EXPRESSED IN HEART, SIGNAL = 2.6; EXPRESSED IN PLACENTA, SIGNAL = 1.5; EST_HUMAN HIT: BG507100.1, EVALUE 1.00e-101; SWISSPROT HIT: Q13614, EVALUE 1.00e-31; NT HIT: gi14768566, EVALUE 1.00e-101
ataggatgggagggggaacaaaagaaatacaacataaccaaatgcacaatataaaaaaccaattcattcaaacattaaaattcactagtagttccaagtatcaaagcatttacccatttttcattgtttagaaaggtaccttcatgttgattgcaattataagtaaaaagctaatataaacaaaggggtagagagagtctttgtttgggatatagtaacacacacccaccttaatatgttctagccaatgagtagattccaagttagacaaccagtgagtttcctcaatgttggggtacacaatctccttaagttttcgtaatgattctctcataacatgaatattgtggatatccaggaaaactagttcagcattttgataggcatcttcactttcataacctccaccctttgcctggaaaaaagcacacatcatggaaaatcataaatgaatgcacatctgtaaacaagtgacataaaatatccaatagcataaaagatgatacatattactggagacaaggaaaactccacaggaaaatgtggatggctcaggacaact

SEQ ID NO: 12713 - DNA, 540 bp, Homo sapiens
  MAP TO CHR14.3; EXPRESSED IN LUNG, SIGNAL =   1; EXPRESSED IN HEART, SIGNAL = 1.2; EXPRESSED IN PLACENTA, SIGNAL = 0.93; EXPRESSED IN ADULT LIVER, SIGNAL =   1; SWISSPROT HIT: P08311, EVALUE 6.00e-24; NT HIT: J04990.1, EVALUE 0.00e+00; EST_HUMAN HIT: BI020549.1, EVALUE 0.00e+00
gcagctaaccagaatcgaggggatgggagggccctggggctcagctgtatcctctttctcagcagctctgagctagggatgacagggtggtacttgccttcaggtttgcttccccagattaagttgataaatagcctgagtttatattttgagccccaatatgtgtcttccatctcttcctcttgctctttttgatcttatcctcctttcctcctcatttacactggcctgttccctcccgcaaagactcacttggtctttctttcaccctttcattgctacaactcttctttcagatggctcttccaccgaagagctccgcagggctgtgttcctggctggccaggaagttccttagctcctcaccttccccagcaatgagctgctgtcagcacaaagtcttctcgcaccaggaaccctccacatctgctctgacctgctggactctggatctgaagatacgccatgtaggggcgggagtggggcctgctctcccggcctccgatgatctcccctggaaggaagcatttggcacttagc

SEQ ID NO: 12714 - DNA, 502 bp, Homo sapiens
  MAP TO CHR3.3; EXPRESSED IN PLACENTA, SIGNAL =   2; EXPRESSED IN HEART, SIGNAL = 1.2; EST_HUMAN HIT: BF834091.1, EVALUE 0.00e+00; SWISSPROT HIT: O15350, EVALUE 2.00e-16; NT HIT: AF124539.1, EVALUE 0.00e+00
aaccagagcatcagggaatgataggatgctgtggactaaatgtccgtttttctccctgttttcattctccatgacaccttcccctgttgcacaggatctggcaagtctgaaaatccctgagcaatttcgacatgcgatctggaagggcatcctggaccaccggcagctccacgaattctcctccccttctcatctcctgcggaccccaagcagtgcctctacagtcagtgtgggctccagtgagacccggggtgagcgtgttattgatgctgtgcgattcaccctccgccagaccatctctttcccaccccgagatgagtggaatgacttcaactttgacatggatgctcgccgcaataagcaacagcgcatcaaagaggagggggagtgagcctcaccatgtgagctcttcctatccctctcctaactgccagccccctaaaagcactcctgcttaatcttcaaagccttctccctagctcctccccttcctcttgtctga

SEQ ID NO: 12715 - DNA, 592 bp, Homo sapiens
  MAP TO CHR6.3; EXPRESSED IN FETAL LIVER, SIGNAL = 0.59; EXPRESSED IN PLACENTA, SIGNAL = 1.8; EXPRESSED IN LUNG, SIGNAL = 3.3; EXPRESSED IN HEART, SIGNAL = 2.7; NT HIT: U91328.1, EVALUE 0.00e+00; EST_HUMAN HIT: BG292093.1, EVALUE 8.00e-32; SWISSPROT HIT: P43276, EVALUE 2.00e-22
cttgggggatttcatctgtgtactacagctcttttcctgaaatgcgtaggtggctcttaaaagagccgttgggttactagaagaaacttctaactgaatttactttttcttgggtgccgctttcttgggtttggcagtctttggcttcgtcaccctagccttggccgccttgggttttacagccttagctttagcagggcttttagctactttcttgggctttacagttttgggtttttttggattcttggaggatttccttgttgccgcaggctttttagcctttttcggagtcttgacgctctttttgctagcccccgtggcctttttgagctttttagatgcacccgttgccttagtttttgtagccacctttgaggcgccgggcttggtttccacggaggacgccttcttgttgagcttgaaggaacccgaggctccggtaccctttgtctgcaccaacgttcccttgcttaccaggctcttaatgcccagcttaatgcggctgttgttcttctccacgtcgtagcctgcggccgccagcgcctttttaagagctgccaacgacacaccaccacgctccttagaggag

SEQ ID NO: 12716 - DNA, 550 bp, Homo sapiens
  MAP TO CHRX.3; EXPRESSED IN HEART, SIGNAL = 1.1; EXPRESSED IN PLACENTA, SIGNAL = 1.2; EXPRESSED IN ADULT LIVER, SIGNAL = 1.1; EXPRESSED IN BRAIN, SIGNAL = 1.2; SWISSPROT HIT: O60673, EVALUE 2.30e+00; NT HIT: gi14759660, EVALUE 5.00e-78; EST_HUMAN HIT: BE300803.1, EVALUE 0.00e+00
ggtttgcaggcagttttaggaatgacatggagtttgaagctctggaaatagattcctttaggacaattcatgttgcaaaccccgcttagaggtctgctgctccaggggcagctttgggcagtgagtattggggttcaaagcacatttctgttgtagaacagtctcagcactggggaaggcctgtggattaaatttccctgactcttagtcagtctttgggatgtcccagggaggatttggggtcccctttgactcctggcctagtcaggctgcccagtaatagttctttctgccccgcttgatccaggctgcagcgtgtgttgcaagtcttcttggaatcagctgcaggacctgtgccgcctggccaagctctcctgccctgccctcggtatctctaagaggaacctctatgactttgaagtcgagtacctgtgcgattacaagaagatccgcgtgagtctggggtgaccatgctctgggaggggacaggtcacaaggaagttagtgtcctgccctcttgtccccaactgcccacatctgtttccaaagg

SEQ ID NO: 12717 - DNA, 576 bp, Homo sapiens
  MAP TO CHR1.3; EXPRESSED IN LUNG, SIGNAL = 2.9; EXPRESSED IN PLACENTA, SIGNAL = 0.99; EXPRESSED IN HEART, SIGNAL = 1.9; EXPRESSED IN ADULT LIVER, SIGNAL = 4.8; EXPRESSED IN BRAIN, SIGNAL = 1.7; SWISSPROT HIT: P42898, EVALUE 8.00e-33; NT HIT: AF105980.1, EVALUE 0.00e+00; EST_HUMAN HIT: BG951918.1, EVALUE 8.10e-01
ctgggaagaactcagcgaactcagcactccacccagagcccccagcctgtgcgaggacggtgcggtgagagtggggtggagggagcttatgggctctcctgggcccctcacctggatgggaaagatcccggggacgatggggcaagtgatgcccatgtcggtgcatgccttcacaaagcggaagaatgtgtcagcctcaaagaaaagctgcgtgatgatgaaatcggctcccgcagacaccttctccttcaagtgcttcaggtcagcctcaaagctccttgcttcggggtggcctttggggtaacctgccaatagggatgacagtcaggagaggctggcctccacctgttcaaggcgagggatgaagagaccacagggactgggcagagagagtcctctgctttgggggctctgatcttgcaccttccaacagcacagcacagcttgaactaaaacagtgagtggctgggctcatgactgatatgcttctgaccccagagatgactctcaggggaggtggctcagagcccagttccaagagtgggggtggattgctccaaactcccacactgtcct

SEQ ID NO: 12718 - DNA, 570 bp, Homo sapiens
  MAP TO CHR6.3; EXPRESSED IN PLACENTA, SIGNAL = 0.53; EXPRESSED IN BRAIN, SIGNAL = 1.2; EXPRESSED IN LUNG, SIGNAL = 0.48; EST_HUMAN HIT: AI908449.1, EVALUE 2.00e-01; SWISSPROT HIT: O00270, EVALUE 7.00e-36; NT HIT: U65402.1, EVALUE 0.00e+00
cagcaggttgaccttaagccgagggtggaccacacggaggtaccggtccaaagccacggcggccaggaaggccatccccacgctgcggctgaggtccagcaggaagtgcagggcccagcagcccacacggcccagatgccaagcctggaggctcaggtagaaggcggccaggaaaggcaggcacgcagccaacagcaggtcagccagggccaggttgagcaggtagacagcgtacggcttccacaccctgacccggaacaggaaggtccacagcgccaccgcgttgcccagcagacccagcccacactccagccccagcaagacacccacagctgtggccaccacagtgctgggggctgagcagtttgggaatggcatcacccggccgtgaggggctgcaggcacagctggagcaggtacaggaggaactctgtgctctttcttacaaaatgaaagaaaaggccttttcctgccacagagtagacaagatctacatttgcccaacaagaacagttcctcagcagaatagagtccacagcaaaccaaaattcatttggggaaagaggatga

SEQ ID NO: 12719 - DNA, 586 bp, Homo sapiens
  MAP TO CHR21.3; EXPRESSED IN PLACENTA, SIGNAL = 1.6; EXPRESSED IN LUNG, SIGNAL = 1.1; EXPRESSED IN HEART, SIGNAL = 1.1; EXPRESSED IN ADULT LIVER, SIGNAL =   1; SWISSPROT HIT: Q13009, EVALUE 4.00e-37; NT HIT: gi15320009, EVALUE 1.00e-125; EST_HUMAN HIT: BE180472.1, EVALUE 0.00e+00
tccccaaaatgagaaacagcagaagcattataaagctgcccatgggtgacaggtggatctgtagcaaaacagctctatgagaaaataaagttccctgcgcctttgaaatttcaacaggaaatgcagggccagtcatcagcccatcttgcacacacattttataccacctgccagacagaggcactcactgaaacacacaagccgcatgataaactccccgggtcgtggcacaacggagttcagactcgcccccagcaccctgcacagccatacctgggttgctggtgagaaaggcgagggggctctcgccaaggtcggcagggccgtccactcggtggggcgggctttccagcagctccactccttcctccagctcggggtaggtcctcaccaggaggcccagcgagggctgtgagaggaaatctttgagcatagaagagttcagggcgtcagcagcacgattattgatctcaagaatctcatctcctgctttcaggcctgccaacgcaagatggaaaatttttaatttcacacacattatcagaacacaacagcttaggagctctgctataaagggcacacctgc

SEQ ID NO: 12720 - DNA, 581 bp, Homo sapiens
  MAP TO CHR2.3; EXPRESSED IN PLACENTA, SIGNAL = 1.6; EXPRESSED IN LUNG, SIGNAL = 2.2; EXPRESSED IN HEART, SIGNAL = 2.7; EXPRESSED IN FETAL LIVER, SIGNAL =  21; EST_HUMAN HIT: AL046173.1, EVALUE 0.00e+00; SWISSPROT HIT: Q9NSD9, EVALUE 6.00e-23; NT HIT: gi15296120, EVALUE 0.00e+00
tatgcagggaaaggatggtctctacccacacagccagacagtgctttctactttattaaacatcaaagcccaaatagatgttccctgtggaggaggacttaaggacactaggggaggagaaagggacacctgggaagagaatcacaccacagagaccaatcttcacaaaaagggtccaacattgatttctagggaggagcagggcatggtcagctcaaatttggtgataacgtcaggatgaaggaccccaagcttcccgacgctttgacccctggcaaagatctctgcacatcgcccggggaagaaagcaggccctgaaaaagagaaagtaagagaaaaatcaatgtttcttctggcaaaacatcaatagacatttaacactaaaagcccactagtctactttaaaaataactattctttaaatcactggctatgaaaagagaacgcttcctcatactttctagtatttaaaagaaggatttgctatcaagaaactcttgcaaggaaaaaatccggggcaaatatgaaaataagggccctgtatttttggtaacagggacccgagcaggaaggatgaaatc

SEQ ID NO: 12721 - DNA, 586 bp, Homo sapiens
  MAP TO CHR6.3; EXPRESSED IN PLACENTA, SIGNAL = 0.86; EXPRESSED IN LUNG, SIGNAL = 1.6; EXPRESSED IN HEART, SIGNAL = 1.7; EST_HUMAN HIT: AL543158.1, EVALUE 9.00e-78; SWISSPROT HIT: P50174, EVALUE 4.00e-12; NT HIT: gi14755393, EVALUE 6.00e-78
tggtcagtcagtgcttggtcaaatgtggacgacttgagctatcaaatgccagttcatgaaaatgttagttttttgctgtttttctcctttcccagctgaaaatgtagccaaaaaatggcaagtgagtagagaagatcaggacaaggttgcagttctgtcccagaacaggacagagaatgcacagaaagctggccattttgacaaagagattgtaccagttttggtgtcaactagaaaaggtgagtatatcatagtggtttaaacatcaacctatttataggtaagagtaacatctaaaagagtaatacataggaatctttagaaattatatcttagttatgtttttcaggttgcaaatatatgtcctggatacatgaatgtggggagggggtatgctgggtttacaggacacggtaacatgggacctatgtcagcactcaagcactcttggttccagagcgtccatgaccactgtgcacacacagcaggtttcatgagaagctggagcactggctcatggttgttaggaggcaccagctgacctgtttcctgtataggctcaacctcctcagaagtggacacccat

SEQ ID NO: 12722 - DNA, 520 bp, Homo sapiens
  MAP TO CHR14.3; EXPRESSED IN PLACENTA, SIGNAL =   2; EXPRESSED IN LUNG, SIGNAL = 2.7; EXPRESSED IN HEART, SIGNAL =   2; SWISSPROT HIT: Q9Z1P2, EVALUE 2.00e-21; NT HIT: M95178.1, EVALUE 5.00e-75; EST_HUMAN HIT: BG769255.1, EVALUE 2.00e-75
gggctggaggataaggagtcagagggagaccctatcataaacctttttaattttttttaaattttagatcatgcacatatattatcttgtcaaaataagtcaaatgcaaaggttctgggtctataaaatccttaggatgctcttcctcagggggcagtcctgcaaaagtgacccacagagcatgggccaggggccccaggggagccagcctccggggagtggaggtggggctcacctggatctcctcaatggtgtgcacaatgaaggtgtcctgcaggtcctccatggccccctccatccagttgttgaagggtgcagcccgcttggcatactccaagtacagctggtcaatggtctccagcagtttctcggtccgctgggagtgccaaatagggtaagggttagtacagtgatgtccagaatcatcccccactcctatcaagatcctcctggtgagccccaggtctagaagcactgactcaatcaggcagaaagaacaagctcttcctgccagctgtat

SEQ ID NO: 12723 - DNA, 588 bp, Homo sapiens
  MAP TO CHR6.3; EXPRESSED IN LUNG, SIGNAL = 1.7; EXPRESSED IN HEART, SIGNAL = 2.4; EXPRESSED IN PLACENTA, SIGNAL = 1.7; EXPRESSED IN ADULT LIVER, SIGNAL = 2.3; EST_HUMAN HIT: BI760949.1, EVALUE 0.00e+00; SWISSPROT HIT: P08565, EVALUE 3.00e-06; NT HIT: gi5454143, EVALUE 0.00e+00
cttcatcctacccatcccacccaaatcttactctactcatctcattctcattaattttgggaaatcatcagaagatgtgttcgttgagtaagagattaaaagaaataagctttttgacccctgccaacaccccatccccagggtggtcaccctccaatacaataagatgccaggaagagtaagttgccctttctgatgccgtaatctgccatcatcttcccatcttccagtctctttccattgcaagtcacaatctgggtctcagggattatacccgtcttagtctcgatcattgctttcacttgtgccactgagctggaccttcgcacctggaggaggtgcctctttgcctcatcacctgactccacaagaaacaagggcagctcctcatcactgggcttcaccactttcagggtaaggtggatggtcttctctttgtcaatgccataagatgagaggcttctccgtggctttaagatcttggagcccagcaaaagaacctggtcctgcacaggaaccttggtcttagaccggacatgttctttgatttttttcacgctgtcatatgggttggcatcaaaggtcatt

SEQ ID NO: 12724 - DNA, 543 bp, Homo sapiens
  MAP TO CHR19.3; EXPRESSED IN HEART, SIGNAL = 0.81; EXPRESSED IN BRAIN, SIGNAL = 0.56; EXPRESSED IN LUNG, SIGNAL = 0.69; EXPRESSED IN PLACENTA, SIGNAL = 0.46; SWISSPROT HIT: P98187, EVALUE 4.00e-18; NT HIT: gi14767726, EVALUE 2.00e-62; EST_HUMAN HIT: BG741060.1, EVALUE 0.00e+00
aacccctccaccttcatttccaagtgtctcccaactgcctgttgcacatgctctgttcatcttagcctccttgccttgacccaaacagttccacttgtttggaggaaacttctctttctctcgctctctctctctctccttctctccttctttgtccttcaatgcctagttctcatcatctctccaggaaggctcttcttgtctccctgggctttgctctccccacacccacacccccactccatcccatgttcccaggccctgggcaagaactcactcctgacaattgctgtcaaagctgaagatgcatttctgcagactgtccagggtcataaggctgatgtgctcaaacacatccagacaggtgctgccctccatggccaggcgttgccacttggcctggccagagaagggagcagggctggggccaggccttggctcctctgagtccccctgcaaccccaaccaccaggatggactcccccagaggcatgctcctggttttctgtcccagacccccatcctcagggaggactacgcttg

SEQ ID NO: 12725 - DNA, 542 bp, Homo sapiens
  MAP TO CHR14.3; EXPRESSED IN FETAL LIVER, SIGNAL = 0.82; EXPRESSED IN BRAIN, SIGNAL = 1.1; EXPRESSED IN PLACENTA, SIGNAL = 0.87; EXPRESSED IN HEART, SIGNAL = 0.55; EST_HUMAN HIT: AA461375.1, EVALUE 0.00e+00; SWISSPROT HIT: Q9PQ33, EVALUE 5.90e-01; NT HIT: AF151047.1, EVALUE 4.00e-82
tgatttggtaccgtgtcttgtacagtaagttgaacatcatgaatccagaacatttatctgcagttattcttatataatgttaataactaggtttttcattgaatgttagtcaactattttagtaacttagtaaaaggaatcttctaagagcattgtacaaatatagcacatacaatatagatttctttttattttacttatgccctcttttttatttctaaaagctgcacatgtaaacttaaatatttaaactgaaatgggatgtcttatagaatgatttgggggggtgttaatgttgtaaaataatatctgtacacaaaatattggttttatatattataggtatgcccaagaggacagagaacgaatgcacagaaatattgtcagccttgcacagaatctcctgaactttatgattggctctatcttggatttatggcaatgcttcctctggttttacattggttcttcattgaatggtactcggggaaaaagaggttagcacatttctatgaacatatctggctggactaatgttggaa

SEQ ID NO: 12726 - DNA, 558 bp, Homo sapiens
  MAP TO CHR6.3; EXPRESSED IN HEART, SIGNAL = 3.6; EXPRESSED IN PLACENTA, SIGNAL = 4.6; EXPRESSED IN BRAIN, SIGNAL = 2.1; SWISSPROT HIT: Q99808, EVALUE 8.00e-05; NT HIT: gi14758708, EVALUE 0.00e+00; EST_HUMAN HIT: AL567014.1, EVALUE 0.00e+00
atacaacggtcagacccagctcctagccaccccaggacaggcagacagtctgacagacacggacgcagacacacagacacatacacagagacacacgtgttctccaagcccaagagcctccactggcctgcacaagcagggatcagtcagagccaagagtggagaaactcaagcaaatgccgaggctacaccccgtccctcgactctgagccccaaacccacaatgtccccactgtccgtccagaggctccctccccagggcctggagatccgggcccagcacacgccgtggaaagcagaagtcagttagaagaaaaaaccgccagaccactcaggatcacccctggcagaaggaaggggcaggaggcagacagggagggaggcaggcagtccttctgtccatcctttgtcacacaattgcccggaacaggaaggagaaaacagcccccagtgccagacccagacacaggaagaaggccatgatggctcctgcggtctctgcctcagctggcttcactttcctaagcggggaaggaagggcaaggctacctcagaatg

SEQ ID NO: 12727 - DNA, 553 bp, Homo sapiens
  MAP TO CHR13.3; EXPRESSED IN ADULT LIVER, SIGNAL = 0.84; EXPRESSED IN PLACENTA, SIGNAL = 0.72; NT HIT: D86956.1, EVALUE 0.00e+00; EST_HUMAN HIT: BG205435.1, EVALUE 0.00e+00; SWISSPROT HIT: Q92598, EVALUE 1.00e-36
gggttgagtatgtggagaagcagttgaaaatgaactggatggatctgagttaatctgataactagtttttgttttctttaggaattgaacaacacatgtgaacccgttgtaacacaaccgaaaccaaaaattgaatcacccaaactggaaagaactccaaatggcccaaatattgataaaaaggaagaagatttagaagacaaaaacaattttggtgctgaacctccacatcagaatggtgaatgttaccctaatgagaaaaattctgttaatatggacttggactagataaccttaaattggcctattccttcaattaataaaatatttttgccatagtatgtgactctacataacatactgaaactatttatattttcttttttaaggatatttagaaattttgtgtattatatggaaaaagaaaaaaagcttaagtctgtagtctttatgatcctaaaagggaaaattgccttggtaactttcagattcctgtggaattgtgaattcatactaagctttctgtgcagtctcaccatttgcatcactgagg

SEQ ID NO: 12728 - DNA, 586 bp, Homo sapiens
  MAP TO CHR2.3; EXPRESSED IN PLACENTA, SIGNAL = 0.52; SWISSPROT HIT: Q22516, EVALUE 2.50e+00; NT HIT: AF210836.1, EVALUE 0.00e+00; EST_HUMAN HIT: BF571049.1, EVALUE 0.00e+00
ttgacttctggcatttgctgctggaaaagaaagctcactgccaaattgtagaatgccatgataggtgttttttattcctctcattcctgacttttttctctcttttcctttccatttctcatttgttttattgggggtttatttgtccctgtaagtcacttgaagttttctgagctaagccaggggtggttgtgagaagagggacctcccgggatcccaagtccctgttggactgggcctgaaaggagcctcatggggctgtcgctgtcttgttctctgcagatgccttgggggtgggactactcaggttcctccaacctgggagagctgaagctcctgctggaggaagcagtcatgctgcggcgcctcaagtccgacgtcctttcccagctgcctgccaagcagcgcaagatagtggtgattgccccaggacggatcaatgccaggaccagagctgccctggatgctgcagccaaggaaatgaccaccaaggacaaaactgtgagtccagggctggagacagatttggaagcagacatgtctaggtgttcctttccatgagaggcccttgaaaatgacctggcat

SEQ ID NO: 12729 - DNA, 522 bp, Homo sapiens
  MAP TO CHR14.3; EXPRESSED IN PLACENTA, SIGNAL = 1.9; EXPRESSED IN ADULT LIVER, SIGNAL = 0.99; EST_HUMAN HIT: AW952302.1, EVALUE 0.00e+00; SWISSPROT HIT: Q90734, EVALUE 7.00e-18; NT HIT: M95178.1, EVALUE 3.00e-61
aaccagaactcagacccacgctcctaggatgaattcatacatgtcatccccaacttgtttcaagagaccaaaaccagctgcgctcataggcagagcagatgccaaggtgtcaggcagcaccaatagacagtatctcgtcctgggccaggttccgcctcacctgagatgacctccagcagcagcatgagcttcaggccatcccggaagtcctcttcgatgttctcgatctgtgtccccgccttccggaggtgggagttacaccatgccgtgaatgtctgggcagagacaagaagggcaagtggtcagggggctggtgttgtcaccctcattggacaagccatttaatggtgccagggggtgggaggtggacacctactcagcagagcctctcaacacagttgccccaccatggtctcattcactgcatcaaccaagcactgagctacccacagggcagcagctgagggaccctacacagagcctgctacatgggtgggagcaagcaggatacatgaagcagca

SEQ ID NO: 12730 - DNA, 570 bp, Homo sapiens
  MAP TO CHR6.3; EXPRESSED IN PLACENTA, SIGNAL = 2.6; EXPRESSED IN HEART, SIGNAL = 2.3; EXPRESSED IN ADULT LIVER, SIGNAL = 2.3; EXPRESSED IN BRAIN, SIGNAL = 3.2; SWISSPROT HIT: Q92833, EVALUE 3.00e-19; NT HIT: gi16162622, EVALUE 7.00e-96; EST_HUMAN HIT: AA223818.1, EVALUE 6.00e-85
ctctcttcctcagcagtgggtaggtgtttttattttattatttttttgttccatccttggaggtgtttgttttttttctcaagagatattcagatgagattttaaaaatccttatttgttctattttgcatcttcttcctgctgggggattttgcttgaaatacgttcaaaaggcacagatgatcttgggagcatttgaaaaataaatttaaaatggcagtagagatcagttgctttgttttttctcctcggttttgtttcattgtggtgttccttctggaaagggtgagggtcaaggcctgtgtttatgagctgtttttcttattccaccaggttctcctgcgctgcccaacagcatggtgtattttggaagctctcaggatgaggaggaagtcgaggaggaagatgatgagacagaagacgtcaaaacagccaccaacaatgcttcatcttcatgccagtcgacccccaggaaaggaaaaacccacaaacatgttcacaacgggcatggtaggtccaccgttgaacttggataagaaaaaatctaaagctttgggtgagagctggaag

SEQ ID NO: 12731 - DNA, 533 bp, Homo sapiens
  MAP TO CHR17.3; EXPRESSED IN PLACENTA, SIGNAL = 1.1; EXPRESSED IN FETAL LIVER, SIGNAL = 0.75; EXPRESSED IN ADULT LIVER, SIGNAL = 0.99; EST_HUMAN HIT: BG424745.1, EVALUE 1.00e-100; NT HIT: gi11426863, EVALUE 1.00e-100; SWISSPROT HIT: Q9UHJ6, EVALUE 7.00e-33
ctgccaggacacactcactgcggcacagcccagcaggcggggtgatgctgacgcagctccggcctattctcattctcccggaaacccagcacccgagtgaaagtgcagttgcccgtaccgatatttcaaaagccagaagatggttgcacagccgaagcccgtggccacactgagatgagacttcggctggggcagagaggccaggaattcgctgctacatcggccatcctgccacgtgaccaggtggctaacagctcggggctcgaacaccggggtaatccctccctctgtccattcacagcctggaacaaaagagatgaccaaaaatgaagaaaagagcaaatgactaggcatggcgcggccttgatactactctgctggtgagtgacaaaatatgtgcgaatcgtcccatgataaagcctggcacacctatgggtcctgatagcactggctttagtacttggctctaccacataatgactgtgggaccctgggcacgtcacatactccctccatttgccccacttctctgt

SEQ ID NO: 12732 - DNA, 507 bp, Homo sapiens
  MAP TO CHR17.3; EXPRESSED IN BRAIN, SIGNAL = 0.43; EXPRESSED IN PLACENTA, SIGNAL = 0.54; NT HIT: gi7705900, EVALUE 0.00e+00; SWISSPROT HIT: Q9UKN7, EVALUE 1.00e-33
tcctccgggtaaaaatagggcacctcgggggggtagatggcctcgtccccaccgccatagacgccttcggcataggggacggtgtagtggactccgtagggatcaaagtagggtacatcgtagggagtgtggtatgggaggtcatagggtgggtatggcgcgtcgtacggcgcatagggatccaggtagtagccataagggtgcgcctcgccctcgtacccatcgtggtagctgtaaggagacgagtaccccgacgggggcgcatatgggggttcgtaatcgtcgtagccgtagccgtaggtgtaccccggatcaaaggggccaccgtaatagtcggggtggtagtagtcgtagggatcctcgggcgggtacccgtagtagtggtcgccgtagggtggccaggccgggctgtaggggccgaggcccgccaggtagggttcctgctcctcgtagcggtggagtgactgccggtcgtagtagtcgtcgccgtcgcggtgatagtcataa

SEQ ID NO: 12733 - DNA, 503 bp, Homo sapiens
  MAP TO CHR1.3; EXPRESSED IN LUNG, SIGNAL = 1.2; EXPRESSED IN PLACENTA, SIGNAL = 2.1; EXPRESSED IN HEART, SIGNAL = 1.7; EXPRESSED IN ADULT LIVER, SIGNAL = 2.1; EXPRESSED IN BRAIN, SIGNAL = 1.5; NT HIT: gi16165134, EVALUE 0.00e+00; SWISSPROT HIT: Q9UMX2, EVALUE 3.00e-22; EST_HUMAN HIT: AA629086.1, EVALUE 0.00e+00
aagaaatcaaatctgggggcatacatgtattgagttttaaagcatgttctaatcatttgttctatcctttcacaggtgccctgctgcgggccttcagctacatgggctttgaggtggtcagaccagatcaccctgccctccctcccttggacaatgtcatctttatggtgtatccccttgaaagggatgttggccacctgcccagtgagcctccttgaacatgcttattccaacgctttgaggggctggaagccttgacacatggaatcaggggcccgggatgtgattcaggacactttccatcctaggaataaagggtagtgcaatcatcaagtgttcacggtttcttgggggggtgggtaatagggttgactggagtgggatatacaccttacagagctaaattcactgaaaagatcacagggacctgaactacggaggaaagtacctaaggatttttggttccctttgccttcctccatgccccaaactatttccccatt

SEQ ID NO: 12734 - DNA, 583 bp, Homo sapiens
  MAP TO CHR1.3; EXPRESSED IN LUNG, SIGNAL = 2.5; EXPRESSED IN HEART, SIGNAL = 2.3; EXPRESSED IN PLACENTA, SIGNAL = 1.7; EXPRESSED IN ADULT LIVER, SIGNAL = 2.1; EXPRESSED IN BRAIN, SIGNAL = 1.9; SWISSPROT HIT: P36222, EVALUE 5.00e-10; NT HIT: U62662.1, EVALUE 1.00e-102; EST_HUMAN HIT: BF915980.1, EVALUE 3.00e-19
ctctgttctctcaggcaccccctgaccctcacaatacccagggtggttatgggttttcctacttcatagtaggccagcatccctccttccttggtgaaggggcctggagtgccagaccctgtggctggggcccccactctggtgtctgatgaggaggccagtgtgaaggagcgtccgtaggtaggcatgccaaggatcagcttgctggcaggggtccccttctgcagccactgttgcacagcagcatcctggtggaagagggcagggttaattttctcagccctcagcctggttctgattatctaagtctgggggatccagaggcagagctaggagggcaggggctcctcagctggagctctacgggcctttgttaggattccagccctaccccatcttctttagagcctgccttagacccgtgaccccagtgaagaagctgcatggcatgataaccagagagcgtgggcttcggacgcagacaaccattcactgaacaaatgtgtactgatggcccactgtgtgccaggcgctgtccatggtgcttcagacacatcagtgaacaaggcagacacagatccct

SEQ ID NO: 12735 - DNA, 587 bp, Homo sapiens
  MAP TO CHR17.3; EXPRESSED IN BRAIN, SIGNAL = 1.2; EXPRESSED IN ADULT LIVER, SIGNAL = 1.7; EXPRESSED IN HEART, SIGNAL = 1.6; EXPRESSED IN PLACENTA, SIGNAL = 1.3; SWISSPROT HIT: O43572, EVALUE 4.00e-19; NT HIT: gi6005706, EVALUE 5.00e-63
tgttgaaatggctccagaggttttttagatttattactgctatgtgcccttaaaaaaaatctattcattctttcacttaacatttatcagaagagtgctctgtgtaagacgtggttaggcatagtgccagtcttgaaggaagttacagcctaataaaagacatagggcatgttgtttggttactgtaatatgaagtggcatgtgttaaatgtcaggggagaactacaaagtcataaaaaggtgggagagattacatacaggtaaaggaatcaggaatgacaccatggggagtaaggtagtgttgacctaggcctttaagatacaatagggacagtatggaaagagtatatttttcccacttaaactctttccttggtcgttccctcaaattttcccttttgtccatgtgcaggcactttagtgagtttctgcgaagtcaccatttctgtaaataccagattgaagtgctgaccagtggaactgtttacctggctgacattctcttctgtgagtcagccctcttttatttctctgaggtaaagtctgcatttcttttcacactctattcgagcattccagcctctaac

SEQ ID NO: 12736 - DNA, 583 bp, Homo sapiens
  MAP TO CHR11.3; EXPRESSED IN PLACENTA, SIGNAL = 1.5; EXPRESSED IN HEART, SIGNAL = 1.6; EXPRESSED IN ADULT LIVER, SIGNAL = 1.7; EXPRESSED IN FETAL LIVER, SIGNAL =   1; EXPRESSED IN BRAIN, SIGNAL = 1.3; NT HIT: M29474.1, EVALUE 0.00e+00; EST_HUMAN HIT: AW299720.1, EVALUE 5.30e-02; SWISSPROT HIT: P15918, EVALUE 1.00e-41
gtatactgggacccttggggaggcaaagatgaatcaaagattctgtccttaaagaccttaaggtttttgtggaaggaaataaaactttacatgtatatatttaagcacttatatgtgtgtaacaggtataagtaaccataaacactgtcagaagaggaaataactctatgatcagcacctaacatgatatattaaggtagaagatttaatacatatcttttggaatacatgaataaataattgaatgtatttatttttattatttataagatacatcagtgggatattgatattggtcttaatatgacttgttttcattgttctcaggtacctcagccagcatggcagcctctttcccacccaccttgggactcagttctgccccagatgaaattcagcacccacatattaaattttcagaatggaaatttaagctgttccgggtgagatcctttgaaaagacacctgaagaagctcaaaaggaaaagaaggattcctttgaggggaaaccctctctggagcaatctccagcagtcctggacaaggctgatggtcagaagccagtcccaactcagccattgtt

SEQ ID NO: 12737 - DNA, 599 bp, Homo sapiens
  MAP TO CHR2.3; EXPRESSED IN BRAIN, SIGNAL = 7.3; EXPRESSED IN LUNG, SIGNAL =   7; EXPRESSED IN PLACENTA, SIGNAL = 5.2; EXPRESSED IN FETAL LIVER, SIGNAL = 7.7; SWISSPROT HIT: Q01101, EVALUE 3.90e-01; NT HIT: AB017268.1, EVALUE 0.00e+00; EST_HUMAN HIT: AI859714.1, EVALUE 0.00e+00
acccagccattttgtctcagaaaattttgttcctatgcaatgtttgattttgtgctaaataaaacatttaaatcagaattataccagtctttaaatctttttgctaacacagtattttccagggcattttttttttctatttttttttaaagcagctgaaacaggcacttgtttatttccccagaaggaagcagaatggggtccttggggagtctctgtcccagcctggtgccccggacaggcagatctcacttccagaagagcacattccagaaaagtagtcagcaagggcagaggcccagggacagcagtgggaagagcagggcgccttaggtgtggtgctccagcgcaccctgggccagtgctgccaggaagagctgccagcccttggccagtgacagtggtgcctcctgcagctcccgccacaggaatgggctgccaaggagcgtggctgccgggcttgtcaacaccagcagggcagcacagagggtccagggcccaaaggctcggcgagcacagcggcagcaccatagtggcggccagcaggaagtccagtcagaagttggtgagggcgatgcagcccagctgcagtactaggt

SEQ ID NO: 12738 - DNA, 503 bp, Homo sapiens
  MAP TO CHRX.3; EXPRESSED IN HEART, SIGNAL = 9.5; EXPRESSED IN PLACENTA, SIGNAL = 7.5; EXPRESSED IN FETAL LIVER, SIGNAL = 8.1; EXPRESSED IN ADULT LIVER, SIGNAL = 7.9; EXPRESSED IN LUNG, SIGNAL =  12; SWISSPROT HIT: Q03721, EVALUE 7.00e-01; NT HIT: U82695.2, EVALUE 0.00e+00; EST_HUMAN HIT: BG575157.1, EVALUE 1.00e-124
ctcaagggactctgcctctggctttgcagtactttgcacagcatgagcaaggggctgctgcgggcgcagccgacatcagcaccctagaccagaagctgcgtctggtcacttccgacttccaccagctaatcttggcttttctccaagtctacgacgacgagctgggcgagtgctgccagcgcccaggccctgacctccacccgtgcggccccatcatccaggccacgcaccagaatctgacttcctacagccaagtaagggtgcccttcccctcccctctaaccgccccctcccctgttcactcagactgagagcttatatcctgcttgggctcaggggcctcagcagcccctgacaagggaccacagggcaggaccaggggctgggaggggctgggctgggctccctgctggccagtggcgtggcagggctctgggcccctcagtgggctggggaggtgctgcttctggtccttggacctgcccaccttagcaggcactagc

SEQ ID NO: 12739 - DNA, 593 bp, Homo sapiens
  MAP TO CHR11.3; EXPRESSED IN ADULT LIVER, SIGNAL = 0.41; EXPRESSED IN PLACENTA, SIGNAL = 0.5; EST_HUMAN HIT: AI991109.1, EVALUE 1.00e-106; SWISSPROT HIT: P29775, EVALUE 4.00e-13; NT HIT: AF124438.1, EVALUE 1.00e-106
gaaacttccccctggcttaggagacctaagacctattgcttagtcttggctatgtcactagttagctgtgtgatcctgatcaagtcacttaagttctctgtgcctcggtttcctgatttgtaaaataaaatattgtgctagtttattcttaaatacctttttaatgtccaacatctggtgattctgcgatccatcttccctgacaagtaggggagaaatgagtatctcctacttgcaggaagatgacctaactcaatgctctctgccctatctttgctgtgacttagatcattagtaacctgcctttctgcttttcatcagacccgagagggactcacttatgggaattcatccgcgacatcctcttgaacccagacaagaacccaggattaataaaatgggaagaccgatctgagggcgtcttcaggttcttgaaatcagaggcagtggctcagctatggggtaaaaagaagaacaacagcagcatgacctatgaaaagctcagccgagctatgaggtgaggagtttcatgtctctgaaaacaaaaaggctgtacgacccattatttacctagcaaccttcatcggatcagt

SEQ ID NO: 12740 - DNA, 515 bp, Homo sapiens
  MAP TO CHR16.3; EXPRESSED IN LUNG, SIGNAL = 0.52; EXPRESSED IN HEART, SIGNAL = 0.57; EXPRESSED IN PLACENTA, SIGNAL = 1.5; EXPRESSED IN FETAL LIVER, SIGNAL = 0.51; EXPRESSED IN BRAIN, SIGNAL = 1.1; EST_HUMAN HIT: BG285039.1, EVALUE 5.00e-79; SWISSPROT HIT: O94916, EVALUE 7.00e-22; NT HIT: AF089824.1, EVALUE 3.00e-79
gctatagttccaggcccattccagaggtcccccagccaatgcacttcataaaagggaagatatatcttaatataccaggtttgtatctcatgctaccattgtagcatcaaaaaaatagacatttaaatcatggctaataacaaattttagaatgaaatagttggtaaattttgtgattttaaacttttctttttgtgtgtgtgtatatgcagcaatgaaaactactggatgtaatttagataaggtaaatattatccctaatgccctgatgactccactcataccaagcagtatgattaagagtgaagatgttactccaatggaagtaacagcagaaaaaagatcttccactatttttaaggtaagctgtattgactagtgcacaaacctcctatataaaaattgctgtcttttacttttcctatttttttaacattatttttactttggatgcacttaatgaattttgctgtaaagagggaatgctttatacttcagcaaaattgcccacatag

SEQ ID NO: 12741 - DNA, 516 bp, Homo sapiens
  MAP TO CHR16.3; EXPRESSED IN PLACENTA, SIGNAL = 1.3; EXPRESSED IN LUNG, SIGNAL = 1.7; EXPRESSED IN FETAL LIVER, SIGNAL = 1.5; EXPRESSED IN BRAIN, SIGNAL = 1.3; SWISSPROT HIT: P79955, EVALUE 7.20e-01; NT HIT: gi14774683, EVALUE 5.00e-75; EST_HUMAN HIT: AL046800.1, EVALUE 4.00e-55
aaatccctaccagacacccctaaaatgctaggacccctgagaatcacaaccaaagttcctcaccgtccatcagactgacaaagaacaacagcccctcgtgagaccccatcttcagcaaacttccagaactgctcttcttccagttaaacatgtccagggctttctcatcaccgctcacagctgcctttgccaactgaaccaggtccctgaaagcaaacacgacacgaagcaagattcttctgccactcctacagcacctcagggctggggcccctcctgggtcaggagcagcccgcttcccacctcccccgatgtaaacacacacacaggtcacagggcaagccccacacttactcgccaggaggggggagccggaagatgcagtgcgtgaggtgtttcccatactcgtgtttcagcagaggcgtcccttgcactcggcccctttggtccaacctccacaagagcaagacaccaagctggaaagacccaacaccacgtgttaggacaggtgtcccg

SEQ ID NO: 12742 - DNA, 579 bp, Homo sapiens
  MAP TO CHR1.3; EXPRESSED IN LUNG, SIGNAL =   1; EXPRESSED IN PLACENTA, SIGNAL = 1.4; EXPRESSED IN ADULT LIVER, SIGNAL = 0.64; EXPRESSED IN BRAIN, SIGNAL = 0.95; NT HIT: gi14737828, EVALUE 2.00e-62; EST_HUMAN HIT: N90025.1, EVALUE 4.00e-98
atgtggcttgtagtccccagtgaaagagaatcagaaatggccaaaccctcctggttagtctcaatgaaagaacctggagatataagtgttgacaggctcttaagaagaatcaaaccaaagaagggctatgttagcttgcctcctggctgcctcccaccccagcctctgtgagatttcatatggcagactggagaagcagctctacatgcctagtgcctagcatggtgccagccacagagcagccattccatcaactttttttttcaattagtgactcaacaaaccaagttgataatttgacaatttgtaacttgatctgccaggctaaaagtctcctgggagtaagggcctggtgcaccttgactccactctgcaggagtggcctggcgagcggcattagcctccatgacgttggagagctcgttgatgatcagctttaggatcttgaccagcaaaggaatgtttgtccagcgttctgggtctgggaaggaagaaaaaggtttcaagtcagagtgtcactgagcttacttctggaagtacccctgtcctctcctcagtgccactcaccagagttcacca

SEQ ID NO: 12743 - DNA, 513 bp, Homo sapiens
  MAP TO CHR20.3; EXPRESSED IN LUNG, SIGNAL = 0.68; EXPRESSED IN PLACENTA, SIGNAL = 0.62; EXPRESSED IN ADULT LIVER, SIGNAL = 0.48; SWISSPROT HIT: Q62936, EVALUE 2.00e-05; NT HIT: gi14772589, EVALUE 1.00e-101; EST_HUMAN HIT: BG683190.1, EVALUE 1.00e-101
gcttggctctatgccaactctccctccaccaccccacactgtcttcaggcaggtccccaaattctgtttctgttttcagtcctgcccacctcccagcccccagtgctgggatggggccttctgaggcctgggggaggtagagaagcagtggaacacctccacccagcccctctgaaccctggaacgtcagtgcttaccctccagcaccacctccttgcctgtcttcttgaggacctgcaccgcctcatcatgggtagcagaggacaagtcttccccattcacagacaggatggcatcccccacaaaaagggcctctgtctggtcagctgccaatcccttgaagatcttggaaatgagaataggcatcttgttctcccggccgcctgcacaggtacagaaggaggacaagacttaggcagatactccaacacttgggagtcacatcaagacacaattatttctgaaggcttcccttggtgcctagcccagtgctggaaaaggcaatgggagaat

SEQ ID NO: 12744 - DNA, 579 bp, Homo sapiens
  MAP TO CHR3.3; EXPRESSED IN LUNG, SIGNAL = 0.9; EXPRESSED IN PLACENTA, SIGNAL = 0.66; EXPRESSED IN FETAL LIVER, SIGNAL = 0.64; EXPRESSED IN BRAIN, SIGNAL = 1.1; NT HIT: gi16159391, EVALUE 1.00e-101; EST_HUMAN HIT: BF223621.1, EVALUE 1.00e-101; SWISSPROT HIT: P32849, EVALUE 2.50e-02
ttcagtgaatgggaaacaaagtaaacaaaaactaatttttaacatggttttctttctccataccttccaatagtggctctgccttcatttttcacagactgataaatctttctctcttcatctgaaagtgtaatgtgctgaataaatactttacgttctggtaactccaaaacaggttttcctttaattttgcttgtctttgttcttctaagtgtaatatttttaattagggactgtaaacgcctaatcagaataaaacaaataattatgtaacttttaatttctacataaattgatccaagaagaacgaaacagaacattttaatttgttactgttttatagcttctgtaaaagtgtttttaaaatcccttatttgggattttaaccaatctgataatcacagaagtattctacaaaaataaaattattaaaacaaatgtatggaaatttcccctcaatacctaacatagtttaatctttttatatcctgtccttattttcgtaagttctgttccccatttttgttccaatcactaactcttttacttctcaactgtcctgtcaactccatcaccgaa

SEQ ID NO: 12745 - DNA, 595 bp, Homo sapiens
  MAP TO CHR22.3; EXPRESSED IN PLACENTA, SIGNAL = 0.61; EXPRESSED IN BRAIN, SIGNAL = 0.62; SWISSPROT HIT: Q9Y698, EVALUE 2.00e-19; NT HIT: gi11418049, EVALUE 2.00e-74; EST_HUMAN HIT: BE670632.1, EVALUE 2.00e-23
gaagggaaagggtaagtggcaattggccaagtaccctgagaggaagcgggcatttgggccttttctcaagtggtgggaagaagatggggtgtggggatgctcctggaggatttggtacaggctcgggagttgctacaggacaggagcccccccaccaccttcctcccctgcaacacgacctagtgcaagtcttggagatttcctctcctctctccccatctctctctgccaggccctcgtggcccctgagcacccacaccccagccttcttcccagtggcaggactggatcagtggctgttacctgcagacacgaagaagatgccggcactcaggatgatgttgtgtcgagttttgtagaactcgctggctgcgatgcagaggccacccatgaaaagcagaatcacactcaggattgggaaaatgctggaggccctcacggcccctgtggaacacagagggtcagggagaaagagaacggcatggctgtgagactgaggcacacagaggcaggtgggagagcagccccgaggcgctgggggtttatggacacagccttagaggagaggttgctttgcaatcctagggagggagag

SEQ ID NO: 12746 - DNA, 596 bp, Homo sapiens
  MAP TO CHR19.3; EXPRESSED IN ADULT LIVER, SIGNAL = 1.2; EXPRESSED IN BRAIN, SIGNAL = 1.1; EXPRESSED IN LUNG, SIGNAL = 1.1; EXPRESSED IN PLACENTA, SIGNAL = 1.2; EXPRESSED IN HEART, SIGNAL = 1.2; SWISSPROT HIT: Q03923, EVALUE 4.00e-51; NT HIT: gi16175145, EVALUE 0.00e+00; EST_HUMAN HIT: AW969266.1, EVALUE 0.00e+00
atagcaaggcccgtgtactgagtgaaggcttggccacattccttacattcatagggttttattccagtgtgagttcttacatgttgagtaaggtgagttgatctagtgaaggctttcccacattccgtacatttgtgtggttttattccagtgtgaatttgaatgtgaacattaaaggatgaggaatttctaaaggatcttccacattctttacattcaaaggacttctctcctttatgagtttttgcatgtgcagaaagttgagaaaaattagtgaaggatttcccacagttcttagtcttttcggatttctttccagtatgaactgctacacactgctttaagtgtgaggaagttgtgatggctctctcacattcctgaaattcacagagtttctctccaatgtggattcccatgtgattatcaaggcttgcaaaatacttaaagccttttccacattccttacatttgtagggttgtcttccattgagaatttcaagatgcacagcaaggcctggagttaaggtgaagacttttccacatggattaaatttggaaagttcttgtccaatagaggcttccttgtgcacactgat

SEQ ID NO: 12747 - DNA, 593 bp, Homo sapiens
  MAP TO CHRX.3; EXPRESSED IN ADULT LIVER, SIGNAL = 1.3; EXPRESSED IN PLACENTA, SIGNAL =   1; EST_HUMAN HIT: BE276266.1, EVALUE 0.00e+00; SWISSPROT HIT: P51810, EVALUE 1.00e-41; NT HIT: gi13651268, EVALUE 0.00e+00
ctctaaggctttccaaggggagccctgggaccccgaagtctacctgctgtggcagacagggcattaccttcagacagcatgctcagggcttcgtcagaagtctgcccacccacttgagacaccttcccggaagcagggttttcatggggcatcagtggggatgggtgagccccctcagcagccgaggtggtcagtgattcccactggatctccttcctgggagactgaaaacccaggctgcatcctgtccagccgtagaaggccaaagacaagagaaatccctgggctggattcaggattccctggagagaggacagaaagacacatggcagtcagtgcagcgtagcagaagtcagagccctgggctgtcacagagtgacacactccccccaggatgcccacagggctggactcgcttggaagggaccatgggttggctggtggctggttgactggttggtgggttggtttggggcaagatgaagattggccacagtaggtgctgtaccttcaagggtgcctgaaagcagaggggagtggggagaggaggggacggggaggagctggagtagagaagggaagaaaggggacag

SEQ ID NO: 12748 - DNA, 587 bp, Homo sapiens
  MAP TO CHR12.3; EXPRESSED IN PLACENTA, SIGNAL = 1.1; EXPRESSED IN BRAIN, SIGNAL = 1.1; EXPRESSED IN FETAL LIVER, SIGNAL = 1.1; NT HIT: gi8922090, EVALUE 0.00e+00; EST_HUMAN HIT: BI667342.1, EVALUE 0.00e+00; SWISSPROT HIT: P53919, EVALUE 8.60e-01
taaaggatcccactgccttggtgccagtcttggccaggacccacactgggacagtcagcaggagcttgagcggggtaggggccggctgggagtcactccagcactaaaaactcaccaggcgggaatgttactcctttctcatgccggaggaaagcctttgattgtgggtcccgaagaaaaacgacttctcgggtagaaagttggtgatgtagccttcaattaaaatgaggatatctcttacatgtcactgtgaacccctaaagctttccagactgagaagctaatcacaccaaccccacaccatgcatacagtgagccgcagcccagagctcgcaaggcaagggaagacccgctttccggtaatgcagtcgtgaccatacttcccttattgaaccattcagggcttttctttttagccaatgataatgttgtaataaatccagctagcgttcctgctgcagcaacagtaccaaggaaaattccacctttaaccaggaaaagccggtcatccgtggacccgggagcctccagcagagaggccggctgcccagtaccagagcccgctgtctccatgtttaggtcgcctc

SEQ ID NO: 12749 - DNA, 597 bp, Homo sapiens
  MAP TO CHRX.3; EXPRESSED IN PLACENTA, SIGNAL = 3.4; EXPRESSED IN FETAL LIVER, SIGNAL = 5.8; EXPRESSED IN BRAIN, SIGNAL = 3.6; NT HIT: gi16161715, EVALUE 0.00e+00; EST_HUMAN HIT: BI223770.1, EVALUE 0.00e+00; SWISSPROT HIT: P51858, EVALUE 2.00e+00
cttgaatctaggcagctgggataataggtgtagcaggggacaggagctcaggaagatgccaccctcctgtgctacccctatcctccatttgaggattgcccctcccaggccccacaagcccacactgctgtttatgctccatcttttctattcccacccctgatcccaacccagagtcccagaatgactaagagagtggggaaaggatgtcaggaggtggaaacagttggcccaggccccagcagaagcctggaaaatagctccaagtggaaggaacataatagcctcatctcttcccagggagcagaagacatggctctgactctgataataggggtatggggacctagaggggagggccaggtgacctgtctcatccaggtcaatctccatggtctgggcttggagtgggaatagtgagtggaagaggagagcaggttggggtgggaaaggggttcccagttttcgggccatggccagtttccccagtagcactcagacagcagcaggaacagggtgggggctcctcttgaaacattggtggctacagactctcatgatctctgatgcctggggtctcagcatcttcattggcag

SEQ ID NO: 12750 - DNA, 537 bp, Homo sapiens
  MAP TO CHR19.3; EXPRESSED IN LUNG, SIGNAL = 4.6; EXPRESSED IN PLACENTA, SIGNAL = 1.6; EXPRESSED IN FETAL LIVER, SIGNAL = 9.3; EXPRESSED IN ADULT LIVER, SIGNAL =  19; SWISSPROT HIT: Q13011, EVALUE 8.00e-18; NT HIT: AF030249.1, EVALUE 0.00e+00; EST_HUMAN HIT: AL564379.1, EVALUE 0.00e+00
tggagaaggtgacggttttcagttccttgttctcagtcgtggcctggaccgacttcacgaggtcttgggtctgcagcatgctcatgttccaggacgcctggtaccgagggtgttgagagagaacgaggagagagattagcaggggccaatcaggataaagcatgagagcaccctgcaccctggttggtcgcctggggttagaggagggctgtgattggtcggagcgtgcaccttaccacgtagttgaggctctcggccaccgaatggtcgcgggaatacagcaggttgaccttggtgctctgcaccgccacggggctcttgctggaaatctcggccgccagcgctaaggcagcatccagcatgacctctttgtctgggaacacccggctgcagtgaaagagatcagggaccgggtgggctgggaagggctctctcctccagcctcccgcagatgaagaagtggccactcacagaggaaggcccaagaccccagagaaacagcccaatcagagcagggggctgaccccacaataaaga

SEQ ID NO: 12751 - DNA, 575 bp, Homo sapiens
  MAP TO CHR9.3; EXPRESSED IN LUNG, SIGNAL = 1.4; EXPRESSED IN PLACENTA, SIGNAL = 1.4; EXPRESSED IN FETAL LIVER, SIGNAL = 1.6; EXPRESSED IN ADULT LIVER, SIGNAL = 1.5; EXPRESSED IN BRAIN, SIGNAL = 1.7; SWISSPROT HIT: Q15528, EVALUE 3.00e-16; NT HIT: AJ224639.1, EVALUE 0.00e+00; EST_HUMAN HIT: BG480521.1, EVALUE 4.00e-86
tgcgtgttctgctaaggttggggcatagagggtggctggggtagactctgcctgcactcagaggtctgtgctgcactctaggtcccaggtctccccgctgcgctgcttgaggctcggccatggcccagcagagagccctgccccagagcaaggagacgctgctgcagtcctacaacaagcggctgaaggacgacattaagtccatcatggacaacttcaccgagatcatcaagaccgccaaggtgggggtggggtggcccaccaaggggagcagagtctgagaaggggtggagacaggagaggccaggggctgagcagcgcgagtgaatagtgttctaggcaggaagcacccagtgcacagggagctggtcagtagataagcaaaccaaataatggcacgtccagcccttactaacagtatggatttggatggagatttcactttttagtgcctcagtttctcctgcatggtggggtccttgtgatgactggtgagtttatctgtgtaaaacagttacctcggggcctggcacacagccaatgagcaggagaaaagcagactgaggggagaagtg

SEQ ID NO: 12752 - DNA, 556 bp, Homo sapiens
  MAP TO CHR3.3; EXPRESSED IN PLACENTA, SIGNAL = 2.3; EXPRESSED IN LUNG, SIGNAL = 0.99; EXPRESSED IN BRAIN, SIGNAL =   1; SWISSPROT HIT: P51406, EVALUE 9.00e+00; NT HIT: U16953.1, EVALUE 5.00e-63; EST_HUMAN HIT: AI792300.1, EVALUE 0.00e+00
ctgcttggctttcatcagtgataccctgtagactaaatgcagattctgctacattttgattctgctacaatctctggaatgcatggttcttacaatgtctatgttaattagggacatttaggaaagcatttcaataacactgtttttattttttccccgaatcagtgatctttctcttgttaaaaatactcagtagcttttattttgaagattacctattttgtggtagagctctggcagctggacctccactttctctctctggaaaagatggtactcagcttgttcacagaccggtgggatcatattgaactgtcttgctacagaataggcttcctagggaggaatgagattacaaccaaatttatactgatgagaaataaggcttcgctgtaatttgtatgcatgagaaatgtttactttggtgaaatcagtacaaaccaagaaacatgtaggatgccaaataataagcaaacttgtcaccaccgatttcactaagagcaatatgaaaggtaggaaacccttattaattctttgggagggtttggattgagtt

SEQ ID NO: 12753 - DNA, 594 bp, Homo sapiens
  MAP TO CHR1.3; EXPRESSED IN PLACENTA, SIGNAL = 1.1; EXPRESSED IN FETAL LIVER, SIGNAL = 1.7; EXPRESSED IN ADULT LIVER, SIGNAL = 0.94; EXPRESSED IN LUNG, SIGNAL = 4.2; EST_HUMAN HIT: BG482966.1, EVALUE 0.00e+00; SWISSPROT HIT: P02675, EVALUE 4.00e-03; NT HIT: AB036706.1, EVALUE 1.00e-118
gtgctgatttctggcctctcctggccacagggtggcactgtcgagagggagataccatctctgtctcttctaagactatttgctctacaaactctttgaaaagatagtgtgaagccaagacagtcagtgcctctgctcataggtgagcagaacacaagatgcatggagcatcgtcttccagcaagtatgtgttggagtcttctgagtgtgcttttgacttcctagggcttttctattcacggagctgagatgaaccctgagctctcagacagggaggctctgggctggttctctctacagatggcctgtattttctccgcaccaagaatggtgttgtctaccagaccttctgtgacatgacttctgggggtggcggctggaccctggtggccagcgtgcacgagaatgacatgcgtgggaagtgcacggtgggtgatcgctggtccagtcagcagggcaacaaagcagactacccagagggggatggcaactgggccaactacaacacctttggatctgcagaggcggccacgagcgatgactacaaggttggtgccacttctctcctacttgggtgagggtgaggtgtggagt

SEQ ID NO: 12754 - DNA, 581 bp, Homo sapiens
  MAP TO CHR1.3; EXPRESSED IN LUNG, SIGNAL =  41; EXPRESSED IN PLACENTA, SIGNAL =   4; EXPRESSED IN FETAL LIVER, SIGNAL = 6.4; SWISSPROT HIT: O00622, EVALUE 1.00e-52; NT HIT: AF307860.1, EVALUE 0.00e+00; EST_HUMAN HIT: AW965092.1, EVALUE 0.00e+00
cagtgctcaaagacctgtggaactggtatctccacacgagttaccaatgacaaccctgagtgccgccttgtgaaagaaacccggatttgtgaggtgcggccttgtggacagccagtgtacagcagcctgaaagtaagttccttcagggacgtgtagactgttgcctggcaggtgggtgggatgtgaacatctttttgaagaaagagaaatatcacccctaactttccttctctcctttctcttacagaagggcaagaaatgcagcaagaccaagaaatcccccgaaccagtcaggtttacttacgctggatgtttgagtgtgaagaaataccggcccaagtactgcggttcctgcgtggacggccgatgctgcacgccccagctgaccaggactgtgaagatgcggttccgctgcgaagatggggagacattttccaagaacgtcatgatgatccagtcctgcaaatgcaactacaactgcccgcatgccaatgaagcagcgtttcccttctacaggctgttcaatgacattcacaaatttagggactaaatgctacctgggtttccagggcacacctaga

SEQ ID NO: 12755 - DNA, 591 bp, Homo sapiens
  MAP TO CHR1.3; EXPRESSED IN LUNG, SIGNAL = 3.8; EXPRESSED IN HEART, SIGNAL = 1.7; EXPRESSED IN PLACENTA, SIGNAL = 1.6; EXPRESSED IN BRAIN, SIGNAL = 1.2; EXPRESSED IN ADULT LIVER, SIGNAL = 1.6; NT HIT: X53750.1, EVALUE 0.00e+00; EST_HUMAN HIT: AU132331.1, EVALUE 4.00e-95; SWISSPROT HIT: P08289, EVALUE 1.00e-28
ttctccctcctcacaccaaccctatgagggggctacgttcccacccgttttatagtcaaatgaagaatcgactcagagaaatgaactgggaccagaacccaccactgagtgaaccccaaaccctcagcttcccctgtcacggaaggaatcccatggatattacagactcccagcatatcagagctgggagccccacagagaagccttttctagccccttcccatgacacagtcagaaagactgaggcctggacaggccacgaagctggccctgctccccactgctcccccgactcaccagcgtccttggcccagcgcaggatggaggtgacctcgttcccctgggtggtgttgcaccgggaacgctcagtggctgcgcttacccccacggtgccctcattggccttcaccccacacaggtaggcggtggcggtgccggcgctgtcagggacctgggcattggtgttgtacgtctgcaggtgggagaggagggtcaggagatggccaggccttcgccccagtggcacccaccccgcctacactcacaccatggggactggggcgtgagggaccagagaggaccccatagcct

SEQ ID NO: 12756 - DNA, 587 bp, Homo sapiens
  MAP TO CHR19.3; EXPRESSED IN FETAL LIVER, SIGNAL = 2.1; EXPRESSED IN ADULT LIVER, SIGNAL = 2.4; EXPRESSED IN BRAIN, SIGNAL = 1.8; EXPRESSED IN PLACENTA, SIGNAL = 1.5; SWISSPROT HIT: P41479, EVALUE 5.80e-02; NT HIT: gi13650691, EVALUE 0.00e+00; EST_HUMAN HIT: R09644.1, EVALUE 0.00e+00
ctcagaacacctgcctctccccttgcagagacctccaggtggctccggtcggaggtggagaactggctcctagccaagtcaggctgtgaggtgaccttcaacggaactcgggccctggcgcatctgcaggccctgacccccagcatgggattgtacccacccccgggtttccccaaactagacccagtggctccgatcacttccgagcccccgcaagccacgcccagcagtaacatctcctgagtagaacctacctccctgcccagtcagcaggctaggaactaagccccgcctccttcacgacaggctgtcaattacggttattatacttttcactccaacttccaataactgacaggtgattatttttgctgcactgtgtgcttaagcaaagcagccaatcaaagcagctagcagttgttaagtcttccccgccccttcgatgaacagccaatcaaagcgatttagctctgcttctgttccatttcttagtcccaccctcaccataaacatccaagtgtggtttggctgaggagctgagggtgtctgccaatcacagctgctcagctctggcttctgtaaaccgc

SEQ ID NO: 12757 - DNA, 525 bp, Homo sapiens
  MAP TO CHR19.3; EXPRESSED IN BRAIN, SIGNAL = 0.56; EXPRESSED IN ADULT LIVER, SIGNAL = 0.49; EXPRESSED IN PLACENTA, SIGNAL = 0.86; SWISSPROT HIT: O60664, EVALUE 2.00e-46; NT HIT: gi14764025, EVALUE 0.00e+00; EST_HUMAN HIT: AL559353.1, EVALUE 0.00e+00
atgcccacaactccagactcagggtcacctgggggatggcgctccctgcctcagtctccctggaagttggggtgcaggggaggggtgcccacatacagagggaagacggagatgctggggtcacccgggggatggcgctccccgcctcggtctccctggaagttggggtgcaggggaggggtgcccagatatggagggaaggcagagatgctgatgctgttgcatctcctaggtcctggcggacaccaaggagcttgtgtcgtctaaggtgtcgggggcccaagagatggtgtctagcgccaaggacacggtggccacccaattgtcggaggcggtggacgcgacccgcggtgctgtgcagagcggcgtggacaagacaaagtccgtagtgaccggcggcgtccaatcggtcatgggctcccgcttgggccagatggtgttgagtggggtcgacacggtgctggggaagtcggaggagtgggcggacaaccacctgccccttacggatgccgaactgggtaagtg

SEQ ID NO: 12758 - DNA, 507 bp, Homo sapiens
  MAP TO CHR6.3; EXPRESSED IN LUNG, SIGNAL = 2.8; EXPRESSED IN PLACENTA, SIGNAL = 1.6; EXPRESSED IN HEART, SIGNAL = 1.7; EXPRESSED IN FETAL LIVER, SIGNAL = 1.6; EXPRESSED IN BRAIN, SIGNAL = 1.1; NT HIT: X87344.1, EVALUE 0.00e+00; EST_HUMAN HIT: AW579860.1, EVALUE 0.00e+00; SWISSPROT HIT: P28065, EVALUE 6.00e-17
agccatcctctctctccctctctccaacttgaaaccctctgcagctattgctctggccatgagccgggatggctcaagcgggggtgtcatctacctggtcactattacagctgccggtgtggaccatcgagtcatcttgggcaatgaactgccaaaattctatgatgagtgaaccttccccagacttctctttcttattttgtaataaactctctagggccaaaacctggtatggtcattgggaaatgagtgctcagggagatggagcttaggggaggtgggtgcttccctcctagatgtcagcatacactctttcttcttttgtcccaggtctaaaacatctttcctagagaaaacaaaagggactaaactagaaatataaagagccctatacatgacaggtgatcacgtactgaatgattttgaagtagtacaaacaataaaaattctcattccgcatcatcatgcggtccatgatgatgaggccgcaagtgaggtgatgggact

SEQ ID NO: 12759 - DNA, 567 bp, Homo sapiens
  MAP TO CHR1.3; EXPRESSED IN PLACENTA, SIGNAL = 0.84; EXPRESSED IN FETAL LIVER, SIGNAL = 0.32; EST_HUMAN HIT: BG777690.1, EVALUE 2.00e-91; SWISSPROT HIT: P47653, EVALUE 3.20e+00; NT HIT: gi14743872, EVALUE 1.00e-103
ccaggctaccgttttgtaccttctcttctacatctgtcagattttctcattcttactcttgatatttaagaaggttcaaaaatatttttgactgaaggaataaagagccaaaaatctaattgtgaatacaactctcatgttcctcatgtgctgaagctcacacacatgaaaagaaaagcaaaaagaaaagaaagttagttacctcttttattttgaaatatgcctggcccttgattttggcagcaatggtaagaactttgttatcaaaaacaaactgaacaaaagcttttaaattagcccagaatatcagctgagtgttgcttaaagaagatataattttccacgccatgtcaaaagactctatgcagagtgattcagaggaagtcagaagctggtaggaaaaaaaaaaatacatacttatttcaaaaacttgatcgccactcctatagttactgttcaattcatgtttcactctatcttaccttgggaaccaacactttcaagcaatggaacactggtaaaacttgatcagaagaaagaactgtgagggcttctagtgcagactgc

SEQ ID NO: 12760 - DNA, 559 bp, Homo sapiens
  MAP TO CHR1.3; EXPRESSED IN FETAL LIVER, SIGNAL = 1.1; EXPRESSED IN ADULT LIVER, SIGNAL = 0.71; EXPRESSED IN PLACENTA, SIGNAL = 0.7; NT HIT: X14053.1, EVALUE 0.00e+00; EST_HUMAN HIT: BG684486.1, EVALUE 2.00e-97; SWISSPROT HIT: P06239, EVALUE 1.00e-56
cagcagggagagcagtatcccctggtagccgactcgggtagcacccaccattctccatgtattcagtgatgatgtagatgggctcctgggtgaccacagcgtagagccgaaccagccgctggtgttgcagctgcttcatgaggttggcctcggccaggaaggcgtccggggacatgctgccctgcttcaggctcttcaccgccaccttcgtgtgcccgttgtagtaccctgggtcggggaagggaaggagtgggaaagtcgccaggcagctgtcctgggactctcatcacctcagcggcccctcccgttcccctcttcccaggcagtcctggaggccacactcacccatccacacctccccgaactgtccagcccccagccgctccaccagcttcagcgtctccctgggaacctcccactcgtcctcccaccacggcttctggggcttctgggtctggcaggggcggctcaaccgtgtgcacagcccatctgaagcatctgcgaggacgagggaggggtgaaggctgtcaatagggcaggcctcgtattgacaccacct

SEQ ID NO: 12761 - DNA, 570 bp, Homo sapiens
  MAP TO CHR2.3; EXPRESSED IN LUNG, SIGNAL =   1; EXPRESSED IN PLACENTA, SIGNAL = 0.56; EXPRESSED IN ADULT LIVER, SIGNAL = 0.91; EXPRESSED IN BRAIN, SIGNAL = 0.88; NT HIT: gi14735269, EVALUE 1.00e-130; EST_HUMAN HIT: AA330059.1, EVALUE 4.00e-49; SWISSPROT HIT: Q61768, EVALUE 8.20e-01
ggacatgtggattggtgaaactgctattccttgtactcccagtgtagcaaaaggaaaatcaagagcaaaaatcagctgcacaaagtaagttaagacttttcagcttttctgaaattcagtgaagcaaatattttttgataatactccattttggttttgtgaatatatcaaaatttttgttaataaaatttccacagttttgatctatcaaattttggagttaaaataattataactgttaaaatcttagagctttaacatcaaaatatgttaaataacagttggatataatgtttcagaacatttttagttattttttaatcttgtttaataggttaaaaacacaaagtcaagaagaagaacttatgaaactggctaaacaatttgataaaaatatggaagagctagatgtgattcaagagcaaaacaagaggaattatgattttacccagatgatttcagaaacagagattttaagtaattataaagataatatacagatgtggtcattacataatatagttcccgaaatagataatgctacaaaaaagccaatcaaaggaaacacca

SEQ ID NO: 12762 - DNA, 577 bp, Homo sapiens
  MAP TO CHR16.3; EXPRESSED IN FETAL LIVER, SIGNAL = 1.2; EXPRESSED IN BRAIN, SIGNAL = 1.2; EXPRESSED IN LUNG, SIGNAL = 1.6; EXPRESSED IN PLACENTA, SIGNAL =   1; SWISSPROT HIT: O15230, EVALUE 1.30e-01; NT HIT: gi14776741, EVALUE 7.00e-56; EST_HUMAN HIT: AW969122.1, EVALUE 0.00e+00
ctggctaggactgcttcaggtctcggttaacctaggtcaaagtgtccttgggcgcaagtctgagttaggctgcagaaacacctgctacctcccccaggttcacactgacagctgccgggcctgggtcaggcacagccagtgctcaccttcatgccgtcagcgcctcggtacacggccgtgcagccctggtaaggacacttgtagatggtgggaagctcctccctgcaatgaagagcatgcatggagccccggccccgacaggcagggcgagcctcgcgttgcaggcatcacctctcacaacgaagcttcttcttccatccgggcttgggtcccggcttcttccgaattcttggttcttcagacttcttggcttctttgctttcactcttcttaccagagactctgaaaaaaagaggttcccaaattcaatggtttctgatctccatttgcaaaatgttttttgtctctccaacctgagaaatggtcttttctgaagcttccctgagttgcttctgtgctgactgaccctcagaatctacctgaagccaccaaagccagagcaactctggacaggagg

SEQ ID NO: 12763 - DNA, 583 bp, Homo sapiens
  MAP TO CHR6.3; EXPRESSED IN LUNG, SIGNAL =   1; EXPRESSED IN PLACENTA, SIGNAL = 0.86; EXPRESSED IN FETAL LIVER, SIGNAL = 1.2; EXPRESSED IN BRAIN, SIGNAL = 0.78; SWISSPROT HIT: Q10337, EVALUE 1.30e-01; NT HIT: gi15304463, EVALUE 3.00e-98; EST_HUMAN HIT: AW949381.1, EVALUE 4.00e-98
ggggtaagaagaaaccagccttgcgggactaaggacggcagcagtcagcatcaaagctcagcccagcccctcaatcagctctgctgcctagcatttagagagagctcacaaaatgtcttttaaatcaatgcaggcttctggctcaccaatgcccctgtcttcctgtaacgcctcttcccttccaccactttctagggcactatatgagcagtcttgccactatatcggtctgtcatcatcccttggcctctcacctgatgcagccagtccagggacagaatggggattccccgccccagggcacacaggaacttgactgtccggcggatgcgatcagtgaccaggtgggaagcctctgccgctgaaccagccagacttccccccagtgccagcacagcccgctctccccgagcatccaccactcctgtgaagagcacctgtggaagggttgacctgaggtggttacggcaacccatgccatcagcacccatctctacaatcctctaggtctccttgcatcctcccctcatctctgtctcccacaaagtcccatgcctttgtctcttactttgggggctgttga

SEQ ID NO: 12764 - DNA, 511 bp, Homo sapiens
  MAP TO CHR1.3; EXPRESSED IN LUNG, SIGNAL = 1.2; EXPRESSED IN PLACENTA, SIGNAL = 0.98; EXPRESSED IN BRAIN, SIGNAL = 0.62; NT HIT: Z49861.1, EVALUE 0.00e+00; EST_HUMAN HIT: BG389013.1, EVALUE 1.00e-117; SWISSPROT HIT: P16106, EVALUE 2.00e-65
cctctcaggtggcgagatagccctcctaggcccgctccccgcggatacggcgtgccagctggatgtccttaggcatgatggtgacccgtttggcatggatgacacacaggttggtgtcctcaaacagccccaccaggtaagactcgcacgcctcctgcagcgccatcacggccgagctctggaagcgcaggtcggtcttaaagtcctgagcgatctcgcgcatcagccgctggaagggcaacttgcggattagcagctcagtggacttctggtagcggcggatctcgcgaagcgccaccgtgccgggccggtagcggtgcggcttcttcacgccgccagtggcaggtgcgctcttgcgagccaccttggtggccagctgcttgcgcggcgccttgccacccgttgacttgcgcgcagtctgcttggttcgggccatgaatccgaaactgttggccccgcggtgtcctctgcccagacctcagcggattgctcgcttttatagagcttgccg

SEQ ID NO: 12765 - DNA, 571 bp, Homo sapiens
  MAP TO CHR2.3; EXPRESSED IN LUNG, SIGNAL = 0.3; EXPRESSED IN PLACENTA, SIGNAL = 0.52; EXPRESSED IN FETAL LIVER, SIGNAL = 0.34; EST_HUMAN HIT: BG827518.1, EVALUE 0.00e+00; NT HIT: gi15298088, EVALUE 0.00e+00; SWISSPROT HIT: P52757, EVALUE 3.00e-29
gggccatttttccaacatagttttaaaattgtgaaactgataaaacagaaaacaaccaggaatataaaaatttacctaacatattttaatagaacaagaattagttatatgcaaagctcagcatcacagaaactagacattaagaaaaatgaatatactttccaaagcactgtggataaatcaatctcttctggcaataatggctttcttaaaagaaccccaaacagaaaaagataaagtgtggtttcatagtagcttacccttttctctgacaccccatcctggcctgtagaatctctctcatcatgtgtctctttcaggactggcatatgttttttgtatgctggctctctgtttaaggttgtgtatcctacgtgctcataaattgggtttatcgtcatcttggcaatgtattctgctgccttggtttcaatatagagagtaatcaagccatcagtcaccagatcgtggatggactcaaagcgtttctccccaacaaagtgcttgccatcgtagtagagcctgaagtttctggtttgacttccaaatctgcctcaatgaaatgggaaag

SEQ ID NO: 12766 - DNA, 562 bp, Homo sapiens
  MAP TO CHR11.3; EXPRESSED IN PLACENTA, SIGNAL = 2.9; EXPRESSED IN BRAIN, SIGNAL = 1.3; EXPRESSED IN ADULT LIVER, SIGNAL = 0.44; EST_HUMAN HIT: BE313893.1, EVALUE 2.00e-78; NT HIT: AB012922.1, EVALUE 0.00e+00; SWISSPROT HIT: P14543, EVALUE 4.10e-02
ttcccccattgctacttttggggatgcccaggtaaactgctggtccagggaagagagatggaagtaacaaaggggaactgcgtgggaagaaaaggtgcgaaagttttctgtttttttccagtggcccaggcacccctgaaaccaaaaacacctcggggtaccaagacaccgatcaacagaaaccagctgtcccagaaccggggactggggggcattatggtgaaacgggcctatgagactgtgagttgacagaaaggggtgggccagattgagttgggtgggcttttgtctctcataggagtctgagagggtcccttccctcattgtgccatcctaccccttttccagatggcaggggcaggggttcctttctctgccaatggaaggcctctggcttcagggattcgttcaagctcacagccagcagccaagcgtcagaaactaaacccagctgatgcccccaatcctgtggtgtttgtggccacaaaggataccaggtaaggcgtctaccatgggaggggctgagagggacagtccaggctggtgagtgtggggagtagga

SEQ ID NO: 12767 - DNA, 507 bp, Homo sapiens
  MAP TO CHR2.3; EXPRESSED IN LUNG, SIGNAL = 0.73; EXPRESSED IN PLACENTA, SIGNAL = 0.69; EXPRESSED IN FETAL LIVER, SIGNAL = 0.43; EXPRESSED IN BRAIN, SIGNAL = 0.7; SWISSPROT HIT: P07316, EVALUE 1.00e-50; EST_HUMAN HIT: BF726411.1, EVALUE 0.00e+00; NT HIT: M19364.1, EVALUE 0.00e+00
agaacttctgggcaggtgtggccagggaggtgtagggactggagctttaatttccatctgtttttgtttgtttactcttgcgttttctgtctgccactccagcactctggcgcttacagaatgaagatctacgacagagatgaattgaggggacaaatgtcagagctcacagacgactgtatctctgttcaggaccgcttccacctcactgaaattcactccctcaatgtgctggagggcagctggatcctctatgagatgcccaactacagggggaggcagtatctgctgaggccgggggagtacaggaggtttcttgattggggggctccaaatgccaaagttggctctcttagacgagtcatggatttgtactgaagtatttacgttttccacttttctcctttaaaatctaataaaatatttagcttgtgtttctggcactagtagagccctgtctttctttcaatctattaagcatttataagtgataatggcactcagcca

SEQ ID NO: 12768 - DNA, 513 bp, Homo sapiens
  MAP TO CHR1.3; EXPRESSED IN HEART, SIGNAL = 0.75; EXPRESSED IN PLACENTA, SIGNAL = 1.9; NT HIT: Y09048.1, EVALUE 0.00e+00; SWISSPROT HIT: P40855, EVALUE 4.80e-02; EST_HUMAN HIT: BI559412.1, EVALUE 6.00e-57
gatggcataccaatccaaccatttaaacctactattttttcaaggaactctgagattcccccactcaacctcaagtccttatttcacaaggactgaggctggcaagagcactcaccaatgtgaggccaaggtaccctcccacattcccctctggcccataggggcctgcccaacctctgctcagggctgcatgcccatcccctccccatcccttaagggggtggaatttatactttggcagtgtctcctggcgatctcttctggggccccgaagcatcaggggccgtggtggtagaagggggtgctggggagggtttggctttatcgaaatcatcaagagcaccttcagagacaagagacatggtgtgtgtgttggcgacagatgagaatgcaagcaaggctgggtggtttctgggcaaagcattaggaatatgatttttcaaattgccaactttcctcaattttcctccttgagtcccccacctccccagaccaccctcaatgagcctccta

SEQ ID NO: 12769 - DNA, 599 bp, Homo sapiens
  MAP TO CHR19.3; EXPRESSED IN PLACENTA, SIGNAL = 1.9; EXPRESSED IN LUNG, SIGNAL = 1.1; SWISSPROT HIT: P12660, EVALUE 7.00e-14; EST_HUMAN HIT: BI826828.1, EVALUE 5.00e-73; NT HIT: S40022.1, EVALUE 1.00e-17
tggtcctcccatctgaagtcagggcagcggatggacagagatggggcaggccctgttccctcctggctggggtggagggcaggatcggagagcactgcctggcgggtttctcctcgacatcgccagaacatcacctaccttggaccccacgggctggaagccgggcaggctgctgactgtcacacgttggtcatccatgcggcggccctgggtactggccagcatgtccatgaggctgtccatctcgggggtggggtcgctctctgcgtggacgttcacagacttgggaggacacagccggagtgggggcccccaaccctaccccttcacccccacacagatgcttcagggtgcacaaccacctcccacatcccgtgcccccaggccctccagatgaccacttgccctgcactcccaccccgttcacgccccatggacagcacccccgtgcccatgctcacggctcttggtggtctggcccggcccggcttgcagtgaacagcgctgtccctccatccggtcgccctgcacgtggctcagcagattgaagaagccctcctggtctggggagcccgcctggggacagactcgctcagtct

SEQ ID NO: 12770 - DNA, 550 bp, Homo sapiens
  MAP TO CHR4.3; EXPRESSED IN LUNG, SIGNAL = 0.4; EXPRESSED IN PLACENTA, SIGNAL = 1.1; EXPRESSED IN HEART, SIGNAL = 1.4; EXPRESSED IN FETAL LIVER, SIGNAL = 1.1; NT HIT: gi11419271, EVALUE 0.00e+00; EST_HUMAN HIT: AA297032.1, EVALUE 1.00e-105; SWISSPROT HIT: Q13316, EVALUE 2.00e-20
aacgtagatggtcccagcagtgagtccagccaagaggccaacctgtcatctcaagagaacagcagtgagtctcaggaagaggtggtgagtgagtccaggggagataaccccgaccccacaactagttatgtagaagaccaggaagacagtgactccagcgaggaggacagctcgcacacactctcccactcaaaaagtgaatccagagaggagcaagcagacagtgaatccagtgaaagcctcaacttctcagaggaaagcccggagtcccctgaggatgagaacagctccagccaggagggcctccagtctcacagcagctcagcagagagtcagagcgaggaaagccattctgaggaagacgacagtgactctcaagacagcagcagatccaaagaagatagcaactccacggagagcaaatcaagcagtgaggaagatggccagttgaaaaacattgagatagagagccggaaattaacagttgatgcctatcacaacaaacccattggggaccaagatgacaatgactgccaagacggctattagc

SEQ ID NO: 12771 - DNA, 587 bp, Homo sapiens
  MAP TO CHR3.3; EXPRESSED IN FETAL LIVER, SIGNAL = 1.9; EXPRESSED IN ADULT LIVER, SIGNAL = 4.1; EXPRESSED IN PLACENTA, SIGNAL = 2.8; EXPRESSED IN LUNG, SIGNAL = 2.7; EST_HUMAN HIT: AU129486.1, EVALUE 3.00e-53; NT HIT: X06980.1, EVALUE 4.00e-54
gggagaaaacaaagttccacctgtggaaattagtgtgttaaataaagtcttatgaaaatatcactctgagacactgcatatgtgattgaccctttcgacttctttgtactgttaaatagtgcattgcttttagcaaagcatttactaataatgtccttctttgtatgttcttcactaaattatgaattgcaaatccttgggctcaagaaaggattttgagaaatcatgtagaccaagttttaggcaaaatatatctcaaatcaggatgattatgaatgtaacctattttttttaatgattttcaattaaaaaatatggaacgcttcacgaatttgcgtgtcatccttgcgcaggggccatgctaatcttctctgtatcgttccaattttagtatatgtgctgccgaagcgagcacaaatgtaacctatttttaaatattagcacagaggtacattccatcaaaggaaactgagataggattgacagatttaacaaatacaaatgcaggacaccagttaagtttgaatcgcaggaaaaaaaaaaacactttttttttagtataaatatgtcccgtgcaatatttgagg

SEQ ID NO: 12772 - DNA, 538 bp, Homo sapiens
  MAP TO CHR1.3; EXPRESSED IN LUNG, SIGNAL = 0.64; EXPRESSED IN HEART, SIGNAL = 1.1; EXPRESSED IN PLACENTA, SIGNAL = 0.81; NT HIT: gi14743434, EVALUE 0.00e+00; EST_HUMAN HIT: BF955368.1, EVALUE 0.00e+00; SWISSPROT HIT: Q28062, EVALUE 3.00e-52
gactccctgccacagatgagggaactggagaagcttgcccagggttcccatgggagaccagagtggaaggagctaccagctgcctgataacccagccttctcttctccacccaggagaactgttcctgggtgaccctccagagaagctgacattggaggaagcacgggcgtactgccaggagcggggtgcagagattgccaccacgggccaactgtatgcagcctgggatggtggcctggaccactgcagcccagggtggctagctgatggcagtgtgcgctaccccatcgtcacacccagccagcgctgtggtgggggcttgcctggtgtcaagactctcttcctcttccccaaccagactggcttccccaataagcacagccgcttcaacgtctactgcttccgaggtgagcccacctccctgcagaagctgagaccaatctcagaaaggcagagttgagtcctaaaagtcctaccccagtctgatcagtttagctcagggctttgccatttgcctgaagtggtcgtgggtgaagt

SEQ ID NO: 12773 - DNA, 539 bp, Homo sapiens
  MAP TO CHR3.3; EXPRESSED IN PLACENTA, SIGNAL = 0.57; EXPRESSED IN BRAIN, SIGNAL = 0.4; NT HIT: gi16160809, EVALUE 2.00e-74; EST_HUMAN HIT: BF834857.1, EVALUE 0.00e+00; SWISSPROT HIT: P55803, EVALUE 4.50e-01
gctttatcacggtcgctaggttaatgccacatagccacggcctttcagtcatagagtaacctcacagttcacttttgtatagttctcttctggtctctgacagaagacctttctaccctgacagaggtgaacctgctgtgtgaagagttgtttacgtgaatgtttcctagggaggagaaataattacataccctcttcactgtccaaaacatgagaaaagttagtaacttttgataaaacctagaactgtcacatctatggcatgtggctccctgtagaaatgaccataggagaatgctgtgaaatttccaagttattttgctctaggccagaaccttacctctctaaggaccagaacacagttcccaggtcctacacattgaggcagctcagcaattcttcctttgttaagatatggccctgagaagcaacggtggttgaagtatatctttggacagcaatattttccattaatcataactgggaaatgaagaaaaacaaatattcaaaacagtcattctctaccccacgtttccaaa

SEQ ID NO: 12774 - DNA, 584 bp, Homo sapiens
  MAP TO CHR6.3; EXPRESSED IN LUNG, SIGNAL = 0.58; EXPRESSED IN PLACENTA, SIGNAL =   1; EXPRESSED IN HEART, SIGNAL = 0.84; NT HIT: AJ302622.1, EVALUE 0.00e+00; EST_HUMAN HIT: BG025021.1, EVALUE 8.20e-01; SWISSPROT HIT: Q9GZK7, EVALUE 1.00e-109
gaggagcatgtggagaaagcccttctcctgcttgccccagcaggaactctcagcactgccaccacaattctggcataagatgtcagaatcagtccaaaaggaatagtgaggcagaacacagacagaatgagagttgtcacctgagccactctgggatccgagcaagccaggcccacgaaaagcataaagtcacagtaaaactggtcaatgtggttggggccacagaacctcagctgggccaccagggccacaaccagtccatctaccacaaatccagagagccaggttgtgaccaccagccccatgtaccgtctgggccccatcaggagtgggtagtggagtgggtagcaaattgccaggtagcggtcatatgccatgacagccagcagtaagcattcagctgtggctagagagccgaagataaagaactggagcaagcaaccagccacagagatagttgcttcttgcaggaagccctccagcatttttggcatcactgcggaggtgtagagaatatccaggaaggacagattcgccaagaaaatatacatgggtttgtggagcctctgggagctaaccactgc

SEQ ID NO: 12775 - DNA, 596 bp, Homo sapiens
  MAP TO CHR17.3; EXPRESSED IN HEART, SIGNAL = 2.2; EXPRESSED IN PLACENTA, SIGNAL = 2.2; NT HIT: gi14772631, EVALUE 0.00e+00; EST_HUMAN HIT: AI887771.1, EVALUE 0.00e+00; SWISSPROT HIT: Q61045, EVALUE 1.10e+00
ctgtagaagctcggtccctgtgtatgtttgcatatgacatcctgcattggatccgcttttgtattttttaaccatacccacggtggggcgggtggggggagcctggaacagtgaccagatctgggggcctgagtggggacagagttgatcgtccacctggccattttgaccctgagtggacagtcacagcctcagctcatgtctggctgtgacacacactgcccccagcttcccttggtcagccccactccagcacggggtgaacggaggcccagagtactagggaaggaggaagggaggacatgcctcttcttcctcctttctttccccatctgttcatgggaagagtttgtctttcttatctttaagcccctttaccctggtcctgtactgatcagtgaaggaaaccgtggttactgaggccctgttgaaaagtgcacgtcttgtccaataaatcacgctgcagttggtgtccatccctgagttgctggggtaagggtcctctccaaatgctgagcagagtcctatggcctgagtgcccaggatcccaacaccccctttcatgtgcaacttgggggcagaaggagtcagtggag

SEQ ID NO: 12776 - DNA, 544 bp, Homo sapiens
  MAP TO CHR1.3; EXPRESSED IN LUNG, SIGNAL = 0.91; EXPRESSED IN PLACENTA, SIGNAL = 1.1; EST_HUMAN HIT: BF511368.1, EVALUE 0.00e+00; SWISSPROT HIT: P08112, EVALUE 5.00e-39; NT HIT: M87843.1, EVALUE 0.00e+00
tttttctgttgggcattgactagattgtttgcaaaagtttcgcatcaaaaacaacaacaacaaaaaaccaaacaactctccttgatctatactttgagaattgttgatttcttttttttattctgacttttaaaaacaacttttttttccacttttttaaaaaatgcactactgtgtgctgagcgcttttctgatcctgcatctggtcacggtcgcgctcagcctgtctacctgcagcacactcgatatggaccagttcatgcgcaagaggatcgaggcgatccgcgggcagatcctgagcaagctgaagctcaccagtcccccagaagactatcctgagcccgaggaagtccccccggaggtgatttccatctacaacagcaccagggacttgctccaggagaaggcgagccggagggcggccgcctgcgagcgcgagaggagcgacgaagagtactacgccaaggaggtttacaaaatagacatgccgcccttcttcccctccgaaagtaagtacttattttgacttccatcccctgaggtt

SEQ ID NO: 12777 - DNA, 532 bp, Homo sapiens
  MAP TO CHR11.3; EXPRESSED IN PLACENTA, SIGNAL = 2.7; EXPRESSED IN FETAL LIVER, SIGNAL = 2.1; EST_HUMAN HIT: BI833693.1, EVALUE 0.00e+00; SWISSPROT HIT: P52433, EVALUE 2.00e-15; NT HIT: U52427.1, EVALUE 0.00e+00
tccccttgtcgtccaataacctgccagcgcctggcctggtcgccatcccacttttctccgcagatctccctagagcacgaaatcctgctgcacccgcgctacttcggccccaacttgctcaacacggtgaagcagaagctcttcaccgaggtggaggggacctgcacagggaagtgagtgtcgagctcaccgcaccggcagatcgttcgatgcgcacacggggcgctatacctgcaacccctccccaactcctactcgtcctgccacccactctggggacccctctcctctctcaggcagccagttgcttcctgctttgggttcccagggcgccctctgcaatgctggacaataagacttccttctctcagctgagatgggtcattcattgactcctcaaacattttaaaaacccttggtgtgtgccaggacccgtgttgggctcagaacaaggtagaatgggaacaagatagaatgaggacagcccctgtggagctcacagtgtaatcattgttcctgtgtctgctctccc

SEQ ID NO: 12778 - DNA, 534 bp, Homo sapiens
  MAP TO CHR6.3; EXPRESSED IN HEART, SIGNAL = 1.4; EXPRESSED IN PLACENTA, SIGNAL = 1.7; EST_HUMAN HIT: AA130731.1, EVALUE 4.00e-18; SWISSPROT HIT: O75715, EVALUE 2.00e-36; NT HIT: X62403.1, EVALUE 1.00e-128
ggggagaaaccgaaagagagcagattttgctataatatctataatattcttggtagttggcatagtggtgattcaagaatttatggagttttttaggaatatcaggaagttaaaatatctaggtataggagggggtggattacctgtgggtaaaaatagcctggatcatccaggagcagaaataacattgtttctcttttccatctctctggtttagcactcctgtcctcatccctctgagattttgggcacattcaaatctatatcctgggaccctgtaaaggtccatgacatccgttggaactttgaaaagttcctggtggggcctgatggaatccctgtcatgcgctggtcccaccgggctacggtcagctcagtcaagacagacatcctggcgtacttgaagcaattcaaaaccaaataggaaggtggagttaagggcaggagcaaccctacttctcacctaatgacttgctctccccacccctccaaaaaaaaggaatacccatcttctcaccacactctcttcctgca

SEQ ID NO: 12779 - DNA, 537 bp, Homo sapiens
  MAP TO CHR14.3; EXPRESSED IN PLACENTA, SIGNAL = 1.2; EST_HUMAN HIT: AA608630.1, EVALUE 1.00e-130; SWISSPROT HIT: P12277, EVALUE 6.00e-62; NT HIT: X15334.1, EVALUE 0.00e+00
tgcccaggcaataagttaggaagcagcagggctggtgtcgggtgtgggccgggcttcatttctgggcaggcatgaggtcgtcgatggcctggccctgctccagccgctgctccatctcgatgagcagcttcactccgtccaccaccatctgcaccagctccacctctgagaagcccaggcggtcagcgttggagacgtcgaagaccccgcccaccgcagccgtgtccacaccgcctggggagacagcaagtcagggcggaggaaacagggctgcccaaaggccacgggaagccgcagcacctgccctgctcacctgtgcctcgcttctgaagtcgcagccgcttaagcacctccgagaacttctcatgcttgcccaggttgggcagcttgatatgcacacctgcccgcagcccggtgcccaggttggatgggcaggtgaggatgtagcccaggtgagggttccacatgaactcatagtccttagacttgaagagagtttcaatctgcagacggagaagagggtatgagggagaaggc

SEQ ID NO: 12780 - DNA, 502 bp, Homo sapiens
  MAP TO CHR9.3; EXPRESSED IN PLACENTA, SIGNAL = 0.9; EXPRESSED IN FETAL LIVER, SIGNAL = 1.5; EXPRESSED IN ADULT LIVER, SIGNAL = 1.4; EST_HUMAN HIT: BG288316.1, EVALUE 1.00e-106; SWISSPROT HIT: Q9UKT8, EVALUE 9.00e-35; NT HIT: gi14739074, EVALUE 1.00e-106
aacccttgaaaaagggcaacccacccgcccccgtgtgcccccgaaagtgctgggtcctggctccggaactccattcccagcaagccacagtgttgtcaaaggagcctgtcacaagcttctgttcatcaaacttcaccgctgcacaagtgtgggtctggatgccataaacgcactgccctgtgctcacatcccacagctttgcagacaagtcatctgacccttcaagagaaaaacagggaggttaataagaaaacaaacacactaaagaaggaaaatcaatcccaaaatcatggtgttcttcaagaacattaacggtcccttcctctagcactttactttaccactgaagaaatcaaagcacggagagagtaacacaacttgcttagagtcaccaaaacggagtcaaaagcactaggacagaatccaagctttttgggtgagacactttcccttaacttttcaggctacagaaggtcattagactaaaagcatcccttggtgc

SEQ ID NO: 12781 - DNA, 575 bp, Homo sapiens
  MAP TO CHR10.3; EXPRESSED IN LUNG, SIGNAL = 0.72; EXPRESSED IN PLACENTA, SIGNAL = 0.72; NT HIT: gi14735962, EVALUE 2.00e-99; SWISSPROT HIT: Q02218, EVALUE 3.00e-28; EST_HUMAN HIT: AL521693.1, EVALUE 1.00e-15
ctcaccatcaccctgttgtgtcccacattcctcctgggcacctcagtggaccttgagcatccccctgctcagtctccaaggctggcaccttctatctcactctaagtaaattgagaggcgcagcaggtttctcctgcctctgcagattggattcaccacagacccccgaatggcccgctcctcaccatacccgaccgacgtggcccgggtggtcaatgcgcctatcttccatgtgaatgccgatgacccagaggctgtgatatatgtgtgcagtgtggcagccgaatggagaaacactttcaacaaagatgttgtcgtggacctggtgggtctggggactgaggccaaggcatgggtgggtggcccatccctgctgtgctgagccagccatgtcatcagcatcttcagcactcagggctgggagtgcttcttggatgagagatttatgccaccaagagcaatctgtgcaaaggcctgggacgggacattcattcggtgataggtgatagtggagctcaaagggctcccagtgggtgtgccctacccagatattccccaattttgcagcagctaca

SEQ ID NO: 12782 - DNA, 542 bp, Homo sapiens
  MAP TO CHR6.3; EXPRESSED IN HEART, SIGNAL = 2.2; EXPRESSED IN PLACENTA, SIGNAL = 1.3; EXPRESSED IN FETAL LIVER, SIGNAL = 1.2; EXPRESSED IN LUNG, SIGNAL = 1.8; EST_HUMAN HIT: AI621134.1, EVALUE 6.00e-94; SWISSPROT HIT: O02812, EVALUE 4.00e-19; NT HIT: gi14782990, EVALUE 4.00e-94
ttaatgggcacgctagaagcccagtccccatcagtccgtggtgagacccatgtaacaaatgtgcacatgtacccccaaatcaaaaataaaataaaaaaattttaaaacatagaaaatacagatacacacacacacacacacacacatacacacataaaggagaagagggctaatatatcctagagtaggtattttggaggagagttctttgtttggatatgaagggtcaaaactatgtttgctcaataaggcatacttttttgtaacatgttaaaaactcttttccttcctgtctatggtactgatagctgtcgacttgctggagaagatgcttgtattggactcagataagagaattacagcggcccaagcccttgcacatgcctactttgctcagtaccacgatcctgatgatgaaccagtggccgatccttatgatcagtcctttgaaagcagggacctccttatagatgagtggaaaagtaagtcctaagggtaggattaacatcttgaaccactaaccaaaagcggtgggaaaaata

SEQ ID NO: 12783 - DNA, 505 bp, Homo sapiens
  MAP TO CHR12.3; EXPRESSED IN PLACENTA, SIGNAL = 0.58; EXPRESSED IN HEART, SIGNAL = 1.3; EST_HUMAN HIT: BI754911.1, EVALUE 1.00e-97; SWISSPROT HIT: P21695, EVALUE 2.00e-29; NT HIT: gi13654556, EVALUE 1.00e-97
tgggagtggaggtgataaggaaggtaggtaggagtgaacagcctggggggctgctgtgagatcctgaggtggggcgctgccccaactcctgccactgttccctcctcctgtactttcctgtgctccccctcccaccaggggctcagccatcgccaagatcgtgggtggcaatgcagcccagctggcacagtttgacccacgggtgaccatgtgggtatttgaggaagacattggaggcaaaaagctgactgagatcatcaacacgcagcatgagaatgtcaaatacctgccagggcacaagttgcccccaaatgtggtgagccccaacaccctgcgaagaacagggagaggaagggagggccaggagttggagccgaccttactcaacaggtgcctcctgctgagagggccgcttcaggtgcagcaggacttgggaaggtctcaggagggctgctctgggccctttcctgaggactgaggagaacctatgctttcccctcacagg

SEQ ID NO: 12784 - DNA, 542 bp, Homo sapiens
  MAP TO CHR10.3; EXPRESSED IN HEART, SIGNAL = 0.72; EXPRESSED IN PLACENTA, SIGNAL = 0.74; EXPRESSED IN ADULT LIVER, SIGNAL = 0.68; EST_HUMAN HIT: BG742067.1, EVALUE 0.00e+00; SWISSPROT HIT: P49191, EVALUE 3.00e-35
gagagcctggagcttcattgttctctccaaaccttcactggctcttggtcttggctttgaccttgggcctgatgtaggtctggcagaagaagtgggcaaagaggatgaaataggtcatatacaagatgaaggaccagaataagtgttccatcgtggtgtggcatccctgatcctgcctccagatgtacgtgaggatgctgacgatggctcctacaaacatctgcaagatctgcaggctggtgatgagcatgggcagcatcttggggggcttcacgttggcagccttcagagtgtagtaggtgtacatgatggcatgaacaccaaagttcatggtgacgaaccagcctcctgcaggcactttgttcttgtatccaaagcttgtgtacacgagcactgtgctgtggtggtaccagtgaataaagatgagtggccgcttacgcaggatgatgaaggctgtgtctcctgggagatggagagtcatagttggcataccacccagtgctgggaccaccctctgcactggatgtagggacacgggagaa

SEQ ID NO: 12785 - DNA, 593 bp, Homo sapiens
  MAP TO CHR1.3; EXPRESSED IN ADULT LIVER, SIGNAL = 1.7; EXPRESSED IN LUNG, SIGNAL = 8.5; EXPRESSED IN PLACENTA, SIGNAL = 1.2; SWISSPROT HIT: Q9QXZ0, EVALUE 2.00e-06; EST_HUMAN HIT: AW961352.1, EVALUE 0.00e+00; NT HIT: AF317696.1, EVALUE 1.00e-118
gggtcaagccgctgtataaccgtcaaaaatatattttttagaagaactgacattgtgtgtgtgtttatttcctttttagcacgaggtagaactaacattgaacttagagagaaattcatcctaccagagggagcatcccagggaatgacccccttccgctcacggggtcgaaggtccaaaccatcttcccgggcagcttcccctactcgttccagctccagtgctagtcagagtaaccacagctgtacatccatgccatcttctccagccaccccagccagtggaaccaaggtatgtactgatctccattatgcccttcttccccaatcccaccctcacagatgttcattgttcacggtagcctctgaaagactccagtgaggagaagaaataaaaatgaaaacatgttttctattttagaaataaaacgtgaaaacacacagatcaagactgccctgttcctagcagtacacagatatatggcctttaagatgactccaaaggacatttattaaaatatgcactcagcctggttatgtcagaaatgtttatttcctcatgttctcagtttaagtttgagcccatccagtgtt

SEQ ID NO: 12786 - DNA, 512 bp, Homo sapiens
  MAP TO CHR11.3; EXPRESSED IN PLACENTA, SIGNAL = 0.69; EST_HUMAN HIT: BF977493.1, EVALUE 3.00e-03; NT HIT: gi13639687, EVALUE 6.00e-87; SWISSPROT HIT: O60882, EVALUE 6.00e-28
actgaatgcctgccaatttcagggtgagtcatcaaagaaggtaataatcttaccgtataatgcctggatccctttcacatcatctttggggaggtggaatccatagggattcttgtacttataagttgggtacatcagtgctgatgggtctgtggaatgggccaggcccagggcatggccaaattcatgagcagcaacggtaaacaaattaaaacctagacaatatgagagagaaaaaaacagtatcaacacaggtttttgttttctccatcttccatctttatagtataatttatgcccacattacagttaacccatctccttctcctaactggattattcaaaggttggtaggttattctggcacttagctttggtgactttaattcttccccccttggctagaagggggttgggggtgggggaggacagaaatgcacatcaatccattttattcatcatcagtgatgtttggtagactgataaagcagagccttggaacaaatagtggc

SEQ ID NO: 12787 - DNA, 593 bp, Homo sapiens
  MAP TO CHR6.3; EXPRESSED IN PLACENTA, SIGNAL = 0.87; EXPRESSED IN BRAIN, SIGNAL = 1.2; EST_HUMAN HIT: AW006865.1, EVALUE 6.00e-88; SWISSPROT HIT: Q9UPE1, EVALUE 2.00e-21; NT HIT: gi14782988, EVALUE 4.00e-88
gcccaaattcaaaccaagtctgtctactccagtgtttaaacctaaactattaatagcaatgttatcttgtccctctacagactaccagtcctataaatgagcatgtgtgatcacagttagaggtaaacacttcaaaaatcatcaactcataagaaaaaatatttttaaacaatacacaccagcttttataacatacaacacaaagacacaatatctagttttctccttcccctatggaagtaacagtgagaatgtctcttggaagctgataatgtttcttaaatatgttattgttgaaatggattgagtggtgtttaattccctggtaacagaataaaaatagaaatttctttttaacttctaatgatagcgaagtccctaaaagaaaatacacctgcagatccggaaggcggaggagctccagatcgctgccattctgttgcttctgcagccagcctccgaatgtactgctcattcactgacaataagatgttctctggtttaatgtcagtgtggatgatacggcacttggtatgtaaataatcaagaccctgtaacacctgaatggaaatagagtggcagacttgcaaaca

SEQ ID NO: 12788 - DNA, 502 bp, Homo sapiens
  MAP TO CHR19.1; EXPRESSED IN HEART, SIGNAL = 1.7; EXPRESSED IN ADULT LIVER, SIGNAL = 1.3; EXPRESSED IN LUNG, SIGNAL =   2; SWISSPROT HIT: Q05037, EVALUE 6.70e+00; EST_HUMAN HIT: BG323925.1, EVALUE 0.00e+00; NT HIT: AF254411.1, EVALUE 0.00e+00
cgggacagggacagagatagggacagggacaggtcatccaagaaggcccggccccccaaggagtcggcgccttcctcagggcccccgccaaagccaccagtcagcagcggctcaggctcttcatcctcgtcgtcctcctgttcttcccggaaggtgaagctgcagtccaaggtggcggtgctgatccgcgagggtgtcagcagcaccaccccggccaaggatgccgcgtcagccggcctgggctccattggcgtcaaattcagccgtgaccgcgagagtcgctcccccttcctcaaacctgacgagcgggcccccactgagatggccaaagcagctccgggcagcaccaagcccaaaaagaccaaggtcaaggccaaggcaggggccaagaaaaccaaggggaccaagggaaagaccaagccatccaagaccaggaaaaaggtccgcagtggaggtggcagcgggggcagtggtggccaggtgtcgctgaagaagtccaagg

SEQ ID NO: 12789 - DNA, 572 bp, Homo sapiens
  MAP TO CHR19.1; EXPRESSED IN ADULT LIVER, SIGNAL = 1.4; EXPRESSED IN LUNG, SIGNAL = 0.85; EXPRESSED IN HEART, SIGNAL = 0.96; SWISSPROT HIT: P17024, EVALUE 4.00e-68; NT HIT: gi14760087, EVALUE 0.00e+00; EST_HUMAN HIT: BG167169.1, EVALUE 1.00e-101
tgacccactctgggaaaaagccctgtgaatgtaaacaatgtgggaaagcattatcttatcttaactttcaaagacacatgaaaatgcacactagaatgagaccttataaatgtaagactgtggaaaagccttgattctcccagttcgtttgaagacatgaaagaactcacactggagagaaaccttatgaatgcaagcactgtggtaaagccttcaatcgttccagttcctttcactatcatgaaaggactcacactggagagaaaccctatgaatgtaagcagtgtagtaaagccttcatttcttccacttcctttcgatatcatgaaaggactcacactggagagaaaccgtatgagtgtaagcaatgtgggaaagccttcagatctgcctcacaccttcaaatgcatggaaggactcacactcaagagaaaccctatgaatgtaagcagtgtggtaaagccttcattttttccacttcctttcgatatcatgaaaggactcacactggagagaaaccctatgagtgtaagcaatgtgggaaagccttcacatctgcctcacaccttcaa

SEQ ID NO: 12790 - DNA, 546 bp, Homo sapiens
  MAP TO CHR19.1; EXPRESSED IN LUNG, SIGNAL = 1.1; EXPRESSED IN HEART, SIGNAL =  13; EXPRESSED IN ADULT LIVER, SIGNAL =  11; EST_HUMAN HIT: AI660959.1, EVALUE 1.00e-114; SWISSPROT HIT: Q09254, EVALUE 9.00e-06; NT HIT: AL445564.1, EVALUE 8.10e+00
ccacacctggcactattttcttttcttttttttatttgtttctgttttgttttgtttgttttggtggtctaaaataaattttttaattgcacatttgtgtcttgggttatctgtggggtgagaaacctattcctcacttccaatcccagctatccaggtacaatctggtgttgtggtctggctgtgggcaaggggtacaggtgggtgcagagctggccctcgagtctgcaccaacgtcttcaaggcagggagctcagaccatggttgtacttgcactgctttggggcctcattgaagccctcacacagggacaggtcattctcagtggtcgaacagtccaggaactgcctgatcttgtaggtgcagagccccatctgtaggggctgggaggcagcaccggtgggggtctgactggccagtcggccacactgtggcttccccaaggcctggtggctgtggtgagaccttattatattagatattagatattattatattagatattagagacggcaatggcggcagcagttctgtcgcagggacaaa

SEQ ID NO: 12791 - DNA, 525 bp, Homo sapiens
  MAP TO CHR1.1; EXPRESSED IN ADULT LIVER, SIGNAL = 2.4; EXPRESSED IN LUNG, SIGNAL =  16; EST_HUMAN HIT: BG504832.1, EVALUE 0.00e+00; NT HIT: gi15812219, EVALUE 0.00e+00; SWISSPROT HIT: P12947, EVALUE 7.00e-49
tgcgatttctacatatccaacgagaacctatgtctttttttttttgaaggcaattttataactttatttgatgtatttgacgatcagcgattagttctcatccacattgactgtagattttcaaaagtggcaacaggtacataggtaaccaaagtatagagcttatttggtgaatcttcatcctcattacgttttcgggacagccgcacacggattcggtatgggacattcttattcctttggcccagacagctttgttgagcctgatatcaatgcgcgcatctggagttcccatctccttcatgccaaatttccgaagctctttgagtgcccgaggggcacacttcttgaagcccactccatggatgtgcttgtgaatgttgatggtgtattctcgggtcaccacctcgttgatggcagaacggcccttttattcttgccacccttctttgcgggagccattctgccgggtccaagttggaaaggaagagcgcgagggattgagggagaaggaaagccgagaat

SEQ ID NO: 12792 - DNA, 525 bp, Homo sapiens
  MAP TO CHR9.1; EXPRESSED IN ADULT LIVER, SIGNAL =  10; EXPRESSED IN LUNG, SIGNAL = 2.3; EXPRESSED IN HEART, SIGNAL = 4.5; SWISSPROT HIT: P55072, EVALUE 6.00e-43; EST_HUMAN HIT: AL579126.1, EVALUE 0.00e+00; NT HIT: gi15298913, EVALUE 0.00e+00
ctcccaactacagtttgccccttctttggccaccccattttattcctgattctagattatcttgatatcctcaaaaattctaccttccctttagaccaaccctaaccccagtggaatcttgtccagaaactaaagagcactccgtaccagcctgaggactcatgcaagtctcccacagcccatgatcttgcacctgccttggcaactggggacttgcgcaggttagccttgaggatggcaacacgggacttctcatcaggaagtgggatgtagatgagctgatcaagacggccaggtctgaggatggcaggatcaatgatgtcaggccggttggtagcgccaatgatgaacacatttttttttgtggacatgccatccatttctgtcaggatctggttgatgactcggtcagcagccccaccaccatctccaatgttacctccacgagccttggcaatcgaatccagctcatcaaagaatagcacacagggggcagcttggcgggcctgtaggaggaatggattg

SEQ ID NO: 12793 - DNA, 506 bp, Homo sapiens
  MAP TO CHR19.1; EXPRESSED IN ADULT LIVER, SIGNAL = 0.59; EXPRESSED IN LUNG, SIGNAL = 1.2; SWISSPROT HIT: O08550, EVALUE 7.10e-01; NT HIT: gi14759200, EVALUE 0.00e+00; EST_HUMAN HIT: AW884640.1, EVALUE 0.00e+00
atgggaagattttgtgggtgtcttatttgcattttattaccataacctgacttttgttttctaggctttttctggaactgttatagaaaaagaatttgtatcaccttccttaacaccacccccagccattgctcatcccgcactacccactattccagaacgaaaggaagttctgttggaagcatctgaagaaactggaaagagggtttcaaagtttaaagctgccagattgcaacagaaagactaggccctgtctaggaaatgggaatttacatcctaaaacctagttgttcatttgtttagagtatctatagcaaaataggttacatgtagtttgaaataaggtatcctgagttactttggcaacaagttcttttacccttaccagtggtatttgaaaaaaatcaaggtaactgtctgaatactttaatatcagcttgttttgtgaattctctgaatactgtcaacactcttatctaagtttgcctttatgatgcagtggcagc

SEQ ID NO: 12794 - DNA, 579 bp, Homo sapiens
  MAP TO CHR7.1; EXPRESSED IN LUNG, SIGNAL = 0.58; EXPRESSED IN HEART, SIGNAL = 0.59; EXPRESSED IN ADULT LIVER, SIGNAL = 0.45; NT HIT: U96996.1, EVALUE 1.00e-107; SWISSPROT HIT: P16056, EVALUE 6.00e-27; EST_HUMAN HIT: AW418529.1, EVALUE 0.00e+00
tggcaatgtcaatgtcaagcatttttattcaagaattctgttgtaatttagtgttagtcaatagaggccagatgaaatacttccttcagaagttatggatttcaaatactgaagccacttgtttaatctgtagatattcagcatcattgtaaattattctatttcagccacgggtaataatttttgtcctttctgtaggctggatgaaaaattcacagtcaaggttgctgattttggtcttgccagagacatgtatgataaagaatactatagtgtacacaacaaaacaggtgcaaagctgccagtgaagtggatggctttggaaagtctgcaaactcaaaagtttaccaccaagtcagatgtggtaatgtattggttatctctgagtttctcctcttttactttcatatccaactttttttgaagttttatcactacttaattttttaaaaaaattcaacaccaccaattccagttttcttcatatgtaaaaatggacttgtctgatacgtacacattgtatattttcataaattcactcatttgttcaaaaatatttgttgagtggggcaacatacc

SEQ ID NO: 12795 - DNA, 502 bp, Homo sapiens
  MAP TO CHR14.1; EXPRESSED IN ADULT LIVER, SIGNAL = 2.7; EXPRESSED IN LUNG, SIGNAL = 1.1; EXPRESSED IN HEART, SIGNAL = 1.7; EST_HUMAN HIT: BE551364.1, EVALUE 0.00e+00; SWISSPROT HIT: Q09233, EVALUE 4.70e-02; NT HIT: AF119863.1, EVALUE 0.00e+00
agacaggatgcccaacactcgcccctccttatattagtagcacatccatcagtttttgttaagacaggaaacacatttattgagagcacagtggggtgcgccaagccctgtgctttggaaccgcatcacagcgcccctcacaacagccctgtgaggtaggtgaaggagcccacttcccacatgcagacactgaaggctcaacagctcccctaggcctcagggttcctgcggggtgggcaggggtccagcccacgggtctgaccccaggtcagcggcgtccatcagtcagagggcgggtctctactcaaggggaggccccgggtccagagtctctgggtccagcctgtcccgtgggaataggtgcagggtgtccccgtggctgtggaggctgagagagacacagttgcagatgaaggccacctgctcccggcctcgctggccgacaagagttcacagacagacaggcaggccccaggagggagggagaggagagcaagtccct

SEQ ID NO: 12796 - DNA, 544 bp, Homo sapiens
  MAP TO CHR11.1; EXPRESSED IN HEART, SIGNAL = 1.5; EXPRESSED IN ADULT LIVER, SIGNAL = 0.92; EXPRESSED IN LUNG, SIGNAL = 2.5; SWISSPROT HIT: P12895, EVALUE 1.00e-06; EST_HUMAN HIT: AV743519.1, EVALUE 0.00e+00; NT HIT: K00027.1, EVALUE 1.00e-94
tgcaaaacaaactgagcagggagcaggcggcggaagaagtagaggacgtttaaatagggctgtttccaaaatatagccactactataaagaaagaataatgaaaactgtgtttcggaattataatgtattgggagataatttaacatttagtgcctggatagttaccataactggttggaagatgggaaggataaggccgccgaggcgaccgaagtaaaggtatcgcttctcggccttttggctaagatcaagtgtagtatctgttcttatcagtttaatatctgatacgtcctctatccgaggacaatatattaaatggatttttggaaataggagatggaataggagcttgctccgtccactccacgcatcgacctggtattgcagtacttccaggaacggtgcactctcccttcggggagagaacaaccgttgtttaatggaagatttcgatcagttagggtacaagctaaatagttatgttcttgttgtttgagttggattaggtgtttttatcgctagtgtgttgaatgacgcgtgttt

SEQ ID NO: 12797 - DNA, 540 bp, Homo sapiens
  MAP TO CHR11.1; EXPRESSED IN HEART, SIGNAL =   1; EXPRESSED IN ADULT LIVER, SIGNAL = 1.9; EST_HUMAN HIT: BI757355.1, EVALUE 0.00e+00; SWISSPROT HIT: P57777, EVALUE 5.10e+00; NT HIT: gi15310039, EVALUE 1.00e-123
aatcaggttgtgctgggaacctgtcccatttccttatctttatatttgaaatgaagatctatcactctgtccctcatttttatctcatgttttcttactgatatttatttattttctcctgtttgaaggtacaatcattggtttgatgggatggcgctgcttcaccagttcagaatggcaaagggcacagtgacatacaggagcaagtttctacagagtgatacatataaggccaacagtgctaaaaaccgaattgtgatctcagaatttggcacactggctctcccggatccatgcaagaatgtttttgaacgtttcatgtccaggtttgagctgcctggtaaagctgcaggtgatagtgatgattatttaaactattacgatatataaccatctatacaaacataaatcttgaaaatagatttttttgtgtatgtgagaggatgttgaaactgctttctccctttgagtgtgtgcttagcgtcgtctacagtaagctgtggtacttaaataactctagggtttggtttcagccatgac

SEQ ID NO: 12798 - DNA, 507 bp, Homo sapiens
  MAP TO CHR17.1; EXPRESSED IN ADULT LIVER, SIGNAL = 0.5; EXPRESSED IN LUNG, SIGNAL = 1.1; NT HIT: gi14774519, EVALUE 1.00e-84; SWISSPROT HIT: Q23356, EVALUE 4.00e-32; EST_HUMAN HIT: BG821758.1, EVALUE 2.00e-84
gttctctgcagtcctttgccgacctcccccaccgccctctgctggtcgacctgacagtagaggaggggcagcggctcaaggtcatctatggctccagtgctggcttccatgctgtggatgtcgactcggggaacagctatgacatctacatccctgtgcacgtgagcttggcggggctgctgggggagtgggatggcccagtctgggcaccagacacggagactctagtccccctccttctccccagatccagagccagatcacgccccatgccatcatcttcctccccaacaccgacggcatggagatgctgctgtgctacgaggacgagggtgtctacgtcaacacgtacgggcgcatcattaaggatgtggtgctgcagtggggggagatgcctacttctgtgggtgagtgagctgccgccctcccagccacatgccccgaggtggccccggggtgcagcctgctcagcccctcacctgttccccacagcctacatctgctcca

SEQ ID NO: 12799 - DNA, 584 bp, Homo sapiens
  MAP TO CHR4.1; EXPRESSED IN ADULT LIVER, SIGNAL = 1.7; SWISSPROT HIT: P40798, EVALUE 9.00e-09; EST_HUMAN HIT: BG166167.1, EVALUE 3.00e-77
tctctcatgttgcttttaaaggtgaagttagctttaataattttcttcttctttgtagtccaaaatgtaggtttgaatacaaacgatctgaaacacctagtaggtactattgctattgtggaaaagtagaagatccacctttagatccgtggcttgtgcctcattcatgtggccaagtatgtgagcgtgaatttaaacctccttgtggccataaatgtttactcctctgtcatccaggtgagttatatattgcattttaaattgtttgtgggtgattatttcttcttatattgaggcaaaaaaaaaaattgtaaaagttgaattcacagtttagtttgccatgagaaaatattgaaagttattgccttttgtaaagtgtcagtaaagaaagttctagaaattattgataggtgtagaaattgaaagttttagtttctgactttagattttttttttttttttttttttgcttttactgaattctaggtccctgccctccttgtccaaagatggtcacaactacttgttactgtaagaaagcaaaacctatccctcgtaggtgcagtgccaaggaatggtcttgt

SEQ ID NO: 12800 - DNA, 506 bp, Homo sapiens
  MAP TO AC068936.2; EXPRESSED IN LUNG, SIGNAL =   2; EXPRESSED IN HEART, SIGNAL = 1.4; EXPRESSED IN ADULT LIVER, SIGNAL = 0.87; NT HIT: AF092565.1, EVALUE 0.00e+00; SWISSPROT HIT: P34369, EVALUE 8.00e-40; EST_HUMAN HIT: BG397394.1, EVALUE 0.00e+00
tgagcagagtgttgtcagcctggcgaacagtctttcttcctctgtagagttggcagcttgtcttgtttctggggctgtcattctcgtcttaacttttcttgacccttttatcctcacagtgcctatggaaactggttcccaggcagcaagcctctcatacaacaggccatggccaagatcatgaaggcaaaccctgccctgtatgtgttacgtgaacggatccgcaaggggctacagctctattcatctgaacccactgagccttatttgtcttctcagaactatggtgagctcttctccaaccagattatctggtttgtggatgacaccaacgtctacagagtgactattcacaaggtgagtgttagcagcagtgtataggtgcgggactctgtacatggctgtgggagagtaatgggctaagtgtgtacacatgctgggaagaaggcaggatggggatgtgttgtgtaggccatgctaacgaatgccgtcctcctctagacctt

SEQ ID NO: 12801 - DNA, 501 bp, Homo sapiens
  MAP TO CHR5.1; EXPRESSED IN LUNG, SIGNAL = 0.72; EXPRESSED IN HEART, SIGNAL = 0.89; SWISSPROT HIT: Q9H158, EVALUE 3.00e-12; EST_HUMAN HIT: BG709151.1, EVALUE 8.00e-44; NT HIT: gi14861872, EVALUE 0.00e+00
aagaatggagagaccccagctctttacctggtgttgcactggatactgttggccactgctgatcaggccctcctggaccagcccgtagaatgccagcctcctctaggtgcacagagctgaataaacacacagacccagataacggttagatcataaattctttcccatctcttcttccaccctcagaaattgcttacaactatgaagccagggctgcagctaacacattctgctcatgcttgaactgaagcaattactgctgagcagtcaccctgcataaactgcagaagcattgctgacttacttattgcctgctatactattccaggaacacacatgttctatctttatggcaattctgttttttattaacgccatgtggcgctcactaaatctaacaggaagcccatcagaggactaagccattttaacatctcgatactgaagcagatgaggagggcttgttctcaaaagttccaagcctctcttgcaggttctctt

SEQ ID NO: 12802 - DNA, 515 bp, Homo sapiens
  MAP TO CHR6.1; EXPRESSED IN LUNG, SIGNAL =  53; EXPRESSED IN HEART, SIGNAL = 9.4; NT HIT: X55710.1, EVALUE 0.00e+00; SWISSPROT HIT: P16188, EVALUE 9.00e-54; EST_HUMAN HIT: BE272947.1, EVALUE 0.00e+00
aggctcctgctttccctaagagacatgacacccccatctccctccttaccccatctcagggtgaggggcttgggcagaccctcatgctgcacatggcaggtgtatctctgctcctctccagaaggcaccaccacagccgcccacttctggaaggttccatcccctgcaggcctggtctccacgagctccgtgtcctgggtctggtcctccccatcccgctgccaggtcagtgtgatctccgcagggtagaagcccagggcccagcacctcagggtggcctcatggtcagagatggggtggtgggtcatatgtgtcttgggggggtctgacgggaagagtcagaaaattcaggcattttgcatctgtcatgggacactccaccagcacgcatgtggccatcttgagaatggacaggacacccgggatggggaagagagcacagaacccagacaccagcctggacacaggcacctgggataatcttctattccctgagaagggaacagcgacttctg

SEQ ID NO: 12803 - DNA, 519 bp, Homo sapiens
  MAP TO CHR19.1; EXPRESSED IN LUNG, SIGNAL = 0.72; EXPRESSED IN HEART, SIGNAL = 1.2; NT HIT: AB003493.1, EVALUE 7.70e+00; SWISSPROT HIT: P10227, EVALUE 3.20e-01; EST_HUMAN HIT: BE378295.1, EVALUE 5.00e-82
gatacccctgctttcttcccccagcagccctggcccgccgggaggaggagagcctggctgttcctgccaagcggcgccgggtcactgctgagatggaggggaagtacgtcatcaacatgcccaaaggcaccacaccccgcacccgcaagatcctggagcagcagcaggctgcaaaaggtactggcccatcaggggcatgcttccctgcggggtccatgtccctccctctgcatcacacagggcccgtcatatcctacagacggtggctgagaagcaggttctaacggggatgcaggagccgtaggccaaggggacagtgatggtggctgcagaggagggaaatacatcacctctgccctctgatcctgcagttagtgtagctgggctccttggcacctcttccccaaggggcaggagcaacgatagagtgatggcctgctgtaaaatgagtggctgtgcttggccaagggcaaataccccaaagtggcaccgttaatatgaaccagaggagacgagtgg

SEQ ID NO: 12804 - DNA, 558 bp, Homo sapiens
  MAP TO CHR16.1; EXPRESSED IN HEART, SIGNAL = 4.4; EXPRESSED IN LUNG, SIGNAL =  17; EST_HUMAN HIT: BF922265.1, EVALUE 0.00e+00; SWISSPROT HIT: Q9Z313, EVALUE 3.00e-27; NT HIT: gi16164936, EVALUE 4.00e-94
gcattttagggagagcaacgtcaatggaaaaagctgcctccaagtcacacagccttgccatgtccattaaggttatctctgcggaaacgcacaggtgaaccttagcagtcccgcttagctcatcacccacaatgttttggttcttctcaccccagcaagacccagggaccggtgtcactgataaaggagccaagcctcactgtccccgcgcaccaggacggccagagagccgtgtactcacagaactgtctcccttcttgggggccgagggcttcctggggaagaggatgagtttggagcggtactccttcagccgctgcacgttggcctgcagggactccgtggacttgttccgcctcctcggatccacagaaatgccgatggtccgggccaccttcttgtgaatgccggccacctgccccagaaccagagagagatggagacaggcccgggctttctccagccccgaggcctggatgaaaagcctcagcaatcagatggaaaagggttcaaatgtgctttcatcaaggccgtacagcgattccggagaatgtcatc

SEQ ID NO: 12805 - DNA, 500 bp, Homo sapiens
  MAP TO CHR22.1; EXPRESSED IN HEART, SIGNAL = 0.53; NT HIT: gi14778708, EVALUE 1.00e-72; SWISSPROT HIT: P53420, EVALUE 3.00e-03; EST_HUMAN HIT: BG717357.1, EVALUE 8.00e-53
ataacggcactagcacccagccccaccctcagcctaccgtggggccctgggcaagccccttcagcctctccatgcctcagtttcccttactgttcaacaggcatagtgggagcgcctccctaacagggatggggaaaggagcctgtgcactggagtccgaggtgccagcatccaccgcagatccactcaccgaggatcatggagcagcgctgggcgggttcctggcccgtgagcagcgtgaagtgttcggggtagtagaactccagggcttccaggaaggcctcatagcccctcttgccacggcagcgcaagatgtccatcaggcgccctacagagtagtggggggatgtacccagggtctaggggaaggcctccccaggtgcctggttgcttctgcccccaccatgctccaggcccacgttccccagatttttgagccagtgacacacacaggggcctgtcccaacacatcagggaagagaagagagccattctgccac

SEQ ID NO: 12806 - DNA, 582 bp, Homo sapiens
  MAP TO CHR5.1; EXPRESSED IN LUNG, SIGNAL = 0.94; EXPRESSED IN HEART, SIGNAL = 1.1; EST_HUMAN HIT: AA808800.1, EVALUE 3.00e-03; SWISSPROT HIT: P09346, EVALUE 9.60e+00
atccctcttttcttccctgcttattttttttctatagcacttaccaccatctgacatcataaatatttcatttgttttgtgtttgtgtttgttttgtttattgtccacatccctctgctagagaataagctccatgctggcaggggtgtttattttgttcactgctttattctcagcacttagaatagtgcatagctaatagatggtgctcaataaataagaaaatatggctcagatcaaaccaggagggcctagttgaatcacagcctctcagagggcaaggatcatgtcttgggcttgctttgacttatttatgatgtgataccatctgctgagtgggtctttattacactagaaatgaatattattactcagatagatatcaatatacagagggaagctattagtctcagaaaccacattctccctcctcgggtgacctcatccaccaggccttgcatgggcatgactcataaatccacaacaccaaccctgaccctcatccatgccacagcccacttttgctgctgtttgctggacacttctaccttgctaagcagctcaaactcagcaggtccacag

SEQ ID NO: 12807 - DNA, 595 bp, Homo sapiens
  MAP TO CHR5.1; EXPRESSED IN HEART, SIGNAL = 0.48; SWISSPROT HIT: P06457, EVALUE 4.40e+00
ttaagggcacattttctggcaaatttggtaaatagctgaatattctggcatccccatagtctgacaaaattcctcttctgaatgcctcaagaagaaacaaatctgaatttcctccagtttagcaaaaggctgtgctggtcaacgggaatctgccacctcctgaatcccccctctggaggtcaggcggcacagcagctgcagccttaagctgctctccctccggcagcaagcggtcaagttctgctgttggcctgtgagagcctacagtgtccacagagttaacactagactggagcggcccagccctcagcgggcaggagcactgggaactcaggcctccttttcaaggccaggatgaatgggaaatatgcaaatggccgcctcccaggagcggcaggggagggcctgctgctggcaggagggcatcactccacttgggtctgtcacatgaaagggtttgtattcctgccgctggccggctcctggccaggctggggctgttctcaccagaaaacaaaaatgtctttcagaccaaagcaaaacgaggccccagctggcccaggcaggccattgggcgttgttcacactgacccac

SEQ ID NO: 12808 - DNA, 504 bp, Homo sapiens
  MAP TO CHR2.1; EXPRESSED IN HEART, SIGNAL = 0.56; EST_HUMAN HIT: BI831625.1, EVALUE 3.00e-43; SWISSPROT HIT: P34713, EVALUE 2.70e+00; NT HIT: gi14725462, EVALUE 2.00e-43
gccatttgcacacaaatacagaaatacagaaataaaaataattcatacatccaagtgaaataattctgttaaacagaggcattggacacctacagaacaaatggaagtattaaaataaaaaaatagaaaagtaattcaaaagagaagaaaaaagttaaggaaaatagcaaactactattcaaggctataatcaaaggagactttcacaaatagctttatgtgacacttttatattagactcaagaactagctgtaaagaaaagtaccttaccctccatcgagaaaataatccacccatcttttatttgtagaaactgggcacaatgataaatatcatcaattgtccaaaggaattcacagctagaaataaagcaagtatttaaaatgttaagttaaacacacagcatacccactatagatgttgcaatactgcctaaaaaatgttatgaaatattaatttatttggatgccacatatatggaatttgatttcagacagttattg

SEQ ID NO: 12809 - DNA, 546 bp, Homo sapiens
  MAP TO CHR8.1; EXPRESSED IN HEART, SIGNAL = 0.64; SWISSPROT HIT: P48595, EVALUE 1.30e+00; EST_HUMAN HIT: AI798060.1, EVALUE 0.00e+00; NT HIT: AF285605.1, EVALUE 0.00e+00
caaggaacttctggaggcacaaatcgattaggaaggtaagggtatgtagcttgtggtaatggctgatgagaagcatattgtgaaaaaattggctgccgaaaattagaagcaggtatttgagattgaaaatacccattcactggcacaaagccatttgcttgtggctcccccgcaaaataagtaaaatattgagagtacagaagattagaatgtgtgccctgggcagtacttgcaactgtggtcaacagcccagaaggagatggctgtacttcatatgatgttatcccttggtatgtctgggtaatggcattgccattgctgttgctgtactgataaacacaccaagcagagtatggatatgaagttccaaataaatgctcagaagaattatatgttgggttacatgcagactgtggaagttcattccaatatgtggcagcattctgcattaggacttttgaatttttgtcattctgttgttcagaaagagagtactctgctccttgattcacattaagggttatatgcccagatgctccaaaagta

SEQ ID NO: 12810 - DNA, 553 bp, Homo sapiens
  MAP TO CHR19.1; EXPRESSED IN LUNG, SIGNAL = 1.4; EXPRESSED IN HEART, SIGNAL = 0.6; SWISSPROT HIT: P98093, EVALUE 6.80e+00; NT HIT: gi16163471, EVALUE 1.00e-115; EST_HUMAN HIT: BF793727.1, EVALUE 1.00e-116
gtgtattcggggatcaatgggtgggcctctgaaaataggcctgtccccgaatcccagcctgttttttccagttaacacttctcttcctcttcctgcccccagcaccacaccccactctggccggagcacgccaagcagctccccatcgctccggaaacggctgcagctcctgcccccaagccggcccccacctgagccagaaccaggcaccatggtggagaagggatcagatagctcctcagagaagggtggggtgcctgggacccccagcacccagagcctaggcagccggaacttcatccgcaacagcaaggttggtgcaagcccaggtggggtggggagagggctagtgggggctggccggtgatctaggggctcatcctgactcctctccttttctttgcagaagatgcagagctggtacagtgtaagtgtctgggcaaggggcttgctggagggctgggaggaccgggtgctgggccaggagccccaggctgcaacagtcaaggagtgcgtgctgagatggagtgggtgcagacctagggtcacgttc

SEQ ID NO: 12811 - DNA, 512 bp, Homo sapiens
  MAP TO CHR17.1; EXPRESSED IN LUNG, SIGNAL = 0.66; EST_HUMAN HIT: AL041645.2, EVALUE 0.00e+00; NT HIT: Y07701.1, EVALUE 1.00e-111; SWISSPROT HIT: P55786, EVALUE 1.00e-33
aaagcactggatgaattggggtagagaaataagccatgctagaatagaaaggggtaaagagatgcaataaagcctacagtttttggctggtatttgctctatggtattaatgtaaacctatttaaatttttcttttttttatttcttaaagaatgtaattgaccggaaaccataccctgatgatgaaaatttagtggaagtgaagtttgcccgcacacctgttatgtctacatatctggtggcatttgttgtgggtgaatatgactttgtagaaacaaggtcaaaagatggtgtgtgtgtccgtgtttacactcctgttggcaaagcagagcaaggaaaatttgcgttagaggtaaatgtacttgaagaggattgttccaacagtccataactccaggttggggaatttacatttctggtcaattattagtacagttatttataatttaatctgaaagttgtgctacttggtttatttttagtagaatttaggaaatgccaaccttggtgtt

SEQ ID NO: 12812 - DNA, 514 bp, Homo sapiens
  MAP TO CHR19.1; EXPRESSED IN LUNG, SIGNAL = 0.69; EST_HUMAN HIT: BG209115.1, EVALUE 6.00e-29; SWISSPROT HIT: O14581, EVALUE 5.00e-55; NT HIT: AF127819.1, EVALUE 0.00e+00
tctcaattcatcctcctgggactctcagaaaagccagagcaggagacgcttctcttttccctgttcttctgcatgtacctggtcatggtcgtggggaacctgctcatcatcctggccatcagcatagactcccacctccacacccccatgtacttcttcctggccaacctgtccctggttgatttctgtctggccaccaacaccatccctaagatgctggtgagccttcaaaccgggagcaaggccatctcttatccctgctgcctgatccagatgtacttcttccatttctttggcatcgtggacagcgtcataatcgccatgatggcttatgaccggttcgtggccatctgccacccattgcactacgccaagatcatgagcctacgcctctgtcgcctgctggtcggcgccctctgggcgttttcctgcttcatctcactcactcacatcctcctgatggcccgtctcgttttctgcggcagccatgaggtgcctcactacttctgcgacc

SEQ ID NO: 12813 - DNA, 549 bp, Homo sapiens
  MAP TO CHR19.1; EXPRESSED IN LUNG, SIGNAL = 0.7; EST_HUMAN HIT: BE513367.1, EVALUE 1.00e-122; SWISSPROT HIT: P36776, EVALUE 9.00e-25; NT HIT: AF059302.1, EVALUE 0.00e+00
agatggaaggaaccaaaggcttcgtgctctgggtttcgtttcttttctctctgagtcctgggggagcagagggtcccccttcgtctgggggacgcacccacccacccagcttcccggagccagggcctgatggcagcacctcaccccacaggtggaggagaagatcaagcagacccaccgtaagtacctgctgcaggagcagctaaagatcatcaagaaggagctgggcctggagaaggacgacaaggatgccatcgaggagaagttccgggagcgcctgaaggagctcgtggtccccaagcacgtcatggatgttgtggacgaggagctgagcaagctgggcctgctggacaaccactcctcggagttcaagtgagtgccaggcccggggcggcccagccctcaggtgacccctcctcagcccccatcttaggcaggccaggggacccagcggggagccccgtggcaccttcttggtgtggcaggtgcgggctgggaggcatccagtgagtatcagccctgttctgggcaggacacgtcatcaccatc

SEQ ID NO: 12814 - DNA, 555 bp, Homo sapiens
  MAP TO AC002107.1; EXPRESSED IN HEART, SIGNAL = 1.8; SWISSPROT HIT: Q15526, EVALUE 3.00e-33; EST_HUMAN HIT: AL549808.1, EVALUE 1.00e-121; NT HIT: gi11429613, EVALUE 1.00e-103
cttgaagtcctcttgctggcccctcatagcttgccatcatctaatgtgtgggcaactagacagttctccagaggcagggcccctgtttcacgaatccctcctttcccttcagaggtcaacatacagaaattatccagtcataaatgagctggctgagaagattaagtcaatgtcacaattagggacttaaactatgcaaggaattgaatctcctgggtatcttgggttccccagggtcctaccaaggttggggattgtgaaggaaatagtgatgtaaattagtataccctgactgcctctgccaggacagccagctcccacatgtcctactcaccccaggtcggtgcagtggaagggagtgaccacataggccccactctgagttgaggaggagatgaggccgccctcccgggcctcccggacagggtccaccatggtccggggcatcatatacagctccttggaatggtcaaagcaccccctgaccttcactggcctatactccagatttttcagttccattgggctgcatggagataagaacagtggccgagc

SEQ ID NO: 12815 - DNA, 600 bp, Homo sapiens
  MAP TO AC004536.1; EXPRESSED IN HEART, SIGNAL = 6.6; EST_HUMAN HIT: AI684741.1, EVALUE 0.00e+00; NT HIT: AJ252243.1, EVALUE 5.70e-01; SWISSPROT HIT: O60469, EVALUE 3.40e+00
gcaaaggacatgcaaagctcttggtatagttgttgttattgttctgctgcttcttcctcttcctcctttatctctcctcctcttccttcttctttttcttccttctccatcttcttctccctctccttctcttcctcctcctccttcttcttccttttcttcctcttcttctttttttttttttttctgatgcctattttactgggtagaataagggggtgggaggtagaggactcacaattctctgatagttcttgccataaaacctcttttaatctccatttctgcccttttgtaacttcagtgtgggtgaattcctacagaaaactagcttttgaccatgttctttgcaagcctcatctagtaattgcacatctcattttgaagcatggagtagtttgcacatacctgttaaggactcagccaaagctaaggcttaagtgctttaatttcaacattcaatcataatcacactcatctacattctttttaaaattcagatttcaccatgttctgatattccttgttgaattttttcttataatcgttctcatttgcttatagtaacaagcttcattatcaaaaatgatgccacccact

SEQ ID NO: 12816 - DNA, 599 bp, Homo sapiens
  MAP TO AC016603.5; EXPRESSED IN HEART, SIGNAL =   1; EST_HUMAN HIT: AL138392.1, EVALUE 5.00e-67; NT HIT: gi16158809, EVALUE 3.00e-67; SWISSPROT HIT: Q01513, EVALUE 2.60e-02
ttggaatggagaaacagcacagttatatttttccagcttccaatctgaaagagaaatataaactgagtatcaaaaaatttggcctacaggttgatcaacatataaaaaacatcatttttgaaagttatgaaaaatacttcacatttatagaagaaataatgactagactttctttttaattaatttttatgtacataagaaagcatttaagaacctcttctaaattaacatagctaattattcagaaaataaataacttgaaaactattttagaaagaaaataaatgaagccacactaaatagctataatgaagataatcagaaaaaaatgaaaagacaaaaatctaaacaaatctaaaatacattacctctgggggcaactgctgtaagtaattatgatcagcagcaaaagttcttaagttagtaagctgcccaatagatgaaggcaaagcttcaacttcattgaaactacaatccagttcttctactgatattaacctttaatttaaaaaaagaaatatatattatttgttaaagatttcctatatataatccaaaatttcagaacatataaacatttgaacttgactttgaaaacc

SEQ ID NO: 12817 - DNA, 511 bp, Homo sapiens
  MAP TO AC003107.1; EXPRESSED IN HEART, SIGNAL =   1; NT HIT: X97267.1, EVALUE 1.20e-01; SWISSPROT HIT: P71613, EVALUE 1.00e-03
tgtccttgccacagaaacagaatccagcatttcgctggcccgagcccctcattaactgggatgtcttctcggcccaggacctcctggccagagcatctggccggcgccccagccagccccacaccaggccccgtggttccaggagcccggccaggctggggaagagggacgggtgcctgcatgatggggccccggggcccttcctggcagacgtctgctcagccaggagacgtgtgggcgccccggctccctgcctcccgcccccaccgttgcctgcctttgtgaatgcagaaggaaagtatgttgtgaaggcagccgccctgccctgggcgggccgggctgtaggcccccagtctgcggaattcatcagggcggcaggggagggcagcttggcgacctctgcatcctcagcctgccttgaactgggagagacgtactggaggcatctctctagaaggaacaaaaggcaggggtgggatggggggctctgagctttgaagtccaggagacg

SEQ ID NO: 12818 - DNA, 586 bp, Homo sapiens
  MAP TO AF020662.1; EXPRESSED IN HEART, SIGNAL = 1.2; SWISSPROT HIT: Q9W1I2, EVALUE 3.30e+00; NT HIT: AF131205.1, EVALUE 1.40e-01; EST_HUMAN HIT: Z19372.1, EVALUE 8.00e-75
tcagcatgtgtagcctcctgctgcctgtctgcaaagccgtccctgcaccatacactcttctaagcatctcagagaggacaggatgtggctttgcatggtagttggaaatgatcaagaaaatatatatttaccaaaatctgagctgaaattaggatatccggatgctgagtgttaatgagcagcgtgtcggtgtttaacaaccggggccacaggccatcagtttcacaggactcatttgaataatgcttccaactgtacagacagtgcagggaaagcagtacacagattggcttatcaggaaacacataaaggaaaggaggaggggaaaaaaaccccatgggatcttgcaggctaaaaaaaaaaaatgctaaaaggaaaaataaatgtacatgtgtacctcttaagtctcacaaatctgcagggatttgtaactcaggaaaaccctgaagtgaaacacaaatcaaaaagggaccaagggccataatccacattcctaaattagttgtcttttccggtaatgaaaaaagaatcagactgtaagtatacaatatctctccctgtcattgccgcttctttcattgctttc

SEQ ID NO: 12819 - DNA, 558 bp, Homo sapiens
  MAP TO AC005101.2; EXPRESSED IN HEART, SIGNAL = 0.93; NT HIT: AL139076.2, EVALUE 2.10e+00; EST_HUMAN HIT: AA149705.1, EVALUE 2.00e-01; SWISSPROT HIT: P40164, EVALUE 9.10e+00
taggatgggcatccattacctccatgatttatactgtgtcacttaacttctgtgtgtcttactttcttaatctatgaaataaactgaatggactgaacaattttaaggttcaaacagcagatctggaatcagaagatgtgggtttgcaccacagctcaatgatttatgttgatcttatatgagtgttaattttctgagataggactagaaatgttgtgctatttattttcagggctgtgatgaaaatcaaatgtgatcaactctgtgaaaatattgtggaaaatataaggaattatgatgataatgtctggttggtcacttcagaatatagcacagaattgaaagggaattaaaggagcacattctataggatttaagatcaaaagctgtttttgatcttaaaaggaaaaaaagggaagactgtaaactccatttttttttttgactgtgatgaagtcaatgaaagctccaataagggatatgatttctaacctagttaattaatcataacaaattaggacagtaatggtgttttcctgcaaagaaatcctgccaaag

SEQ ID NO: 12820 - DNA, 583 bp, Homo sapiens
  MAP TO AC005081.2; EXPRESSED IN HEART, SIGNAL = 0.93; NT HIT: AF041056.1, EVALUE 0.00e+00; EST_HUMAN HIT: AA077633.1, EVALUE 1.00e-114; SWISSPROT HIT: O42184, EVALUE 5.00e-11
attgggtttggacagaatgccctctgcccatagccaccaagcagcctcctcttttcccttcatccagggtttgatgccaacctttctgaactccctgccctgcatctgtataaccctccttaacttccagagaaaggcttagggttccaataaatcagttatataaaaacagcaataaaggtaaatggctcaattttccctattaaaagatatgcactttcttctttgttcaaaaatcccaaactggaactagagtaagtcaggggcagaccagaacacctggatctcttacatcctcacccctcccaaacgcacaccagagaatccccttctgcagccccaccctcaccaggccactgcggctgggccgaccccccacggaggaggccacagagctgacggagctgatggaggaactgctgggactgtgggtcagtgctgacacacccatggccatacgcttggtcttcttggccttggctgggctggtagatgggaagccgatacggatcactttgtggatgggcgcgaagagaccaaacttgggtgggcactggaagtacctgtggaagcaggagagacc

SEQ ID NO: 12821 - DNA, 546 bp, Homo sapiens
  MAP TO AF227509.1; EXPRESSED IN HEART, SIGNAL = 1.7; NT HIT: AL163209.2, EVALUE 0.00e+00; EST_HUMAN HIT: BG572478.1, EVALUE 7.70e-01; SWISSPROT HIT: Q55292, EVALUE 5.10e+00
cagggcaaaatctacatggccaaacccatacataattgttctccatctatttctagtctagaaactcagttctttttccttgacttcttccccatggtttatttaatctgttccatgaattagcctcatgtataaatttacctgtacaagcaaagttacagagattcctctccacattgtgttccaaactgccgccatcatccaactcttgaagcctgatatccttactttgttcaatatttgggttattattcacacatttattttcccaaactagaagtttaggagccaactttgacttcttccattttctccacacaaattcaatcagtcagtgtgtcttgttaaatctaactctgaaatgtttttcgagtctgtcacatcttattcattctttacagttttatatatagaaaacaagtggttctcttaacttttcatcctgtccttaatgtgtctcaatgtcatgaattcttctctgcctattcactttttggtcttttctcactgtttcctgaaaacctatctttgcccctgatgttttct

SEQ ID NO: 12822 - DNA, 551 bp, Homo sapiens
  MAP TO AC002050.5; EXPRESSED IN HEART, SIGNAL = 0.98; EST_HUMAN HIT: AL535503.1, EVALUE 1.00e-130; NT HIT: gi4758719, EVALUE 0.00e+00; SWISSPROT HIT: P42568, EVALUE 2.00e-18
gtcctgtggaatgaaccaccacagagagatacatgataccatacacattctttgagttttcttgtgttgtgtttgatttgtttgttttcaaggctatccaggctaactcttcccggggatttccttggagagaagagtggtccgctgaggctggtttgctttaacctctcctttatcaagagatgatgactggctttaaagaaaaataaagctgaaggttgtttgatttttattttttcccttttggttgcatcattttgagtgttttcatataaacaacaagaacaaaaaatcacaaccaaaaaaaaaaaaaaccaaaaaaaaaaaacacaatagttcttgatgcatccagttgttatatcctcaggatgttccagatgtttccaggtaactctgtagtttacggactgtggttttgtccagcgagcaaagatcaaaatcaaatgttgtgtttgtgatatgaaagtgtccagtttcttctataaggttcacgatctagaggagtgaagaagagaaagtttgggcaatacgcagcaaacatcaaaaggcaa

SEQ ID NO: 12823 - DNA, 528 bp, Homo sapiens
  MAP TO AC004494.1; EXPRESSED IN HEART, SIGNAL = 1.2; SWISSPROT HIT: P24745, EVALUE 2.90e+00; EST_HUMAN HIT: AI284346.1, EVALUE 0.00e+00; NT HIT: L00670.1, EVALUE 2.00e+00
ttcagtctgtcgtcaggcacacaccagagccagctagcccacacagaccccatcagagcaaaacagacaagagaatttaattcatatccacatagaaaggacttctaggtaggaggtagaccctttagctcccttccaattaaaggagtccccaattctggcacctgagagtcccctgggtctaacagctatgatatttatgtagtgtgttgcttacctaaatgaatacaatttccttccagacacgtgacactgatattaaagtgctaatgagagggatctatttcttcttgtacgctaaaagagaaacagcagttcagatttcccatcagaagtccgaggactttgttcttgataactactaccaataaaaattgagtatttgaaaaattcctttgtattttccatccatacacatttttttttaaagcattttaggaagtcctctaattatatagtaaaaattgtcagcaatggcctgctagttttctatttgacctaatcacaaccatcctcgttaggtcctga

SEQ ID NO: 12824 - DNA, 533 bp, Homo sapiens
  MAP TO AC010527.4; EXPRESSED IN HEART, SIGNAL =   2; SWISSPROT HIT: P40145, EVALUE 8.70e-02; EST_HUMAN HIT: BF203587.1, EVALUE 1.90e-01; NT HIT: D26471.1, EVALUE 8.00e-03
ctccctttccttcccacttccagaaatatcaagtcaacctgctaatgccaggatggctgagaagacctagggctcagctgccaggaaccctgcacaggccacacctgctcggccagaaataccaccttccccagtggcctcagtgtatgacctcgtttctcagtggcacccgggggcggctgcaccagcctccccgaggcgccacagtggaagcagaatgtcacccagggtggggaggaagggctgagagtggctgacctcccactcccaggtccctggaccgctctgctcctgtcttctacctgtgctggcaagacgagaggtgccagggtctcaatgccaatgtctctgggctctcggatccgaggccagggccaggtgcagaggcagcggtagcccgggacccggagaagctggagctgctgttcccatccagcagagccccgagcgagcaggtagcaatccagccttggaagatggtcatcggacgcacgagctcctggcttgggcgagcagccacagccattcataga

SEQ ID NO: 12825 - DNA, 523 bp, Homo sapiens
  MAP TO CHR19.3; EXPRESSED IN HEART, SIGNAL = 4.7; EXPRESSED IN FETAL LIVER, SIGNAL = 2.5; NT HIT: D49738.1, EVALUE 1.00e-112; EST_HUMAN HIT: AI126083.1, EVALUE 1.00e-112; SWISSPROT HIT: Q99426, EVALUE 2.00e-16
tgatgagaagatgggggaacagcaagatatgaggagacagaggctggcccctgataccgaagggccactatttacccagtgggtccccaaatcatgaagtcctctaaatactttctgggtttctagtgaatttaatgcatgagtctcaaaaatcaatggcaaaggaaaaaatgaataaaattaaaatggggtcaggagaaaagggccatgggcacacacaggaggggcagtcagtggctgagctaggagctgaagcaggggaattccttaggtgtcatatctcgtccaacccgtagtcctcctccgggaagtcccccaccgtcacgactgctggcttgacaaaggcgccatacttggcctggcattcgaagtagcgtttcccattcacactgcaggaaaggataggggtgggtgtggtcagaggaccctcacatggctccactctagaagctggcatgggcagctcagcaagcagcacgcatggacttacacacaaatgcacacacagacacctgagtgggaa

SEQ ID NO: 12826 - DNA, 557 bp, Homo sapiens
  MAP TO CHR19.3; EXPRESSED IN HEART, SIGNAL = 8.4; EXPRESSED IN BONE MARROW, SIGNAL =  12; EXPRESSED IN FETAL LIVER, SIGNAL =  16; SWISSPROT HIT: P54726, EVALUE 9.00e-37; EST_HUMAN HIT: BF064141.1, EVALUE 0.00e+00; NT HIT: gi14759311, EVALUE 3.00e-92
tggaataagggtagggtgggggcttcggtggcctggcttcctggcatcactcgtcatcaaagttctgactcaggaggaagttggcagccaagttctcatttttttcacacgcgaaataggcctggatgaccaggctctctgggaagcccagggccttcaactgtgggaagataggttaagtgtgagcaggagagggtaggggtcctgcccacctgcagtcacccctcagccaggcctcttaccctctctatagcttctttctcctgcggcgtcacctggatgtagttcatctgcggggcctcctctcctatggcgcccacctccccctccacatctgagatgtccgccagctccccagggggctcgttcagcatctggatgaactgctcctggtgccggctgatttgctgcaggagagggtggggaagggaaggtaattcacagccctggtcccctcctctccccaggtcatcacagcccttgctttttcattcagtcaggcaaatatccagaggagcctgttctggccaaacacaacatagcagtcgacacaagcc

SEQ ID NO: 12827 - DNA, 579 bp, Homo sapiens
  MAP TO CHR16.3; EXPRESSED IN FETAL LIVER, SIGNAL = 2.7; EXPRESSED IN HEART, SIGNAL = 2.1; EXPRESSED IN BONE MARROW, SIGNAL = 1.6; NT HIT: gi14775319, EVALUE 0.00e+00; SWISSPROT HIT: P43662, EVALUE 5.60e+00; EST_HUMAN HIT: R17132.1, EVALUE 0.00e+00
gaatgttatctttgccctttccataatatgagatcccaatatgaattggaaaaaaattggctaattactagatagcattctttttttatttcaaaatgatcaaattaaccagtttcagtagagaagaaaaaaagtaactttcaaggttaaaaaaacccccaaattcagcctatatgcaatactgaaaaagtctatcaagttatattacaatttttaaaaagttaactctgtcttcagaagaaacttgagtaacactgaaacttaccataacagtttcattagtttcaggtgcagaatcaagcaggtcatctagttcatctccaaggaccatatctccatcatctagaaaagcttctggcatagtgaagggcatctttcctccatttgccagcactgcagatggcagagcgctctcttccacttgtagtggcaaaatagaagttaagggcataacaggaactgaggccagctcacttccaacttcatgagaaaaactgggtgccggtaaagagacaacaggaactgcttcttgccttggagttaataaatctgtaacacagatggaaatgtactcagtca

SEQ ID NO: 12828 - DNA, 503 bp, Homo sapiens
  MAP TO CHR19.3; EXPRESSED IN HEART, SIGNAL =  29; EXPRESSED IN LUNG, SIGNAL = 1.1; SWISSPROT HIT: O00268, EVALUE 3.10e-01; EST_HUMAN HIT: AJ346155.1, EVALUE 0.00e+00; NT HIT: gi14763455, EVALUE 0.00e+00
cggatcttagacagaacacggtagacaccaacagttaaaaaaacaggacccagtttactactgaagctgcagcgaggttacagaggcgtcttggggctcagtccctgagctccgggacgcccaactgggagtggggcctccactctcctacgtacagacacccccatagggaaacgctcacatgctgtcctgctgggacgctgcaggcctggccgttctgtggccgcatccgcgtccgggtccctgtgtcctggctgggcgagccggggagggggctgattcctgggagcggttcagcagcgagttctgaatgtcttccaggacttcacggaagagctcctctcgggacttcatgccgtccaggtagactgaaatcagaaaggctgcgtcagggctgccgggaggaagggggccagagcacggggggacgagtggacggctgggtcaggagcaaggagatctgcagagtcgggctgctggagtcagtttcctggaccaacagc

SEQ ID NO: 12829 - DNA, 550 bp, Homo sapiens
  MAP TO CHR16.3; EXPRESSED IN HEART, SIGNAL = 1.7; EXPRESSED IN FETAL LIVER, SIGNAL = 1.5; EST_HUMAN HIT: BG506684.1, EVALUE 2.00e-60; NT HIT: gi9910183, EVALUE 7.00e-59
tggtagccatcaaagagcagatacttttagaataattccattataatcagaagtgtcagcgctgaatataactgttctagtgccctataattaggaaagagaaagcattttattgtaagaacatggattccaactgttacataccagttcagacgttccctaacaaactaccatgtctgatttttactaatcataaaaggaggtagtttgtgtaaaaaaaagaaaaaaatcgcacatatcaactgctaatcttgactaaactcagactccttactaagacattatcgtttccttctatcaacggagataacattttacatcagtgggttataactaagtttcattttggctgtacagtcgtttttctgaactcttacatttttgtgacattccttaagcaagttaatcaagacgttgcattcttcagtgtgcaagtgtggagataagtcaggatgcatctttaggagatgaggatggatcacagcagtgcaacctgtggatacaagagtgtcttgaatatgcataaacacatttgttacgccacctaaaa

SEQ ID NO: 12830 - DNA, 517 bp, Homo sapiens
  MAP TO CHR14.3; EXPRESSED IN HEART, SIGNAL = 2.9; EXPRESSED IN FETAL LIVER, SIGNAL = 2.9; SWISSPROT HIT: Q13268, EVALUE 1.00e-18; NT HIT: gi14751018, EVALUE 7.00e-62; EST_HUMAN HIT: AA906040.1, EVALUE 0.00e+00
ctgcacaagccttagcagtctttgtctctgctcacaggatcggcttcgccgtcgcccagcgtctggcccaagacggggcccacgtggtagtcagccgccggaagcagcagaatgtggaccaggcagtggccacgctgcagggggaggggctgagcatgacgggcactgtgtgccatgtggggaagatgaaggactgggagcggctggtggccacagtgagctgcagggaaatgggcacagagccaggaggtggaaaagggagccagcctgagcctccttccctgctttcctggacagcattggtgagatccaacgcagtgatgttaactaaaacataacagtgtgttctgcatacccaaccagcccaccagcacgtttttattgtgtgcctttctattatgtccatatattaaagttggagaataatcccatcccaatcagagaatgttaaaacattctaatgcttcaaccctgcatcatcccttgcataccccaaagaaaccgctggtactggttc

SEQ ID NO: 12831 - DNA, 570 bp, Homo sapiens
  MAP TO CHR19.3; EXPRESSED IN FETAL LIVER, SIGNAL =  94; EXPRESSED IN BONE MARROW, SIGNAL =  36; EXPRESSED IN HEART, SIGNAL =  72; EST_HUMAN HIT: BG574125.1, EVALUE 0.00e+00; SWISSPROT HIT: P12750, EVALUE 7.00e-83; NT HIT: AB015610.1, EVALUE 0.00e+00
actctgtttggccaccagtcttttgtctgtctcttctgcaatagtgaggcggataccctttcctcggggaagagaaatccatggtctgttgcccttgccaataacaaaaatgttggaaaatctagtggcaaatctgttgcctttggcatccttcacgtaaaccactttgaaagatcgagggtgccgctctctgttgatcacaccaattcttcccaggttagcacttccagtcaccatacacaggttccagtgtcaatcttgatgaaatcagtaatcttgccagtctctaaatcaatctgaatggtatcattcaccttgataaggggatcagggtagcagatggcgtgagtatcaagagtcaccagatgagggattccttttgtgcccacaaagatttttctcagtttgcataacatgtacttggcctcctcaggtgtaatacgttgtacagcaaagtgacccttggtgtcacaggtcagttgggaattctctcccatcttgtcagtgttgatgacatccattaatccagcagggtaggttatatcagttcggaccttgccatcgatctta

SEQ ID NO: 12832 - DNA, 529 bp, Homo sapiens
  MAP TO CHR16.3; EXPRESSED IN HEART, SIGNAL =   9; SWISSPROT HIT: P79100, EVALUE 2.20e+00; NT HIT: gi14741509, EVALUE 1.00e-106; EST_HUMAN HIT: AU121805.1, EVALUE 0.00e+00
ggaaggtatggctctgttggaatccgcatagtgtggaaatgagtttgccctggaaagggaaagaacagcttcttgccctcaggtttctcaccttctcctctcctcactctcaccaagggctgaggtccatttgtatgcacacaaagaaaagagtttcttcctttcgaggaaataaaattgtcctgaaagacgtcattactctacggagacatgtggaaacaaaagttagagctaaaatccgtaagaggaaggtgacaacgaaaatcaaccatcatgacaaaatcaatggaaagaggaagaccgccagaaaacagtaagatgtgccttgacacaaatactgttgtatgaaccatgtgccaatcaaagtagacaactgtaaagtccttgagaatattttctacaatatttgtggcaaattcagtgggttcaaaattgagtttgtcctttctgcttcattagtttaagctgtataattcctttcccttcctacattcttgttttcattttttcggaggaagaggagttgcta

SEQ ID NO: 12833 - DNA, 524 bp, Homo sapiens
  MAP TO CHR16.3; EXPRESSED IN FETAL LIVER, SIGNAL =  13; EXPRESSED IN LUNG, SIGNAL = 3.5; EXPRESSED IN HEART, SIGNAL = 8.5; SWISSPROT HIT: Q25158, EVALUE 6.40e+00; NT HIT: gi15315332, EVALUE 8.00e-77; EST_HUMAN HIT: AU121805.1, EVALUE 0.00e+00
tatggctctgttggagtccccatagtgtggaaatgagtttgccctggaaagggaaagaacagcttcttgccctcaggtttctcaccttctcctctcctcactctcaccaagggctgaggtccgtttgtatgcacacaaagaaaagagtttcttcctttccaggaattaaaattgtcctggaagacatctttactttatggagacaggtggaaaccaaagttcgagctaaaatccgtaagatgaaggtgacaacaaaagtcaaccgtcatgacaaaatcaatggaaagaggaagaccgccaaagaacagtaagatgtgccttgacacaaatactgttgtatgaaccatgtgccaatcaaagtagacaactgtaaagtccttgagaatattttctacaatatttgtggcaaattcagtgggttcaaaattgagtttgtcctttctgcttcattagtttaagctgtataattcctttcccttcctacaatcttgtttgtcattttttcaggggaagaggagttgcta

SEQ ID NO: 12834 - DNA, 583 bp, Homo sapiens
  MAP TO CHR16.3; EXPRESSED IN HEART, SIGNAL = 4.9; EST_HUMAN HIT: AW935917.1, EVALUE 0.00e+00; SWISSPROT HIT: Q28749, EVALUE 3.80e-01; NT HIT: gi14741509, EVALUE 1.00e-11
agtgctgatgcagatgatgccacggcccttagactctctcaacattcaatttctcatgtgttggctttttcagatccccccttctgcaagaaaggctctttgcaactgggtaagtttgcttgttttccttgcttttggacatagtctgccaggtcaggacatggatacatttttctccctacagctctgtgctcaagccctgcagagggagatggcagagagaaaggctgcctacaagcatcacagtcccatccctgttggtaaccgtgttgcgcaaaaacaccttcatccccacccagtggggcccctgatctaatattctaagtgtcagaggttccgtatttgtaatagcagatgggccctgactgtaaactagtgaagagtgaatgtaacttattacccacagggacaattccaaatgaaggccttaaatgatgctcagctaagctggttcttgtgtggcctctgtaccttcaaaagctgccgagtcctatgattacacgtgatgggacttgtacacttgaagtgaaacacagttttaaaacttgctttgtttagaattcccacctcatttttccatgga

SEQ ID NO: 12835 - DNA, 516 bp, Homo sapiens
  MAP TO CHR19.3; EXPRESSED IN HEART, SIGNAL =  10; EXPRESSED IN FETAL LIVER, SIGNAL =  11; SWISSPROT HIT: P54920, EVALUE 5.00e-12; EST_HUMAN HIT: AL537113.1, EVALUE 0.00e+00; NT HIT: gi14755992, EVALUE 0.00e+00
accaggggtgacagagacagatcttgaaaaccttgggacaagtgcccttgggctgcagggttgggaacggggggagcatggccagcctatcacctggtgtgccctcaggtgaaggaatacgactccatctcccggctggaccagtggctcaccaccatgctgctgcgcatcaagaagaccatccagggcgatgaggaggacctgcgctaagccccacccagccccccagtgcccgtcttcctgtcccatctgctcagagagaggtggggccgagacttgctggagagcttccctcctttcccatctggggagtgccgcgggccacagtgggcaggtggcaccgggggtcagcatgcaggggcgccagaggcccaggctgctggccggacagtcaccctctgttctcgctacatcccttgccccctgtccatttatttaagcccccataggtgcccttcacccccaaaaccagctgtacagaatctttgatacagacctatttgctaggggtgctgc

SEQ ID NO: 12836 - DNA, 560 bp, Homo sapiens
  MAP TO CHR18.3; EXPRESSED IN HEART, SIGNAL = 1.9; EXPRESSED IN LUNG, SIGNAL = 1.7; EXPRESSED IN BONE MARROW, SIGNAL = 1.7; EXPRESSED IN FETAL LIVER, SIGNAL =   2; SWISSPROT HIT: P21561, EVALUE 3.60e-01; EST_HUMAN HIT: BI821820.1, EVALUE 5.00e-02
tgagtcaatggcaccacttcacacaccccgaggcccaggcacccaggcctgaggctgctccaggtctgaggctgctcagtcaggcccaggaggccagggggcatccacccagaacccttctcttgtccagccatgcaggtcctgtaagccccacagctcccgcccacctgctccagcctcctccagggcctgtgaacaacggctttcagcttttgtgtccactaccaaagtacattccacacaggcagggagatccattctgccaactgccaacagccaagagccaatttatgtttgtctttgacaaacacaaatcagattatgtcacccaccgggcaacacgccttagcagggtctgcgcggccgggagaatgcagccacgcgccctgctctctggcctgccctccctcctgctcctgtgcggagctccggtgtggaaggtctcccttccttgggcgcatgcagcggtctccctccagtccttgtcctctcctgcgccctgagtgctgttgactgctcggcctgcatgcagaggccctgggatgagaccaagttctccg

SEQ ID NO: 12837 - DNA, 509 bp, Homo sapiens
  MAP TO CHR19.3; EXPRESSED IN HEART, SIGNAL = 2.5; EXPRESSED IN FETAL LIVER, SIGNAL = 4.2; EST_HUMAN HIT: AI676124.1, EVALUE 0.00e+00; NT HIT: D84471.1, EVALUE 0.00e+00; SWISSPROT HIT: Q9Y285, EVALUE 1.00e-20
taaactctgttccctcccccacaagcccaacgatgatcaaatatggcatcaacaatatccgggagctggtgggccacaaggtgaacctgcagatggtgtatgacagtcccctgtgccgcctggatgccgagccgaggccccctcccacacaggaggctgcgtgacatgggccactctaggacaggtcatcctccccgagtccctgctgctgcgctcctttgcatccctggccagtgaccttgtatttatgaggcctctgtgaggccagcccccaccttcctctttcccacctgtcccaggaccagaatcccagggacagaggactgggtagcaggttccttctgttgtcctgtgtggtgtgtctactgtgagggtgggccctgaggagacctgtgggccacctattgtctaataaagtgggcagttgcccccatctggtggctttccttaggggtgaggggtcttgttgggtccccctagctcagtgtgccacttgatggtcaaaattc

SEQ ID NO: 12838 - DNA, 598 bp, Homo sapiens
  MAP TO CHR18.3; EXPRESSED IN HEART, SIGNAL =  54; EXPRESSED IN FETAL LIVER, SIGNAL = 9.6; SWISSPROT HIT: P29269, EVALUE 3.00e-21; NT HIT: gi14765857, EVALUE 1.00e-107; EST_HUMAN HIT: BF574248.1, EVALUE 1.00e-109
ttaggctaaggctgcaaagcggggacctactgaagatgaattagtgtccctcagcacccctatactgctgaagtatagaacttgggagtttcctaagtacctaattttttttgcttcttggttttttattgttatcaaatcagcagatttggttatcagctgttgttagctatatagcagtacaggacatatgtaatcttgttgagatgtgtcttctaaagacacatttctgagtagctcaaacatatcaggaaagttggttctgtgtacttttgttaatcattgttttgattcaaacttaagtaatcttagatgttgatttggtttttattgtatttcctttcctaattaggacttaaccaccaccatgtcgagcaaaagaacaaagaccaagaccaagaagcgccctcagcgtgcaacatccaatgtgtttgctatgtttgaccagtcacagattcaggagttcaaagaggccttcaacatgattgatcagaacagagatggtttcatcgacaaggaagatttgcatgatatgcttgcttcattgggtaatgctcagtttaaatattaatctattggatagaatttccatggtgcc

SEQ ID NO: 12839 - DNA, 524 bp, Homo sapiens
  MAP TO CHR14.3; EXPRESSED IN HEART, SIGNAL = 1.7; EST_HUMAN HIT: AA084430.1, EVALUE 1.90e-01; SWISSPROT HIT: P37492, EVALUE 6.40e+00; NT HIT: AF331848.1, EVALUE 1.30e-01
tcaaggccttcatcttgactgtcctagaacagttctccctaggttcctgtacttagttaacatccacttacactttagatctaagagccacttccttagggatgttgtatttgcttcccaaagttgtgtcatttgcccttatggaaatatcttcttttacttccttcacaggattaatctcaattgataactgaacactcatccatgtgaccattagattaatgggtgtcccatccactagactataaataaaagaaagggacacatataaaaaaagaaggggacacatcttttttgctcatgttctttgcatctcacacagtgcccaatgtgtaagaatttgttgaaaaaatatataatgataagaggaatttaaaaggacacaggaagaaaactgtagctaaattttgcctcaaatagatggagtgagaccttggggaaaaatccaaggcaaatgcaccctcgtgtttgttttttgtttttatgacaaaactcaatctctctcttgctctcccgtcagtttc

SEQ ID NO: 12840 - DNA, 515 bp, Homo sapiens
  MAP TO CHR16.3; EXPRESSED IN HEART, SIGNAL =   5; EST_HUMAN HIT: AA366873.1, EVALUE 2.00e-96; NT HIT: gi16164563, EVALUE 3.00e-98; SWISSPROT HIT: P17538, EVALUE 1.00e-29
catccaggtcctgaagatcgccaaggtacccaggccccgtgcagcagagggcagggccgtgggcacggggggagacccctcggctgcttcagggacaggcgcccagtggggccgggccggcctcgtgattcccattccggccctggggatggactgctccttaacgggcaccagggaaggagtctgtcctcgaagcctgcaggtcctgcctcctcccagggcctcaccccggcactctggcccccacccccaggtcttcaagaaccccaagttcagcattctgaccgtgaacaatgacatcaccctgctgaagctggccacacctgcccgcttctcccagacagtgtccgccgtgtgcctgcccagcgccgacgacgacttccccgcggggacactgtgtgccaccacaggctggggcaagaccaagtacaacggtgaggggccgcggggctgcctctggggtctgggctgcctggccgtggagtccccccgtgaccgtttggctctaaattcca

SEQ ID NO: 12841 - DNA, 551 bp, Homo sapiens
  MAP TO CHR14.3; EXPRESSED IN HEART, SIGNAL =  69; EXPRESSED IN FETAL LIVER, SIGNAL = 1.5e+02; EXPRESSED IN BONE MARROW, SIGNAL =  59; SWISSPROT HIT: P39023, EVALUE 4.00e-77; NT HIT: gi14778998, EVALUE 0.00e+00; EST_HUMAN HIT: BG251261.1, EVALUE 0.00e+00
aaaggggtcaccagtcattggcacgccaagaagctgccccgcaagacccaccaaggcccacgcaaggtgtcctgtattggggcatggcatcttgtccatgtggccttctctgtggcacgcacttggcagaaaggctactgtcaccacactgagatcaataagaagatccataagattggccagggctaccttatcaaggatgacaaactgatcaagaacaatgcctccactgactatgacctgtctgacaagagcatcaaccctctgggtgtctttggccactatggtgaagtgaccaatgactttgtcatgctgaagggctgtgtggtaggaaccaagaagcgagtgctcaccctccccgcaagtccttgctggtgcagaccaaacagcgggctctgcagaagactgaccttaagttcactgacaccacctccaagtttggccatggccgcttgcagaccatggaggagaagaaagcatccatgggacgactcaagaaagaccaaattgcaaaggaagaaagagcttaatgccaggaacagattttgcag

SEQ ID NO: 12842 - DNA, 521 bp, Homo sapiens
  MAP TO CHR19.3; EXPRESSED IN HEART, SIGNAL =  23; SWISSPROT HIT: Q13011, EVALUE 5.00e-34; NT HIT: AF030246.1, EVALUE 0.00e+00; EST_HUMAN HIT: BI258154.1, EVALUE 0.00e+00
tgtgaagcaacgagtgaagggttacaaatggggcgggaataccctgccctcatgtccatcttcccacaacgttccactttcacccagtcccgcagccccgcctccccccgcaggcaggcctccaggatctgcaggtcagacctccagaagaccttgttcatggcattcctcttgttgggccggttgagctggacatgcagaacatgtttctgcgcagacgtcacacgaagggactcatagctgtggtctggggcttcaccgagggctactccggaagcctcctcttgtgcagaggagccagtgaggcgaaggctaatactgagtcccgggtagttggagcctgtcagtcctggggagaaaggaacagcctttgatgaccccagactgcaagacacaggcctatcgaattagggagtccttcaaaagggagcacacgcacccctgaatttaggggactcgggcccttcgtgaccccggatagccctccccgtcctacatctgctataacagcacgacagcgc

SEQ ID NO: 12843 - DNA, 583 bp, Homo sapiens
  MAP TO CHR19.3; EXPRESSED IN FETAL LIVER, SIGNAL = 9.7; EXPRESSED IN HEART, SIGNAL = 5.2; EXPRESSED IN LUNG, SIGNAL =   1; SWISSPROT HIT: O43914, EVALUE 2.00e-05; NT HIT: AF072845.1, EVALUE 0.00e+00; EST_HUMAN HIT: AA974881.1, EVALUE 0.00e+00
gctggattttatttggtgggtcccttccactgatggcccccattcctttaggagctccagggtcagaggtcggatgtctacagcgacctcaacacacagaggccgtattacaaatgagcccgaatcatgacagtcagcaacatgatacctggatccagccattcctgaagcccaccctgcacctcattccaactcctaccgcgatacagacccacagagtgccatccctgagagaccagaccgctccccaatactctcctaaaataaacatgaagcacaaaaacattatgccagatccttgggctgatgggatggggacatgtgggggttctgagggggccttggatccagaaacagttcatgggagggaggctttgggaactctggggttctttgagaaagaatacgactacaggtgtttcaattgttttattacaatccaaaagttggggcgggggttcctgtgccaccacacaccatccaggatgagagggtcagaagtcaaaggtccaagctgcaggagggtcagcccctgcctggcatgttgatgtagactttgccatcttctggggataggggagag

SEQ ID NO: 12844 - DNA, 524 bp, Homo sapiens
  MAP TO CHR19.3; EXPRESSED IN HEART, SIGNAL = 7.5; EXPRESSED IN FETAL LIVER, SIGNAL =  15; EST_HUMAN HIT: AI190024.1, EVALUE 1.00e-110; SWISSPROT HIT: Q07020, EVALUE 5.00e-09; NT HIT: gi15431298, EVALUE 6.00e-59
aatgtgacaggcttgtggtgttcctgtgccactccacaatggcctcctttaagagggcccccctctcactccctcctctccccacagaccctacgtccgctccaagggccggaagttcgagcgtgccagaggccgacgggccagccgaggctacaaaaactaaccctggatcctactctcttattaaaaagatttttgctgacagtgctctgtgtgtgttattgggggatgggttggagaattggttcctgcgggtgagaatgcatttggtttggggacagggacgtcatgccagtgaagaccagccctcttcctgcccccactgccccggaagctccctgcctccttcccaacagccaggtggcaggtgttcccacaccggcttccttgggtcagccacgcccgcccctcttaaaggatcctgtgcccctccctggtgctgggatggcgggtggggcgtggaccgggaagtgcagggtgcaggctggcagggctgtggggagggagagactgcctgggaacag

SEQ ID NO: 12845 - DNA, 577 bp, Homo sapiens
  MAP TO CHR18.3; EXPRESSED IN HEART, SIGNAL = 3.7e+02; EXPRESSED IN FETAL LIVER, SIGNAL = 2e+02; EST_HUMAN HIT: BG029729.1, EVALUE 0.00e+00; SWISSPROT HIT: P53505, EVALUE 5.00e-73; NT HIT: D50604.1, EVALUE 0.00e+00
aaagccatgccaatctcatcttgttttctgctcaggttaggttttgtcaagagagggtgtaacgcaactaagtaacagtccgcctagaagcatttgtggtggacgatggaggggctggactcgtcatactcctgcttgctgatccatatctgctgggaggtagacagcgaggccaggatggagctgccaatccacatggagtatttgcgctcagaaggagcaatgatcttgatcttcatcgtgcttggagccaggccggtgatctcctgcatcctgtcggcgatgccagggtacacggtggtgccgccagacagcactctgttgacgtaccggtctttgcagatgtccatgtcacacttcatgatggagttgaaggtagtttcatggatgccacaggattccatgcccaggaaggaaggctgaaagagtgcctcagggcagcggaactgctcattgcagatgacttggccacctggcagctcctagctcttctccagcagggggttggaggccaccatggccatctcctgctcaaagtccagggcaacatagcacagcttctcctcgatgtcatgca

SEQ ID NO: 12846 - DNA, 599 bp, Homo sapiens
  MAP TO CHR14.3; EXPRESSED IN HEART, SIGNAL = 1.6; EXPRESSED IN LUNG, SIGNAL = 1.3; SWISSPROT HIT: P32479, EVALUE 1.30e-01
ttgtttgaattttcttcctctttaggggaaatttggaaagtttaagaggtatgtggcccatagtacacatgtcacaaatgttcgctggacttatgatgacagcatgttggttaccctaggcggtacagatatgtctttaatggtgtggacaaatgagatggaaggctatcgagaaaaaaggccttgtgatagtgaagaatccgacattgattctgaagaagatgggggtacgtcattttataatacttgaacaaaaatatagggaaaatttagcacaacttgtttaagctgtggaagttaaagcaagtaataataatgtttgaataattgtagtggtactgtttttagtctgtttaacatcaaaatccattttgtgactcaagaacaacaggttgccatgaatttatgactttgatattatttatctacaaatgaaaaatatctgaattttaaataagtactgttaaggtaaattttatattattaaacctcatattttaaaataattttgattttcttctaatataccagtaatatcagctcgttatagaaaatgtattttgccataaaaattaaacacagcctccataatttgacca

SEQ ID NO: 12847 - DNA, 511 bp, Homo sapiens
  MAP TO CHR14.3; EXPRESSED IN HEART, SIGNAL = 1.8; EXPRESSED IN LUNG, SIGNAL =   1; EST_HUMAN HIT: BF917273.1, EVALUE 3.00e-71; SWISSPROT HIT: O75360, EVALUE 1.90e-01; NT HIT: U07703.1, EVALUE 7.60e+00
ttattggcatccaaaaacctgtacttcaattttttaaaaatagaatcatgtgctggcactgacagcccaatcacctgatattgaacatttgaatgaagtgagcctcaagctcccacttagtgacgtagctgtgaagacgttacaaaatatgaaccggcaatggattcgggccacggccacggcactggagcgctgcaggttagaacatcccttctctgtcgttgtttcaattaaggtaaaattaacggcttcagctcgggaatggcattgttaacatgggtgtgttttgttttaaacctttgtagtgagcttcagggaattggattgaatgaaaagtttctttattgctgtgaaaagtggatccaacttttggagaagatagaagaagcactcaaagtggatgtggctaacagccttcctgagctcctggagcagcagaaaacctataaggtaaacctgtgttctctgccacccttgaaccgctcatctggggcaggagtcagggaaagat

SEQ ID NO: 12848 - DNA, 524 bp, Homo sapiens
  MAP TO CHR18.3; EXPRESSED IN HEART, SIGNAL =  10; EXPRESSED IN LUNG, SIGNAL = 3.9; EXPRESSED IN FETAL LIVER, SIGNAL =  14; EST_HUMAN HIT: AU121805.1, EVALUE 0.00e+00; SWISSPROT HIT: P28000, EVALUE 2.80e+00; NT HIT: gi14741509, EVALUE 7.00e-99
tatggctctgttggagtccccatagtgtggaaatgagtttgccctggaaagggaaagaacagcttcttgccctcaggtttctcaccttctcctctcctcactctcaccaagggctgaggtccatttgtatgcacacaaagaaaagagtttcttcctttccaggaaataaaattggcctgaaagacgtcattactctatggagacatgtggaaacaaaagttagagctaaaatccgtaagaggaaggtgacaacgaaaatcaaccatcatgacaaaatcaatggaaagaggaagaccgccaaaaaccagtaagatgtgccttgacacaaatactgttgtatgaaccatgtgccaatcaaagtagacaactgtaaagtccttgagaatattttctacaatatttgtggcaaattcagtgggttcaaaattgagtttgtcctttctgcttcattagtttaagctgtataattcctttcccttcctacattcttgtttgtcatttttcgggggaagaggagttgctag

SEQ ID NO: 12849 - DNA, 598 bp, Homo sapiens
  MAP TO CHR19.3; EXPRESSED IN HEART, SIGNAL = 4.6; EXPRESSED IN FETAL LIVER, SIGNAL = 6.5; EXPRESSED IN BONE MARROW, SIGNAL = 6.5; SWISSPROT HIT: P01192, EVALUE 5.10e-01; EST_HUMAN HIT: AL526838.1, EVALUE 0.00e+00; NT HIT: gi14760348, EVALUE 0.00e+00
gtatctgtgagtcctgggggacctccctccctgtggatctgcccatctagcgtgcctgccctgctctggctgtgggaggctgtcccctccctgcaggggccccagcggtaatgccctccctgttttctctcctcacagtcctaaaggggaagaagttgagtttgccggcatagccccggtcctctccatctctctcctcggcagcagcgggaggcagaggaaggcggcagaagatgaagagctttcccatccaggggtgacttttttaagaacccacctcttgtgctccccatcccgcctcctgccgggtttcagggggacagtggaggatccaggtcttggggagctcaggacttgggctgtttgtagttttttgccttttagacaagaaaaaaaaatctttccactctttagtttttgattctgatgactcgtttttcttctactctgtggccccaatttttataaagtgtttttgagtgtcctatgggccggggcagggtccaagatcttttcccttccccaggcccctcggctccctcccagatcccacccccagccccactggttgccaaacactaaatctgccgacacccat

SEQ ID NO: 12850 - DNA, 574 bp, Homo sapiens
  MAP TO CHR14.3; EXPRESSED IN HEART, SIGNAL = 1.5; EXPRESSED IN LUNG, SIGNAL = 1.3; SWISSPROT HIT: O60412, EVALUE 2.00e-40; NT HIT: gi16163994, EVALUE 0.00e+00; EST_HUMAN HIT: AW009208.1, EVALUE 0.00e+00
ttagcctgttggattcccagctgcacagttggattgtgttacaattcaccatcatcaagaatgtggaaatctctaattttgtctgtgacccctctcaacttctcaaacttgcctgttctgacagcgtcatcaatagcatattcatatattttgatagtactatgtttggttttcttcccatttcagggatccttttgtcttactctaaaattgtcccctccgttctaaggatgtcatcgtcagatgggaagtataaagccttctccacctgtggctctcacctagcagttgtttgctgatttgatggaacaggcattggcatgtacctgacttcagctgtggcaccaccccccaggaatggtgtcgtggagtcagggatgtacgctgtggtcacccccatgctgaaccttttcatctacagcctgagaaacaggcacacacaaagtgccctgcggaggctgcgcacagaacagttgaatctcatgatctcttgcatcctttttcttgtgtgggtgaaaaagggaaaccacatcaaatctctacatctgcaaatcctgccccttggtcacattat
